United States Patent Application Publication US 2007/0067865 A1 - sequence listing, part 3

SEQ ID NO: 7115 - DNA, 429 bp, Glycine max
gaaagaagggcacaaccaacataaggcatggccttatcctctccctccctcttttcagctgtaaacgccacatattcagtaccccatttccatgcactgccactttcactttcttcttcttactttccaattaatgttagaccctccacccatcatctcgttcatgtctctcataatcacaaatggagaacaaaagtttcatttttcacttccttcttgaagcagaaaggtaaagatgccaagatcatcaaggaagaactccttgaggccattgcaccacttgatcgaggggctgatgccactccccaagaccagcaaacagttgatcagattgcgcgcgaacttgaggcagttactccaataaaggagcccctcaaatctaacctactcgatggaaaatgggagcttatatacactacctcgcagtca

SEQ ID NO: 7116 - DNA, 1416 bp, Glycine max
tgattgtaaaaaatggaaatgaaaacgtgacgtgaaagaatgattgattcccgagcgaaggtggatctcactcccacccgttataaaatgacataacttcatttcctcatagtcattgacttctccaacatgtcaagcgacgccgtttgggtcctcttccacctcgccttcttctcccaatgccttccctccgcctgggcccactcggcgatcctcctcccgggtcaactcgcccgtgactcaccgcagagctgccccgcccctgaccccaacctctactacaagccagtcatcggaatcgtcagccatcccggcgacggcgcctccggccgcctcagcaacgccaccggcgcctcctacatcgccgcctcctatgtcaaattcgttgaggccgccggcgcccgtgtcgttcccctcatctataccgagcctccggagaagcttctcaagaagctcgaattggtaaatggggttctcttcactggtggatgggctaaaagtggtttatattttgaaactgtcacaaaaatatttaagaaaattttagagaagaatgatgctggagatcatttcccattatttgccacctgcttaggctttgaactcataacgatgatcataagccaggacaataatattcttgaagagtttagtgcatcaaatcaggcaagtactcttcaatttgtggagaatgcaaatatcggagaaagtgtctttcaaagatttcctccagagttgttagggaagatgagtacagattgtcttgtcatgcaaaaccatcgttatggcatatcccctggaaagcttctgaataatccaaagttgtctagtttttttgagatcttgacaacttgcacagatgaagatgataaggtttatgtttccactgtacgttctcaaaactatcctgtgactggcttccaatggcatccagagaaaaatgcctttgaatggggttcaccaagaattccacacacggaggatgccattcagataacccagtatgttgcaaattttttggtcagtgaagctaggaaatccttaaacagaccagttgctcaagagttgctagacaatctcatttacaattacagtccaacttattgtgggaaggctgggaaaggatatgatgaagtttatatatttgcgcaagcctgagaatgctggagaaatcagccaagaattgtattgtgcatagtaattaccatgaatgttgttgtatgcactagtaatatcattgttatgatgcacaataatgagagcaagatgcttaatattgtaccaaaagctatgctcatttatgcgttgtatcatgttattaccgagtctttggccttagcttctgctagtattccaatattataatacgtgcatctgcagaatgctaacgctgtgttgtttaggtcaattttctgt

SEQ ID NO: 7117 - DNA, 548 bp, Glycine max
gaacaaagggagatacatatacattaaattacatagatcaatgcttgcttagttaacgctatgaagttgcgttccaactactctttttagtctctttatctttattcttcttctattctcatgcccccaccctatacccctcttcccccatcaaccttctttctttgcattctttcttcactttcttcccttcttcaaccccaactcatgcatgtccctctctatcttctcccaatgaaatgaaccatcaaaaaacccaccaccccaattgcaccaccatcaaccaccatgtcctcctagccaccaaagtccgcaaacccaaaaaccctcatagagttagctagaaacaccccaaaagattcattttgttttaaagcgcaacttatggcatccattgccaccttcttcaacaagttcctctacttctttatcctcttagtccacctcggctgcttcatcttcaccaccgccgggaaacaatcgccgcccgtcaaagaaacgcaaaacctcacctttatcccaaccctcctccccttcccacaccaaat

SEQ ID NO: 7118 - DNA, 566 bp, Glycine max
ctcgagccgctcgagccgattcggctccggcaacaatggcttcttcgtcttcagaatcggcggtgtcggagcgaagaggaataccaggggctcagttcgtagaggatgtccaaacttacctcactcaatcgggtctcgatgttggttcagccctggcttttctccaagagagacttcagcagtacaaggtagtagaaatgaagcttcttgctcagcaaagggatcttcaggcaaagataccagatattgaaaagtgcttagacgttgttgctacattgaaagctaagaagggtactggtgaggaacttattgctgattttgaggtatcagaaggcatctattcacgagcacgcatagaagaaaccaattccgtgtgtttatggctgggagctaatgttatgctggaatattcattagaagaggctactggtcttctacagaagaacctggacaatgctagagccagtttggaagttcttattgctgatctacaattcttgagggaccaagtgacaattactcatgttacaattgctcgtgtgtataattgtgatgttcatcaacgg

SEQ ID NO: 7119 - DNA, 351 bp, Glycine max
ggagtgagcgtcaacaatggcttcttcgtcttcagcgtcgggttcgggttcagcttcggcggtgacggagcgaagaggaataccaggggctcagttcgtggaggatgtccaaacttaccttactcaatcgggtctcgatgttggttcagccctcgcttttctccaagaaagacttcagcaatacaaggtagtagaaatgaagcttcttgctcagcaaagagatcttcaggcaaagataccagatattgaaaagtgcctagatgttgttgctacattgaaagctaagaacggtactggtgaggaacttattgctgattttgaagtatcagaaggcatctattcacaagcacg

SEQ ID NO: 7120 - DNA, 276 bp, Glycine max
aacaatggcttcttcgtcttcagcgtcgggttcgggttcagcttcggcggtgacggagcgaagaggaataccaggggctcagttcgtggaggatgtccaaacttaccttactcaatcgggtctcgatgttggttcagccctcgcttttctccaagaaagacttcagcaatacaaggtagtagaaatgaagcttcttgctcagcaaagagatcttcaggcaaagataccagatattgaaaagtgcctagatgttgttgctacattgaaagctaagaa

SEQ ID NO: 7121 - DNA, 828 bp, Glycine max
acgggaggttcattgtatctgagtgtcaggtgtgtgagtgagtgaactcaattcaactcaacattcttcaatcaaatcagccatggcagcagaacccacccgccccgtaaaaatcatcgccgccgccgatgacttcggcactcctctcaaagacgccctcgtcgctcacttgcgcactctcaacatccaagtcgaagatctcggaacctcttcctactactccgccggagccgaggtcggtcgccgagtctcccaatcctcctcctccgacatccgtggcctcgtcgcctgcggcaccggcgccggcgtctccatcttcgccaacaaatatcccggcgtctacgccgccacgtgcctctccccctccgacgccgtcaacgcccgctccatcaacaactccaacgtcctcgccgtctccggcaagtacacgtcgccagaggccgcagtcgaggtcctggacgcgtggctgaacacgccgttcaagtccgcgtgcccggccaacgacgacaagccctggccgcaggagattcactcctttctcgaacactcgctcgtggagatgccggagatcggaaaagagggcgcgtttgacacgtgcgcggtgtgctgtctggtgaagaaccgggaactgaatccgatcgatttgattccgggcgggtcgatgaagattctaagggaaactccgacgtcggcgttcgtgaggttcaaggccgggagcgtggagcccgcacaccaccacacgtttgggcacgacttggttgtgatcgaagggaagaagagcgaatggaatctgacgaaggaacagaggtatgatctgacggttgggga

SEQ ID NO: 7122 - DNA, 431 bp, Glycine max
gctggatcatgatgaaagcatcaacatcaccctttaacctaaagtattaaaatgttggtttattattattactcatagctcaaaacccaattttaccctaccaattaaggtctctcatacagtagtattttatttgcactacgtactggctactttatttatttaagcagaagcaggtgagtgagtgagtgagcaagagtgaagagcgaagagaatggctcccaagggtttaatctttttggctgtgttatgcttctcagcactgtcactgagtcgttgtcttgcggaggataatggacttgttatgaacttctacaaggaatcatgccctcaggctgaagacatcatcaaagaacaagtcaagcttctctacaagcgccacaagaacactgcttttctcctgcctcagaaacatcttccatgactgtgct

SEQ ID NO: 7123 - DNA, 424 bp, Glycine max
  unsure (1)..(424): unsure at all n locations
gaacgtaaattatacaaatgtcgtccccctgttataatactaacccggcctgggtcacttgactccggcacaaggaaagctgcttcttctttgcaaaggcggcgaggcaccaacgctctctagctccggtctctttgtattttgaggtagataacacaatgtcgctgaggcgtttcttaggctattctgatggtgaggtcatgaggtctgatgcaaaaccttgttccaggctaatgaggcacacagctgcaatctttagtgttggtggagcattaggattttgggtcctttgccgaatgcactatggtcctcgaattacaaatcctaggagtcttcgttgggcagcatgtggagctgtaactgcgagctcaggcacggctttgctggttcgtntgtttaatcctgaatgtgagccccagaatat

SEQ ID NO: 7124 - DNA, 723 bp, Glycine max
caggtccaaccaacccttaggccaagcattcggccaagccttcgccggtgccaaaagaacaacaaaagggatataacactgtcactcttacaatctcagctcatagcattcttcttcttccaacgagaatcagtctttgtgttccaaatggctcgtacgaagcaaacagcaagaaagtccaccggaggaaaagctccaaggaagcagctcgccaccaaggcagcacgtaagtccgctccggcgacgggcggcgtgaagaagccccaccgtttcaggccggggacagtggctctgagggagattcggaagtaccagaagagcacggagcttctcataaggaagcttcctttccagaggctcgtaagggaaatcgctcaggacttcaagaccgatctacgcttccagagcagtgctgtctccgctcttcaggaagccgctgaggcctacctcgttgggctctttgaggataccaacctctgcgctattcatgctaagagggttaccattatgcccaaggacattcagctagctcgtaggattaggggcgagagagcttagggtttatgatttacaaagccgtagtgttttctaagggttattattttgcaatcgattccttcagcttagtattagggtgaaagtccttgttttattgtgactgtattggaaactcgtttctgtaacgtgagaaatattaatgttgagtcctctcattttaagctt

SEQ ID NO: 7125 - DNA, 870 bp, Glycine max
gcaatgaacctgagggatcccatttgacacaattaacctcaccctggtgcccagcaaaagtttttatagggcgggtttctccaattttgcaaacatgtatcatattgtctgtggaacttgtggcaaaagacacattgttgcgccaatcaacatcaagtgttggacctgaatgaaattcaaattgttgtttccattcttctgccttcacatcccacacaattgcagtttgatcacaacttccagtcagaagataatctcctttcttattccacttcagagagaatattggtcccttgtgtttgcttaatgtactcttcagttcaccattggtggtccaaattcttgcttgcccatcatatgaaccagttgcgagaagtgtcccttccccattccagtcaagtgtagtaacatctttactcttttcatttgtcttacccctaacatgcttcaacaccaacacattcaaagggccattctctgaaccaggcttacatctcccttctgctattgtccagatacgagctgtcgaatctccagatccggatacaggaagagatcctgtagggctccatgcacaagcacacacctctgaagtatgaccttccaaaattgtcacatctgaactaggaattccacatagctgagatgttgatgttgtagagatgtccattgattctggccctccaactgctccattctcttcaagctttacaacaggaaccctatcttcatgatctatgaccatttttctgacagtctggtctccgtgttgttgttctcgttctttatcattttctaccttctccctatccttcacaacttctttctgtctttcacgtctttccttttcaacttctttctccttttcac

SEQ ID NO: 7126 - DNA, 402 bp, Glycine max
ggtgttgcagaagacacaaaagaagtcacaaaatgtatcgcgttcttcaccgcgctttctgcaccgccacagagcccgccaccaccatcgccgcttccatcaggtccatttcggaggatctgtacaaggaagtgaagctgaagaacgtggtggagaagttcaagaaagcctccgacaacgaccgcttccgcaaaaaaaccggcatctacgaggacaccgtccgccgcctcgccggcgcccgacgcttccggtggatccgcgacatcctcgagcaccagaagcagtactccgacatctccaacgagggcttctccgcgcgcctcatctccctgtacggcaagtccggcatgaccaagcacgcgcgcaaggtgttcgacgaaatgccgcagcgaaactgcagcc

SEQ ID NO: 7127 - DNA, 476 bp, Glycine max
ggcatcacgtatccccccacacatcaccctctacctactttgcacctctcacccttctctctataggaaatagcaagcgtgttttcccagctatagtaatctatcaaacaaaacctctgctacactctagcatcctacacccccactttttctagtaataatagtactacattatctagtgttcgagagagagagagttcatagttcaatgctcagttcttcttcggcttcgtttttgaggcagttaagtgcaaaaaaggagggttggaaagagagatactataatagtggtagtggtggctggggaatgagctttggagggtgtgaggcaagtgtgaaactaatggaagggtttaacatgcaggggaatgtggggaggaagagggtgatggtggtggttgatgacacctcacattccaagcatgcaatgttgtgggcactcacatcatgttgccaacaagggtgattccttgact

SEQ ID NO: 7128 - DNA, 790 bp, Glycine max
gagagagagagacagagagagagagagacattgagagcgatggtgaaaatctcacttggtggatacgatgatggggaaggacccagcaaccgaacccataagcgacgcagggaagatgatgatgacgacgacgaagaagagcaacaacaacaacgaagctttgagatggtggacccttcaataggaactcaagagaacgaagatcatgctgctccatccaatgatggatcgaattctaacggaaatggggctggaaccagtacccgggataggtccgttcctatcttcgtttccgaccctgatgtccttgattgctgcatttgctatgaacccttgacttcccctgtgttccagtgtgagaatggacatattgcttgctctatttgctgtgtgagactcagtaacaagtgtcccatgtgttcaatgcccattgggtataaccgttgccgggctattgagaaggtcttggagtgtattaaaatgtcatgcccgaatgcaaattatggctgcaaagagacacttagttacagcaagaaaaacgaacatgagaaggaatgcatctatctgccatgttcatgccctcttactggttgtgattttgttgcctcatccaaggagttattcctccacttcagccatagacatgtaggcatgggaacacggttcgcatatgataaatttttcactgtattcttaagtattaaccagagaacaattgttcttcaagagaaaaatgatggtaatctgtttattgttcacaataaccattaacatcttggggacatagtcc

SEQ ID NO: 7129 - DNA, 642 bp, Glycine max
gattcacgcagctgaataaagaaaaaagcctttcatagtgagatagccctagaaatgtttcgtgaatctttgtttgctctctttctactttctgccttctcctcctcactcctacctttaaccactgctcaagattacgttctcgacacggacggtcacgcggttgaaaatcacggtacatactatttgttgccagcgaaatcaggaagcggcggtggtggaatagaggtagccgcaactggcaaagaaagttgcgctctcactgtagtgcaatctctgaacgaggactccatggggctaccattgaagctttcaagcccatccatcactacgtctcacttcaccgaatacacttcgttgagcatcgagttcacttcggcgccggcgccgtgttcgtccgcttcggagtggaccgttgtcaagggattacccgaaggacgcgccgttaaacttaacgattacgggaacaccgtagagggtgactttgcttttgtatgtgctaagagagaattttaccgttgcaataaatcgtatcagcttattttctgtccatatggtcttatgaggtgtgaagatgttgcgatctctattgacgatgatggaaacaggcgtttggtgatctccgacgggaatccattcctg

SEQ ID NO: 7130 - DNA, 540 bp, Glycine max
ggatcataaggcaaaaatctaaagagctacgatgacgcgagcaagcggcgaagattcctgagaagagtgggattcgcttgagtcattctcttcccttctagctacgtaacgactaacgacgcactctactctctcttagggtttcttctcccgccaatttcccctctcccccattcaattccaaaccctaacctcactccacccttgccggaaccgcaccttcgattcgacctagggtttcacagtttcactccgagcacgcacgcacgaacttcacgatgccgtcgctactctccccgggcaaaatccactgcctcgaggtggagaatttcaagtcctacaagggcttccaagtgatcggtcccttctacgacttcaccgccatccttggccccaacggcgccggcaagtccaacctcatggacgccatcagcttcgtcctcggcgtccgcaccggccagctccgtggcgcgcagctcaaggacctcatctacgccttcgacgaccgcgagaaggagcagaaaggccgcagagctttcg

SEQ ID NO: 7131 - DNA, 884 bp, Glycine max
ttttgatatgtttattttatgtgaacttaatattgaaaatttgaggatattccattcatttttaaatccaacccctctctttcttttttcgcgtctgacccctcatttatgtttttttccaaactaaataaacctgaagcacaggatcatccaaagaggctcagaatcatgccaaagaaatttcaaatttgccatgaaatttcactttccatcattccattccaggctactactcttggcttctctcgtcccgttcccactgtacactaaccaatattattattccctaaaaataaaataaaaaaaggaaaacagcttccttttttttttttctcttcccttgatcatagacggcactcgttttcgttctcgttctggtttatagatctttgcgaaggaggtttacagcgctcaaccaaagatgcagaacgaggaaggacagatcactgagctttacattcctaggaagtgctccgccacaaacagattgattaccgctaaggaccatgcttcggttcagatcaacattgggcatgtggatgagaatggcgtctacaatggccatttctccacttttgccctctgcggattcatccgtgctcagggtgatgctgacagtgctctagaccgcttgtggcagaagaagaaagttgaagttaagcaacagtagacacccatgatagtttgttacttcgttatgtattaatttctactcttgctagagatatttgagtactatgattgtcgtcttgagcaaatactcattctaaattttcgttggtatttggtaccgccagctaaatttgcttttttgacagtttgccagtgcgttgataaatattctgtcatatttcaatcatataaattttgttaccgtggatttt

SEQ ID NO: 7132 - DNA, 583 bp, Glycine max
aaatccaacccctctctttcttttttcgcatctaacccctcatttatgtttttttccaaactaaataaacctgaagcacaggatcatccaaagaggctcagaaacaagccaaagaaatttcaaatttgccatgaaatttcactttccatcattccattccaggctactactcttggcttctctcgtcccgttcccactgtacactaaccaatattattattccctaaaaataaaataaaaaaaggaaaacagcttccttttttttttttctctcccttgatcatagttcttcataaacctcattttgtgaaaacactaattaggtcataataataataataataataataattacgaatccaccctgctaatcccaattctcttcaccgacacgttcctaaacccttccatcatttccataccctgaaaacacatcatcccattctgctgctccatgtaactcctcacctccttccttatcatctcatgcatcaccgccataaactccgcattcaaattcaacgctcctaatccaacctccggcgccggtaacggaaccggagccgccgcagccacggtgtac

SEQ ID NO: 7133 - DNA, 790 bp, Glycine max
gccatgaaatttcactttccatcattccattccatgctactactcttgtcttctctcgtctcgttcccactgtacactatccaatattattattccctaaaaataaaaattaaaaaggaaaacagcttccttcttttttttttttctctcttccctcccttgatcgaagttcttaataaacctcattttgtgaaaacactaaataggtcataataattacgaatccaccctgctaatcccaattcgcttcaccgacacgttcctaaacccttccatcatttccataccctgaaaacacatcatcccattcttctgctgctccaggtaactcctcacctccttccttatcatctcatgcatcaccgccataaactctccactcaaattcaacgctcccaatccaacctccgccggaaccggtgccggagccgcaacggtattcaccggcatcaccggcaccgtagttgcgcgatttggtatttccgccgactccacaccgggaagagacagcgacagcgaagtcgcgggtccggcatcgtcggcatcgtcttgcgacgacgccgtttcagcaatcggccgaaccggcacggggcgaaacacgtgcgaaggagagaccgagaccacgccgggagcgctggactcgctgaaatcggatccggaggggcttgcgggaggaggcaccgccggtccggcgctgaaggatcgcttgagcggcctcggactcacggcgacggcatcatcacccgccatcatgaaggacgcgcacttgcgttttagggttgagttccag

SEQ ID NO: 7134 - DNA, 401 bp, Glycine max
gctctaccgcattaccacccgtcttgggtcctggttgatagatctctgtgaagtcgctttataacactcaacctaagatgcagaacgaggaaggacagatcaccgagctttacattcctaggaagtgctctgccacaaaccgattgattaccgctaaggaccatgcttcggttcaggttaacattgggcatgtggatgagaatggcgtctacaatggccatttctccacttttgctctctgcggcttcatacgtgctcagggtgatgccgacagtgccccagatcgcttgtggcagaacaagaaagttgaagttaagcaacagtagacacccatgatattgtcttgttgataattacctgtaaaattagactatatgcgctgacaactattaatttgtgat

SEQ ID NO: 7135 - DNA, 485 bp, Glycine max
acgagccggtggccaaaacgtatcctctcgttagtcgttaccttctcctacaaaacaaaacaacctaaaagcttgtccatctaagactcaaactctttcccatggatactctatcatcctctgtttcaaccctcaatgttcccccactcccatcatcaaccttcacaaatcgcgatttctatcgattcaaagcatcccccacccgttcccaacaacaacaacaacatcatgttttctccacttccacacccaattttctccccaaaaccaaaactttctcccacaaatcttccccttctcttccattctccccctcacccctcaaacccaaaccgtcttctccaactttccatccaaatcccgctactgggtatgcggcagcgctggtggacgtcgcccacaacagcaattcccttcactttgttcacagcgatgttcagaggctcttgaaattgctgcagggtgccaagtttcagtcacccgcg

SEQ ID NO: 7136 - DNA, 712 bp, Glycine max
cggctcgagggtttctttcacttcagatttggttaattagggttccgttggcgcgagctaagagcgaaggaagtagaagcagcaaaacccaatcaaagaccctcactctcaccccacacttcacgtaagtgaaaacgattttgttgttgcagcacaaatgtgttggaagccaaagaaaatgctggttccattaaaacaacagcaaccgatactgctctagaaaactttaagcagaagtgggaattgtttagagtagcatgtgatcaagccgaggagtttgtggagtctgtgaagcaaaggataggatccgagtgtctggtggatgaggcaacaaggcctgtggcaggaaaacctggacaagctaccatgactggtcttcctcccattagtgcagttcggttggaacagatgagtaaagctgttcgatggcttgtgattgaattgcagcatggctctggagctggttctgctaattcagctcttacccacccctcagctccgtttgatgccaggttttctgaagatgctgctcagtagcattaatgtgactgcgatgattaatgttatatatttttttctctatgatgatcatgcttagactatattgtgttaaacattttattcaagattaaggattagatttatgttaagctgttaaagaatgtaacttgtgtgtattgtgcatgacacaacaatccttattccttatttt

SEQ ID NO: 7137 - DNA, 383 bp, Glycine max
actcgagccgaatcggctcgaggtttcacttcagatttggttaattagggttccgttggcgcgagctaagaacgaaggaagtcgaagcagtaaaacccaatcaaagaccctcactctcagcccactcttcacgtaagtgaaacagatctgtaattacaagaagcttagatttgacacaagcaggcacaatggacagcatagttgattctctgaataatgcctatcaagattttgttgctgcagcagctaatgtgttagaagccaaagaaaatgctggttccattaaaacaatggcaacagatactgctctagaaaactttaagcagaagtgggaattgtttagagtagcatgtgatcaagctgaggagtttgtggagtctgtg

SEQ ID NO: 7138 - DNA, 303 bp, Glycine max
tttcacttcagatttggttaattagggttccgttggcgcgagctaagaacgaaggaagtagaagcagcaaaacccaatcaaagaccctcactctcaccccacacttcacgtaagtgaaaacggcaccatggacagcatagttgattctctgaataatgcctatcaagattttgttgttgcagcagcaaatgtgttggaagccaaagaaaatgctggttccattaaaacaacagcaaccgatactgctctagaaaactttaagcagaagtgggaattgtttagagtagcatgtgatcaagccga

SEQ ID NO: 7139 - DNA, 428 bp, Glycine max
gttttagacttcgcaaaaccctacgccgatcccaaacgattccgatccagaaaatggcatccgccgccgccagatctatattccgatcatgctccgcccccaggtcagcgtttcgcgtcgcatcggaagccaaaccggttcgttctccgttccgcatcgcgtccaataagcctctctcgcagtcccaatccactctcaggttccctgtggaattgagttcgtgtgtggaatcgatgatgccgtaccacacggccactgcttctgcgctcatgaattccatgctttcaatttcaagccgcacgagcgcttggattcccgaaggccaaaagcagactacgtgaagatcagggagcatacatgggattgcagggacattctatgatatgatgttcatcttgaaacaagattttgttggtgctaggaataat

SEQ ID NO: 7140 - DNA, 530 bp, Glycine max
ctctttttaagtcctcccacctccaaagctgagggagccacaacacaaccaaaagcctattcacttggtcaatcattctctcacttagcaaacaaacactgtgtgtagctgcaatggaagagtattactaccagagacatcacgtgccagcatttgggagctgggattggaatgataatcttccttttacacaatgctttgagtctgcaagacaggctggtttgctaagatatggttactctgagtctgaagatagagatctttatgtcactggagacttgtatgagaatgattttgtcaaacccgctgtgatcgttgttcctcgcagaagggaaaaggtacgttgccagaatgaaaaagacgaaaaaaagcagaattgggtgagtaatgtgaaggagctacctagcccaactagtccaattcaaagaccaaaaccaaagccggtggatgaggacttgtacaagatctcaccagagcttctttatgccaaaactaggaagaagagagggttgtgtttcttcccaagctgc

SEQ ID NO: 7141 - DNA, 475 bp, Glycine max
ctggtgcgttgcttctactcacacttccttcctcttcagcccaccaaggaaactgcttccgaatctgatcaatggaaaactcagacgagcaacttcccttctctccacaaaaccctaacaatgccgaagaagaagacgacgacatcgaagagccagaagacgaagacgaagaagaggaggaggaggacgacgacgacgacgacgtcgtttcgcaggagcaatccccattgtcgcggctgcgcgagcagcgttcgaagctggaaaccctgtcccggcgattggcgtcggagctggtcccaatccgagtccacgacgtgctgattcgcggcaacacgaagacaaaggagtggggtgatcgaggcggagctcaagctcctcgaggaggccaccaacgtgcaggagctcattcgcgcctccgaaatcgccctcgccaggctccgcggcctcgagattttcgacaccgccgagctcacgc

SEQ ID NO: 7142 - DNA, 1619 bp, Glycine max
gtattctcagtttgtgaattgaaatgatgtcatcaactatgttctaaattcaccaacccaacgtcttgtaagctccgcccctggacaaaatcaaggtcccatttatgcaagctttgattcacattcctgttcgtttttccttcgcaccttttcttcttcttcgctccgtgccatgtcttcctctctcgctcttccttccactcccttcttcgccaatggaacaagaatcttcgctctcaagcactctctccctcgctctagggtttccatgagcgtctccgctggatctcaggcttccgttcaccaggctttgttcgccgattacaaggcctccacttcattcctcttcccgggccagggtgctcaagctgttggaatggggaaagaagctcaaaatgtgcctgctgctgcggttttgttcaacaaggcaaatgacattttggggtttgatcttcttgatatatgcatcaatgggccaaaagaaaagttagattccaccgttattagccagcctgctatttatgtcacaagtcttgctgctatagagctacttcgtgcacgtgaaggaggtcagcagattattgactcagttgatgttacatgtggtttaagcctgggagaatatactgctctggcatttgctggggctttcagctttgaagatggactcaagttggtcaaactgaggggagaggccatgcaggatgccgctgatgctgctagaagtgctatggttagtgtgataggactggactcagagaaggtccaacaattgtgtgatgcagccaatcaggaagttcctgaagctgagaaggttcagattgccaattacctgtgcccaggaaactatgctgtctctgggggattaaaaggagttgaagtgctagaatccaaggcaaagtctttcaaggctcgaatgacggtgcgcctagctgttgctggtgctttccacactagttttatggaaccagctgtgtcaagattggaagcagcattggcaacaacagaaatcagaaccccaagaataccagtcatctccaatgtgaatgcacagccacatacagatcctaacacaataaagaagatattggcacgccaggttacttcacctgttcaatgggaaacaacagtgaagactcttctaaccaagggtctgaagaaaagctatgaactgggacccggaaaggttattgctggaatcgtcaaaagaatggacaaaggtgctgatattgaaaatatcggtgcttaatgtggggaccttgctccttcttcgggttggaatgaacaaaactaaattgtgttagctataaatcaggatgcgtggaacttgaagctttgaaagcaaggagcagctacagtcatatttgaatgccagttttgaagttaaaatgttaaattataattcacgagttagataagtgattgtacttggcactagaattttttagtttttctaatcttatattcaatctgtctcggagttaattatgcctatgcttctttgtaccaaatatagcttttggcctttacacaggcttaataataattagaagaaacaacactttccattcaaaaaaaaaaaaataaaaaaaggcggccgttctagatgatccaagctt

SEQ ID NO: 7143 - DNA, 578 bp, Glycine max
aaaaaaatttcctagtgtcctcatgttgtgcttccttgcttgtttcaccaaagattatagcgaaatcatttcctccttccttcttccttcctgcttgttcttcatggtgcttgagaactgatatcatcatcattcattagctgggcggtttgaaaaggctaaattctaataacaccaacgtcttcatcttgtaagctccgtctcttgacaaaatcaacgtcccatttatgcaagctttgattaaccattttcattccctttttccttcgcactactccctcattctgtgccatgtcttcctctctcgttcttccttccactcccttcttcgcccatggaacaagaaccctccctctcactcgatctaggctttccatgaccgtctccgccggatctcagccttctctccgcgacgctctgttcgccgattacaaggcctccacttcattcctcttccccggccagggtgctcaagctgttggaatggggccagaagctcagaatgtgcctactgctgcggttttgttcaacaaggcaaacgacgtattggggtttgacttcttgatatatgcatcaat

SEQ ID NO: 7144 - DNA, 283 bp, Glycine max
ctgtaagccaggtgcagctacactcatatctgaacgccagttttgctccttcttcgggttggaatgaaccaatactagatcgcgttagctatagatcaggctgcgtggaacttgaagctttgaaagcaaggagcagctacagtcatatttgaatgccagttttgaagttaaaatgttaaattataattcacgagttagataagtgattgtacttggcactagaattttttagtttttctaatcgtatattcatcctgtctcggagttaattatgcctatgctt

SEQ ID NO: 7145 - DNA, 587 bp, Glycine max
cggaattccggggaaccctaattctgcgaggtgagtgaaaatggcggtacccttgctctccaagaagatcgtgaagaagcgcgtcaagaagtttatacgcccccagagtgatcgcaagatctccgtcaagccaagctggcgcagacccaagggtattgattctcgtgtcaggagaaagttcaaaggatgcactttgatgcccaacattggttatggctcagacaagaaaacccgccattatctaccaaatggtttcaagaaatttgtcgtgcacaatgtgaaagacctggaacttctcatgatgcataacaggacatattgtgctgagattgctcacaatgtatccacaaggaagaggaaggacatagttgagagagctgctcagcttgatgttgtcttgacgaacaagacggccagactacgtagccaggaggatgagtagatccaatacatgggagagttatttatgttttgtagtgagcttctgttgacacccttgatggtagattttgattttttgttatttccaaaactttgttgcatgccatacaattttatatgttgcttattgtctatttgctgttgct

SEQ ID NO: 7146 - DNA, 510 bp, Glycine max
ggatgagacagtaataataataatgagtgactgactagtctgaaagtgaaagttggtagacaaaagggaccccattctccattctccattctcaaactcaccatcaaatccttgccttctttctccctccaaatccctaattcccttccatcccaaaaattcaacaatactaacattattaactcttctcttcgtttttcccaattaggtttccgagtctcaaccaatttcaccatgtccactcaaattccgagttagttagttatctctttccgccatggaaggtaacaaggacgaagcattacgctgcgttcgcatcgccgaagaagcaatcgcgtcgggaaacaaagaccgcgccctcaaattcctcagaatcgcgcaacgcctcaaccgcgatttgcccctccagtccctgctcgaaaagtgcgaccgcttcgattcgcactccgctgctgcttacgcctgctgtggcaggtcctctctctcggcgatacggtcactctccgcgtc

SEQ ID NO: 7147 - DNA, 733 bp, Glycine max
gagactgctacaaaaacattgaaagaaatagaaaaagcaaaactggtttctcgcatttcctccgaaacaaaccgtttcgctcgtttctcggatctgcaatggaagccccacccaaaggcgctgctggaagaagaggtgacaggaagaagtccgtttccaaatccatcaaagctggcctccaattccccgtcagccgcgtcgccaggtacttgaagaaaggccgttactctcgccgccttggcaccggcgctcccatttatctcgccgccgttctcgaatatctcgccgcagaagtgttggagctggccgggaacgctgcacgtgacaacaagaagaataggattaaccctaggcacgtgttgctggcggtgaggaatgatgatgagctggggaaactgcttcaaggtgtgactattgcgagcggtggagtgttgccgaacattaacccggttttgttgcctaacaagagtaccactccgccttctgagaagtcctccactcctaagtcccccttatctcctaagaagaaatagaagtttcattttgtaaaggctaatcgttttttatttttattttttgggggtaggggttggcagctttaccatatatacatatatatagttgttcggttaggtgcaatatgatggtgtaattcagcgccaggtgttcgcttttttgctttttttggtctccccatcgatggctgcatataatgttaaatgtagtgggttcc

SEQ ID NO: 7148 - DNA, 1097 bp, Glycine max
gggcgtaggacttgaattttgctggccaaaaaaaaccaggaaaatgagaaaacaaaatacaaagaaagatttggaaagagaaaaaatggcaacaaatattctctcaacctcaaaccccttcctactaactaattcattctcatcatcatcatttgtaacaccaacatatgtttactacaatcccataatgaaatgcacagtgaagagggaattaactctttgcaaagcagcaaaccaaccagcccctccacactctccaattgttgtgacaaagagaggcttgtccatcagcttcatcaccagcttcgtgctttcattggctagtaagaagaatgcaaatgcagcaatacttgaggctgatgatgatgaagaactcttggagaaagtaaagcgtgacagaaagaagagacttgagaagcaaggtgtgatcagttcttccaaacaagaaacagggtatcttcaagatctggtgtacaagctaagcgcggttggtcaagcacttgaaaagaatgatctatctgctgctggctctgtccttggaggaagcgccgacgcagattgggtccaaagagctaatatagcattcaataaactgagctccagttcagaagagaagactgaggtggacgcattcaattcctcattagcttcactaaggtcatcagtttctaagaaagatgttgagtcctccaaaattgcctttgtctcttcggccactgcatttgagaagtggacttctatgacaggccttgctgctcagcttaagggcctttgagggaaaacaatgtacaaaagatatcatttcatttcatcattttgtgatcaatatagagaaatccactaaatttcctacccatgaccacctaattgttgtcttggaagcagtctcttcacagcattatctagtactacttcataacgatcaataagctcattctttgttaacaaagcttgtgttacgagtagtgccactgaaatttgtaattttgatgtcattatttaatggcatgttctgttatgctggctcatctaccttgacaaataaagaactttataagttattgtagtagggtgatctctatatatattaaatctgt

SEQ ID NO: 7149 - DNA, 392 bp, Glycine max
gcaaaataagaaaataaaatacagagaaagattggaaagagaaatggcaaaaaatattctctcaacctcaaaccccatcctactacctagttcatcaccatcctcatcctcatcctcatttgtaaaaccaatacatgtttgctccaatccgataatcaaaagcacttcgaagagggaattaactctttgcaaagcaacaccacactctccaattgttgtgacaaagagaggcttgtccatcagcttcatcaccagctttgtgctttcattggctggtaagaagaatgcaaatgcagcaatactcgaggcagatgatgatgaagaactcttggagaaagtaaagcgtgacagaaagacgagacttgagaagcaaggtgtgatcagttcttcca

SEQ ID NO: 7150 - DNA, 485 bp, Glycine max
gcatcctaatctcgctcagattttctccagaaaagggaaaataaataaaaaaagagaataataataataccttttgtaattcgcaaaacgtgatcgacgctggcgcaaattgaaattaggaattagggttagggttttcattatcttcgcccggaaaagaaaggggggaagaagaaagaaccgttcctttatgatcgaaaaggtgcctttggtcatcatcgcggtgttaatcttggtggtgcaatcctctgcagcgttccacggtataaacagaatcatgaaggtccaccctgttcctcgaaaacgcaacatctcaatccaatttggcggcgacgggggcaacccgatgtcggaggctcaagcgctgttggggatcgccgggaagaagctccggcgactaccgcacgtgttcagctgcgtgctggagctgcccttccgctccgacgccgacgtttgcggtggaggaagcccccgactgcttccgc

SEQ ID NO: 7151 - DNA, 520 bp, Glycine max
gagacaaaaaattcttcgcattgcaattgtaatcgagtgagtcaagtgcgggaacgattctaactcagtctgcacgcactgatctcacagcatagcgcttgggctgaggaagaaggaagagaagaagaagcatggcggtgcgggccactgtgtcgcgtttcccgatggacacggacgcccgcgagggctcgggcctcctctggggagtaaccgtcacgccgttctccgccgccgacgagaatgcccgcgctccgtcgtacggctccggcggcgacctcttgccccggtgcgagaactgctgggcctacttcaacacctactgcgagctggagcagtggtcctggtcctgctccctctgcgggaacctcaacggcctctcctccgacgccatcgaccgctactctcgccctcagtcctgcgccgagatgatgtcctccttcgtagatctcgaattgccttcgcaggaactggcggaggaagcggcaatgcacgcgtgtccggtttatgttgctgctgttga

SEQ ID NO: 7152 - DNA, 481 bp, Glycine max
caccattcaccctcttgcaatcgagtgagtcaagtcagggaacgagcctaactcagtctccacgcactgatctcacagcacagcgagcgagcacaacgcttgggctgaggaagaaggaagaagaagcatggcggtgcggtccacagtgtcgcgtttcccgatggacacggacgcgcgcgagggctccggcctgctctggggtgtcaccgtcacgccgttcgccgccaccgacgagaacacccgcgctccgtcgtacggctccggcggcgacctcttgccccggtgcgagaactgctgggcctacttcaacacctactgcgagctcgagcagtggtcctggtcctgctccctctgcggcaacctcaatggactctcctccgacgccatcgaccgctactctcgcactcagtctccacgcactgatctcacagcacagcgagcgagcacaacgcttgggctgaggaagaaggaagaagaagca

SEQ ID NO: 7153 - DNA, 627 bp, Glycine max
ggggttttcttttcacattacaaagtacaaacaccctgcagcaggagcgtacgcataactccccgccgtccggacatttcttggttcctgattcaccatggcaactatgagaggctgtaatcgatttgaaggatgaaccactggacttgtctataatttttgaaggaggaaagggttgtaacagcagatttttgttccatcatcatattatctgaacttctggtagaaaatggcagctgaagatgataggaatcttgtcgaaatcatggaaaccctgaatccaatagatgttgctaaatacatgaattttgttggtgccccccaagctggtgctatagctacattttcaggcacaactcgcgacacctttgaaggaaaaacagtcgtggagttgagatacgaagcttatgttccaatggcaatacgctgtatcaagtcaatctgctcatctgctagagcatcctggaacctacattccattgctgccgctcatcgtctaggcacagtgcctgttggtgaaacaagtgtctttgtcgctgtctcatctgtccacagggccgatgcactggaggcttgtagattttttatagatgagataaaagcacaagttcctatttggaaaaagga

SEQ ID NO: 7154 - DNA, 674 bp, Glycine max
cgagtcatgtgagaagtgagggagagatgcagtagtagtagtgggtggtaacagagaagaaaatagggggtttggtttggtgagttacccaagagaaaggatgaagagggaacgcgagcagcttggttccatcgcagggacctcaagctgcggttattcaagcggaaaatcgaatctttgggaggaagaaggaggcatggacgagcttcttgcggtggtgggttacaaggttaggtcatcggacatggcggaagtggcgcagaagcttgagcgtcttgaggaagccatgggaaatgtccaagatgacctcacggacctttcaaacgacgccgttcattacaacccttccgacatctccaactggctccaaaccatgctttccaattttgaccctctcccctccgaagagccggaaaaggactccgcctcgtcggactacgatcttaaggctattccggggaaagcaatttatggagctagcgacgcgctaccaaaccctaagcgcgtgaaagccgacgagtcaaggcgcgcggtggtggtcgttgactcgcaggagaacgggatccgcctcgtgcacagcctcatggcgtgcgcggaggccgtggagaacaacaacctcgccgtggcggaggcgctggtgaagcagatcggcttcctcgctgtgtcgcaggttg

SEQ ID NO: 7155 - DNA, 447 bp, Glycine max
atttgggggcgagtgatgtgcgaagtgagggagatgcagtagaatagtaatagtggtaacaaaaggcaacagagaacagaagagaaaggaaaagagagggtttggtgagttacccaagagaaaggatgaagagagagcgccagcagcttggttccaacgcaggaacctcaagctgcggttattcaagcggaaaatcgaatctttgggaggaagaaggaggcatggacgagcttcttgcagtggtgggttacaaggtgaggtcatcggacatggcggaagtggcgcagaagctggagcgtcttgaggaagccatgggaaatgtccaagatgacctcacggacctttcaaacgacgccgttcattacaacccttccgacatctccaactggctccaaaccatgctttccaattttgaccctctcccctccgaggagcccgagaaggact

SEQ ID NO: 7156 - DNA, 331 bp, Glycine max
gacagcccaccctctgtcccttttttctctcttggctttctttctttcatactcagtactccccattggggtataatagggacacgaggttgatgcggtggagctaagaaaatgaagcccttttgcacattcttcattcttctttcgctgcttgttattctcgttgaatcttcatgcaaaaacgaagaccaggagatggtgtccaaggccttccaatctgtgtctggattcaactcttcctggttcgatacaggttccaactgttcaaatgctgagattaaagggataaatctttcgtccaagaacctaagtgggaacatctcgtggaggt

SEQ ID NO: 7157 - DNA, 1073 bp, Glycine max
cggctcgagctcgagccgaatcggctcgagtttctttcttcttcttcttctcttcttcttcaagattgcgacgacgatccaagtgatagacactcgttcgcgatggaacgtgtagctgaatccgagcgaactctgtacccatacgtgactggatcctctgtagtcgctatcaaatacaaagatgggattctaatggccgctgacatgggaggttcgtatggatctaccctgcggtacaagagtgttgagcgtatcaagcctattggaaagcattctcttcttggtgctagcggggagataagtgactttcaggagattctgcgttaccttgatgagcttatcctatatgacaacatgtgggatgatgggaattctctagggccgaaggaggtgcataattatttaacccgtgtgatgtataatagacgtaacaagttcaacccattgtggaatgcacttgtacttggtggggtgaaaaacgggcagaagtaccttggcatggttaacatgattggcattaattttgaggacaaccatgtagcaaccgggcttggaaatcatctcgctaggccaattctccgtgatgagtggcatgaaaacttgacctttgaagagggcgtcaagttactggaaaaatgcatgcgtgtgcttttataccgtgataggtctgctgtcaacaaaatccagatatctaaaattacagatgaaggtgccactgttttcccaccattctcattgaaaacgtactgggagttctctgccttcaagaatccaactgtgggcgctgaaggttcatggtaactgactcattgtgaaatgaaacagaattttaaatggatatgaaatggattccaatagaactctttaaggtgttaatggatattaaattagacttggtgtttttatattttttttaaagattcctatgatggtccaaattgatattttcattagaatttctattccagtttcctttcattatgacattcatcataggcatttttctttttcaattgcttgcatagacatcaacgcggtgctcgtgtttgaaattaatcatgcaaagatttgtc

SEQ ID NO: 7158 - DNA, 691 bp, Glycine max
  unsure (1)..(691): unsure at all n locations
gccgaggtattccattttctttttcttccctgagacggagtcattgggtgagtcacccgctgcaaatccaactcgtgcatttgaagaaagacaaaaaggggttggtttttggttttggttttggtttggttaactccctcttcctcttctactctcacccatggtctccgaatccgaactcatcggccgcctccgcgagtttctccggagctccgacctcaacaccaccacaaccgccaccgtccgccgccagttggaggccgatttcggaatcgatttatccgaccgaaaggcattcattagggaacaggtcgacttgttcctccagaccgaacacaaccaaccacaacaagaagaaggcgaagaggaagaagataaacctgaacaggccaaaaatgccaagaagaataaaggacgatctaacaagttaggtgatgaggtagtaaagaaaagaggtggtggtttttgcaaattatgtagcctgtctccgcaacttcaggaattcatggaagctccagaaatggccagaactgaggttgttaagcaattatgggtctatattagggagaaaaatttgcaagacccgaacaacagacggaatataatttgcgatgagcngatgcgttccctttttaatgtcaattccatcaacatgttccaaatgaataaagcattgtcaaagcatatcttg

SEQ ID NO: 7159 - DNA, 440 bp, Glycine max
gccgcccccccctgcaaatccaactcgtgcatttgaagaaagaaaaaaaaaaaggggttggtttttggttttggtttggttaactccttccacttccacccatggtctccgaatccgaactcatcggccgcctccgcgagttcctccggagctccgacctcaacaccaccaccaccgccaccgtccgccgccagttggaggccgatttcggaatcgacttatccgaccgcaaggcattcattagggaacaggtcgacttgttcctccagactgagcacaaccaatcacaacaagaagaagaagaaaaggaagaaaaacaccaaaacgaccacgtagaggaacaagaagaggatgcgcctaataatcccgaacaaaagccaaccctccggatttccaaggaagtaaccgatgaagacgaagaagaagaagacgaagaagag

SEQ ID NO: 7160 - DNA, 635 bp, Glycine max
gaatcatataaataaataaacatagtataattaattgatcgtcgatggtagtagtatgttgagggggctgtttgtgtttggtggcacgtgctgcaggagattgacgttggcacgacagtccacgcagaaacagaaacagtggtgggatcatcttcatcatcatcttcgctccaaaaaccttcattgggcaggtctcatggagagtaatgggaactcggtgaaggatgctgagaaacaaatcacccgtgttttgttttgtggaccccgtttccctgcttctcatgaatatacaattgagtatttgcaaaatcattcacatatcaaggttgatgttctccctttagaagatgtgccaaaggatattgccaactatcatgtctgcatagtaaaaaacatgaggctagattcagaaataatttctcgtgcagttcagatgcagcttataatgcagtatggtgttgggctggaaggtgttgatattgatgctgcaacaaagcatggaatcaaagttgctaggataccaggtgatgtttcgggaaattcagcttcatgtgctgaaatggccatatatctaatgctgggtctcctccgtaagcaaaatgaactgcacgtttccatacaacaaaaagagcttg

SEQ ID NO: 7161 - DNA, 657 bp, Glycine max
ggtggcaacgagcaaaggcgccattaacagtaacgcctaaacgcaacgaaacgcaagtctccacctcttctctctctgcggaccaaaacacagacacgttccaattcccccttctttctttcacatgcacactcttcagattccacttcaacaaaccctaaaccctaatgctctgaaactcacattcccataaagttgagaaatatgagaattccaagcaattgcgagttcacacgaatcacgccctctgctttcagctaccaccgtctcaaatcctacgtttccgactgcagagccgtgcttctcccctcattcggcggcccgcacgtgctccagcttcgctcgcacgtgccagtccctccgctcaagcctcacgatgtcctcgttcgtgcgcgcgccgtctccgtcaaccccttggacacccgaatgcgtgctggctacgggcgttccatcttcgagccgctgttgcctctcattttggggcgcgacgtcagcggcgaggtttcggcggtcggagataaggtgaggtcggtgagtgtgggagaacaggttttcggggcactgcatcccactgccgtgagaggcacttactcggattacgcgattctctccgaagaggaggttactccgaaaccggattcacttactcatgtggaa

SEQ ID NO: 7162 - DNA, 758 bp, Glycine max
ggtcaggaattcccgggccgacccacgcgtccagacgacagaagggggaaccgaaacgaacctcaacaacgctgagcgcagaaaggggaaaaggggattagggtttaggaagcagcgacaacaatggatttcacagtggagaagaaggaatcagagaacaacgccgaaaatgctcacccaacaacgttagattcttcttctcaattggcatcggcacttgattccaacaacaaagaaatcgaagaacgacaagctcgtgaactcaaagccggacttcaccccctaaagcacaagtttgtcttctggtacactcgtcgaacacctggagttcgaaatcaaacatcatatgaggacaacataaagaaaattgttgaatttagtacggttgaaggattttgggtctgctactgccatcttgctcgtcccgcttctttacctagtccaacagatttgcaccttttcaaggaaggaatccgtcctctatgggaggactctgctaactgcaatggtggtaaatggattatacgattcaaaaaggttgtctctggccgtttttgggaggacctggttcttgccttggtgggtgaccaattggattatggggataacatatgtggtgcagtacttagcattcgtttcaacgaggatatattgagtgtctggaatcgcaatgcttcagaccatcaggctgtaatggctctgagagattcaatcaaacgtcacttaaagcttcctcacagctatgttatggagtacaa

SEQ ID NO: 7163 - DNA, 488 bp, Glycine max
ttcaaccctgatcgcagaaagacctgaaggtgattctgcactgacacgcattcacatcaagggatatcacagtgcagaggattgattaaactagcatcaccgaaactgccaccgcacacttactcctaatgactagttactcactcgagctactatcttgtaatcatcagcactcaatttgtgaagctacaagcttgctaccccaatgctggacttcggcgccttacgtagcacaagtttggtcttctggtacactcgtcgaacacctggagttcgaaatcaaacatcatatgaggacaacataaagaaaattgttgaatttagtacggctgaaggattttgggtctgctactgccatcttgctcgtcctgcttctttacctagtccaacagatttgcaccttttcaaggaaggaatccgtcctctatgggaggtagatacttaaaagtagtagctgaagttgcattttcttgccgattgagaattta

SEQ ID NO: 7164 - DNA, 378 bp, Glycine max
gtctgatagtagattgagcaaacaaaggaacaatgtcgaagaagaacaacctcgccaagagaaagaagcagtacgaattcgatctccaaagagagaaacaagagaagataaagaaagagcagaagctccatgcgaagaaaaacaagatgaaagttgatggtagtggcaagaaaaagaaaggtgggagtggatttcaggtggggaagagaaaagtgaagaccaagttgactgcccttgctaaagctaaggctgcccaggcaatggagcttgacaaatgaggttcgacttgtgtaattttagacaatgtgttgaaaattggtagatgacagtgttgttttgaggctcaatatccttgttctgttctgctatatgactatg

SEQ ID NO: 7165 - DNA, 719 bp, Glycine max
gagaaataaagagcgaaggacaacatatgaaggtgaagagggttgagttcagagttgaaacttgagagagtgtcgttgattccaatttacgacggaggagtgaggaatcacaatctccaccggcgaaacctgtaactgttggcgacgctcaacactcgcactacgccgatagtgatggagagtgcttttgcaagcgcctctgcgattactgaccagaggcagaagatagagcagtataagcaaatacttgctgctgtcatttcatctaatgacattgttcaggctaggaaattcatagatcacatgttatcagatgatgttccattagtagtgtctcggcagcttttgcagacttttgctcaagagttgggaagattggagcctgagatacagaaagagattgctcattacgcccttgcccaaattcagcctcgtgttgtgtcattcgaagagcaggttttagttattagagagaaacttgctgagctttatgaatctgagaagcaatggtctaaagcagctcaaatgctcagtggtattgaccttgattcaggaatgagggtgattgatgatggattcaggttgtcaaagtgtgtccaaattgcttgtttatatcttgaggtattgactcttttctgcaatgaaatctatatttgattgaagtagcggctattgggagtcatagcaagccacacaagaacatgagtatccatatctat

SEQ ID NO: 7166 - DNA, 1086 bp, Glycine max
gaatctgagaagcaatggtcaaaagcagctcaaatgctcagtggtattgaccttgattcaggaatgagggtgattgatgatggattcaggctgtcaaagtgtgtccaaattgcttgtttatatcttgaggacgatgatgctgtcaatgctgaagcttttattaataaagcatcattcttggtcagcaacagtcagcatgaagttctgaatttaaagtacaaggtttgctatgcaaggattttggatttgaagaggaagtttttggaagcagcattacgatattatgatatatctcaaattgagaaaaggcaaataggagacgaggagattaatgaggaagcacttgaacaagctttatctgctgctgttacatgcacaatattggcagctgcaggacctcaacgttcccgtgttcttgccactttgtacaaggatgagcggtgttcaaagttgaagatctatccaatactgcagaaggtgtatttggagagaattctcagaaaaccagaaattgatgcttttgcagaagaattgaaaccacatcagcaagctcttcttccagacaatttcactgtgctggaccgcgctatgattgagcacaatcttttgagtgctagcaaactctatactaatatcagctttgatgagctaggcacgctgttggggatcccacctcacaaggccgagaagatagcatcaagaatgatttatgaggataggatgaggggctctattgatcaggttgaggctgtgatacattttgacgatgacactgaagagttgcagcgatgggaccagcagattgtgggcttatgtcaagccctcaacgatgttttggatagcatggccaagaagggttttccggttcctgtttaacgtggatggttgacaatttctttgtttatccattcttagtaaagcatcttttttttcttttgttgattttttgtgaacttcattatacaaacgaaaccattaatttcctcatatatttggtccaaatttggtttaccccaagggcttgtttaattactgcttctgcttaacgagtttctgaagcacatctttgttgtgctttttgctcgt

SEQ ID NO: 7167 - DNA, 825 bp, Glycine max
ggatgaggtgtgaacagataagcgatctctttcttcgtttatctgtaaagtaaccctctaagcttcaattctgcctttatataagctcagtgtataaggttggttgctccaaccacaacacaacacaacacaacacaattacacacacgaatttccttagttaggcattgctttgcgatggaaaaaatggaactggcagagacacctctacctttgctttcactaaaccacgtttcttttgtatgtaagagtgtgagtgagtcagtgaaattctatgaggatgtccttggatttttgctcatcaagaggccatcttctttcaaatttgaaggggcctggttattcaattatggcattggcattcacctgttggagtcagaaaaggttccggtgaaaaaaagagagatcaacccaaaagaaaatcatatatcgtttcaatgctcagacatgaaagttataatgcagaaactggatgcaatgaagattgagtatgtgacagcagttgtggaagaaggtggaattaaagttgatcagctgttctttcatgacccagatggatatatgatagaaatatgcaactgccaaaatcttcctgtgcttccaatttcttcctgccctctaaagcagctcggaggagaagctacattcaagattaattgctttgcagaagaatctatgtctatgctgatgatggacaatttcgtgatggatatgttgaagatttcaatataattaaagctttttgtaaaaaaaaatatttgtaaaagcctttttgtccgacgagagaagaggggaaataaaaagtgtaagagtaaattatatcaa

SEQ ID NO: 7168 - DNA, 1102 bp, Glycine max
  unsure (1)..(1102): unsure at all n locations
actcgagccgaatcggctcgagggacgacatcaaagtgtatggtgacgctttggagaagcgcccttctagctttttcccagtccaagcagcctccaattcgtgccactctcttcaaaatggccgttaccttctcaaatctccacacagaatcaggtctcaagtccctcgacgacttcctctctgggaaggtctacgtttctggggatcagttcacaaaggacgacatcaaagtgtatggtgctgttttggagaagccaggtgactcttttcccaatgctgccaagtggtacgaggttgtctcatctcagcttgctgcaagcttccccggcaatgctcaaggggtgagattcagtggcaaagcttctgctccagcggaggctgctcctgcgaaaccggatgcttctgctgctgaagatgatgatgaccttgatctctttggcgatgagactgaggaagacaaaaaggcagcagaggaaagggaggctgctaagaagtctaccaagaagaaagagagtggcaaatcttctgttctgcttgacgttaagccttgggatgatgaaacagacatgaagaagctggaagaggctgttcgcagtgttgagatgcctggtctattgtggggagcatccaaactggttcctgttggttatgggatcaagaagttgcagatcatgttgactattgttgatgaccttgtatctgtggacacccttgttgaggaacgcttgacagttgagccatgcaacgagtatatccagagctgtgacattgttgcattcaacaaaatctaagttttcttgttgacttttgagtttggccattttcaagcggctgatcagtctgttactcttcctttaatcgttcatgtttggtctgtttcaatggtggttttcttgcaagaattgtgagaagtaaagagatattatagatatatcaagtatccatgttatggtggttttcttgaattagatatatgggattaaaataactgaacgatgtgcttccatttaaattgtgataagtttctcnnnnnnnnnnnnnnnnnnnnnnnnnnnnnnnnnnnnnnnnnnnnnnnnnnnnnnnnnnnnnnnnnnnnnnnnn

SEQ ID NO: 7169 - DNA, 520 bp, Glycine max
ctgatctagggtttgtgactgtacatgctataaatataaattattgagcatcgaaggagtgtctctctttttcactcactctgcacccaccattactcagcactgccactcttcaatcacactaatggctgtcaccttctcagatcttcacaccgaagagggcatcaaatccctcgatcaattcctttctgggaaaacctatatctctggggatcaattgacaaaggatgatatcaaagtgtatgcagctgttgtggaaaagccaggagactcttttcctaatgctgctaagtggtacgatgccgtctcttctcaacttgctccaagcttccctgggcacgctcaaggggtaagattcagtggcgctgctgctccagctgaagctgcacctgccaaagcggctgccactgctgaagaagatgatgatgatcttgatctctttggtgatgagacagaggaagataagaaggcagcacaggaaagggaggctgcttaaaagcctgccaagaaaaaagagagt

SEQ ID NO: 7170 - DNA, 369 bp, Glycine max
tgaggagactctcacagttgagcccatcaatgagtatgtccaaagctgtgacattgttgcattcaacaaaatctaagttttcatgttgaatttcagtcattttgaagcagccaattagtttgtttttctttctcatccacttccttctaacttattcatgtctagtttatgtttcagtgatggttttgttactagaattctgagaagtaaaaaatatatattttgaatatttatgttcttgtgttccatcaatgtgttgttagattctaatataaaataggtgtcctactcctttccactattacaataaaaattaattattcaaattgagatcggatcgggttcaatttaaaagctggttcaagaagg

SEQ ID NO: 7171 - DNA, 1245 bp, Glycine max
taaacccatattttcacacgcccaaaaccctcgcgctctctattcgcatctgaattctcagtcgcttctcgaaccctactttcttccgcggtgattgcatttgaattcctgtaatggcgattgataatatttttaaaaatgaagctagtgaagaaaaaggagagcgtgccagaatggcttcttttgttggagccatggctattgctgacttagtgaagacaaccttggggccaaagggaatggataaaattttgcagtcaacaggtagaggacgtgaagttactgtcacgaatgatggcgctacaatcttgaagtccctccatattgataacccagctgctaaagtccttgttgacatatcaaaagttcaagatgatgaagttggggatggaactacctcagttgttgtgttggctggtgaacttttaagggaggcagaaaagctggttgcaaccaagattcatccgatgacaataatatcaggttttcgaatggcagcagagtgtgctcgtaatgctttgttggagaaggttgtggacaataaagcagattctgagaaattcaggtcagacttattgaacattgcaatgactactttgagctccaagattctctcacaggacaaggagcattttgcaaaattagctgtggatgctgtaatgagactaaagggaagcaccaatttagaatctatccagattataaagaaacctggaggctcattaatggattcattcttagatgaaggattcattcttgacaagaaaattggtattggacaacccaaacgtatagagaatgcaaagatactggtggcaaacactgccatggacacagacaaagtgaagatatatggtgcacgtgttcgtgttgattctatggctagagttgctcagattgaaacagctgagaaagagaaaatgagagaaaaggtgcagaagataataggtcatggtatcaactgttttgttaacagacagttgatttacaattttccagaggagctctttgctgatgcgggaatattggctattgagcatgctgattttgatggtattgagcgtctggctttggtaactggtggtgaaattgcatcaacctttgacaatcctgagtctgttaagcttgggcattgcgaccttattgaggagattatgattggcgaggataaactgattcatttttctggtgttgctatggggcaggcatgtacaatagttttgagaggtgctagccaccatgttc

SEQ ID NO: 7172 - DNA, 996 bp, Glycine max
tacaaatatgtcatttttccttagcttgtgaattgtgaggcagaagagattagagaaacagctatggaaggagaaaatggaaagaagctgaaaatactgtgcctccacggattcagaacaagtgggagttttcttaaaaagcaaatcagcaaatgggatccttctctattcattcaatttgatatggttttcccagatggtaaataccctgctggagggaagtctgacatagaaggcatcttccctccaccttactatgagtggtttcaattcgaaaaggacttcacagtgtactttaacttggaagaatgcatctcatacttatgcgattatattacagccaatggtccctttgatggcttccttggcttctcacagggtgcaactctttcagcacttttgataggttaccaggcacagggaaagttactaaaggagcatccaccaataaaatttctcatatcaatatcaggatgcaaattcagaaatcccagcatatgcgatgttgcctacaaagacaccatcaaagctaaatctgttcatttcattggggaaaaagattggctgaaacttccttctgaggatctcacatctgcatttgacaaacccctgataataaggcatccccaaggtcacaccgtaccacgattagatgaagtggctaccagtcaattgagaaaatggattaccgaagaagtcctatgtcaaccaaaggttggcatctcagtttgtgagcatgaaacagaccatgaagaaaagaagtcagagaaggggaccaagctagaaccctgtggtaccaatcaagacaaaggtgtaaacggtgttgaaataaacaagggttctgaaacagtagaggtggctcaagcctgaagataaggacttctaagaggaagcacctgaatttttaatattaaattatgtatcatgtatgattggtgattcatatggacatgttttacgatttctcgatctttaataaattattatgtattgtgg

SEQ ID NO: 7173 - DNA, 509 bp, Glycine max
ggtaaagtgaagcaaaaacgtagtgtttcatctcttccatttcgctctatcgctcaacggatctaaggcttcagtgtagtctgtaatcatgtcaggcaagtatatcatttctgctattcttggatcatttggagttgcatgggtttgtgattattatgtttcagacaaaaagctatttggaggttctacccctggaactattacaaacaatgagtgggcagaagagactgacaaaaaattgcaggcatggcctcgtactgccggtccaccagtggtcatgaatcccataagtcgccaaaatttcattgtcaagtctcgcgctgagtaataatttttgttgattgattttgagttaattggtgcttggtcatgccatatgtttccataaatgatgataatgcttgaggtaaaactcttacagttcaattagtgttttgaagtttaaacatgtgaatgtgtttacttgctaaataaaatgttacttaagcaatcatggattgattaatgca

SEQ ID NO: 7174 - DNA, 419 bp, Glycine max
gtccaagacaaaattccttttggaaattccttttcctcgtgaacgatcggctcactctcgctctccctagatcgcgcactttcgctctccctcgtcgcgtgctcgttctcgctatcgtgctctcgcgctctctcggatctaactctgtctgtaatcatgtcaggcaagtatatcgtttctgctattcttggatcatttggagttgcatgggtttgtgattattatgtttcagaaaaaaagctatttggaggtactacccctggcactattacaaacaatgagtgggcagaagagaccgacaaaaaattacaggcatggcctcgtactgccggtccaccagtggtcatgaatcccataagtcgccaaaatttcattgtgaagtctcgccctgagtaatattttttgttgattgaatttga

SEQ ID NO: 7175 - DNA, 477 bp, Glycine max
ggttaaacttcaccttacagtccactaaagcataacctaatcgcactccggctctccgcactccgctattgcacctccctcgacggcacctcaggcgcactcgttttcggttccgattgcattgaatcaaatctgagaaccattctcattgcccgtctgtaatcatgtcaggaaagtatatcatttctgctattcttggatcatttggagttgcatgggtttgtgattattatgtttcagagaaaaagctatttggaggttctacccctggcactattacgaacaatgagtgggcagaagagactgacaaaaaattgcaggcatggcctcgtactgccggtccaccagtggtcatgaatcccataagtcgccgaaatttcattgtgaagtctcgccctgagtaataatattttttgattgattgagttaattggtgcaccttggtcatgggatatgtttccataaatgatgataatg

SEQ ID NO: 7176 - DNA, 402 bp, Glycine max
ctgatgcgtggggccttgtttttgttttttacttgggattttgggggtgttttcggattatgctttgcgatcctctgagtttcttgtcctttccctttctttctaggaatcaattctgagaagcattgacgttcaacaggttgcttcgaagtctgtaatcatgtcaagcaagtatatcatttctgctattcttggatcatttggagttgcatgggtttgtgattattatgtttcagagaagaagctatttggaggtagtacccctggcactattacaaacaatgagtgggcagaagagactgacaaaaaattgcaggcatggcctcgtactgccggtccaccagtggtcatgaatcccataagtcgccaaaatttcattgtgaagtctcgccctgagtaata

SEQ ID NO: 7177 - DNA, 490 bp, Glycine max
tacagtccactaaagcataacctaatcgcactccgctctccgcactccgcactccgctattgcacctccctcgacggcacctcaggcgcactcgttttcggttccgattgcattgtctgcgtttcttttttctttgccttgtttttgttttctttttctttttattttgctttgcgattctctgagtttctttttctttccctttcttctaggaatcaaatctgagaaccattctcattgcccgtctgtaatcatgtcaggaaagtatatcatttctgctattcttggatcatttggagttgcatgggtttgtgattattatgtttcagagaaaaagctatttggaggttctacccctggcactattacgaacaatgagtgggcagaagagactgacaaaaaattgcaggcatggcctcgtactggccgtccaccagtggtcatgaatcccataagtcgccgaaatttcattgtgaagtctcgccctgag

SEQ ID NO: 7178 - DNA, 762 bp, Glycine max
gggtttagagcaacggcagcgcagggttgggctatccatttgtttcgagaatgcggtctctctcagccaacccttccttactgcgacaagctgttccagttttggtcaaaccctacaaatccattctctctcgagcattcctcttcagctcccctgcctccacatctcattctcacaatactcaatttcttagatccgtcacgtttttctctactacttctcttcgtaattttaattcacgcgccacccatctcaacgatgctggctctatcgactctcctcttatacagtccatgcagaacaagataaaggaacaactcaatgcagaatcggtctccgtcaaggatgcttatggtgatggtcggcatgttagcattgatgtggtagctactgcctttgagggacaatcagccgttaataggcaaaggatggtttataaagctatatgggaggaacttcagactgtagttcatgctgttgatcagatgactacaagcactcctgctgaagcagccgcaaagtgataaaggatcatgagaacatacattgactacttatttatgggggtgaactaggagtgtttgtgctcttcataaatttttgtattgctgtttttctatgaatgaattcctaattttaaactaccctttcagtatgttgttcacttgcaactggacatcaattttccggttaacaccctcagtttctatattcattaatttgcatgacaatgcacttggtcaagcaaccaatccttttctc

SEQ ID NO: 7179 - DNA, 696 bp, Glycine max
  unsure (1)..(696): unsure at all n locations
gagggtttatcgatttcacttctgagtgtggtgcttcactcttcacttcgcacattcagatcttcttcgtcctctgaatcaagttttgactttatttgaatagtttctcaactgctctttccttccaaaatgagccggccaatggaggaagatactgcaggtaagaatgaggaagaggagttcaacaccggaccactatctgtactcatgatgagtgttaaaaataatactcaggtactgataaattgtcggaacaacaaaaagcttctgggtcgtgtaagggcttttgacaggcactgcaacatggttcttgaaaatgtcagggagatgtggactgaggtgccaaagactggtaaaggaaagaaaaaggcccagccagtcaacaaggatagattcatcagcaaaatgtttctacgtggagactctgtcatcattgttcttagaaaccccaaatgagattctgtcatcaacttgtaggagtaaatggctctgtagtatttgccttttcgttatatcttgaattcttgataaacgaatatgtagacattctgtccttcaaaataaattatgtacgggaggcttaaaggatttccccattggaggatttcctggaggaaaccaaggaggcaatgcaggtcaatttttggttttttggtttgccccttggtaaaaaaacccctttgaaatgttgttncc

SEQ ID NO: 7180 - DNA, 546 bp, Glycine max
gatacttagatcttcttccttcactcaatcaagttttgactttatttggagtttctccaaaatgagccggccaatggaggaagatactgtgggtaagaatgaggaagaggagttcaacactggaccgctgtccgtactcatgatgagtgttaaaaataatactcaggtactgataaattgtcggaacaacaaaaagcttctgggtcgtgtaagggcttttgataggcactgcaacatggttcttgaaaatgtgagggagatgtggactgaggtgccaaaaactggtaaaggaaagaaaaaggcccagccagtcaacaaggatagattcatcagcaagatgttcctccgtggagattctgtcatcattgttcttaggaatcccaaatgagattctatcatcaattattcgcgtagacattagcggaggatgtagttggtcatttgatgaggacgccctggatcttttatgtacccattaacgtgtacatctaatgttttgtatggattaaaatgtaaagttttatttgtttttttttttttggtctt

SEQ ID NO: 7181 - DNA, 392 bp, Glycine max
gagtctcagcttcacattttaaccctaggatcctttctcctctcatccacctggagcaaagaatgagccggccaatggaggaagataatgaggaagaggagttcaacaccgaaccgctatttgtactcatgatgagtgttaaaaataatactcaggtactgattaattgtcagaacaacaaaaagcttctgggtcgtgtaagggcttttgacaggaactgcaacatggttcttgaaaatgtcagggagatatggactgaggtgccaaagactggtaaaggaaagaaaaacgcctagccagtcaacagggatagattcatcagcaaaatgtttctccgtggagattctgtcaccattgttcttaagaaccccaaatgagattctcttatcaac

SEQ ID NO: 7182 - DNA, 331 bp, Glycine max
ggggatttaaccctcacacataagacattaccatggttaattttaaggttggcaatttttgtggcctcccttgtagtagtcgtccaatcccaggttccaaacatatgggaagccaagcccttccaccacatgttgtctttggttcagccagaccctgttgtcctcaactaccacaggggtccactccttaagggaaacgtcaccgttcatatcaactggtacggcaacttcacacccattcaccgttccatcatcgttgatttcatccaatcccttggttccattccccactctcgtcaggacccatcagccttttcgtggtggcgaatca

SEQ ID NO: 7183 - DNA, 1539 bp, Glycine max
ggagtggaaaaattgagagtggagaaaagaaaaaaaagttcaagcccctctatataaagaaacttagacaatcaaagccactcatcggtatacattgtcctctccatcttccactctttcacactcacctatggctccaatctcaaaactcattcctttcctattcttaacaacccttttagtttccctccaagttaatgccagagacagccaattcttcagcaaagtcacccctctcaacaacaacatcaaagagactgagactcccaaaaatgaaggccaagtaaacaagccagaacaacaaccaacattcattcctgaaactgaaaacagttatggcctatatggtcatgagactggtctgcaccctcccaccactacaacaactaatgctgcaccctacaccaccacttacaagccatacaaaactaccacagctgaagaggacactgccaagtactccaacaacaacaacttctacagcttcaagaaggatggctacaacaccaaccaaaatgagttgagtgaaacaacaagactcacaggcacttcttacaccaacaacaacaactacttctacagcggtaaggatgcttttgctaagcagaatgaattgagtgatacaaagtacactgaaggtggatacaacaccatggaaaatcagaacagcaacaacaactacttctacaacggcaaggatgcttttggtaagcagaacgaattgagtgacacaaagcacactgaagggggatacaactccatggagaatcagaacaacaacaacaactactacaacggcaaggatgcttttggtaagcaaaatgaattgagtgacacaaagtacactgaagaaggatacaactccatggagaatcagaacaacaacaacaacaacaataaatattactacaacaacgaccaagccgccaatgagaaatacttctacaacaacaacaacaatgatgatgctgccaacaacaggtattacaaaaccaaatctgtcaacagcaattacaacggcgagaggcagggtttgagtgacacgaggtttatagagggtggaaaatacttctatgatgttaagtctgaaaagtacaaccatccaacacaatatggtggctcaaccagaggagtgaactcagagaactggtccaacaacaggggttactttggcaacaacaatgtgaactccatggaaggttaccagaaccaggaggagtttgaagatgaccaagaggacttcgacccttgagctgcaatcatgattttgtcaaagtgaagagttcattttgcttttgatttggagtattcacagtgggtgatcgatgttttattgtgcttttcattataaattacaaaacaatgttaaagggtgggtagtaggatattgaggggttttacttagtggtaatcttgttaagttaaatcttgcttttggaattgcacagtctatgtaatgatgtgaaaatatggcatgaagtatcaaggcatatgtggcttttgctatcaaacatgttctagttttgcgcttttttcact

SEQ ID NO: 7184 - DNA, 613 bp, Glycine max
gaggttcccaaaaatgaaggccaagtaaacaagccagaacaacaaccagttttcaccccagaaacagaaaacagctatggtctatatggtcatgagactggtctgcaccctcccaccactacaataactaatgctgctccctacaccaccgccaccacctacaagccatacaaaactaccacagctgaagaggacactgccaagtactccaacaacaacaacttctacaacttcaagaaggatgcctacaacaccaaccaaaatgaattgagtgaaacaacaagactcacaggcacttcttacaccaataacaacaacgatggcaaatcagaacaacaacaacaacaactacttctacaacagcaaggatgctttcggtaagcaaaatgaattgagtgacacaaagtacactgaaggaggatacaactccatggagaatcagaacaacaacaaatattactacaacaacgacaatgctgccaatgggaagtacttctacaacaacaatgatgctgccaacaacaggtactacaaaaccaaagctgtcaacaacaattacaatgatgagaggcagggtttgagtgacacgaggtttatggagggtggaaaatac

SEQ ID NO: 7185 - DNA, 746 bp, Glycine max
  unsure (1)..(746): unsure at all n locations
cgtcagatgcaatgtgaagcatgtgctcaagttatacaaaagcgaatccgcaagattcaaggagtaaagtcagtgaaaacaagcttgggaaatgatcaagtcatagtaaaaggtgtgattgacccagcaaagctagtcgattatgtgtacaagaggaccaaaaagcaagcttctattgtgaaagaggaggaaaaggaaaagaaggaagaagaggagaagaaagaggaggaggaaaaagagaagaaagaaggtgaagagaaaaaaggagaagatggtgaagaggttgatactaaaactgacatcaagcgaagtgaatactggccattaagatcccacgttgactacgttgactacccttatgcttctcagattttcagtgatgagaacccaaatgcatgcactgtaatgtagatcagtcttttgtactaactcggtattttttagtagctgatcgatcaactgaagcaacttgtgctgtgtcgttggagcgtggaataagatgcatggttgtgaatgttttcaaggctttgtatatgatttcgcatccctcggagttggcattctatggagatagatgccttatttcttgtgttttatgagctttctacatatttccttggcaaagggtggctagaatcagttgtgttagtgtgtactgaattttggcctacaacttcaattatgtacctaaatgatgacatcaattagtaattttaagtcgtcatgtcatgatanaacttgctgcg

SEQ ID NO: 7186 - DNA, 774 bp, Glycine max
aaagacaaccgaaagggggttattgaagagtagggataatagaatccgtatcgtagcaaaacgcacgagttaggggcggcgatgggaggttcatcggaggatttctcggtggtggtgctggcgtcggacctcggcgtcgatgcgcgacctttcctcgaacacgatcaacagcaagaagaagagaattggcacgactgttcccagtacctctcccccgacgaggacttctccgatctcgatcagttgcaattcctccgcctccaaggctccgacaagaactccaatcgcattctccgcatcgtcggcaagtactttcccgcaactgttgtgagtgcggagcggctcaagcggtatgtgttcaacaaaatttgcagtgagttgcctgaggggcccttctgtattgcttacatgcacagcaccgttcagaaggaggataattcccctggcatcaccatcttgaggtggatctatgaagaacttcctgctgatttcaaggacaggcttcagactgtgtatttcgtccaccctggctttcggtcccggctagtcatcgctactcttggccgctttttcttgagtggagggtaactcatctatcaatgctgaccaaaaaaaaaaaaaactcatctatcaatttttcttaacagaaatgaacatccaaaagcattctatttaggagtatcatttaggtcgtgtttggataaacttctttcaagagaagcagaataaaaaagtaaaatgaataaagcttctataagtttaaatcaatttatg

SEQ ID NO: 7187 - DNA, 405 bp, Glycine max
gagaccaaatcgaacagcactagaagaagagaagacgatggagaaagaggagagcacggaacagcgaaagcaagcgaggcttgccattatggagctcgccaacatgataagcgttcccatggcgctaaacgccgtcgttcgcctcaacgtcgccgacgccatctggcaaggcggcgccaacaaccccctctccgccgctgagatcctcccccgcctccttcccgccgccggcggcggaacgccgagaacctccagcggctcctccggatgctggccagttacggcgtcttctacgagcacctctccgccggcgagcggaagtactccctcaccgacgtcggcaaaacgcttgtcaccgatgaacaaggcctgtcgtacgcgcattacgtgcttcaacaacaccag

SEQ ID NO: 7188 - DNA, 569 bp, Glycine max
agagagagagagagagagagagagagagagagagagagagagagagagagagagagagagagagagagagagagagagagagagcttcggtgccctccctcctccgcctccaaccaccgcgaccagagctcttctccgccgcgtccggacctattctccaccacgttcaagttggttgaaggataatgggtcggaaagctggtacgcttttcatcaaccccaagagatttggtaatcttcaaaaaccttgcatgaaggaaatggcattgtttctcagttgtatggctgcaaaccatagcgataccgacgcttgtgctcgccagaaggagctattaaatgtctgtattgatgctcagagtaaaaagaacagaaagtcttgggggagtatcaattatcaactgcagaggcttaaccgaggaaggaagtagctcaagatttctcatacgtgttattgcttttgcaattcaagggaagcttagcctgttatacactgctttggttgtcaacctagaatgaccatacactaacttgtattctcccttgaagtatcttgatgataaaatttctac

SEQ ID NO: 7189 - DNA, 864 bp, Glycine max
gaagcagaagaaattggcttatgggtcggccattagggcgcttgattttgctatgacgaagtacccgccggcttgtgagcgttttgtggatgttttggggttgaagaccgcgtttgcggctttcatgggtaagattcctttaagtaagaagaacaagaaagaaaggtaccaagaggatttggaggagcgcattgtgtcactgattgcgtcattatttggtggaatcttgaggggttctaggagagaaagattattaagtaaatttgttgaaaatgagtgtgagaagatagacaggctaatggaactatacatcagatattcagatagagtcaaagcagaaactgaacggttgaatcaagttgagcttgatgacttggagatggatgaagatgaaaaatacaaccgtaaactagaatctggactatatactcttcagttgattgctgtcattttgggtcatctttggtgctcagagcatccacaaatgagagggagaattgaactacttctcaagcagaacaaacttagtaagaagcatatcaaggatatacttcaggagtatcatgacaatattggtgaccttgatggaccggaagagaaggagagagcacagacaaaaattcagaagttcataacggccttataattagtgtaagacacaaacttcaatggaggtgagctcaagtaattcattttgcttgtaaaagagaatagattagtcagggtaatggagaaggaacaccgatctgcaaatgtcgttgagatcatagccatgtagtgtttatttcacacaacttcttaatgtagttatattggatattatttttttccccccccggggtgtcataaatgttgttcctctat

SEQ ID NO: 7190 - DNA, 581 bp, Glycine max
ggaagagtacttagcgatctccgtgaatacatagtaacacaataaaccacctccgcgcgagccaccttacccagtgaaccctaccgcaccgaaacaaaaccctcgcaaaccctaaccctaatctcataggaacatggacggcgacgacgagacctcgggtccgatgatcgacgaaatctacgccaacggcggtggcgtcggcgacgacggagacaagcggagccgccgcgcaatcatgagcggcgaccagctcgacatcgaggcgtacgcggcgctatactcggggcgcacgaagatcatgaggctcctcttcttcgccgacaagatgaacaacgcggcgacgcagctcgaggcgctgcgcatggcctacgacgagattaagaagggagagaacacgcagctgttcagggaggtcgtgcagaagatcgacgggaggctgggcccgaactacgacatggacgcggcatggtgcgacaccgtggatcggagagctgagcagaagaaggagaagctcgagaacgaactcaatgcctataggacaaacttgattaaggaaagcattaggatgggattcaatgatt

SEQ ID NO: 7191 - DNA, 555 bp, Glycine max
gaattctgagtaatttttatcatttttgagatttaatatgtatataattatatagtaggcattgtattaactataagctacataaaaaaattcagaatagcggcggttatcctctatcctgctatattggtttttcggtcggctgctatgtgccgctactcaagattcaaaacattctggtaattctagaacatgtaaagtttttttttccaggttttagaatgccattgtattattattattattggtgagcatgtttggtgtatagattactttttgagaaataatcataaaaaattctcttgtgaagttataaacaaatgattgtttctcccgaataaattgaaccactgtgcactaagatcatattgttaaacaatcattcttttggatagaatatagatattgcagatacagtcatgccctcagattttaggtaattttatatgaaaatgcataaaaaattaaagttctggagtgtgggttgggaaatgagaggaatgatacattgttcttaataattgcagccttgttagctacctgccctctttaagc

SEQ ID NO: 7192 - DNA, 897 bp, Glycine max
acgagcggcggttatcctctatcctgctatattggtttttcggtcggctgctatgtgccgctactcaagattcaaaacattctgctctagttctctctcacaagctttctccagctttgcaactagctttgtctgactctggcatatatttttgttcttcagaaaaatactaatggattcatcacaaagtgcggctcttgggggaaatggtgggagtggtggaaatgggacgttgatttctcaaattaatgacatggcagcctctgcaacaggagctgatgattctatgcagaagctgaaccaggtcagcaactccattcagaaaaccttgggccttatccatcagctttacctcacagtttctaccttcaatgctgcctttcaaatgcctctcctccaacgcatcaatggccttgttgcggagcttgacaacatggttaaattggcagagaagtgcaacattcaggttcctatggaggttgtcaatttaattgatgatggaaagaatccagacgagtttaccaaagatgttataaatagctgtattgtaaagaatcagatcaccaaaggaaaaactgatgctttaaagagtttgcgcaaacatcttttggaggaattggagcataacttccctgatgaggttgaaacttttagagagagtcgtgctgctgcagctgctgagttgaaacgtcaggcacaggcacaaagcgcactgccaaatggagatgtgagggttaaatcagagcattgagtgatatatttcttgtgtcttctagcgtttatgtatgcactgtatagtggagttcagcactgttccttgtttctgcatgttggttaaatgctgtaaatttgatgactaatttttgcttactattaattacttaatttggcttgttg

SEQ ID NO: 7193 - DNA, 363 bp, Glycine max
ccccgacttcaccttagctatcgccgagaacccgtaccttcatataaacatatatatatctgatactctcacgtttcacgcgtccttctcccaccgcaccccacacttccggcaccgtcggaactcagcaccgcacatctgcaccccacacccgtcttctcacaaccgtcaatcgctgtcacagcgcacagcttcgacttcagaggtcccccccttcactgcaacgttttcaccttgatttcttcagctctagttctctctcacaagctttctccagtgttgcaactagctttgtctgactctggcatatatttttgttcttcagaaaaatactaatggattcatcacaaagtgcggctcttg

SEQ ID NO: 7194 - DNA, 511 bp, Glycine max
ggctgctgcggtttagtagtgcagctaaacgtcgacgaacaaggaaggaataacgaaagagccttcaacgctgatttttgtagaatattggaccgacaaatagttaccagcttccaccctgtctctctgcgattgagaaagggactcacgttctctgttcatcacaccctctctctctctctcttcgtctctctctctcatccatgtgcatttcttgtctcatattaggcttcgagttcagaggtcgcccccttcatagcttagaagcaacttccgcaacgttttctccttgatttcttcagctctagttctctctcccaagctttctccagctttgcaactagctgtgtctggctctggccatcatcaagtcttcttcagaaaattacaaatggattcatcacaaagtgcagctcttgggggaaatggtgggagtggtggaaatgggacgttgatttctcaaaataatgacatggcagcctctgcaacaggagctgatgattctatgcag

SEQ ID NO: 7195 - DNA, 1689 bp, Glycine max
ccctgaaacaattactccatccctagcgcgcacacacacccccaatcctttctctcccgaaaccgtacggttacgtaaccgtaggcgatatcagaattcacggcacacacacagtccccactctctacgatgaccggtcaacgcatctcctacggcaaacgctcccactcgcactccgattccgacgccggctccaaaaacaagcgccgcaaccccgcagctgatgactcctcctcctccctcatcaccgccgacgacaccgtcttccgctacctctgccccgtccgcaagattggcagcgtcatcggccgcggcggcgacatcgtcaagcagctccgcgccgacaccaaggccaagatccgcatcggcgacgcgctccccggctgcgacgagcgcgttgtcaccatccacagttcctccgaggagaccaaccatttcgacgagaccggcgatctcgtctcgcccgcgcaggacgcgctttttagggttcaccagcgcgtgattgccgaggacgcacgtgaggatgaggacgaggagaggaatcatgtgactgcgaagcttctcgtgccgtccgatcagatcggatgcgtcattggaaaaggcggccagatcgtgcagaatatacggagcgaaaccggcgcgcagattcggatccttaaggatgatcgcttgcctccttgcgcgttaagcaccgatgaacttgttcagatatctggtgaggctgcggttgtgaagaaagctctgtttcaaattgcggctcagattcgtgataatccatcgcggtctcagcatctgcttgcttctgcagttcctggtgggtatgcagctggtggtcctggtgcaggggctccaattatgggagtggctccttttgtgggtgcttatggggggtataagggtgatactggtgactggtcacggcctttgtatcctgccccaagggatgaagcatctatgagagagttttcagttcggtttgtctgtcctactgggaacattggtggtgtgataggaaagggtggtgccataataaatcaaatcaggcaggattctggggcaaccatcaaagttgatagttcagctactgaaggagatgactgtctgataatcatttcgacgaaagagttttttgaggattctttctctccaactatagaagctgctgtgcgattgcaacctcggtgcagtgagaaagtggaaagagattcagggattgtctctttcactacccgtcttctggtgccaacctcccgaattggttgccttattggtaaaggagggacaattgtgactgaaatgaggaggcttacaaaagcaaacattcgcatcctgtcaaaggataatcttcctaaaattgcgtctgaagatgatgaaatggtgcagatttccggtgaccttgatgttgctaaggatgctcttgtgcaagcacttacacggctaagagcaaatctttttgataaggagcgtgctgtctcaggattccttccggtgcttccatatcttcctgcttcagttgatggatcagatggtttgaactatgacagtagagatggtaaacgacatggacgtggtggatatgccggcggacgaggtggctatggtggcgggcgtggtggctatggctgctggcgtggtggcagtcgctatgactatggtcgtactgaacatatcggggctgtggttgatgct

SEQ ID NO: 7196 - DNA, 816 bp, Glycine max
ggtcgctatctggtgagagaggaaggaggttgtgggattaattaaaggaagaagaagaaatccttttatgtgggagtaacagcagaagcaaaacaaaacatcatagacagacacaacattatctttcaactgttgctctgcctctgcacagagaatggtgtgggaggggaaacagacatgatctatctgtgttcacagcaccactgtttccctgcctcacacccttatctagaagaacaagaatcagcacatacacccgccacaacgccatagtcatcatcacttagaagaacttcacaatttttattttcttggatatggcgagtcttgctcttgaaaccgaggatgtaatctcagatatatacctttcactgggacttaaggaatcagacaaaggagtaggagttcctcgagttttatctcttctctcttcacttcttgagagatcagttcagagaaacgaaacgctattggaggcaaagcacgtaaaagatgtagttacagtatttcacggtttaagagctcctactctgagcgttcgaaagtacattgatcgtatcttcaagtactcaggttgcagcccatcatgctttgtcgtggcacacatatatgtggacagattcattcaacacacagaaatcaaattgacttcactttatgtgcaccggcttctgataacaagcatcatgctagcagcaaagtttatagatgacgcattctacaacaatgcttactatgcaaaagttggaggagtgagcacgtctgaattaaacaggttggagatgagctttctatttggcataaattttaggcttc

SEQ ID NO: 7197 - DNA, 334 bp, Glycine max
ggttgaaagaggaaggaagaagaaatcgttttatgtgagtaacagaacaacacatcatagacagacacaacattagtatctttcaactgttgctctgcttctgcacacagagaatggtgtgggtggggaaacagagatgatctatctgtgttcacagcaccactgtttccctgcctcacccttatgtacaagaacaagaataagcacacacacccgccacaacgctatagtcatcacacttcgaagaacttcacaattttgttttctcggatatggggagtcttgctcttgaaaccgaggatgtaaatctagatttatacctttcgctggggct

SEQ ID NO: 7198 - DNA, 543 bp, Glycine max
aattcgacattatgggagagtggagtaaaaaaaaagagcagtgtaagaaattagaaagggcgaaaggcgcactttatctgaaagcaaaaaccctacctagggtcaaccgtgacgccacaatcgccttcggcatctttgcaacgggatcaggtgctcctcgtccttcacgatggcgggaactgaagccaaaaaaactgaatccaaaaaacctgccgctaagcaatccggtgcgaagaagaaggaggtgaagaaggaaactggcttaggtctcacgcatcggaaggcggagaacttcggagagtggtattccgaggtggttgttaatgcggaaatgattgagtactatgatatttccggttgctatattctcaggccttggtcaatggcaatatgggagatcatgcaagggtttttcttaatttgtgttttgctttagataaatgaatgagtggatgcgtttgtgtatagtgtacttgttttacactcaagttttactcaatgtatgggtgttagattgcaagaacattaatacagatttgcaga

SEQ ID NO: 7199 - DNA, 417 bp, Glycine max
gcacagtggagtaaaaaaaaactgtgtaagaaattagaaagggcgaacggcgcactttatctgaaagcgaaaaccctagggtcaaccgtgacgccacaatcgctcttgcgcgtttcaatcgccttcgacttctttgcaacgggatcaggtgctcgtccttcacgatggcgggaactgaagcaaaaaaaactgaatccaaaaaacctgccgctaagcaatccggtgggaagaagaaggaggtgaagaaggagactggcttaggtctcacgcatcggaaggcggagaacttcggagagtggtattccgaggttgttgttaatgccgaaatgattgaatactatgatatttccggttgctatattctgaggccttggtcaatggcaatatgggagatcatgcaagagtttttcgatccag

SEQ ID NO: 7200 - DNA, 313 bp, Glycine max
tcgcaggtacgcgattcggctcgagaaaaaaaaaagaaaagaagagcagtgtaagaaattagaaacggcgaaacgcgcactttatctgaaagcaaaaaccctacctagggtcaaccgtgacgccataatcgctcttgcgcgcttgaacgccttcaacatctttgcaacgggatcaggtgctctgatggtcggaacctgagggagatgtcaggcagagggcggggacgggggggacggggaggatggggatggggaagaggaggtggatttaatacatttgcctctcaagttccatttgatctttttcccgagg

SEQ ID NO: 7201 - DNA, 497 bp, Glycine max
ggggcacatgaaggagacacgtagacaaacacactaacacagcgaggcagacataggaaagggggggtccaggagcataaatggcattgcgtcatttacgaatcttccctcacacacttcctctaactctcactcccaaacccaaactcaataacagtaaccgtttttcgttcttcacttcctcactctctctctcttccaccacactcatggccactgctcacaaggtcctcgttcccatcgccgacggcaccgagcccatggaggccgtcatcatcatcgacgtcctccgccgctccggcgccgatgtcaccgtcgcttcctcctccgccaacctcgccgtccaagctctccacggcgtcaagatcatcgccgacgcctccgtctccgacgtcgccgccaccgcctttgacctcgtcgctctgcccggaggtttacagggtgatgagaatctgagagactgtaaagttcttgaagggtttgtgaagaagcatgtt

SEQ ID NO: 7202 - DNA, 278 bp, Glycine max
tacatcctttgtggtacaagtagagggtacatctacttggggattgttatactgagaacaagagagggtacatctcttgtggatcagttctagtggagggtacatccacttggttattcaaagagaacaagggagggtacatcccttgtggatctttggcttgtaaaggattttacaaggttgaaagaaatctcaagaaccacaggttgcatggggactgaatgtaggcacggtttgtggctgaaccagtataaatcttgagtttttcttcttcttcc

SEQ ID NO: 7203 - DNA, 809 bp, Glycine max
  unsure (1)..(809): unsure at all n locations
ggatgaagaaagttgggcctaacgtgtgaagcccagcaagtgcaggagaagaggtgtttgggtggcattttatcatgaaaagaatagagaagagagtgaggttttgtggtgtggtttagtgtcaaatggcggcgagtagaagcacttttcctctgatgaaatacttgagagtgcgcgtcgacgctcttccccgcaacactcccttaaccctcgctcccaactttttgattcgccgcttctgtgaagaggttaggggttgttttctcgacaagtctgaggtcacagatcgcgtcatttcctgcgtcaaaaacttccagaaagttgatccttcaaaggttaaccctaatgctcacttccagaatgaccttggattggatagtttagattcggtagagattgtgatggctcttgaggaagagtttgggttcgagattcctgataatgaggcagacaagatcaactccattaaacttgcagtggacttcattgcatctcatcctcaggcaaagtagtggaattcgtgtataatttttcttttgtttctcaacatctagtttagatgatccatcagacatttttgcttccatagtggaactttgttttctcatccctcagaagggtgttagctggggatgtgccagcttcatttggcggtattggcatccagaacttcacattctgtgttcctcctatattcgtgtcaataagaattgtgttaaatttccgaccccgaaattgtgaggtcttgagttgtcctcagccaaaaaaattttttttttttnnnnnnnnagcggccgctctagaggatc

SEQ ID NO: 7204 - DNA, 467 bp, Glycine max
agggattcaacaaagaaggaaattgaattttggggggtgggttaatggccaatggggggcaattaaaaccactttcccccggatgaaatgcttgagagtgcccgccgacgctcttcccccgcaacacccccttaaccctcgctcccaactttttgattcgccgcttctgtgaagaggttaggggttgttttctcgacaagtctgaggtcacagatcgcgtcatttcctgcgtcaaaaacttccagaaagttgatccttcaaaggttaaccctaatgctcacttccagaatgaccttggattggatagtttagattctgtagagattgtgatggctcttgaggaggagtttggtttctagattccttgtaatgaggctttcaagattctacttcataaaactttcatttgactttatttgtattttattcttatgctttatttttttattttattttttttatattat

SEQ ID NO: 7205 - DNA, 686 bp, Glycine max
ggagctatgtggattacgcagaaggcaaagcagatgagctttctaactaatctttagtcaatcctctaataatctccgtttcaacaccaaactcagtcttaaacagcaagcgaaagctgaatcaagccttccaagttccaccaccaccgtcccaaccctcttcttcttcttcttcttcttcttcttaatcgaaacaacctcatccatactaaggaaacaaacgacagagactgcaaccatgtacgttgatcacgcgttttcgatttcggacgaggatgtcatgatgggaacctcgtacaccgtcaacaacaaaccccccatcaaggagatcgccctcgccgtttccctcctcgtttgcggcgtcctcggcatcgtcatcggttccctcatggcctacaaccatgtcggcggcgacactgctcacgggatcttctttgcaattctgggatttatcttgttcataccgggtttctactacacgcggattgcgtattatgcttacaaaggatacaaagggttctctttctctaacataccacccgtgtagctctactagctagccatgtctcatactttaggttcacatagcttcctcttgtacagatcttccatggttgtactctatgttctttctttctggtgttgtgtttttttttttgcaaccatagaaagtgccagtatatgat

SEQ ID NO: 7206 - DNA, 499 bp, Glycine max
ggagctagatagatatagattaggcagaacgcaaacgaatgacctttctaactaatctacagtccatcctgtaataatctccgtttcaacaccaaacaccaagcgaaacctgaattaagcctcttcttcttcatcgaatcgaaacaacctcgtccgtgctaaggaaactcaacgacagagactgcaacaatgtacgtagatcacgcgttctcgatttcggacgaggatatcatgatgggaacctcgtacaccgtcaacaacaaaccccccatcaaggagattgccctcgccgtttccctcctcgtttgcggcgtcctcggcatcgtcatcggttctctcatggcctacaaccacgtcggcggcgacactgctcacgggatcttctttgcagtactgggatttatcttgttcataccgggtttctactacacgcggattgcgtattatgcttacaagggatacaaagggttctctttctcaaacataccacccgtgtagc

SEQ ID NO: 7207 - DNA, 1352 bp, Glycine max
ggagagacacgtgagatagcacagtggcagggcgtgtcaatccgagagaaagaggcaaccaacttcccattttgttatttccattttccattcccaatcgtaaaaacacacaaatcataatcagtcatagcttcggcgacttctcgatattattttttctgacagagccaccgacagagccggcggttcccgtggcggtttgagaatggccgacaagtacaacctgaagaaccccgccgtgaagcggatcctccaggaggttaaggagatgcagtccaacccttccgacgatttcatgagcctccctctcgaggaaaatatatttgagtggcaatttgcgattagagggcctcgtgatacggaatttgagggtggtatttatcatggaaggattcagttgccttcagagtatccattcaaacccccttcatttatgttgttgacacctaatggtcgtttcgagactcaaaccaagatttgcttgagcatatcaaatcatcaccctgagcattggcaaccatcatggagcgtgaggactgctttagttgcactgattgcattcatgcctaccaacccaaatggtgcattgggatcgttagactacaagaaagaagagaggcgtacactggcagttaaatctcgtgaagctcctcctaaattcgggactcctgaacgtcaaaagctgatcgatgagatacacgagtacatggtaagcaaggcacctcctgttcctcaacctagcgccagtgaggcttctgaagagaaccccagaaatgaagaggccgagacacaggtcaattcaccaaatcccgagtccttacctgcaggagagggtattacagatcaagaagttgatggaattgtggaagaacaagaagtcatccttgcaaaccctgcaggagttgaagcttcaagggaggttcaaccaagtgtttcaaggaatgaagtgctccaaaagtcatgacacatgggctcagaatcctaagccagggacgagggttcagaaacatgatgatcggttgttcacgttggcagctattggactcactattgcaattgtggtccttttgctcaaaaaattcctcaaatctacacaacatggggcacttttctcggatggatcttaagacgttttgttgctgatgttggtttctgagattaaaaacttcttggcctttatgcagtaaatagaaatatagagctcttctaaactcaaatctcaaagaagcatttttttttgttttaatttgattgtacttttattacactatttgtaattatggtaatatatatgtgctcctgcaataaattgaggaggagcatggcctttgttattaaaaaaaaaatttttt

SEQ ID NO: 7208 - DNA, 396 bp, Glycine max
agaaggacaacacaatactatgcattccctatgggcatagctttgagcagcaatcgtgatcttatcaactatggcggagaaacacaaccttaagaatccagccgtgaagcggattctccaggaggtcaaggagatgcaatcaaacccttccgatgactacatgagcctccctcttgaggaaaatatatttgaatggcaatttgcgatcagggggcctcgtgatactgaatttgaaggtggtatttatcacggacggattcagctgccttcagaatatcccttcaaacctccttcgtttatgttgctcacacctagtggccgttttgagacccaaaccaagatttgcttgagcatatcaaatcatcaccctgagcattggcaaccatcatggagcgt

SEQ ID NO: 7209 - DNA, 340 bp, Glycine max
agctgattgatgtgatacacgagtacatgctaagcggggcaccacctgttcctcaacctagtgccacagaggcttctgaagagaaccccagaaatgaagaggccgtgacacaggtcaattcaccaaatcccgagtccttacctgcaggagagggtattacagatcaagaacttgatggaattgtggaagaacaagaagtcatccttgcaaaccctgcaggagttgaagtttcaagggaggttcaaccaaagtgtttcaagggatgaagtgctccaaaaggccagacacaagggcttcggaccctcgtctctggcttaggattctgagcccttgtgtcata

SEQ ID NO: 7210 - DNA, 296 bp, Glycine max
aatcatagtcagtcattgcttcggcgacttctcgatattatttgttctgacagagccaccgacagagcatggccgacaagtacaacctgaagaaccccgccgtgaagcggatcctccaggaggttaaggagatgcagtcctacccttccgacgatttcacgagccgctcctctcgaggaaaatatatttgagtggcaatttgcgattagagggcctcgtgatacggaatttgagggtggtatttatcatggaaggatccagttgccttcagagtatccattcaaacccccttcatt

SEQ ID NO: 7211 - DNA, 378 bp, Glycine max
aggacgacagaaggggaatccaatagtaagagaactgagaatcacattgagaaagatacagagctgaagcatgggaatttcaaagctggggaagatcatgctgaaaatgtgatggatgggcctggagcggtactggtaagacttgttgacaagtttaaggcatttgccacctgccatgcattcagtcctggttgtaatggctctcacttggttgtcttggtttcccttctttctgtttgatacggattggatggggagagaagtttatcatggtgatccaaaaggggacacttctgaagtagatctttatgatcaaggagttagagaaggtgcatttggtttgctattgaattctgttgtccttggaattagctcttt

SEQ ID NO: 7212 - DNA, 469 bp, Glycine max
gcggagacatagttaggttagagcggtgaataggtgcggttagtttgggtgtagaaaagcgagtgagagacatacgatacatcggcgcagtgagatggaagaagaaggtgttccggtggaaggttcttcaggtacggtgagtcgggcacggaagcttctgtttcggcgaatgctggtggggatcaaagacggaaggttcttcttgggctccttctactgcatcgacaagcaaggcaacatcattctccaggacgccgtcgaatatcgcagcacgcgccaatcttcgccttctcccatggaacagaggtgcctcggccttattctcattccttcctcttgccgcacctcttgtcacgtcgattgcgctatccacgaacagttatctctcctttcgctgaatcaaacaccaccgcactagccagggttttactgtgccccttcaattgcttatatatgttactgaaaatta

SEQ ID NO: 7213 - DNA, 528 bp, Glycine max
  unsure (1)..(528): unsure at all n locations
ctggtggttttccgctcatctacctcacccacacttctctctctctctcataaattcaatgctctcatcgttttccctcataaaccgctttctcgtgttgtaacacactcatcactcatcatattcattcacacttcccactttccaatatggaatgctgcataatcgccaggctcaagacccaacctttatggttcgcgctgctcttcgttgtcggattgttaacgattctcaaattggctttcgttgttttcagatgggtctacgtcaatttcctccgaccaccgaagaatctcaaaaagtacggatcttgggcagtggttactggacccactgacggcattggaaagagcttcgctttcgagctcgctcgcaagggcctgaacctcgtccttgtcggaaggaaccccgacaagctcaaagacgtgtcggattcgatcgcggcgaagttcagaagaaccgaggttaagaccgtcgtggttgacttctccggggatctggacganggcgtgaagaagattagcgaag

SEQ ID NO: 7214 - DNA, 263 bp, Glycine max
tctcttctcattttcctcattaacagcttcatagtctcgtatcacagtagtagtatctatcccatcattcccacttcccaatatgggatgctgcataatctccaggctcaagacccaacccatatggttcgcgcttctctttattgtgggattgttaacgattctcaaattggcattcgttgtgctcagatgggtctacgtcaatttcctcagaccaccgaggaatctcataaagtacggatcttgggccgtggttactggac

SEQ ID NO: 7215 - DNA, 423 bp, Glycine max
aagaagacacagtagtgttgtatccagccccaggcataggccacattgtatccatggttgagcttgctaagcttctccaattacatgctcattcaatcacaattcttctcaccacgggtctccttgaccacccctctatcgacacctacatacaccgaatctccatctctcacccttccatcttcttccaccgcctcccccacacatcactctccaccaccaccaccgtgagcatggccgccaaagccttcaacttcatcaacataaacacccccaacgtagccaccaccctcaccccaatccccaaatccaccaatatcaaagccttcaaaatcgatctcttctgcacctccgcaatgggaaccggcttcctcatttgggaatccccgtctaccacttcttcacctccggcgccgccgttct

SEQ ID NO: 7216 - DNA, 483 bp, Glycine max
agaagtttaacaacaccctgcgggttcttctacggtggtagttctagaacaaactaagcgacgactgacgtggtggattgtggaaacgcaaagagcaattgttccgagaatgagcaattaatgaatgaatgatcaatgtctcatcaggagcaagcctttgtgtctcttctctctcagctcgccctttctttcgacggtgccgttttgggcttggccttggcctacgccgccgtccgcaccctcttcaaattcaccgccacctctgccgccctccgcaagctccaccgcgccccttctgtctccgtctccgacctccgatccctcctcgccgagataccctccgacgccgacggaaactccgacggtggcaacatcgtaattgtccgcggcactgtcgatgccaagtccgccgtcgaaggcgacctggaaaaccctgagacctggtgtcttggtttctcgcgagtccggcgataaaggcgttat

SEQ ID NO: 7217 - DNA, 392 bp, Glycine max
ggatcagtgtttgaatgaatcattgatcaatctaatgtctcatcaggagcaagccgtgttgtcccttctctccaagctcgccctttccttcgacggtgccgttttgggcgttgccttggccttcgccgccgtccgcaccctcttcaaattcaccgccacctccgcctccctccgcaagctccgccgcgcaccctccatctccgtctccgacctccgctccctcctcgccgagccaccctccgatgccgacgccggcgaaatcgtaattatccgtggcactgtcgacgccaagtccgccgtcgacggcacctgcaaaactttgaaacccggcgtactggtttctcgccagtccggcgataaaggtgtcattcttcaaagaactcacacgtgta

SEQ ID NO: 7218 - DNA, 644 bp, Glycine max
acgacagaaggacagaaagggagggtacaatacaaacacaaagtcagaaacacaaatctgggtatagtggagtagtagggtttttgcgtttgagagagaagaagcatgagcaggagtttgggaattccggtgaagctgctccacgaggcttcggggcacgtggtgacggtggagctcaagagcggagaactctacagaggcagcatgatcgagtgcgaggacaactggaactgccaactcgagagcatcacctacactgccaaggatggcaaaacatcgcaacttgagcatgtgtttattcgaggcagcaaagtcaggtttatggtcatccctgacatgctgaagaatgctcctatgtttaagcgtttggatgcaagaatcaagggtaagggtgcatcacttggtgttggtaggggcagagcagttgcaatgcgagcaaaggctcaagctgctgggcgtggagctgcgcctggaaggggtgtaccaccagtgcggaggtgatcaccatttatatagtctggattctccttgcctgttggacatttttaaattcttttgtaaaagttatgtgagatagacatccaaacagaattgcgtatcaagacttattacagattacttttatgcaaatacttgatccctct

SEQ ID NO: 7219 - DNA, 447 bp, Glycine max
aaaacatcgcaacttgagcatgtttttattcgaggaagcaaagtcaggtttatggtcatcccagacatgctgaagaatgcgcctatgtttaagcgtttggatgcaagaatcaagggtgcatcacttggtgttggtaggggcagagcagttgcaatgcgagcaaaggctcaagctgctgggcgtggagctgcacctggaaggggtgtaccaccagttgcggaggtgatcaccattcatataatttgtattctccctgtctgttggacatgtttatgtgacaaagaaattcgaacagaaactgagtaaagacattacagattactctttatggatagtacttgatcccaaatttgttctcatcatctctagtattttgatctgcactgtgtactacttggctaggaggattttgtagaaggaatatttgttaaaatggtacaagatagt

SEQ ID NO: 7220 - DNA, 534 bp, Glycine max
cagctcgaggctttcgataccaggtttgcttcactctgcctttcctttcccttcatagcccaaaccctaaacgccgttggttattcccgccggcaaccatttcagtggcttcttccgccgtcgccgctcattgccagtgctccattttctgatcaggaagaatgaggcctacaatgatgcttagggctctaaccaagcagtttcttggaattgtaggcgatgcagcaaacactgttgctaagaagccccccctgcctcctcctctggtgtcacgcaaacctgctttcattgatgcattcttgtacaagatgaagaagaacccaaatcttttgtcgaacaagaccatttggtcacggagatccactatcttgccagaatttgttgataccactgtcaagatttacaatgggaaaaccactattcgttgtaggatcactgaagggaaaagtgggtcataagtttggagagtttgctctcaccaggaaacgcaagaccagagaacaagccaatgccaaaaatgttaaacaacttaag

SEQ ID NO: 7221 - DNA, 578 bp, Glycine max
ctctgtctctctctctttcactctgcgcattcttttcgccgatccaatctgagtgagagtgtttattggcatggattcagcatttgcgagaacgagaaagatccatgttcttcttagcttcactcctcttctacatattcgcagtcaccaccaccaccaccttcgcatccatccacatctacgaccatgaacctttcatagaactcggcaattcctacctcctcgccggcggcagcgaaggcatcgtcgcttcccaagccaattccatccacgacgatggccgttcctacattcgattcgagaatataaccttcaggagaaccaaagcttcagctaaggcacgcggttctgtgccattacacatcataatttttgaggctgctgatcgtaatgatataggtggttctgcttatggtggacaacgggaaatctgttgcagtcctgatttagctaagatgggagtttgtaagcaaggagagattattaggagaccttctgcaacggacattaattggccagtcattttagacgtacaattcaaaggcagatctaaaactgcaagtctagattctcagaaa

SEQ ID NO: 7222 - DNA, 737 bp, Glycine max
tactcgagccgaatcggctcgagacgcgaccgcctacgccctgcggagagagaaattgagtttctgagataaccacttttctctttgattcatcaatggcaaccgcgaggaccgtgaaggatgtttcgcctcacgatttcgtgaaggcttacgcctcccatctcaagcgttccggcaagatggagcttcctgagtggactgatattgtaaaaacagcaaaatttaaggaattggctccatatgatcctgactggtattatgttagggctgcctcaatggcaagaaagatttatttgagaggcggtcttggtgttggggctttccagaggatctatggtggaagcaagagaaatggaagccgtcccccacatttctgcaagagcagtggggctattgcaagacacattctgcaacaattgcaaaacatgagcattgttgagattgatacaaaaggaggtaggaaaatcacatctagtggtcgaagggatcttgatcaagttgctgggcgaattgtggttgctgcctgatcgaacatctttttgagaactgatgatgcatattctaggatttatgtttgcttatcagtagatggcatcaaggaaaaattaagtattgtttgctgagaatattacaatttgtatttttgttaaatgtttaacctttattctagtttggagttttggtcattacggttttgatttaagttctcaatgcattatatcttctccaatccccag

SEQ ID NO: 7223 - DNA, 604 bp, Glycine max
gaagaaactgtcgtgaggacaaaagaagaagtatcactcatataatactctgtatcatttcatttcgataatcatccatagttactgaagaaaatggcaaccatctctgctgctatcacaaccccatcgatctcccgcgcaactcttgtgcaaaagcgggtctcatctcccgttcttggtttgccagcaatgggtaaggtgggaagagtgagttgctccatggaggaaaaaccttattctgtgaaggaaagcagctctagcatgttggggatgggggcatctctgatggcagctgccagcgctgcagccatgtcaggcccagccatggccttggtagatgagagactgagcactgaaggaaccggacttccctttggcctcagcaacaatcttcttggttggatccttttcggcgtctttggtcttatctggactctctattttgtctacacttccactcttgaagaggatgaagagtcaggactgtccctttaaatatcctgggttgtagggtgggtgatgatgaatgatggattgtataaattgcaatgagtccccctcatcttctgtgttgttaaaacaaaaagttctgtgcttaaaaaaa

SEQ ID NO: 7224 - DNA, 518 bp, Glycine max
cggctcgagtacggcacgacagagggggatgatattagttttaacgttaagcttaggaagaaatctgtgtaagtagcctagtcatactctgtatcatttcatttcgataatcatccatagttactgaagaaaatggcaaccatctccgctgctatcacaaccccatcgatcacccgcgcatgtctagtgcaaagacgttctcttgggttctcatctcccgttcttggtttgcagttatcttctctttctaatttgccattatgaaataggacaatcatctttctggaacacaagtgaaatatatataagctctttcaatgcctgatatttcttcaacatgtgatgcaataagacgattaaaaaaaagaaaagaaagggataaaggaatgttgagagcgattatatagtatgagaattttaagatacgtgtttggttgatggatgatgttggttgatcaatcaaccattttcttaaaagagtttaacgggtatctgctatcaatctaattacattattt

SEQ ID NO: 7225 - DNA, 461 bp, Glycine max
acagaacgagatgatattatgttaacgttaagcttaggaagaaatctgtgtaagtagcctagtcatactctgtatcatttcatttcgataatcatccatagttactgaagaaaatggcaaccatctccgctgctatcacaaccgcatcgatcacccgcgcatgtctagtgcaaaaacgttctcttgggttctcatctcccgttcttggtttgccagcaatgggtaaggtgggaagagtgagttgctccatggaggaaaagccttcttctgtgaaggaaagcagctcaagcatgttggggatgggggcatctttgatggcagcggccagcgccgcagccatgtcaggcccagccatggccttggtggatgagagacttagcactgaaggaaccgggctacccttcggcctcagcaacaaccttatcagttggatcctgttcagcgtcttcggactcatctgg

SEQ ID NO: 7226 - DNA, 448 bp, Glycine max
aattgtcagcgtcacgaattcaagacgaaaatgaatatttagtttttttttttttcaaaggtggtattgaaatgtgggtaaggtagctccatttttagtgcagggctttcattacatcgatgccatggataccctctcaaggattagattcccccccacttgttacagccttcagttaccaaaaatctctgcattatctcgtttcccaaatgctttttccaaaaccactcaccaggtttcagtgctaagagtaagagcttctcgtccttcagtgagcaatgcagacgaggatgtcttgcaaatattttttaaggcgagagaattaaatggggattttatatcaagagcttccgatttactatggagaagagatttcagaagttctggtgattatgatattagcgagctcaacaacaacacttctcaacatactgagcagatcatagag

SEQ ID NO: 7227 - DNA, 431 bp, Glycine max
agctaccatacattatactgtggtgttatcactttcatattgattatccaaattttgtcctctagacaaagactggtgctccttgccgaagtgagcgattggcaaagtataatcagcttcttcggattgaagaggaacttggaagtgtgcaatatgctggtgaaactttcagatcaccttagagtgaactcaattgatccaaaaaatcttattctggaaatgattctgcatcataatcattgtcatcattgatttaccaaggaaaatcctgatttttgatatagttgcttgccttctggggttttcagatctacttgatgagttagtcttaagatatgtgttttgaactgaaataattactatgtgattggatgataacttggggcagtaacatggtttcgtcggtgtaactttctttctttttttgaaag

SEQ ID NO: 7228 - DNA, 551 bp, Glycine max
ggaacaacattgtatgaacagagaacagttgagttgaggctaatcaatgctatatagagcgcaatcatagtccctctttcttctcttccgccatcgttttctttgaaacgcacagcttcaatcaccgaccacaccacccatcaacgacatgcttcctctttcccttctcaagactgcccaaggccaccctatgttggtggaactgaaaaatggggagacatataacgggcatttggttaattgcgacacatggatgaacatccatctgcgagaagtcatttgtacatctaaagacggagatagattttggaggatgcctgaatgctacatacgaggcaatacaatcaagtaccttcgagtacctgatgaggttattgataaagttcaagaagaaaccaagagccgtgcagatcgcaaaccacctggtgttgggcgtggaaggggaagaggcagagaggatggtcctggtgggcgcccagcaaaaggaattgggcgtggtcttgatgatggtggtgccaagggagctggcagaggccgaggcaggggtggtc

SEQ ID NO: 7229 - DNA, 422 bp, Glycine max
tactcgagccgattcggctcgaggtcgcctaagattcaaaaagaaagttggaacacaagagaggtctgattaatactagttttctgtaaaatcgcaaagaaacacacagttagcaccgtcaacctctgcaaccaccgattccaaccatgcttcccctttcccttctcaagactgcccaaggccaccccatgctggtggaactgaaaaatggggagacttataacgggcacttggttaattgtgatacatggatgaacatccatctccgagaagtcatttgtacctctaaagatggagatagattttggcgtatgcctgagtgctacattcgtggcaataccattaagtaccttcgggttcctgatgaggttattgacaaagtccaggaagaaacaaagagccgtactgatcgcaaaccccct

SEQ ID NO: 7230 - DNA, 314 bp, Glycine max
atcgttttctttgaaacgcacagcttcaatcaccgaccacaccacccatcaacgacatgcttcctctttcccttctcaagactgcccagggccaccctatggcaactcacgggtcattctcttctcttttatttctaacttattattattatgatggtgatggtgatgttgatgatgatgtaacagttggtggaactgacaaatggggagacatataacgggcatttggttaattgcgacacatggatgaacatccatctgcgagaagtcatttgttcatctaaagtaatgttgcttttacgatcccttgcttg

SEQ ID NO: 7231 - DNA, 252 bp, Glycine max
ctctaagttcgttcctttcagcaatggatacaaagatctcgtcaattcattccttttcctcatatatattgtttttaacctaaaaccttaaaacccaataacagcttcccctttcccttctcaagactgcccaaggccaccccatgctggtggaactgaaaaatggggagacttataacgggcacttggttaattgtgatacatggatgaacatccatctccgagaagtcatttgtacctctaaagatggag

SEQ ID NO: 7232 - DNA, 485 bp, Glycine max
acgcgtcaacgagaaaacgacagaaggggactctctgaagtaaccaacgcaacccatcactctttctttcttcctcttccccccacataccaaacgcaaccacatcactctttctttcaaatctagggtttcctccttctgcaaccatcaatgtcggcaatcgcggctccccaacacagatcctcgaagacagagtcctacgtggacaataagcgcaaggaggatatccgccatgccaacatcgtggccgcacgctcagtcgccaacgcggttcgcaccagtctgggccctaagggcatggacaagatgatctccacctcctccgacgaggtcatcatcaccaacgacggcgccaccatcctcaacaagatgcaggtcctccagcccgccgccaagatgctcgtcgagctctccaagtcccaggactccgccgccggcgacggcaccaccaccgtcgtcgtcatcgctggcgccctcctcgagca

SEQ ID NO: 7233 - DNA, 455 bp, Glycine max
gaaaaaccccactctctgaagtaaccaacgcaacccatcactctttctttcttcctcttccccccacatactattatcatcaaatctagggtttcctctgcgtctagggtttcttccttctgcaaccatcaatggcggcaatcacagctccccagcaccgatcctcgaagacggagtcctacgttgacaacaagcgcaaggatgacatccgccacgccaacatcgtggccgcacgctccgtcgccaacgcggttcgcaccagtctgggccccaagggcatggacaagatgatctccacctcctcctcctttcccacggcatccaccccaccgtcgtctccgacgccctccacaaggctgccgtcaaggccgtcgacgttctcaccgccatggccgtccgtcgtcgaactctccgaccgcgactccctcgtgaagtccggcagcacttccctcaaa

SEQ ID NO: 7234 - DNA, 700 bp, Glycine max
gtttaaaaagccctattggagagaggagagggtggtggtgtgcgtgagagtgaagcgagaagcagagaagagagatggatccagacgcgttggcaaaggcattcgtggagcactactacagcaccttcgacaccaacaggaacggcttagcgaatctctaccaggagggttccatgctcactttcgaagggcagaagatccaaggcgcttccaacatcgttgccaagctcacctccctcccttttcagcagtgccaccactcaatctccaccgtcgactgccagccctccggcgtcaacgccggcatgctcgtcttcgtcagcggaaaccttcagctcgccggcgaacagcacactctcaagttcagccagatgttccatttgataccaacacctcagggaagctattatgtgttgaatgacatattccgtttaaactatgcatgaagatgtcatatgaccggaaaggccatagaagaagtttgcctatagcaagctgtttcagattgcacatttgaaattgaaattgggttctttttggttggttgtgttgaacgcttaattgtgcctgttgtgtttagaattttctgttgtgactggttaaaaaccctccttcaaggataaattgttgaaagattactggatattggagattgaaaacttgaatttatttgtgatccgcgatactgaaaaaaaaaaaa

SEQ ID NO: 7235 - DNA, 550 bp, Glycine max
gacgtgtagtatataaaggaggggagaagagagagagaagcgagaagcgagaagcgacatggatccagacgcgttggcaaaggcattcgtggagcactactactccaccttcgacaccaaccgcaacaatctcgccaatctctaccaggaaggttccatgctctctttcgagggtcagaagatccagggctcccacaacatcgtcgccaaactcacctcccttcccttccaacagtgccagcactccatcaccaccgtcgattctcagccctcaggcgtcaacgccgccatgctcgtcttcgtcagcggcaacctccagctcgccggcgaacaacacgccctcaagttcagccaaatgttccatttgataccaacaccacagggaagctattatgtgttgaatgacatattccggttgaactatgcgtgaaagatagacctctgagtatgttgacatttgcctacagctgttttgcttcagacatttgcatttgagaattaacgagttcattttggttcgtgttgaacgcataattgtgcctcttctgtt

SEQ ID NO: 7236 - DNA, 764 bp, Glycine max
gatacatgcatggtaaaacactggtgaaacatgtgattttcaggttcttgtgtatagaagaatatctgtttggagaaacagttccttacttccttaactagatattagtctctaattttttggctatcccgggttcaattacacctgaaacaaacaacaacaacaacaacagaaataaagcacaatggactaccttctacttcttccactaataatcaccatagtatggataaacattcatgtattcatctctagcttcaaaccactcaaatcctctaaaaatcccccgggtcctcgcccttttccaatcataggaaacatcttggagcttggcaaccagcctcaccaagcacttgccaagctttctcaaatttatggtcctataatgagtctcaagcttggtaagactaccaccattgtcatttcctctccacaagttgccaaagaagtgctacaaaaacatgatcaaatttttgctaataggacagtccctgatactcttcgagcacttgaccatcacatactttcggttgcatggatgccacctttaccacaatggagggcccttaggcgagcttgtgccaccaaagtgttctcttctcagcagctcaatttcacacaagttcttcgccagaggaagatgcaagatttgatggattatgtgcaggaacgatgcgagagaggtgaagctatggatattggtgaggcttcctttacaactgttcttaattccatatcaaacactttcttctcaatggatttgg

SEQ ID NO: 7237 - DNA, 935 bp, Glycine max
ggccgttgtagttgtagctgtagaagggtgagagaagatgtttcctcaggagaatcatagtaacggctatcagcatcagcagggttacagtcacagagagcgagtccgtcggggcacttgcaggtcacgtgcctccactttgcctcacactctcactccgacttagggtttacgaccaacctcgtcctccttgcactgatttcgacttgcctatttccattcctacgctcaccttggcatccaccaagagatgatcaaggatcgtgtgcgtactgatacttatagggatgcaatcatgcagcatcagagtttcattgcaggcaaagttgtcgttgatgttggatgccggacaggaatccctttctatattttgtgctcaggctggtgcaaaacgggtgtatgcaattgatgccagtgacattgccctgcaggcaaatgaagttgtgaaagcaaataacttgtctgatgttgttgttgtattgcatgggcgagttgaggatgttgaaattaatgaagaagtggatgttataatttccgaatggatgggctatatgcttctgtatgagagcatgcttggaagtgttattaatgctagagatcgttggctcaaacctggtggtcttattcttccttcaagttcaacgttgtacatggctcctgtcactcatacggacagatacagtgacagtgttgacttctggcgcaatgtttatggaattgatatgtctgccatggtatcactggctaaacaatgcgcatttgaagaaccttccgtggagactataactggtgaaaatgtcttgacatggccacatgtggtaaaatatattgatagttattctgttaccatccaagagttagaatctgtaacagccaagtttaagttcaattccatgatgcgagcaccactgcatggttttgcattttggtttgac

SEQ ID NO: 7238 - DNA, 636 bp, Glycine max
tccgctccgaggttgtaactcttcttttctatcccacctttcttcttagatttcattctcttccctttcaattcgattcaccttttcacttttggttccgaatctctatcggattccgtctctgcatgcttattttcatcaatctcatcaattcccgattcaacaatttatcgagctagaagaaatcaacgatgcctcgctatgatgataaatatggtaatacccgcctctatgttggacgcttgtcttcgaggactcgttcccgtgacctggagcgtgtcttcagcagatatggaaggtaattttccctttatgattcatcattatctttcaaattatgtatagaacagtctttatccttcaaattatgcaatctcatccttttaaaaaaaagttttttacttgcaaggtgttaaattggggctgtggcttcgtcacaatctttaatgttgtgggaaatcttgtaaaaatatggcgatacttctgcaattgcggaagtcttggtctgtgactgttttaaatcatttacttgtaaatgacgttggttatttagtctttttcatgattattatgattgcgtgtgtgtctatttggatttggatgaatgtcttataatttattagtacatcatttctt

SEQ ID NO: 7239 - DNA, 1100 bp, Glycine max
gaagattgtaagataccgatccacttgaaagggttaggtttcgggagaaaaagcaatccactcagagagctagaagaattcaacgatgcctcgctatgatgataaatacggcaatacccgcctctatgtgggacacttgtcttcgaggactcgttcccgtgatctggagcgtgccttcagcagatatggaagagttcgaggtgtggatatgaagaatgatttcgcctttgttgattttagtgatcctcgagatgctgatgatgcaagatataacttggatggtcgggatgttgaaggaagtcgtattattgtggaatttgccaaagggggtcctcgtgggtcccgggaaatatttggggcgaggtcctcctcctggctctggacgctgctttaattgtggccttgatggtcattgggcacgggattgcaaagctggggattggaagaataagtgttaccgctgtggggagagaggacatatagaaaggaactgcaagaacagccccaaaaaattgagcacaaggcgaggacggagttattcacggtcaccagtcaggtcacattcacctcgtcgtggcagaagccgtgatcgcagttacagccgagatcgcagctacagtcgatcacgatcccctgtcagaagagaagaaagccccgttcgtgaagataggtcacaaagccctcaacacaaaaatagtcctcagccctccaagacaaggaagcatagtccatcacctgaccgtagcccacagagaagaggtgacacatctcccgacaatgataggttgagcagaagccctgcaagggaccccgaagataggggctatgacagccctaaagttaatggtcgtagtggcagccctagccgtagccccagggatgatgacaggagccccattgacgatgacgacaaccaccgccactcgccaagaggcagcgagtcaccttaagtagttctccgtggaagaactctgtatgtggcctataatttatatctgctttggttatctgatgcactttgctgtgaagatcggggcaatttttagcttaaaagagaaactttatgaattgtttatgggtatgaagaaacggttttatgt

SEQ ID NO: 7240 - DNA, 715 bp, Glycine max
  unsure (1)..(715): unsure at all n locations
cacgcgggcggncggactcattgngggagaaccaagcatcggttctacttccaggaccaccgctacatcccgtcgagagctgttgttttatgaaaacgaaggccagctttttaaaatagatcacacaattgtgcgccctccctgataaggaagcatagtgcatcacctgaccaaagcagcccacggaagagaggtgacacagctcctggcaatgataggttggccactctgcaagatgggtctgactacagtgatggtcctagagggaaaagtagaagccctgctagccctgcaagggaccgtgatgagggtggctatgatagccctaaagctagtgggcgtagccacagccccagcaggagccctagggaagatgacaggagccccattgatgaagatgatgacaacaaccgtcgctcagggtcaccttgaaaaaagcactttctgataaaatgagatcaggatgtgacccaatttgtatctgctttgtttataaaatgcactccaggttaattatgtgacaattatttatgaaaacattttatatatgctatttttcagattcttgcggtcaagcaacatgtgtggcttacctagaatatgaagtgcatggatttgtttcaatgttttggcataatttaaaccaatatgaattattgtgagaaatttacatttgacatgttttgnnnnnnnnnnnnnnnnnnnnnnnnnnnnn

SEQ ID NO: 7241 - DNA, 409 bp, Glycine max
tgctcgagccgaatcggctcgagctttgaaagggttcacgaagaaacaccaatccgctccgagttgtatgttttgcagagctagaagaaatcaacgatgcctcgctatgatgataaatatggtaatacccgcctctatgttggacgcttgtcttcgaggactcgttcccgtgacctggagcgtgtcttcagcagatatggaagagttcgaggcgtagatatgaagaatgatttcgcctttgttgaatttagtgatcctcgagatgctgatgatgctagatacaacctggatggacgtgatgttgcaggaagtcgtattatcgtggaatttgacaacgggggtcctcgaggcttccgggaccaggaatatatgggtcgggagacacctactggatctgggcgatgcttta

SEQ ID NO: 7242 - DNA, 422 bp, Glycine max
cgatccacttcgaaagggttaggtttacgaagaaacaccattcctctccgagaagaaatcaacgatgcctcgctatgatgataaatatggtaatacccgcctctatgttggacgcttgtcttcgaggactcgttcccgtgacctggagcgtgtcttcagcagatatggaaggtttctgaggttttctctaaacctggaggtctttgttgggaggttggccttggtggaatttgtggaaattcctgtcgagtattgactttggcgattctttctgtaatgctattgcgtgtttctttatggactcggcaacactcccaaactggtgtttagttcgcctttgaggggtgatgtatcatacagttccagtagttaagtaatgacggccttattgtttctggaaaccatttccgcagagttcgagg

SEQ ID NO: 7243 - DNA, 496 bp, Glycine max
gtttcgggagaaaaagcaatccactcagaggacccttttaattgttcaccgggttgaaggccatccactcagcgagctagaagaattcaacgatgcgctcgctgtgatgataaatacggcaatacccgcctctatgtggggcacttgtcttcgaggactcgttcccgggatctggagcgtgccttcagcagatatggaagagttcggggtgtggatatgaagaatgatttcgcctttgttgtttgttgtcaccctttctttatctttgtctatttatttatttatttcctaggacttcaatttcttcttatttatttgctaaaatgtggcttctagtatctgcttggaggaattcagttgtagatgatggtatgatttctgtgttactttcttggcttgttccttacaacctttgggcaggattttagtgatcctcgagatgctgatgatgcaagataataactggatggtcgggatgttgatggaagtcgtatta

SEQ ID NO: 7244 - DNA, 460 bp, Glycine max
ctcgagccggtctttatttatttctttttgacttcaatttctcctcatgcctttgctctaagttggcttttagtatctgcttggaggaattcagtagtaaatgatgataagatttggtgtcactttattggcttgttcctgacattttgaacaggaatttagcgatcctcgggatgctgatgatgctagatatagcttggatggtcgtgatgttgaaggaagtcgtgtcactgtggaatttgccaaggggggtcctcgtggttcctgggaatcctcaggtcagggtcagggtccacctactggacctggacgatgttttgactgtggcttgatggtcattgggcccgagattgcaaaactggggatgggaagaacaagtgtttccttagtggggaaagaggtcatatagaaaagaactgtaagaacagtcccaaaaagttgagacatggatgaagtcttt

SEQ ID NO: 7245 - DNA, 1302 bp, Glycine max
tgtaaccctatatcctctcttttctgttacgaataaacaacacttcttaaccgtgtgatctaagccatcccatatccttttgttttgttctcttcagtctgtttgcgagtgcgagtgaaaaaaaatgggtgggggaggagctatgaggtcggcggcgaagatagccggaattggcgtgtccaaggcggcgctccggccttcggcgctccctacggagcagacggtccgcaacgcgtcgcgaccaacggcggtctccggagtgtcgtcgcagtcggcgaaatccgcggaggtggcgccgctgcacacggcagctgcctgggacgattgggacttcgccgaggatggcgaattggtcgtgccgaggatggtgttcggttctgtccccactctcgatgaagctaaggaagccaccgcagagttgaaggacgctattgatcaagtatatctttgtcctgagacttctcaatattcatctcccggtggtcaagtctctgctttgtctcccactctctatgggccagtgaacagatcttgtgtcattgatgctatttcagatcctacggccccaaagcatgccattcaggcttttcatttgcttagcactagtcgtgaggcccaggctgttgtggcttcacttgcttgtgacccaaatgtatggaatgcagtcatggaaaattctgctgtcagtagtttcttccaatcacaacagtcagtggctggttttggagcagcagaaaattctgaggaagtggataagttatcaagctgtgcttctgaaacagtcgaatcccctgagaaattggaagggtcggctgagtctcacccggggaacatgtttgacgatttcatgggtcttctgcagaatgtgaagcttacagttattgaattggtaagtaggttgtctggtttccttcagaacatattcccaacacctgatgctatgagagagaaaatgtctttcgatgctgatgggaacactaaagcaagtttcatggatagtaaaattagcatgggaggaaccttcataggtttggcagtgctggtgataatggtgatcgtgacaaagagagcttagactcttgcaagcaaaactacaatttgtcgacttttctgatagttttgaaaccatgttattaaatatgaactgtttttaaattgagatgtgtcgcacttggtgatttatttccattaaaataaaatttgaaagtcttattggatagttatttatttatttttaactttttgtttatttttatcatctttgtttgtcttttgggtcctgtgattggatagataaagtta

SEQ ID NO: 7246 - DNA, 471 bp, Glycine max
ctgtgtttgtgagtgggttgatatctgacaaaaaaatgggcggaggaggagcaatgaggtcggcggcggcgaagatcgccggcatcggcatttccaaggcggcgctccgtccttcggcgctcccgacggagcaggcggtccacaacgcgtcgagaccgacatcggttgtcggagtgaagggggcgaaatccactgaggttgcgtcgcttcacgcggcagcgccgtgggacgactgggactcggccgacgacggcgatttggtcgcgccgaggatggtgttcggctctgtccccactttcgctgaagctaaggaagccaccgcagaattgaaggatgctatcgatcaagtatatccttctcctgagtcctctcaatattcatctcgtggtggtcaagtctctgctttgtctcctactggtggtcaagtctctgctttgtctcctactctttatgagccagtgaacagatctt

SEQ ID NO: 7247 - DNA, 488 bp, Glycine max
atttccttttgttttgttctcttccgtctgtgcgcgagtgcgagtgaaaaaaatgggtgggggaggagctatgaggtccgcggcgaagatagccggaattggcgtgtccaaggcggcgctccggccttcggcgctccctacggagcagacggtccgcaacgcgtcgcgaccaacggcggtcaccggagtgtcgtcgcagtcggcgaaatccgcggaggtgctccctacggagcagacggtccgcaacgcgtcgcgaccaacggcggtctccggagtgtcgtcgcagtcggcgaaatccgcggaggtggcgccgctgcacacggcagctgcctgggacgattgggacttcgccgacgacggcgaattggtcgtgccgaggatggtgttcggttctgtccccactctcgatgaagctaaggaagccaccgcagagttgaaggacgctattgatcaagtatatctttgtcatgagtcttctcaatattcat

SEQ ID NO: 7248 - DNA, 391 bp, Glycine max
gacgtataatactactagtttgtgacccatttctggacaaagacacatctttgaatttcattggattcaattcatttgggtatcaatcaagattgaattgttgttgtcgtcgtcttggggatgggatcgtgcctgtagatgacgggggcacgggtgtgacgttgctgaagcagggacaggaccttgttattgtgaatgtagatgactccagagctgtattagctgcccaagatcgtagcaatggttctcttattgctgtccagttgagcactgaccacaagccacatcttccaagggaagcagagaggataaggatttgtaaaggaagggtcttcgccattaagaacgaaccagggattgctcgagtatggctccccaacattgattcccc

SEQ ID NO: 7249 - DNA, 565 bp, Glycine max
  unsure (1)..(565): unsure at all n locations
gactcgcagattcaaacgtttccgaggtgaggctgaggcatctctctctgctttctagaatgggagctgggcgtggagtctccatctcacttgatggggtgagggacaagaaccttatgcagctcaaaaagctcaatctcgctcttttccccgttcgttacaatgacaaatactatgtcgatgcactcgcttccggtgaatttaccaaactagcttactatagtgatatttgtgttggagcaattgcatgccggctggagaagaaggaaggtggggggcaagttcgggtttacatcatgacgttaggtgttttggcaccttaccgtggacttggtattggaacaaagttattgaatcatgttcttgatctttgctccaagcaaaacatttctgaggtttacttgcatgtgcagacaaacaatgaagatgccataaacttctacaagaaatttgggtttgaaattacagaaacaatccagaactattatacgaacattacaccgncagactgctatgttctcacgaggtatacggcaagcacaacggaaaaataacatttcagcca

SEQ ID NO: 7250 - DNA, 477 bp, Glycine max
tcacggctgcgagacgacagaagggggaacaagaaagaaaagaaaagaagaggaaaaggagagtggagaggaagaaaaggattgaagttgttgctgtgagaaagagaaagagtgaaatcggagtttgggaaggaattgcaatcaatggatgtgataaagacgcagcaaatctcatctcgaccaatcgagaaggtggtggttcaccctctcgtgcttctcagcatcgtcgacaactacaacagagtcgccaaagacactcgcaagcgcgtcgtcggcgtcttgctcggctcctccttcaaaggcaccgtcgacgtcaccaacagctacgccgtgccctttgaagaagatgacaaggatcctagcatctggtttcttgaccacaattaccatgaatctatgttttccatgtttaaaagaataaatgcaaaggagcatgttgtggggtggtatagcactggtccaaagctgcgcgaaaat

SEQ ID NO: 7251 - DNA, 445 bp, Glycine max
ggatataatgaaagtgaagtgagttttgtgcggggagcgagaagcgagaagggagtgaggtttggagaagagagagatgggaaaggagaagaagaggtatcttctgaaaacggaaccgtcggagtggtcgtgggaggaccaggcagcaaacggaggcataagcaaatgggatggggtgaagaacaagcaggcccagaaatacctcaagtccatgtccatcaacgacctctgcttcttctaccactccggccccaaggcccgccgtatcgtcggcgttgtttccgtcgtccgcgagtggtacggcgatgctgtcgacgtcaaggctgtcggggagatgaggaggcccgtcgacttaaaggagatgaaacatttcaaggatttcgctctcttgaggcaacctaggctctctgttgtccctgttcccgatcacatttggaaccaaatc

SEQ ID NO: 7252 - DNA, 526 bp, Glycine max
  unsure (1)..(526): unsure at all n locations
gaggcccggttgggtcatactgagtcaggcacatcaaaagcaaaagtccaaacgctcccatctcgccaccgtgaacaccccgacacaaacacactccaagcgcacgttagcagtctccgccgtcttcgccaccgtgccatcgccgtcgatggagtctctcttcggctcgatcaacgttcgcgacctcctctcggcgcaggacctctcggaccctaactcccctctctcagcgccggatctccgtctcctgatccagcgcctggagtcgcagtccttccagatccgttctcaggtgcagtcctaccttgtctcgcaccacgaagacttcgcgcgcctcttctctctttgtaacgacaccgtttcgcacacgcgcgaggtctccgatgatgtttccgccatcctcggcctnctctccgaccacccgatcgatgccgaggtgcgcgagatcgtgtcggagacgaagtcgaagaaggaggagctgaagatgaagaaagagctgctgggattggtcggaacccgtgtggcc

SEQ ID NO: 7253 - DNA, 763 bp, Glycine max
gagggaccaaaacagcagaaaaccctcttttattttcaaaattacccttttcgagcttggagttcccaacaactatcttattccttcactcactcctctctgcgcttggctatggaaaaaacgcacagctccagcgcagaggagcaggatccgacccggcgccacctggatcccccacccgggttaactgctgaagagttcgaggacctcaaaccctccgtgctggagcaccacacctactccgtcacacccacccgccaaagctcctccctcctcgcgcagcgcatccacgcgccaccacacgcggtgtggtccgtcgtgcgctgcttcgacaacccacaggcctacaagcacttcatcaagagctgccacgtcaaggagggcttccagctcgccgtggggtccacccgcgacgtccacgtcatctccgggctaccggctgccacaagcaccgagaggcttgacctgctcgacgacgacagacacgtcatcggcttcaccatcgtcgggggcgaccataggctcaggaactataggtcagtcacctcggtgcacgggttcgaacgcgatgggaagatctggaccgttgttttggaatcgtacgtcgtggatgtgcccgaagggaacaccgaggaggacacgcgtctgtttgccgataccgttgtgaagctgcctctgcagaagctcgcgtctgtcaccgaaggaatgtgcagtgacagtgatggtaagggtaataacgcttgaattcttggcctcgagggcc

SEQ ID NO: 7254 - DNA, 275 bp, Glycine max
agcttttgagttccctactatcttcctctctgcgcttcgctatggccaaaacgcacagcggggaggagcaggatccgaatccgacgcacccgacccggaaccacctggatccaccacccgggttaaccccggaagagttcgaggacctcaaaccctccgtgctggagcaccatacctactccgtaacacccacagcgccaatgctcctccctcctcgcgcagcgtatccacgcgccgccgcatacggtgtggaccgtcgtgcgctgcttcgacaa

SEQ ID NO: 7255 - DNA, 511 bp, Glycine max
atcaggggtgactgtgaagcgatctcagagccattgctgacgttaaaatagagtatagaattagagtcagcgagcgaaagaggggttttggaacgtgcaagatccggtgctctaatctctgcattctgtgatggctccaaaaccgataacgagtcccgtccccgattcgtggtaccccacgctctccgtcttcaccctcgccatcggcctcgtcttaaccgcctctttcttcatttatgaagcaacatcttctaggaaaagtcgttcacttgttcaggagctgacaactggtgcagtggcttcagtcttcttgggttttgggtccttgttcctcctacttgcttctggtgtttatgtctaatttaaacattgaattggatgaaaattttgctaagcagatagctttaaatgaaaaattgcattggacgttttagtttgatatccgactctaaggtatgttcttaatctatcgataacaatgttggttgtgtgtaatgctcaagaagattat

SEQ ID NO: 7256 - DNA, 318 bp, Glycine max
gctgacgttgaaatagagtatagactagagtcagtgagggaatgacgggtttgtagtctgcaaattgcagttgaaatttggaacgtgcaagatccggtgctgtagtctctacattctgtgatggcaccaaaaccgataacgagtcccgtccccgattcgtggtaccccacactctccgtcttcactctcgccatcggcctcgtcttaaccgcctctttcttcatttatgaaacaacatctgctatgcagcgtagacacttcaaagtagtagttgtgtccatgccatacctgggtcagacagatatagatggttgtcgt

SEQ ID NO: 7257 - DNA, 525 bp, Glycine max
caaaagcatctctctcttgctctctctctctttttctcgttttctaacacactcgcactttctctctctaaaaaccaccatttccgaggtcgagttttctggctctatttatatggtgtgtaatccgtgtttcgttgttgcgtgcgcgtgcgatttggaatctggtggtgcgaggggcatttgaatgtgagagaggattttttgatttttttttggattcgcggtaggtagatcggcgatggcggaggtttccggcgacggcggcggcgccgcgctgtcggtgtcgggatcgttcaaggaggggagaggctcggcaaggcggcgcggcggcggaagaggagtgaggccgccgagcatggacgccgacgagttcatgaatttgttgcacggttcggatccggtgaaggtggagctcaatcgcctcgagaatgaagttcgagacaaggacagggaattatcggaagcgcaggctgagatcaaagccttgagcgtctctgaacggctcagagaaaaggccgttgaaga

SEQ ID NO: 7258 - DNA, 975 bp, Glycine max
gatgttctgttctacttgctctcaagtttcatcttgggctgtaggctgtagcataccatgaccaccaaggatccaaaatccgtgtacgactttgttgtcaaggatgctaagggagatgatgtagatctctccttttacaagggaaaagtccttctgattgtcaatgttgcttctcaatgcggcttgaccaactccaattatacggagctgaatcaattgtatgacaagtataaagaccaaggcctggagattctggcatttccatgtaatcaatttggtaagcaagaaccagaaagcaatgataaaattgtggattttgtctgcagtcccttcaaatccgaattccccatccttgataagattgacgtgaatggggacaattctgctcctttgtacaaattcttgaagttggggaaatggggaatttttggtgatgatattcagtggaacttttccaagtttgtggttgataagaatggacaagtagtgggtcgctattatcccaccacttctcctctcagccttgagcgagacatccaccagcttctgggtatttcctgaaggcaaaaagataatgtcttcctgagctcattatgttcccttatgtggtgaaaatgtaatgcaaatatgcacaaactgatgcaattaatcttatggacatcatatataccatgtcccatgtcatgaattcgtccatatgtctttgttccctttaatttcatcggggtggtctaactgtctccaagtaaaaatgggaattaaaaaatctcatctaaaccaataaaattacatagaattgtacataaaaaagtctatacaaattgatacaatattattgggtcacattacatagaatgagattgtttaacctcatttctagttgggattagatatacacaacctagttctaaataggttcacctatgaaagtttcaattttaatgatttttttcttaaaagaacctattaacaaaa

SEQ ID NO: 7259 - DNA, 563 bp, Glycine max
ttcttgcgtccgctcaagtttcatcttgggctgtagactgtagcaaacaccatgaccaccaaggttccaaaatccgtatacgactttgttgtcaaggatgctaagggagatgttgtagatctctccttttacaagggaaaagtccttctgattgtcaatgttgcttctcaatgatatccttaatcttaactactctcaccgctaatgttataaatgttgagaaaatttacaatatgtttgggattgagacagcggcttgaccaactccaattatacggagctgaatcaattgtatgacaagtataattgttggcctggagattctggcatttccatgtaaccaatttggtgagcaagagccagaaagcaatgattaaattgtggattttgtctgctctcgcttcaaatctgaattccccatctttcataaagtagttcaacatataactgatcttggaaagtttacctgaactaccatttttaagcactccgacttgtcaaaattgtgatatgatactactaaaaaaaaagtcagatttttgtattttccggtttgctattct

SEQ ID NO: 7260 - DNA, 755 bp, Glycine max
cataagctatattccttcaccttcacttcactctcagatcgctctttctgtcacacactcacattccggtgcaaaatgaaggtcatcgccgcctacttgctcgccgtattgggaggcaatgcagccccttccgccgatgacttaaggaccatccttggctccgttggagctgacgcgaacgatgacaacatcagcaacttcttgtctgaagttaagggcaaagacattgtggagcttatcgccgccggtagggaaaagttggcctccgtgccttctggcggtggcgccgcggtttccgtggccgctgctcccggtggtggcgctgctgcaccggctgccgccgaatctaagaaggaggaaaaggtggaagagaaggaggaatcggatgacgatatgggattcagtctctttgattaattggtagggttttcaaacctttgttcggaacatattgtcgaattagagttccttagttttgtcatttttatttttggttaaagtagtactattcaaagccaatgaattgtgtggttgaaagatttcggtttaatattgattacttattgaactttcttccctgatttactggtatatactctatccttcatttagtttttcgttggtatttagtagatagattatttttatagaatgcagcgttgtctagccgctggaattaggttatgcgattaaaatttgggatcaagttttttccttagttttgtgctggcaccagtaaaacaaaatcttgtcta

SEQ ID NO: 7261 - DNA, 902 bp, Glycine max
ttcgttaatattcacgtcgcgattcgcgaaaacgggaaaagcttaatcgcttcgtgttcagttctccgatccaaacagaaccttattattatcattcccctttccgttttctcgttctcctttcagtttcagcgagaaaacgaaaacgaaaacgcgcttcgttcgatcgcgtgcgtgcgtcgcaatgaacaacgatttcgtttggcttccttcgctgtattccgatccggaactattcacctatctggagccattcgtgttccgcagttctccgagctcgcatttcctgcaatcgatggcgaacaattccagaagcttcgcgctcgaggaggcgttcggacacgtgtcgcggttcgccggcgcgttgctgttctggctctcgcgcgcgtcgagttccaatgtggcgcgttccttgcgcggttcgccgccgctccggttcggtagcgtgcaggttaaggctgggtcgacgacgaatgtgcgcgtgttcgggtttccgttcggatcgaagtggaaatcgtcgttttcgagtgtgaggttggggaagatttcgagtttggcgatgaggatgatttggagagaagcgaagaggcttagcttgttccccgttctgtcgctggctgttgcgttggttccaccgtttcaaaacttgtcatcaaatgtactagctagcccgttgctcaatcctgatgtgcaaatgtttggagccatggaccaagtgcctaaggaggttgaatgccaaggatgtgcattcctaccgtgtcttgagttgaaccaggcaaaacctgcagtggagcctaagactggtattgaatttcctttggttctagacaatatattcactggagagaagaattatgacttcaactctgaggtcctggttggaacaggatccagaaccatga

SEQ ID NO: 7262 - DNA, 914 bp, Glycine max
  unsure (1)..(914): unsure at all n locations
tctcgagccgaatcggctcgagacggcgacagaaggggggggaaaatttgtcaaataaattcatctaaccccaaacaaaaccctagcacacttttatcgcttagtggcagctcagcagtggcggcaagcaactccatccgcaatgggaatcgatttgaaggcaggaggtaagtccaagaagaccaaacgtacagcccccaaatccaatgatatttacctcaagctcctcgtcaagctgtaccgttttcttgttcggaggactggtagtaacttcaatgccgtcatcctcaaacgccttttcatgagcaaggtcaacaagcccccgctatccctctctagattgattcgttacaccaagggaaaggaggataagatagctgtggtagtcggggccgtgaccgatgacattagggtgtatgaagtccctgctctgaaggtaactgccctgaggttcactgaaactgccagagctagaattgagaaggctggtggcgaatgcctcacctttgatcaactggctcttagagctccactcggccagaatacggttcttcttagaggtcccaagaatgcccgtgaggctgtcaagcactttggaccagctcctggtgtgccccatagccacaccaagccctatgtccgtgcaaagggaaggaatttgagcgggccagaggaagaaggaatagcagaaggtgatctgagctaacatggaaggttcatttacctatgtcatattggtgtttcttggttggacattgttaaattggttatttctttttaaggaaaatgacgtttcccgacaattgtcttgcacctttcagggtatgatgcttgtctctaaaaaaananaaaaaaaanaaaaaaattggggggccgccatccccctatggggttcccgtcatggcgttttacag

SEQ ID NO: 7263 - DNA, 585 bp, Glycine max
tagattgattcgttacaccaagggaaaggaggataagatagttgtggtagtcggggccgtgaccgatgacattagggtgtatgaagtccctgctctgaaggtaactgccctgaggttcactgaaactgccagagctagaattgagaaggctggtggcgaatgcctcacctttgatcaactggctcttagagctccactcggccagaatacggttcttcttagaggtcccaagaatgcccgtgaggctgtcaagcactttggaccagctcctggtgtgccccatagccacaccaagccctatgtccgtgcaaagggaaggaaatttgagcgggctagaggaaaaaggaatagcagaggctttagagtttgagttctggagctcaaacatgaaggagttttccttttacctcatgatcattatgtattgttttcttgtgttttggaacaatttgttaattttggtttttatttttccttatctaagggaaaaaattgaaacgctgtccccgaacaattttgttcttgcacacttttcagaggattaatgagtagctattgctctacttaaaaaaaaaaaaaaaaaaa

SEQ ID NO: 7264 - DNA, 532 bp, Glycine max
gttagttaatcacaaaggggaggtgaagattactgattttggtgttagcgccatgctagcaagctcaatgggccaaagggatacatttgttggaacttacaattacatgtcgccagaaagaatcagtgggagtacttatgattatagcagtgacatctggagtttgggtatggtagtgcttgagtgtgccataggacggtttccttatatacagtccgaagatcagcaaagctggcctagtttttatgagcttctggcagcaattgtggaaagccccccaccttctgctccacccgatcagttctcccctgagttctgtacattcgtgtcatcctgcatccaaaaggatcctcgggatagattaacatcattggagctactggatcatcctttcataaaaaagtttgaagataaagatctagatcttgggattttggtaggtggcttggaacctcctgtaaactttccgagataatttttacaatagagtgtaaaatttgtactagacagccacaactcttggtgatggaac

SEQ ID NO: 7265 - DNA, 583 bp, Glycine max
caaaaggggaaaaacaagtgaatagatgaatttgccgttaatttatttatccctctcttaaccatcgttgttcataatcattacacatcataggctctctctctagggtttgatcagactcaagggtttaagccatgggaaaaaggaaggcaaaggcaaagcctcctccaaagaagcgaatggataagctcgataccgtcttcagctgccctttctgcaatcatggcagcagcgtcgaatgccgccttgacatgaagaacttgataggggaagctatttgcgggatatgccaagagagctttagcactaccatcacagctttatcagagccaatagacatatacagtgagtggattgatgaatgtgaactggtaaaccacccggacgatgatggtgctgagcactgatgctcagattcctgttcttgtggttgtgaacggattaactggccaattttatatcttcaacctgtaactatgtcggttcctgatgtgagtgagcactggtgcaactataagatgcatgtaatagcttagttatgtaatagcatgtgcaagaacatgagaataattggccctttttt

SEQ ID NO: 7266 - DNA, 506 bp, Glycine max
gggggccgaacttgtagggcaattgagatggaaaaataataaaaagaaagagaaaaacacaggagaagagaagagagtagaagatacgaagatttgaggcatttatataatcgaaattggaagcgaggaaggaaaacccaaatcgaaaatggcagtgatggagaggttgaagatgttcgtcgttcaagagccagttgttgccgcttcctgtctcatcgctggcttcggtctttttcttccagcttttgtgaggcccatgttggattcatatcaggcaaccaagcaacctccccagcctgctttaagtgacgtggttgcaggaatgactggtaaaaagtaaaggtgatttacttgacagatgcaagggcaaatttgctaagtttcttgtttgaacttattttaagtctcaaatgtgagagaaataagagtactgaatattggatttaacttccctgtctgacgatctctatctgttccggaatcattcagtggtttcacttcatagc

SEQ ID NO: 7267 - DNA, 368 bp, Glycine max
gactcttcagtctttttttcatgtccagttcccgctccatttgctctctctggctctgtgtctctctaaacctggtctcatcgcacattcgcagacacacacacttcagatccgaatctccatccatggcggagtccgagttcgagccaagcgttgacctcgaagagaaatcgtggcacctcctcgcgctcctcctccgaattggccacgccgtttacccgcaacgcctcgccgcgcagtgtcgtttgttcgctgcctcgccgaacttcgtctgccacgtcggcactctccgcggctcgccgatctccgtcaccgacaacggactggtcacgcgctccgtcggcaccgtcttccccctcggaagcttc

SEQ ID NO: 7268 - DNA, 318 bp, Glycine max
gactgttgcttgcttaaaccaatttctctctctctctctgtttgtgtgattaattaacttatggacggttttccaccggaggcggaggcaacagcggtggccgtacggcgggcgttggagctgctgcagctgaacgaccccgttttgagggtccaagcggcgagggacatccggcgcctcaccaagacctcgcagcggtgccgccgccagctccggcaagccgtggcgccactcgtgtccatgctccgtgtcgactcgcccgagttccacgaacctgcgcttctcgctctgcttaacctcgccgtacaagacgaaacg

SEQ ID NO: 7269 - DNA, 1048 bp, Glycine max
gccgaccgacgcgtccgcccacgcgtccggcgcgatgccagtttgtgttgtgtggtatcatcacagcgaagcgcgccgccactactaaactttcctcgctttctctctctctctctgtgagttgtggaaattgattagaattgaaaataatgtctggttcggaggacgagggaggagaagagtacctcttcaagatcgtcataatcggagactctgcggtgggcaaatccaaccttctctcccgctacgcccggaacgagttcaacatgcactccaaggccaccataggtgtcgagttccagactcagtgcttggaaatcgactccaaggaagtcaaggctcagatttgggacaccgccggccaagagcgattccgcgccgtcacctccgcctactaccgcggcgctgtcggcgccctcattgtctacgacatctcccgccgcaccaccttcgatagcgtcggccgctggctcgacgagcttaaaactcattgcgatacgacggtggcaatgatgctagtggggaacaaatgtgacttggagaatataagggcggggagcgttgacgaagggaaaagccttgcggaagcggaaggcttgtttttcatggaaacgtctgcgttggactccacaaacgtgaagacggcatttgagatggtaattcgagagatatacaccaacgtgagcaggaaggtgctcaactccgaaccatccaaggcagagttatctgtcaacagggtcagcctcgtcaacaatggtgcttctacatctaagcaaaatcaaccctatttttcttgctgttccagatgacctacaatcctctgcaacttgctttgtcacttctatttcctttttctttcttttctttgctttattaattaaatgggctcggttggattgttccttcaaaacttgtttatcagttacccctatatagtaaatcaaaatgttgtcttcaatctcaggaaaccgggtataaattgtataattgggttccaaagagcttgtaattgcactgcagcgaatgaaagcggacatccatttatgcc

SEQ ID NO: 7270 - DNA, 520 bp, Glycine max
  unsure (1)..(520): unsure at all n locations
tctttctcttctttctctctcactcagttttctcttctcttcgacttttatttctctttcatttttcaatttatagtttaggattatggaggagccatcttctcttagctcggtggagaggaacgtccacatagcctctgttgtggaagccatggcggtggacactattctcgctgctgccaaatctctcatttgcttcttcattctgactggatctctgctgactgacgtcaatcattcagtgtccccaaaattgaccccaatggatggaagatttccttttgatgatctctgcaagggaaaacatacttaccttttaaacaaggatgctagtgattcagatgaggacggggatgaagaagacgatcatgatgacgcagatgatcaggatgatgaggaaggagatgaagacttctcaggtgaaggtgaagaagaggctgaccctgaggatgatcctgaggccaatggtgcangaggaagtaatgatgatgatgatagtgatgaagatgatgatgacgac

SEQ ID NO: 7271 - DNA, 390 bp, Glycine max
attttgcccaaaaaaaaaaagcttgtgagtgacaagaacaattttggtcagaaaaaccctaattggagcaacacaagggtttatcctaaccggaccgaattccttctttccccacttggactctctctctctctcactgtcagagtcagatactccaacccaactctatgactatggaggagctatcttctcttagctcggtggagaggaacattcacatagcctctgtcctggaagccatggcggtggacactattttcgccgctgccaaatctctcctttgcttctccattctgactggatctctgctgactgacatctatcattcagtgtcccaaaattgaccccatggatggaagattgcttttgatgattctgcaggggaaacat

SEQ ID NO: 7272 - DNA, 425 bp, Glycine max
caaattgaacccacacttctagcaccccactacaatgactttgcacctacctctctccctatttaaaacttcaatacacttcattgtgagtgtattttaatcttctttatcttcattcattggttctctctaaccaaccctctcttttcctaaatcctaattaaacacccctcaaccagaaagagcatgaagaagctcaatctaatactcagtaagtgcaagaacttgtcaaagcatctaggaagatcttcatcatttaatagcctaaggtccaagtttgctaaggaagacttatgggaaggaaatggcatgcaagaaggtgaacattgtgaaactgtatttgttggcagcacaaggaaacggtatgtgataagctccaagtatttgaaccatcctctcctcaaagctctcatcaacaattccaa

SEQ ID NO: 7273 - DNA, 590 bp, Glycine max
  unsure (1)..(590): unsure at all n locations
cttggctaaggccatttttaatacattaagatcacaggattacatccatacatgtatagagagaagaagatcaagttactgtctaaagtctcaataactcttgctaaagtttttacctcttctttttacaaatgctcatgtttggtctgaaatcagcttcatattgcacacacaatgtagccattggcagtggcgtgctgaagcccaacatgtcaacttttggtgctgaccaattcgatgacttcagacccaaagaaaaagtgctaaaactttcatacttcaactggtggtcgtttaacactgcatttggcactttagccgctacactgtttgttgtgtacattcaagagaggtttgggtggggattggggtatggaatatcagcaatgaagtttctagttgcctctgttaccttctttatgggtgttccaatatataggcataaatccagaaaggggaagagccatgcaaaggagtttttcagtgtccctgttgttgctttcagaaatangaagcttcaacttcctagtagcccttctgaactgcatgagtgtgagatgcaacattacattgatangggaagacgacaa

SEQ ID NO: 7274 - DNA, 288 bp, Glycine max
ggacacaataccacatcacacagtagtaacaccaaccactcttctctccctctcgcaatagctctctccaaccttattgctatcaacaaacaattcacggtttagactctcttttgttgtggtttgatggaaagctgcatcttccgctaccatcacccaacactcctcactctcccatcaatttcgcacaagccccacttcagattcttcacaacgcctgatcttggtggtcgtggtgtctcttcgtcctcttcctgttttttatactatacgccaagaccctttatc

SEQ ID NO: 7275 - DNA, 1013 bp, Glycine max
tttcctttttacatttttttttttggtgatttattgctgcttaacttgcacagtcgggaatccagcttgcgtttatagttgcaaagagcagtgaagacactacagaacacaacacaaacacagagaaagagagtgaataaatccagcattgttctgttctctgcaacattctccactctcaaccatggcttcaaagcttttactcatcactgtcttcgtttttgatttgattgcttttggacttgccgtggctgctgagcagagaagaagcaccgctagtgttgtgacggacaatgaaaagaattataattactgtgtctataactctgatatagcaactggctatggtgttggagcatttttgtttctcttggttagtcaagtcctgataatggtggcaagtcgatgcttctgttgcgggaagcctcttaaccctggaggctcaagggcctgtgcagttgttcttttcataatctgctgggtgtttttcatcatagctgaggtgtgcttgttggctggatcagtggaaaatgcctatcacaccaagtacaggaccatcttcggggagaatcctccgtcttgcgaaacagttaggaagggagtctttgctgccggtgctgcttttgttttcttcactgccataatctctgaattctactatatcaactactcaagggcaagggaaagcttccaaccttatgctggcggcgagactggtgtcggtatgggaacctacaaatgagcttctagttaagaattttacagcaaacatttaggtgtgactatatctggagtctggattctgcagcacatttccttgattttagtgcatttattgtatttactgtctagctactttacaagaatggtatacgttgtattttagtaattttttgttgttgttacctattgtcgtatgttatgggtgactgattcattgcctctttacatttttgaagttctttgtcatgtatacatttatcaccaagagaaataatttcttgcattctctg

SEQ ID NO: 7276 - DNA, 1635 bp, Glycine max
ggccataacttaagttccactataaataactgtcatggcttcactctccactcctacctcaaattccgaagttctttttcttataatggggctcttgtggaaaactcacacgaggatacacgtgattagaacattttttgcaatccttttggttgcactgctgagttcagagagagtagagagcagaaaagccaaagttgtgaccacttccttggagtacaatgctataaactgcagagctcacagtgctgcattgacagattttggtggtgttggggatggaaaaacatccaacacaaaggcatttcagtctgcaataagtcacctgagtcagtatgcttctgaaggtggctctcagctctatgttcctgcaggaaaatggctcactggtagcttcagcctcactagtcacttcaccctctatcttgacaaagatgctgttctccttgcttctcaggatataactgagtggcctgtgcttgaacccctcccatcatacggtagaggaagagacgcaccagcaggaagattcacaagcctcatatttggaacaaacctcactgatgttatagtcacaggtgaaaatggcaccatagatggtcagggtgagttttggtggcagcaatttcacaggaaaaagttgaagtacactcgcccatacctgattgaattaatgttctcagacaacattcaaatctcaaatctaactctcctcaattccccatcatggaatgttcatcctgtttacagcagcaatattattgtgcaaggcatcaccatttatgctcctgtcacatctccaaacactgatggcatcaacccagattcttgcacaaatgtaagaattgaagattgctatatagtttctggggatgactgtgtggcggttaagagtggatgggatgagtatggcataaaatttgggtggcccaccaaacagctagtgataagaaggctaacatgcatctcaccatacagtgcaaccattgccttgggaagtgagatgtcaggtggaatccaagatgtgagagctgaggacatcacagcaatccaaacagaatcaggtgtcagaatcaagacagcagtagggagaggagggtatgtgaaggacatatatgtgaagagaatgaccttgcatactatgaaatgggcatttaagatgactggtgattataactcacatgctgatggccactatgaccctaatgccttgcctgagatcaaaaacatcaactatagagatgttgtggctgaaaatgtgaccatagctgctaggtttcaaggaatctccaatgatccctttacaggaatctgcattgcaaatgtgacactaaggatggcagccaaggccaagaagcagccttggacctgcactgatattgaagggatgacgagtggggtgacccctccaccttgtggtctgttacctgatcaagggccggagaagatcacagcatgtgatttcccagcagataatctacctattgacatagtggagcttaagaaatgtactaccaccatgacatatgttgaagtgtagtagtttatgtaagttattgttttaggaatagtccttctcagattatcaaaaaaacatttctcaagttaagaaatgaatggtgtttcaaattatag

SEQ ID NO: 7277 - DNA, 380 bp, Glycine max
ggcctcagccctaaaacccaaggctgctgagtgttgcagaggcatgtctgagtcggacacgaagaagaagaagcagcagcagcgcaggggcggaaagcatgaaggagaagaagggttgatgatcaagccccagagcttcactccccccatcgacacctcccaatggcccattctcctcaaaaactacgagcgcctcaacgtccgcaccggccactacacccccattccctccggctactcccccctgaagcgccccctctccgagtacctcaaatacggcgtcctcaacctcgacaagcccgccaacccttcctcccacgaggtcgtggcctggatcaagcgcctcctccgcgtcgaaaaaacggccactccggtaccct

SEQ ID NO: 7278 - DNA, 423 bp, Glycine max
  unsure (1)..(423): unsure at all n locations
aaaaccctacccttctcagttgcagagccatgtctcactccgacagcagcaagaagaagaagcagcagcagcgtagcaagcacgaaggaggaggaggagaggaagaatcgaaagacgaaggcgggttgatgatcaagccgcagagcttcactcccccaatcgacacctcccaatggcccatacctcctcagaaactatgagcgtctcaatgtccgcaccggccactacacccccatcccctccggctactcccccttgaagcgcccnctcgccgagtacctcaaatacggcgtcctcaacctcgacaagcccgccaacccttcctcccacgaggtcgtcgcctggatcaagcgcctnctccgcgtcgaaaagaccggccactccggcaccctcgaccccaaggtcaccggcaacctcatcgtc

SEQ ID NO: 7279 - DNA, 403 bp, Glycine max
ctcgagccgaatcggctcgagcaggctcgagcggctcgacaatgcagcaagctccaaccacactcaccggattgctccatcgcgtcgccggaatattcccctcccgccgcgccgtctccgtctccggcaagttcgacctcacgcactcccgtctccaccacctcgtcgaactcgccgcctcgcgcctcctctccgccggcatcaaacccggcgatgtcgtcgccctcaccttccccaacaccgtcgagtttataataacgttcttggccgttattcgagcgcgagccacggcggcgccattgaacgcggcttacaccgccgaggagttcgagttttatctatctgactcagattcaaagctgttactaacctcaaaagaaggaaacgagccggctcaagccgc

SEQ ID NO: 7280 - DNA, 2686 bp, Glycine max
ggttaaagccagcatcatataatttcatttcccattctactcactcacacacacacacactctctttccatgggtccgtttcgtaaacccttccttgcatttctctcggttgttctatttctgggtctctatgaggcagcagcagaacagactcagactcacaagagtacttacattgtacacgtggcgaaatcggagatgcccgagagcttcgagcaccacgctgtgtggtatgagtcgtcactgaagaccgtgtctgactcggcggagatgatttacacctacgacaacgccatccacggctacgcgacgagattaaccgctgaggaagcgcgtttgctccagcgccaaacggggattctggctgttttgccggagacgaggtacgagcttttcacgacgcgaacgcctttgtttctcggacttgacaagagcgccgacttgttccccgagtcgagttcgggaagtgacgtcatcgtcggagtcctcgacaccggcgtctggccggagagcaagagcttcgacgacaccggactcggacccgttccgagcacgtggaaaggcgcgtgcgagacgggaacgaatttcaccgcgtcgaactgcaacagaaagttgatcggagcaagattctttgctaaaggtgtagaagccatgcttggtccaattaacgaaaccgaggagtccagatccgcgcgcgacgacgacggccacggcacccacacgtccagcaccgccgctggatcagttgtttccggcgcgagctcctcggttacgcctccggaacagcgcgtgggatggccacgcgcgctagagttgctgcatacaaggtatgctggaaaggagggtgtttcagctctgacattcttgccgcaattgaaagggcaatattggacaacgtgaatgttctttctttatctctcggtggtggcatttctgattattacagagacagtgtcgctattggagctttttcagcgatggagaaagggattttggtttcatgctccgctgggaactcgggtccgggtccctacagtctctccaatgtggctccatggatcactaccgtaggcgctggtacactggatcgtgacttccccgcatacgtggcgctcggaaatggactcaacttctccggcgtttcgctttaccgcggtaacgctttgccggattcttctttgcctttggtttatgcagggaatgtgagtaatggtgctatgaatgggaacttgtgtatcacgggaacgttgtctcctgagaaagttgctgggaagatcgtgttgtgtgaccgtgggttgaccgctagggttcagaaaggctcggtggtgaaatccgccggagcgttggggatggtgctgtccaacaccgccgctaacggcgaggagctagtggcggatgctcatttattaccggccaccgcagttgggcagaaagccggtgacgctattaagaagtatttggtttccgatgcgaaaccgacggtgaagattttttttgagggaaccaaggtggggattcagccatcgccggtggttgctgcgtttagctcaagaggtcccaactcgatcacgccacagatcctgaagccagatctcatcgcgccaggtgtcaacatcctagcggggtggtctaaagccgtggggcccaccgggttgcccgttgataacaggcgcgtggatttcaacatcatctctggcacctccatgtcgtgccctcacgtgagcggcttagccgcgctgatcaaatcggctcaccctgattggagcccagccgcggtgagatcggctctgatgacaacggcttacacagtttacaaaactggtgagaagttgcaagacagcgcaacgggaaaaccatccacgccgttcgatcacggttcgggacacgtggacccagtcgctgccctcaatccaggactggtctacgatctaacggtggatgattacttaggttttctctgcgcgttaaactactcagctgcggaaatcagcactttagccaagagaaaattccagtgcgacgcgggcaagcagtacagtgtgaccgacctcaactacccttcgtttgcggtgttgtttgaatcatcagggagcgtggttaagcacacgaggactctcactaacgtggggcccgcgggaacttacaaagcttccgtgacgtcagacactgcgtccgttaaaatctcggtagaaccgcaagtgttgagtttcaaggagaacgagaagaaaacgttcaccgtcacgttttcgtcatcgggttcgccacagcatacagaaaacgcttttggaagggtagaatggtccgatgggaagcacctggttggatccccaatttcggttaattggggttgaaacttgaaaaaggttgatgcaaattgcaaggttcatcactcactcgaagaggggtgtgtcttgattggctagtgattatagtatttaatatgttactattattactactattaataaatttaacttttgttgcaaacaaaaatgttgggtttatttatttatccagctggaaattgatgatagctggggccttatgcttggttggtgttggtctgtttgttccctgggagaaatgttgcaaaggggaaagaaattttaaatggttgggctcatgtgtttcttcttcccagtgtacagcgttctaatcattgatgaatattatttttcttagaccg

SEQ ID NO: 7281 - DNA, 323 bp, Glycine max
gccagcttcatctaatttccatttcccattcccatcctactcacacactcttcccatcacttcgtttcgtaaacccttcgtggccattctctgggttgttctgtttctgggtctccatgaggcagcggaaccagagaagagcacatacattgtacacgtggcgaaatcggagatgccggagagcttcgagcaccacgcgctgtggtacgagtcgtcgctcaagaccgtgtctgactcggcggagattatgtacacctacgacaacgcgatccacggctacgcgacgaggctaaccgctgaggaagcagtttgctcgagaccca

SEQ ID NO: 7282 - DNA, 972 bp, Glycine max
accaaattcagattcagatccactccactgcactccaatttcactcactctcacattcccaatttctccatgaaaccctaatttcagccatggttgttacatccaaaccttctccaatggcgctagatctcaaaacctccttcactctccccaaaaccctaaagctcaagacgaagcagcaagagcttctgatccgcgtcgccacgctctccctcatctacgtcctcgccttcatcacgcgcctcttcagcgtgctccgctacgagtccatgatccacgagttcgacccctacttcaactaccgcaccacgctcttcctcactcgcaacggcttcgccgagttctggaactggttcgactcggaatcatggtacccgcttggccgcatcatcggcggcaccctctaccccggactcatgctcaccgccgccgccatccactccctcctccgcttcctccgcctcttcgtccacatccgcgaggtctgcgtcctcaccgcgcccttcttcgcctccaacaccaccctcgtagcttacttcttcgcgaaggaggtctgggactccggcgccggcatcgtcgccgccgcgctcatcgcgatctgccccggctacatctcccgctccgtcgcggggtcctatgacaacgagggcgtcgcgatcttcgcgctgttgctcaccttctacctctttgtgaaggcggtgaacactggctcgctggcgtgggccctgggttcggcgttcgggtatttctacatggtgtcggcgtggggaggttatgtgtttataataaacttggtgccgctttatgtgctggtgctgcttgtgacggggaggtactcgatgaggctctatgtggcgtataactgcatgtatgtgttggggatgctgctcgccatgcagattaggtttgtggggttccagcatgttcagtccggcgaacacatggccgccatgggcgtgtttttcttgcttc

SEQ ID NO: 7283 - DNA, 274 bp, Glycine max
cactcactcactcccattcccaatttctccatgaaaccctaatcccaacaatggtcgtcaccaccacctagatcctctccaatggcgcaagatctcaaaacctccatgagctccttcactctccccaaaaccctaaagctcaaaacgaagcaacaagagcttctgatccgcgtcgccacgctctccctcatctacgtcctcgccttcatcacgcgcctcttcagcgttctccgctacgagtccatgatccacgagttcgacccctacttcaact

SEQ ID NO: 7284 - DNA, 394 bp, Glycine max
gattgacttaatagagaaatagagataagtacggtgcgaaaagagtgaggcggagaaaaatgaagtgcccgtactgttcggcggcgcaggggcgttgcgccaccacgagcagcgggcgttcgatcacggaatgcacgtcttgcgggcgcgtggtggaagagcgacagtcgcatccccaccacgtgttccacgtgcgcgcccaggacaaccctctgtgtctggtcacatcggatctcgctctccccgcgctcaatcaaaacaacgaggaggaggaccctttcgagcccacgggcttcatcaccgccttctccacctgggccctcgagcccagcccactctacctccagtcctccctctccttctctggctacctcgccgagctcgaacgcactct

SEQ ID NO: 7285 - DNA, 545 bp, Glycine max
gaacgttttcatactttgcagcatccattcttgttctcttctttctttcgatcagggtttcccctcgtctccgggctcgtttcgttctcgaataatcgatctacgataatgactcgcggtagccagagggatcgtgatcgcgaaagggctcaggctagaactggtgctaaaggcaagcagaaagatgatggattgacccctgaacagcgcagggaaagagatgcaaaggcgctgcaggagaaggccgcaaagaaagcggcacagggtgcaggagggaataatgcaggtggaagcaaaaaataggcaataattcaatgagtagtttgagtttgccgtttgttgattgtggacatggaatttgtggaaaattttatgttgcattattcatggagtatgatgtgtttattaatgtaatttgcgacggaagaacaaataagttgtgcttctttgaaagatgttgtcgctgggggcagaatcaataacttgtatctttgtttggaataaatagtatttggcaatgatattgtgtttgctcccctgtctta

SEQ ID NO: 7286 - DNA, 520 bp, Glycine max
gtcgtttcgcccctttccacgttttcatactttgcgcaccaatcttgctctctgctttctgtcgatcagggtttcccctcgtctccgagctcgtttcgttctcgacttgttctcttctttctttcgatcagcgcacgcggtagccagagggatcatgatcgcgaaagggctcaggctagaactggtgctaaaggcaagcagaaagatgatggattgacccctgaacagcgcagggaaagagacgcaaaggcgctgcaggagaaggccgcaaagaaagcggcacagggtgcaggagggaataatgcagctggaagcaaaaaataggcaataattcaatgagtggtttgagttcgacattgttgtttgtagacatggaatttatggaaaatttatgttgcgttattcgtggagtatgatgtgtttatttattcatctgtcacaaattacattaataaacacatcatactccacatcaaatcgttgactgtctaaaaaaaaaaaattcataaaaaattaaaaa

SEQ ID NO: 7287 - DNA, 1208 bp, Glycine max
  unsure (1)..(1208): unsure at all n locations
ggacggtcagaataaatcttggaagcaaaagacgaatcagaaccgtcgagtgtgagatgccccagggcacacagctactacaaaaacccgacctatctcacttcacgatgttgtcaagcctgccgagaaaaccctagttcgcttgcagtcacacaagaggccaatcctattcatagctcgagatgggtgaagaagtgaaggtagttgttccagaatcagtgttgaagaagcgcaagagggaggaggaatgggcgttggccaagaagcaagaactcgatgctgccaagaagaagagagccgagagccgcaaactcatctacaacagagctaagcagtacgctaaggagtacgatcaccaggagaaggaattgattcggttgaaacgcgaggccaagctgaaaggtggtttctatgtggatccagaggctaagctgttgtttattattcgcattcgtggtattaatgccatggaccccaaatcaaggaagatcctgcagttgttgcgattgagacagattttcaatggtgtatttctcaaagttaacaaagccacagtgaacatgctgcacagagttgagccgtatgtgacttatggatacccaaatctcaagagtgtgagagaacttatttacaagagagggtatggaaagctaatgaagcagaggactgctctaactgacaactctatcattgagcaggctctgggcaagtatggaatcatatccactgaagatctgatccatgagatcatcactgttggacctcactttaaggaggctaacaacttcctttggccatttaagctcaaggctcctttgggtggcttaaagaagaagagaaaccattatgttgagggaggtgatgctggaaaccgggagaattacatcaatgagctaatcaggagaatgaattgagctgtagcactgttcaatcatttgattagttgaatcaatcttttcttgttggctttttagatcaatatcagactattttcgtatctgaaattttgagaatagcacatttcttctgactttgataaatctttttgctaaggttgaatgtttttcgtttttacaagtatgagtggtatattttattacacaacattcccattatttatatgcgtagctttctgttctgcaattttgggtttgaaaaaaaaaaaaaaaaaaaaaaaaannaaaccgcccgctctagaggatccaagc

SEQ ID NO: 7288 - DNA, 535 bp, Glycine max
atgcgtaaaaatttccttacaatcccctctgtcagtgaagactgaagagtaatggcgcttccgagagcatgtttggcgaggattttgtcacatcgtaatccaatgtttttgtcactctcaccacttacaatgcacgccaactacctctctcattctcaaacgcactctctcacgctctctgcttcgctttctacttccgaggccccttcttcacacgagcctcactttcgcaggaaacccatgtgcttgtaccactcccagggaaagtgcactaagatggatgatcctatccaccttgagacgtttaaccatgattgcttcagggagcttctagtgaacaccgctgagttgaacaatatacgctctcgggatctagactttttccttgtgcttgatttagagggtagggttgagattcttgagtttccagttctaatgattagtgcgaaaacattgcaagttgaagacattttccacaggtttgtgaggctctcaaaaatgagtgaacgaagaataaatgaatatgttgaaggaa

SEQ ID NO: 7289 - DNA, 482 bp, Glycine max
  unsure (1)..(482): unsure at all n locations
gaaaaacanactccgaaagaaacagtcagaatcagaatcagaagaagcgagcaaagatgtcgggtcgtggaaagggaggcaagggtttgggaaagggaggagccaagaggcacaggaaggtgctccgcgataacatccagggaatcacaaaacccgccattcgccgtttggctcgcagaggcggcgtcaagagaatcagtggcctcatctatgaagaaacccgcggcgtccttaagatcttcctcgagaacgttattcgcgacgctgttacctacaccgagcacgctagaagaaagaccgttaccgctatggatgttgtttatgctctcaagaggcagggcaggactctctacggtttcggtggttaatttctagggtttccatcggcgtaacagctgcttattggttattgttgtaaatggttgctttttacgcttcttggtatatttgcttcaattgtaatggaaccaaaagtattttgt

SEQ ID NO: 7290 - DNA, 661 bp, Glycine max
ctcgagccgaatcggctcgaggtaaccgtttagattttacactacattaataatacttaaatacttaatatacacacacgagagggacaacgcggagagcttcagaaacagaacgactcggtatttctcttcctctaaagaccgagtccgactcggagggcgaagaaggcaaactcagtaacctttccttccttcactacacgcgagagagacctcagtgtctgagacgcaggcaacgtgcattttcccatacgaaggacaccatcacgccgttttcgcgtccccgtcgtttcggatccatcgtcatcgtttttgtcttcttcttccattagtttagttgagaatcaatcccaagacaccgagctggagcctccgcccgccaccgtcgctgccttcaacggtcagatccggtaccgatcgccgtcctccgccgagctcttcgacggcagcagcaactctccgccctcgcacgccgccgaccagcactcgccggagttcgagtccagcaaaatgctgaagcgccccggccgccaggagtccctcgccgacaagatctaccggtttcgcgggacactgctccgtcgtcgcgatcccgctcctcctcatcactattcgtctctacgtcatgccgtccagcacctcaacgagtccgtcggagact

SEQ ID NO: 7291 - DNA, 388 bp, Glycine max
gacacacaccatttaaccatttttcccgcacaaacaacacagacactgactctctcactacacgcgcgcgcgcgcgagagagaaagacctcagtgtctgagacgcacgcagcgtgcattttcccataagacggacagcatcacgccgttttcgcctccccgtcgtttccggatccgtcgtcgtcgttttcgtcttcttcaattagtttagttgagaatcaatcccaggacaccgagctggagcctccgcccgccgccgctcctccaacggtcagatccgctaccggtcgccgtcctccgctgagctcttcgacgggccaggccagcagcaactctccgccgtcgcacgccgccgaccagcactcgccggagttcgagtccagcaaaat

SEQ ID NO: 7292 - DNA, 509 bp, Glycine max
gggaagaccaaagatgaactggggaattgactagtgcggcgcgctcctattatcaccgtagacggcggaggtggcggtggtggtgtagacacggcgtgacggcgatctcttgagataaatgttggttgaaagaggaagaagaagaagagttgtattgtagaatgagccaaccaacggtgatacttgccactgcgagctatgatcacactattcgtttttgggaggccaagagtggccgttgctaccgcaccatccaatatcctgattcgcaagtaaaccggctggagataaccccggataaacgcttcctggctgcagctggcaatccacacatacgactgtttgatgttaactcaaatagtcctcaaccagtaatgagctatgattcacataccaataatgtaatggctgttgggtttcaatgtgatggtaattggatgtattctggctcagaggatggcacagttaaaatctgggatttgagggcacccggttgtcaaagggaatat

SEQ ID NO: 7293 - DNA, 448 bp, Glycine max
cataaaaaaggttccaataacgccgtggtcgcttatactctgcttctcaaagaacaccaagaaactcccaaattcgtagattgttcgatcgaaccttctcaaaaccctagttccactccgaaatcctcttccttccaaccagatctcaatctcatcatggccaataaagagttcaaggtcccgccggtggctttcccctccgccggcaaccccgccgcggcgggtccaaacctccagcagcggcgcatgcccacgccgccgttccagccgaactccggtatccccttcatgtccttcgacataggctccgccgcggcgtccacctcctcggggccgatctacaccggccccgccgtgggccccggcggctccgccaacttcgacgacgaggagcccctcctcgacgagctcgggatccaccccgaccaaatctggagcaaaatcagat

SEQ ID NO: 7294 - DNA, 597 bp, Glycine max
cggacgcgtgggctcagctgtgtctgtttgcaataaataactctcacctttctaccattgctctgcacctctttctccttttgtcaaattcttctgttcaacaggtgtgtgctttggaatcagcatttggctatttggtctttgccaatggatgctaagtcggctgtagaattaatggagtcttcctcagaggttcatttttctggatttcacatggatggttttgagcaaagaaaggctagcatagaacaaccaacaacctcagaaactgacatgtataaacaaccttttgtcataggtgttgctgggggtgcagcatctggcaagacaacagtttgtgatatgattattcagcagcttcatgatcaacgagttgtacttgttaatcaggattctttttacaataacttgacggaggaggaacttacaagagtacaagattacaactttgaccatcctgatgcttttgatactaagcaattactacatgttatggacaagttgaagcatggcgaagcagtagatattccaaagtatgattttaagagttacaagagtgatgatgttttaagaagggtgaacccttcagatgttata

SEQ ID NO: 7295 - DNA, 463 bp, Glycine max
  unsure (1)..(463): unsure at all n locations
cccacgcgtctgctcagctgtgtctgtttgcaatatataactctcacctttctaccattgctgtgcacctctttctccttttgtcaaattcttctgttcaacaggtctttgccaatggatactaagtcggctgtagaattaatggagtcttccgcagaggttcatttttctggatttcacatggatggttttgagcaaagaaaggctagcatagaacaaccaacaacctcagaaactgacatgtataaacaaccttttgtcataggtgttgctgggggtgcagcatctggcaagacaacagtttgtgatatgattattcagcagcttcatgatcaacgagttgtacttgttaatcaggattctttttacaataacttgacggaggaggaactttacagagtacaagattacaactttgaccatnctgatgcttttgatactgagcaattgctacgcgttatgg

SEQ ID NO: 7296 - DNA, 416 bp, Glycine max
acgagcccgtatcgctatggtgcttcaccaagggatccatatttgccacctatgagtagagaggaaatctcttcaagctcttatttggctgggggaagatcgttgattggaagtgatatcttacaaaggagggaggctgttcacgatacgctttattcaacatattctgcggctgatgctttgtctgaatacaatcgaatgcagcactaccaagagagtttggaagctacagctgtgccagtttcatcccgttactctttcgctggtccttcatattcacttcgctaaattaaacatgcacttttgaaaaccccttgcatgtgtttcttaagattatgactcattaacattaaaagaactgtacgaatcctacatacttttttttttctaatgcacaactctgaattggggaagca

SEQ ID NO: 7297 - DNA, 491 bp, Glycine max
gtttaacttagttctgaataaacgcgaaagcaacacttatagggtggtgacgaattcaagggtagataagaaaaagaaaaaatgtgtagcctcgagaagcgtggcaacgcctgggtactaaccctcgacggcgacgacggcgacgtccaacaccgcctcaacccaaccctaattgattccctcctctcaacgcttaaccgtctcgcatctcaagccactcccggctccgtcctcgtcaccaccgccaccggcaaattcttctccaacggcttcgacctttcctgggcgcgcgccgccgcttccgcctccgccgccaccgaccgcctccagttcatggtggactccctcaagcccgtcttggcggcgatcatgtcccttcccatgcccaccatcgtcgccatcaacggccacgcctccgccgccgggttcctcctcgcggtcagccacgattacgtcctcatgcgcagcgaccgcggcgtgctctacatgcc

SEQ ID NO: 7298 - DNA, 1043 bp, Glycine max
ggcccgcagataaaccaaattgcaagtcacacatacacgatatgataccccgtcctccctctcttcacttttgactattgacttcctcaaccgatccactcttctctctatctgcagatggcaagtgggtttggggaatcaacagggagatcacccccaagcccttcctacttcaacaacaataataacaatgatgctgccaattttgaatgcaacatttgctttgaattagcgcaagacccgataattactttgtgtggtcatcttttctgctggccctgtctttacaaatggcttcactttcactcacaatcacgagaatgcccggtgtgcaaggccctcgtggaggaggagaagctggttcccttgtatgggagaggaaagtcgtcgactgatccaagatcaaaatctattccgggcgataacatcccgcatcgtccggctggtcagaggcctgaaactgctcctccacctgaaacaaatcattttcatcaacatgggtttggatttatgggtggcttggggggatttgcgccaccgccgatggcaacaacaagatttgggaattttgcattgtccgcagcttttggtggttttataccatccttattcaactttcagttgcatgggtttcatgatgctgccatgtatgggggaggggctggttttcctcatggatttgccaatacatttcatggtgtccatgctcatggattccctctgcgcacccatcaagggcaacaagattattatttgaagaagcttcttctatttgttgttttgtgtgttgttcttgcttttatatggcaataggttggatacaatctctagcagtatctgacttctgctctgataggtcttctgatgtgctctttgttttgtaactaaggagtaaggatgttgttcatatgataatactgtcttattaatcttgtagttcttttctttgtgatagctttgtggttcccatggtatccatgtgcaaaagatataaagcatgaaagcaatgcacccattgttaggaataaggatctgggtaccgg

SEQ ID NO: 7299 - DNA, 326 bp, Glycine max
aagaataaattccgtggaattcgtgaattgcagcccgaaaagtaataggaataagcttcgtcctttctatctccgcaggcggcagacaaaccaaattttgagtcacacatacatgataccccctcctcaccagtcacttcctcaaccgatccatttttcttagtttttcgctttcctcagatggcaagtgggtttgggggatcaacagggaggtcacccccaagcccttcctacttcaacaataatactaacagcgatgctgccaattttgaatgcaacatttgctttgaattagcgcaagacccgataattactttgtgtggtca

SEQ ID NO: 7300 - DNA, 649 bp, Glycine max
gcccccaagattcaaaatctgaaaacacacacataattcccgacaccatcttcaactctcacaaaaaaaacatcattaggccttttgagttttgtcacaaaagccgcattcgttgtcgagaaacaccttcttcatctaacttgaacactcgagaatggtgtactcctactacacccccacgtactactcaaccctccatgactcactcacctctctgtgcaagaccattcttcctttcagcttcaagaaacgaccgttacctgcggcggaacacaaattgtcgaaactgcaatccgacaaccttaaatggcagcaagactctttccaccaggtgctgaacttgatgggtctccacaaagaaggcatcgtcgctgaatctgaggtttcggccttcagaacccacttgctagacaccctcattgcttctcctccagaacaagaacaccccgttatattaagagataagcttctgtttctccaggaacttctctatgccaagtgcatttctgaagaagagtaccattcttctaagaagccattactccagagactggcagcacagggggctcagattgaagctagggatgtgatcgtggcaaggcctaaggactcaaaagagaattcagaggaagagtggtcagtgattgat

SEQ ID NO: 7301 - DNA, 2333 bp, Glycine max
ctttcctgtctctagctgtaacgccgattatttatttattttaattattatcatctcatctcacccaattcaattcacgtaccttggaatcgattcttagggtttctgactcctttatgtgtttgtctcgcaattgatcatcgcaaccacaatgtccggtcccctcgatcgttttgccagaccttgctttgaggggttttcgggcagtgacgagaagaaggagaggagatctgacttcgagaactccgaggatgaaaggaggaccagaattggatctctcaaaaagaaggcacttaatgcatcctccaaattcaaacacactcttagaaagaagagtagcaggaggaaaagcgatggccgtgttagctccgtttcaattgaggacgttcgcgatttcgaggagctccaggctgtcgacgcctttcgccaatccttgatcatggacgaattgctccccgaagcctttgatgattaccatatgatgttaagatttttgaaagcgaggaagtttgatattgaaaaggcaaaacatatgtggactgacatgctacaatggaggaaggagtttggtgctgatactattatgcaggattttgagttcaaggagttagatgaagtcgtgaagtattatccacatgggcatcatggcgatcgacaaggagggaaggcctgtttatattgaaagacttggaaaggtcgatccgaacaaacttatgcaagttacaactttggatagatatgtgaagtaccatgtgcaggagtttgagaaagcttttgcaatcaagtttcctgcttgctctattgctgccaagaggcacattgattccagcaccacaatcttagatgttcacggagtgggccttaagaactttacaaagtctgcccgggaactcattacccggttgcagaagattgatggtgataattaccctgagactctttgccaaatgtttatcataaatgctgggcctggatttaggctgctgtggaacactgtcaagtcttttctcgatcccaaaacaacttctaagattcatgttcttggaaacaagtatcaaagcaaattgcttgaagttatagatgccagtgagttgccagaatttctgggaggtacctgcacttgtgaagatcagggaggttgccttagatctgataaagggccctggaaaaaccctgatatattcaagatggttctcaatggtggagcatggcggtcaaagcaagttgtaaaagttcttaacaatgaaagaaaggttattgtgtatgccaagccaggatacccaacggtaaaaggcagtgacacatcaactgctgaatcagggtcagaagccgaagatatatcctctccaaaagcgatgaagagttattcacaccttacgttgacccctgttcatgaggaagctaagatagtaggaaaaacaagctatgccagcaacttgtctgggtatgatgaatatgttccaatggtagacatacctgttgatgctggttggaagaagcaagcatctctacagaggtcttacacctctaaaggagcacctcctcctgacactcagaaaactcctgaagggattcaagctcggatgtgggtagcactgtctatcttcttcttgactgtattaactctcttacgccaagttgcataccctgtgaccaagaaatttccagcattatcttccaatgatgataagagtacttcaaaaccacctcctgatacaacaaacatggaagttcttcctccttcatcaactccatcatgtacagaggaaaatctccttccctccatgctgaaaaggttaggtgagcttgaagagaaggttgacacactccaatctaagccatctgagatgccttatgagaaagaggaattgctgaatgctgctgtatgccgggtggatgctttggaagcagagctaattgcaactaaaaaggctctttatgaagcactaatgaggcaagaagagctgcttgcttacattgatagtcaagaaaaagctaggttacggaagaagttttgctggtgagttttggttgctgatagaaagggactctgggagagggtgttttcgaatcatggtgtttctagtgctgaccttgcacatgatgttaaactctgaatactgattcagtttaatgagtaaacttgagaattgtttcaaacttgtgtatagctaatggtggcttctttgccggattaaacacaagccttgtttttgctaacctttgttgttgtatttggtgtggttgtctttgttggttggaaaagcggttgttcttccgatctcataacccgcatcgaatattaatctattttgggggctagcgaggggaac

SEQ ID NO: 7302 - DNA, 1093 bp, Glycine max
ctttctcgtccgcattcctcaggttcttggaaacaagtatcaaagcaaattgcttgaagttatagatgccaggtacttaatggctccattttttatatgtttatattaatctctgcatgttacaatttttgtatttttgtttttcttttccattgactaatgctttgtaattttttgcactgctacaatttatatgatccttttaaatgcctaatatattattgtgcacatgatgaagtgagttgccagaatttctgggaggtacctgcacttgtgaagatcagggaggttgccttagatctgataaaggcccctggaaaaaccctgatatattcaagatggttctcactggtggagcatggcggtcaaagccagttgtaaaagttcttaacagtgaagggaaggttattgcctatgccagaccacaatatccaatggtaaaaggcagtgacacatccacagctgaatcagggtcagaagctgaagatatagcttctccaaaagtgacgaagagctactcacacctgaggttgacacctgttcgggaggaagctaaggtagttggaaagttgagctctgctggtggtggtaacttagctgggtatgatgaatatgtaccaatggtggacaaagctgttgatgctgcctggaagaaccaagcatcactccagaggtctcaaacttcaaaaggaacacctcccctccctgacactcctaacccccctgaagggattcaagctcggattgtggtagctctaactgtcttctttatgacgctgtttactctcttccgttcagtcgcatgccatgtgaccaagaaacttcctgccgtatcatctaatgatgatcagggcacttcagagccaactcttgatgcaacaaaaacaaactatgaagactatcgtcctccttcaccaactccagcatatgtagaggcaaatctcctttcctcaatgatgaaaaggttaggtgagcttgaagtgaaggttgacacactccaatctaagccatcggagatgccttatgagaaagaggaattgctaaatgctgctgtatgtcgggtggatgctttggaagcagagctaattgcaac

SEQ ID NO: 7303 - DNA, 414 bp, Glycine max
agtgaaagctggcgtgtttgacaaaatgagggaatgaagactattagctcattctctgaatattctgacatccgccaccgccacgtgtcaacctaattgggatccacagtcttcttccttcttcagctccacgcgccctctttccctttcctgtttctagctgttaccgacgtcaattgttactccgattatttattcttatttattttccccatctcactctccttcgattcgggatcactcacaacacaagtactactaccttggaatcaatttttagggtttctgattcctttatgtgtttgtctcgcaattgatcatcgcaaccacaatgtccggtcccctcgatcgttttgccagaccttgctttgaggggttttcgggcagtgatgagaagaaggagaggagatctga

SEQ ID NO: 7304 - DNA, 862 bp, Glycine max
  unsure (1)..(862): unsure at all n locations
ggaaatagggatctggtgtgggtgtgggtggaggtgagggttggttcatttgatctgcgactgagagaagagaagagaattgtgatgggaggaggacacggtcacggcaccacctacaaaggagttaccgttcatcacccaaagcgctggcacactatcaccggcaagggtttgtgcgcggtcatgtggttttgggtattctacagggcaaagcaagacggtcctgttgtattgggctggaggcatccttgggagggtcatcacgatgatcatggcaagggccattaagcattccttaggcatgagctccaagaacaggaagaacagaatttgaagtgtctgttgctgtgggtgtgctgttagttgaaatgtttactttgatcaattcaataaatttggctgtaaaataagagatttctttttgcatgatttcatgagcattagatatgtctgtgcaccttacctgttaactgggatcaaagtcatgtctatgtttggttggattattaaccatttcgtcgcttttcttagaaatttatgggagttgactcaatgtgtgtgtcaactatgatagacgtgtgcccgccagttaaccaaaatgttgtagtgctctccgtttgtgctaacctattgcttcattgttttaatgggagcattatttgtcaccaaataattatgatttttaatgtacgagatgaattttagatgtgctacagccctgggatgatatttactagaatttactagtaaatttcccccttttttttgttcaaaanaaaaaaaaaananaaatgagggggcggcccaatccccctttaangggcattacggctcaattggcccggtttaacactcgactgaa

SEQ ID NO: 7305 - DNA, 354 bp, Glycine max
gacacaacatcactgcaattcctttttccctcgagcaacgacgatggacgacgcggaagcggcgaacacgcttcgcattctggtggcgacggactgccacctcggttacatggagaaggatgaggtgcgccgccacgactccttccacgccttcgaggagatttgcgccgtcgccgagcgccaccgcgtcgacttcgtcctcctcggcggcgacctcttccacgagaacaagccctctcgctccacgctcgtcaaggccatcgagattctccgccgctactgcctcaacgaccgccccgtccccttccaggtcgtcagcgaccagacgctcaatttccagaacgcgtttggtca

SEQ ID NO: 7306 - DNA, 445 bp, Glycine max
ggcacactacggtactatagtatagtgtttacttacttaattactcagcactctcaaaaaaataaaaacttcttttataaattggaaaagggactcttcactcttctctttctctctctgcaatgtaggtcgtcggagaatggcaaagtgtcatcagaacaacgtcggatccatcgctcttgaccaccgccactccgccaaaaatgccaccgccgccggccacttccgcgtgctccgccgcttgatcttcgacgccgtcagctgcggcggcacctctcgctaccggtatcgccagcgcggtggcgatgtcagcgacggcggtgacttcagctcagcggcgtgccacacagagaaggaggagaggtcggagaagctatcggatcttctgaacgccgcggagaataaaatggctgctgcggatgatgagaagaaaaagaagaggcac

SEQ ID NO: 7307 - DNA, 452 bp, Glycine max
gggagtgtgaggccatcgacgcagtttgaaatcatctgctcctgctcgtttttctgttctgcacgttggaacattctcttcagaaaaagggtgaatttgtgtttctgttataccctattaagtgaggaatcattttttggctttttgcccctaaaaaaatggtgcaagttgtgtcattgagcactctggcaacctgtggaaatagcaggttatgtggatcctcaccatcttggatggcaccctttgagccatacaagagatcccaaattacctcttccaatggcagacacttggtttggaacaattctgtgcagagcttgttcttaacaaggcacagtgattttagggctgaagcagcatggatgtttagagggggagaacaagggttggatgcgagttcggagcacagcgagagcgctaatgaggatatcttgatgttcttctttcagctc

SEQ ID NO: 7308 - DNA, 408 bp, Glycine max
ggacgcacatagtaaggtgtgattcagcaacaacagcacacaaagacacagacacagattgttatcccaacgttttatcctttcagctttaagctcaccgaactaactcagcattcaacaacaatggtgatgctcatccgttgctcttgcttcttcgctcgccctcgcttctcacaacctcaattctacggcaacaacaccaaacccttactcccagggaaattagcttttctttctctaaaacctgacaagggtgttccacactttgaagatacgcttgatgggtcttctaagatttcatgtttgctgcactgctcaaagtgtaaggaagacatacaccaaaggttcccatcactgatatttgttgcgagcaatgttttgatgttctctatgcctaacacagctttg

SEQ ID NO: 7309 - DNA, 548 bp, Glycine max
ggagcagagaaaaagcatatggtctcccgtcacagatccaagaagtggtttcaaccgggaatccagaactttccacagcctcaagccccctctccgtctccctccccccaacgccgccgtctccgcagccgccttcgccctcttcctccgccgcaactcgcagttcccggactcctccaccgcctttatcgactctgccaccggccaccgcctctcctacggcgagctcctccaccgcgccaaaaccctagcctcgaatctcgccacaatcctcaaactcaccaaaggcgacacagcgctcgttctctcaccaaatattctccaagttccgatcctctgcttcgcgcttctttctctcggcgtggtcgtctcccccgcgaaccctctctccacgcgctccgagctcacgcgcttcttcaacatcagcaacccctcaattgtcttcacagtaacctacggtcgtgaaaaaacacgcgagtttcaagtgaaaaccgtgctcctggactctcccgagttcgacacgctcacgaagtctcagattcacacaa

SEQ ID NO: 7310 - DNA, 811 bp, Glycine max
aattcagctcgagcactttttcaactgcacttcctctccgtctctaagctactcaagcaaacaaacccattccgcatagacagtgaagaaggctttctctagcagctagagatggcagagggaagagggtccactctcgtgcacctcttggtcgtggttctgtgcttggtcgctttcgggttcgccattgccgccgagagaagaagaagcgtcggaaccatgcacaaaattgaaggaacaaatgaaacattctgcagctatagttcagatgttgccactggttatggagtgggcgctttcctgtttcttctttctggtgaatcactgctaatgggagtgacaaagtgcatgtgctttgggaggcccttaacacctggggtaaatcgagcgtggtccattatatactttctttcttcctgggtcacttttctggtagcagaagcttgcttgatagcaggtgcaaccaagaatgcctaccacaccaaataccgtggaatgatttatgctcataacttctcatgtgaagccttgcggaaaggtgtcttcattgccggagcggttttcgttgttgcaaccatgattcttaacgtatactattacatgtacttcacgaaggcaatgacaacaccagtttctcataaggcaaatcgggtgagctccactgttggaatggctggatatgcatgatggactatggctgaaaagggtaacatattgagtcttaatttcagtggatatctctatgattgtcactagcaaaacggtgattttcaatttgggttttcttaggtgtttataatgtttttgtgga

SEQ ID NO: 7311 - DNA, 413 bp, Glycine max
tatcgagccgctcgagccgaatcggctcacacaaagaacaaaaggcaaagacagagagagaaacaatgtcttccccaagcaaacgtcgagacatggacttgatgaagctgatgatgagtgattacaaggtggagacgatcaacgatggcatgcaagagttctttgtggaattccacggacccaaagacagtccttatcaaggtggtgtgtggaaggtaagggtggagctacctgatgcttatccttataagtctccatctattggctttgtcaacaaaattttccatcctaatgtggatgagatgtctggttctgtttgcttagatgttattagccagacttggagtccaatgtttgaccttgttaatgtgtttgaggtgtttcttcctcaacttcttctgtaccccaatgca

SEQ ID NO: 7312 - DNA, 872 bp, Glycine max
cgtgcgtcaagatcccaaacgtcagggggtgctgtgagtgagattacccatagatagagagcgcggcataacctaaacctatctttcttctctctctgtgtgtgcgcatcaacggcaaccagaagcagccatggccactgcaaggactgtgaaggatgtttcacctcatgagttcgttaaggcgtactcctctcacctcaagcgatccggcaagatggagctgccagagtggactgatattgtgaaaactgcaagatttaaggagttggctccttatgatcctgactggtactatgtcagagctgcttccatggcaagaaagatctacttgagaggaggacttggtgttggtgcctttcagaggatttatggtgggagcaagaggaatggtagtcgccctcctcatttttgcaagagcagtggtgctgttgctcgtcacattcttcaacagttgcagaacatgagcatcattgaactggacaccaagggtggcaggaaaatcacttccagtggccggcgggatcttgatcaagtggctggacgcattgtggttgcaccttgatttgaaaacgccataagcatattgaggtttttggtttctggttagagagatgtgatgataacagattatgctaaagttttgattttagactgtcttttatgtatcggacatgctcaatgtttatgttgctttcagtcattttagataatattgctacatttaatttgagtttttctttggacattcttgttccttaagtgtcttttacgtatgaaatgaaatttaagggtaaattaaactgattaacacaaaaaaacacagaacaataacatcccaccttaaaactcccctccccaaaaaaaaccggccc

SEQ ID NO: 7313 - DNA, 518 bp, Glycine max
atcactacctgcgtaaaaagtgtacttcactaaccattactctgactattactatgtcaaatctgcttcactggcaagaaacatctactttagaggaggactcgcttttcgtgcctttcataggatttatggtgggagcaagaggaatggtatccgccctcctcatttctgcaagatcagtggtgctgttgctcgtcacattcttcaacagttgcagaacatgagcatcattgaactggacaccaagggtggcaggataatcacttccagtggccggcggcatcttgaccaagtggctggacgcattgtggttgcaccatgattcatgatttgaaaacgccataagcatattgaggtttttgggttctggttagagagatgtgataacagattatgctcaaattttgattttagactgagtgtcttttgtgtattagacgtcttttgtgtattagacatgctcaatgtttatgttgctttcagtcattttagataatattgctacatttaatttgagt

SEQ ID NO: 7314 - DNA, 570 bp, Glycine max
cccacgcgtccgcccacgcgtccggagaagaagtgaaagaaagcatcagccgcggcggtgttaggtaggcggagccatggcggcgcctgaatcccctctctgttacgtcggtgtcgccaggcaatccgctgcttttcgcctgatgaagcaaatggggtgggaagaaggagaaggtcttggaaaagagaagcaggggatcaaaggacacgttcgagttaaaaacaaacaggacactattggtattggccttgagaagccaaacaactgggccttcgacaccactcagtttgataatattcttaagagattgaaagttcaagcaccgcaatcccatgacatagaggaaaaagtggaaaccaaggctagtgttcctgttgataatgaggaggatctgtccccaaaactacaagaccacaaggaagatacacgagaagagagagggggaagcttgtctcgcaatattcctttgaagatcttgaaagaattcttgttaaaaaggtgacatatctgggagtactgaaaatctaatggtgaactggacatgttaaatacatctgaaattcaaaattt

SEQ ID NO: 7315 - DNA, 598 bp, Glycine max
agcccacacgtccgaaacgacagaagggggtttctaaaacactatcccttttactgtttattgacaaagagaaacaatcggaggatctgttctgttccataagatggctggacttttaggatataggagccttccacctaaggcaaagaatctggtagttgctgggggtttgacagcttttgtctttggtgcatacttctacaccatgagggctgttggaggcactgatgaactgcaggtagcaattgataagtttgaagctgacaagagcaagaatgagggtgatgccaacatgccatcaaaggtctaaagcttgtacaataaagcaatactttgggtgtattcactgttttggtttgggatcaagctttttacttagtatgagaatgttctaaaaggaatgatattgaatctagttgctaataagtttcaaccagctttatgtactatgactgcgtggtagggaatctaaattgagattctgttttggccttaaaaaaaaaaaaaaaaaaaaaaataattatataaaaattaaatatattatattttaatataattttaataatattataatttattatttattatttataaaata

SEQ ID NO: 7316 - DNA, 1075 bp, Glycine max
ggaccgttgaaaaaagctgaagctcatcatgatggtcccatacaattatcagcatctgcgtgtgagttgttagagacaagaaaaacgagacctttagatggtcggaagatcaaaaggagaaagccaaacagcacctcctcagcaaattaacataaaaaacctctctttctctatttcttttattattgggtatgtcttgaagttcttctgaatttgaagcatatatttgtccttgaatggaaacacgtgctggaagtgatatgaagatggccatagatgatgctttgaacgccttctctcctgtttccacccccaggattttctggaaatcacgaaggagatcagctagcgggaggaatttagaggtatcagaagatactgctaataaaccacccagcaagcaggaagatactcctcctcctcctcctccaccttctagtgaggaggtgcagaacacgactccgatttctgagcgccgaaaggccttgtttgaaccgttagaacctataatgaatattaatggccgacgaccctcggccgagtctttacttcctccccctgactttgagtctgcaaactatccgaagggctggctgattggcaagaagagaaaactcgttaatgtcgatgttgttgaaagcatgagaaggattgccatccaagaaatgaacagaaaggacagggaaattgatgggctgaatgaacagctggaggaggattcacggtgtctagagcacttgcaactccagcttgtggatgaaaaaagcaaacgcgctcgagtggaaagagaaaatgcaatgctgcaagaacaagtgaacatgcttatgaacatgttgcaagaagcagaacaaatgggagatgaaggccctgatgaaccttaaagtttattattataccctgtgtgtgtgtgtgtgtgtttgcttgtgtgtattaaattctttttgtaggttttgttcgtcatgtctagttggctgcgcatgtcggatgtctctgcagttataaaatagagtgtgcatatagtaatatttggggggatatagatcaaaccgcaatgagcaaactattcgtttatatc

SEQ ID NO: 7317 - DNA, 473 bp, Glycine max
gagaaaggcaaagagcacctccaaaaaaaaacaataaccgtagcccacacctcctctcagcaaacatctctctttctctgtttcttttattatgttgtgttccttgggggtgctgatgtatgtgtgttgaagttctgaatttgaatggaaacacgtgctagtggtgatatgaagatggccatagatgatgctttgaatggcttctctcctgtctccacccctaggattttctggaaatcacgaaggagatcaggtatatattaagtcttaacttcacctacgttcctctattttctctctctactttatctattacattctgttccaaacaattttcgcaactgcactttactttctcctctgagccatttggatttcaaattcaatgtttttgttcatttttgcatggaattttcaatattataacatgccctctgccaattcttaattcctttcaaaattaaaattaaaat

SEQ ID NO: 7318 - DNA, 450 bp, Glycine max
ggctactcactcacattacacacaccacctcgcactcgcagggacagagagtggggaaggaaaaacacagactaaatggcgccaaatgctctctttctcttctctttcctcgccatgctcctccttctgctccgctcaaccgccgccggccacaactaccgcgacgccctccgcaaaagcattctcttcttcgaaggccagcgctccggcaaactccccgccgaccagcgcctccgctggcgccacgactctgcattgcacgacggcgccaccgccggagtggacttgagtggagggtactacgacgccggggataacataaagttcgggtttccgatggcgttcacgacgacgatgctgtcgtggagcgtgatcgatttcgagaagagcatgggggcggagctaggtaacgcgttgaaggcggtgaggtgggggaccgattatttgctc

SEQ ID NO: 7319 - DNA, 2113 bp, Glycine max
  unsure (1)..(2113): unsure at all n locations
accttctnctgttcgacgacttagatcgccttctcctgtgcgacgacgtagatcgccttctcctgtgcgacgacgtagatcgccttctcctgtgcgacgacgtagatcgccttctcctgtgcgacgacgtagatcgccttctcctgtgcgacgacgtagatcaccttctccagtgcgtcggcgtagatcaccttctccagtgcgccgacgtagatcaccttcccctgggcgccgacatagatcaccttcccctgggcgtcgacacagatcaccttctcctgggcgctgtcatagatcaccatcacctcttggacaacggaggtcactctcacctagacgacgaagatcacttgttactcggcataggtcaccttcaccagtacgccgaataccgccaaccaatgtgcagaatagatcagactcccccatgcaatccccctcccacatacgacaaggaacagaatccgtgactcgtcaaccctctagtcctctggggtcggcaataagagataaatgtggcaaagcttcacactataaatcacaagattcaatgtccacacctgagaagtctccaattcaatctgtatctcaagaagcaaggagtgagaccagcagtgaaggtcgaagtcctcatgagagccctatgaaacaaagaagagatgagttgtccaatgaaataaacacgaatcctctgaagaaacaaagaacccaaagacctagccgtgacagcccagatacaagagatgaagcagaagaaacgcactattccagagaaagcagagatccaaaaatgaattcatcacaaaagatatcaaaacatttccctgttagtaagcgaaaaggttcacctgcaaaatatcgtcacgaggagttctctcctgaaagggtgtcaggtcatccagcttctgaacatcattatgataacaatgattggagtaagaaaggccaggagataatgcgtgataaatcttccggaaagggcaatgaatttcctgctcaaaagtcatcaatgaacaaagaaactttttccagggagaagcctcaagaatcttatgctgtagatattaaaaaatcagatgtcaaggaccaatcccattcaaactatgccaaaagcagttatcggcatcacaaatccgaaaccactcaagatttagttggaaaaggtgatcgtgtcaatcacaatgcttcacatgattctgtttctgaggatagtggtaagcatagacgggagggaaaggataggaaaaggcataaaaggtctgagaaaaagtatacatcttctgatgaggattatagtgatgattctgagttagaggacaggaaagaggctaagaggaggagaaaagaggagaagaagctgcagaaggaggagaagcgtcgaagatgtgaagagaagcgacgcagaagggaagaacggcgtgcggagaagctgaaaatgaagagtaaaacagatgatatttcaggtgatgaggaggctaaacgaatggattatcatcaaagtgatagtgtagttacatcatctgagcaaaagaagcttgagattgaattgcggaacaaggctcttgaatccctcaaagcaaagaagggcatgaataactaaatgcatcacatccaagttttatgttgttttatgctttaaaaacttattgagaaatatcttagcttgtttaagaaacttggttttgcaaatgttatgtttatttattcatcggtaaatgtttgatgtcatctatctttaatgctggcagcggaaatggatagatgatgctttctgagtaaatctgttgagtacaactctatgcagacattgtcctatatttactgatgaattttatgtcaactctagatgacctggtgagaagaccatgtgcagaccctttattttgaacttcaattcaggtgaagtttttcattcttttagcatattttttagttctagaatagcttcataagtaactctgatgtattacgtaggtggttctttctggttgtatatttttcaaaactaacattggcatgtcggtagtttttcctggaatgtgtttcccggaattctccatgatgtatttgtggggtccgtcgcgattgatgtagctgtatgcttttaagtttt

SEQ ID NO: 7320 - DNA, 858 bp, Glycine max
tactcggcataggtcaccttcactagtacgccgaataccaccaaccaatgtgcggagaagatcagactcccccatgcaatccccctcccccatacgacgaaggtatggtagtagaactcctccacactctccatctccattgcgacgtagatcacctattcctggtaagcaaagatctcctagtatctccccactccgacagaggtctcctcgagatgaacggagttctcaatctccaatacggcgtgtatctccatctccaatcaggaaaaattctccaagacaccaaagaagtcccttgccgtcttctatggggagagtcagaacagaatccgtgactcgtcaaccctctagtcctctggggtcggcaataagagataaatgtggcaaagcttcacactataaatcacaagattcaatgtccacacctgagaagtctccaattcgatctgtatctccagaagcgaggagtgggaccagcagtgaaggtcgaagtcctcatgagagccctttgaaacatagaagagataagttgtccaatggaagaagcacgagtcctctgaagaaaccaagaacccagaaacctagccgtgacaggccagattccagagaagaagccgaagaaacatactctttcagaggaagcgcaggttccaaaatggattcattcccaaagatattaaaaactttcccctttagtaaggcaaaagggtacactggcaaattttggatgtgaggatttctctcctgaaagggtgtcaggtcatacagtttttgaacatcattatgataacgatgattggagtaagaaaggccgggagataaaacgtgataaatttttcagacaggacaatgaat

SEQ ID NO: 7321 - DNA, 1206 bp, Glycine max
cgagtctctgtgactcaaactcgaaggtgaaggtgaaggtgatgatggaattggaagtcgacgagaacgacttgaaagccgccggtgctgagctcttcgtcgacggtggtcggcgcggcattcgcatcaatggctgggtgatcgagactcggaggcactccatactcaactcttccacactccaagagtgggaacagaatctcgatacgtctcatttaccagaaatggtttttggggaaaacactttgattctaaaacacttgagcagtggcaccaacattcattttaatgcatttgatgctctacgtggctggaaacaggaagcattgccgccagttgaagttcctgcggcggctaaatggaaatttagaagcaagccctctcagcaagtaatactagattacgactatacatttacaacaccttattgtggaagtggcactattgagattgataaagatctgaatgagggagagacttctaaggaaaccagtgatatccattgggaagactgcaaggatcaaattgatgtagttgcacttgcatccaaggagcccatacttttctatgatgaggtggtgttatatgaggatgaactcgctgataatggagtatcacttcttactataaaagtgagagttatgcctagctcttggtttcttctgttgcgtttctggcttagagttgatggagtgttgattagactgagagaaacacgtatgcattgtgtatttggtggaagtacaaatcccattatacttcgagagagttgctggagagaatctacatttcaagctttgtctgcaaaagggcacccttttgattctggtgcgtatggtgatccgagtttcatcagccagaagctccccatcataatgcataagacccaaaagcttgtaatttcctcttaaagttataagactgtaaatccccataatgcaaaagggttcttgttcatatttattcatctttaccatggctgtttggaaccataaattgcttcttatgagataagctcatagatgcatgctaatcatgttctgttcttgtacgaaaggttggagggagggttggggtgagatctaactaatatgcgagggattcattttacatgaaaaattgagaagtttattacttatatataggttgaagttaatttataatttatcatacgaacttatgtatttggtcacaattttaactact

SEQ ID NO: 7322 - DNA, 814 bp, Glycine max
cataagaatttgtagatccttattatcaggaagctagaaagttcagcaagccatacattgatcagattgctattgcagctaaacctcatgttgataaagtacaggtagttttgaagccctacacaaaggaggttgttcgcacttatgggaagtttttggaatcagctactacatatcatcgccaggtccaagcttctgtccaagagacactgaaaaagcacgagcttactagacctcttgctactaaagagttggaatggtttgcggcctctgcccttttggctttacctattattttagtggctagagtgttttcagctgttttctgtagcaaaaaagtgaataaacctgctcgaaatggaaacaatcaccatgcacgacgtaaacataagcgagggcatctagacaagcacacaacatgaagttggttcctgctttatttttttccttggaaagtttagataatttttcctgttcgcatgagcttattgagggggatgtatctttcctgtcgtgtggggtttcgaatattttacttctctttttttgggtgaggtaactttaggatgtttcactgtagaaaagggcacacagtatgtttagatgttcatgtattatccctgttatattttcttaaattccttgcactcccttttcctgttggttttattttcttaaattcttgacatagtagaaatgtttccacttaatgtatgtttatcagaatcagaactagttctgtctattgcggttgtctgtggaacttgaaatttattactaaaagaaattaattcatgagttattcttctttggg

SEQ ID NO: 7323 - DNA, 385 bp, Glycine max
cgacgtaaacataagcgagggcatctagacaagcacacaacatgaagttggttcctgctttatttttttccctggaaagtttagataatttttcctgttcgcacgggcttattgagggggatgtatctttcctgtcgtgtggggttttgaatattttacttctctttttttgggtgaggtaactttaggatgtttcactgtagaaaagggcacacaatatgtttaggtgtttatgtattatcagtttatcactttgttatatttgttattagaccttgcactcccttttcctgctggttttattttcctaaattcttgacatagtaaaaatgtttcctcataatgtatgtttattaaaatcagaactagttcctgtctattgcgg

SEQ ID NO: 7324 - DNA, 254 bp, Glycine max
gaacaacctcctttgtgtagggcttcaaaactacctgtactttatcaacatgaggttgttcgcacttatgggatgtttttggaatcagctactacatatcatcgccaggtgccaagcttctggcccagagacactgaaaaagcacgagcttactagacctcttgctactaaagagttggaatggtttgcggctctgcccttttggctttacctattattttagtggctagagtgttttcagtgttttctgtagc

SEQ ID NO: 7325 - DNA, 1220 bp, Glycine max
attatatattagtgcatgaacccgaatccaccggtttgagagtctcttccagtcacagcagagacagagagtaagagcacactgcacagatctgagtggtgactctttcacttctcatcactattattattaggtctgaaggctcattgccattatcatgtcaaggaggccagtaaatccttcgcgtcggctaggtgatggtggaagtataccatttgttgcatctatccagtccaaatctcaaaactctcccctactatctattgggcttgtcattgtgggtgcaatcctcctgattggttattgttacagcaattcaggtggagctagcggtggtattaaggatgtaaaacttgaaggtggcgcatcgtgctcattggaagtcctacaagcattgcccattttgaagaaagcatatggagacagcatgcataaggttttgcatgttggccctgactcttgttctgtgttatctagtttgttagaagaagaggatactgaggcttggggaatagaaccatatgagttagatgatgttggtgcaaagtgtaaaagtcttgtacgcaagggcattgtgcgtgtggctgatttgaagttttctctaccctaccgtgcaaagtcattttctctggttattgtgtcagatgcattggattacttatctccaagatacctgaataaaaccctgccagagttggtgagggtgtctgctgatggtgttgttatctttgcaggttatccaggtcaacagagaactagaggtgaagaagtggccaaatttggtcgtccagccaaattgcgcagctcatcttggtggataaggtttttcgttcagtctagtttagatgaaaatgaaactgctggaaagaagtttgaacaggcttcagccaagaaggcatacaagccagcatgccaaatttttcacctcaaatcatacccttgaaatttcactgtcttatttgtatactccacttaatggttagaagccatgctgatgagataggcatcttcagcacccgaagggtaaagttccatatatgctgttgaaattatagttcgatggtgatgacatattttatttagattcaattattaaactatttttgtcttggatagtgttcctcatgtttttgtattcacaactgctatttattatttagaaaaatttctaatttcacacatttacttcatctatagtatatgatgggaaaaccatattt

SEQ ID NO: 7326 - DNA, 713 bp, Glycine max
agttatattaatgcatgaatccgaatccaccgctttgagagtctgtttcggtcacagcagagcagagagtagtaagaagacactgcacagatctgagtggtgactgaaggaatctagcttctttcatttctcatcactattcttaggtctgagggctcattgccattatcatgtcaaggaggccagtaaatccttcgcgtcggttaggtgatggtggaagtataccatttgctgcatctatccggtctaaatctcaaaactctcccctactatctattgggcttgtcattgtgggtgcaatccttctgattggttattgttacagcaattcaggtggagctagcggtggtattaaggatgtaagtaaacttgaaggtggtgcatcatgctcatcagaagtcctacaagcattgcccgttttgaagaaatcatatggagacagtttgcacaaggttttgcatgttggccctgactcttgttctgtgttatctagtttgttagaagaagaggatactgaggcttggggaatagaaccatatgagttagatgatgttggtgcaaagtgtaaaagtcttgtacgcaagggcattgttatccaggtcaacagagaactagaggtgaagaagtggccaaatttggtcgtccagccaaattgcgcagctcatcttggtggataaggtttttcgttcagtctagtttagatgaaaatgaaa

SEQ ID NO: 7327 - DNA, 753 bp, Glycine max
aggtacgcctacgcgtgcgacgtaaagttgcgaagggccactcgcttggtagaatttcttgcattttattattttgaactttgaagctgaaggcaccattttgaggcagacacaacacagatccgtcttgaacttctctgtgttctgaaacagcaacaatggcaaaaaccatgactatgtggtttctgttggtcactctttccttcgtttatgctgctgccactgctaatactcaaatcaaagttactaacaaccctgcggacaagttggtagttgcgattaacgaaaacagaactgctcacaaggtgtcagccttaacggacaacccggggcttgcgtgtattgctctacaatacattaaggcataccagggtgaatgtgatgctgtgggtggatctgatggcaagaaacctcctgaatctcgatttgctgaagtttttgtcccaaactgtggtgttgaggcatcaactcttgctcctataactggtcgtttcctggcgtgccagactaagtatgtccatgcccctgaggcattttctgatatcctcataaggaaccaacagagcttagacatactctacagtaagaatcacactcaggttggtgctgcggtcacaggtactgatgggggctctccttacttctggtgtgtgttgtttagcagtggcaaacccaacaaaacatttacttttgagagtggtgtggctaaaataacaaaacccggttgctttagtggagctaatgatgagtgca

SEQ ID NO: 7328 - DNA, 1457 bp, Glycine max
attattttccaatcaatccaagtactctccaatctctttcatcataaacaaagattcttctctattctccaactcttttgcttcttccaccaaagtggcatcaaaaactaagaaaatggggtgtggcaatttgttcttcacagtcctcataaccttctcagtggcactcataacatacaacatcataatctctgccaatgcccctctcaagcaggacttcccggggccctcacgcccttccatcaaggtggatcctctcatcaagatgccactgcacagaaaatcatcatcctcggaggaatcgaagaagaggttgttgttccacactgctgtcactgcctctgactctgtctacaacacgtggcagtgcagggtgatgtactattggttcaagaaggtaagggatgaaggaggagatgaatctgggatgggggggttcactaggatcctgcactccgggaagccggaccagttcatggatgagatccccacttttgttgctcagcctttgcctgctggaatggatcagggttacatagtccttaacagaccatgggcatttgtgcagtggcttcaacaagcagatattaaagaagattacatattgatgtcagagccagaccatataattgtcaaacctatacccaacttagccagagatgggctaggagctgcgttccctttcttttacattgagcctaagaagtatgaaacagtgctaaggaagtactttcctaaggagaagggaccaatatccaatattgatccaattgggaattcacctgttattgttgggaaggaattcctcaagaaaattgctcccacttggatgaatgtttctctggcaatgaagaaggatcctgaaactgataaagcttttggatgggtgcttgaaatgtatgcttacgctgttgcatctgctcttcatggtgttcgtaacatattatacaaggacttcatgattcagcctccatgggatcaagaaattggcaagacatacataattcactacacttatggctgtgactatacaatgaagggtgagctgacctatggaaagattggagaatggagatttgataaaagatcttatgataaagttgctcccccaaagaatctgacattgccaccacctggtgttccagaaagtgtggtgactctcgtaaaaatggtgaatgaagctacagcaaatattccaaattggtggtcataggaactttaaaggtgttgcaaattacaatcgttggagaatgctttggacctatggccattttacacggaagagcattgtacacgttgcttatgtatttatgtaattcttcgtatatagttggacttgcgagtgagacaaacctgtggaattgtatcaccggtgcttcgtcaaaatgcttgcgttcagctgctgctccagtatttgggttttcttaattaaaacttgcttccccttaattttcatt

SEQ ID NO: 7329 - DNA, 906 bp, Glycine max
  unsure (1)..(906): unsure at all n locations
gaaatcctgacaacttgatgaatgaaatttctactgttgtggttgatccccttccagcaggtttggaccggggatacattgttttgaataggccatgggcctttgttcagtggctggaaaagactaaaatagaggaagaatatgtgttaatggcagagcctgatcacatatttttacgtcctctgcccaatctggcctttggaggacatccggctgcttttccatttttttacattagacctgatcaaaaccaaaaggaccataaggaagttttatcctgaggagnctgggccagttacaaatgttgatccaattggaaattctcctgtaattataagaaaggatttgatcgcaaagattgcccccacatggatgaatatttctttgaagatgaaagaggacccagagactgataaagcttttggatgggtgctagaaatgtatgcttatgctgttgcatctgctgtgcatggtgtgaggcacattctgcggaaagacttcatgttacagcccccatgggatcttgaaactaacaagaagtacattctccattacacttatggatgtgactacaatatgaagggtgaattgacttatggcaaaattggtgagtggagatttgataaaaggtcacatctacgaggacctccaccaaaaaacttgcccttgcccccaccaggggttcctgaaagtgtggtaacccttgtaaagatggtgaacgaggctagtgctaacattccaaattgggactcatcttccacctcatcatgatgatatcccaagtgcacatttcgaaaaggaaaaaaaaatagacatttgagtctttttttttttttttttatcacgagtttagtcttattagatggatagatgaatgtaagcaataccattttatatgacaattaa

SEQ ID NO: 7330 - DNA, 339 bp, Glycine max
ctaaaagccgcctctattatatttactctccaatctctttctctatctctttctctttcattaataaacaaagattcttctctatttctccaactctttctgcttcttccaccaaagtggcatcagaaaaccaaaaatggggtgtggcaatttattcttcacaattctgataactttctcagtggcactcataacatacaatatcataatctcagccaatgcccctctcaagcaggacttcccggggccctcacgcccttccatcaaggtggatcctctcatcaagatgccactgcctctgactctgtctacaacacgtggcagtgcagggtgatgtac

SEQ ID NO: 7331 - DNA, 334 bp, Glycine max
catgttacgaacaccatgaagagcagatgcaacagcgtaagatacatttcaagcacccatgggatcaagaaattcgcaagacatacataattcactacacctatggctgggtctttactatgtagggtgagctgacctatggaaagattggagaatggagatttgataaaagatcttatgacaaagttgctcccccaaagaatctgacattgccaccacccggtgttccagaaagtgtggtgtcttttcacctccctcactagataatgtgattttgttgagttgcattcttgtttgtggcggttttctcgccagtatttagccttggacggag

SEQ ID NO: 7332 - DNA, 434 bp, Glycine max
aagacgacagaaggggaaggaagagaatggataacatcacagcaagtgaagtagctggtttcggagtgggtgctgtgctcctctgtgccactgttgctgccaccaaagtcgatgctttcttctcttcttctcagcgcagctcattagggatgtgcaagcgatgtggcaatcttaggcgattggcttgctcgacatgcaaaggaactgggtctatcagagaagggggaatacttggtattaaactcgtagaagatttgtttgaaacaattggtaatagtgaaccaaacgtgaagcagatagcatgtgtaaaatgtcaagccaaacgttacttctcatgtcctaattgctctgaactataatcactgtggctttatgttctatacctacaaggatttttgcccaaaacattcaatgtcaacatgtaacattgtgaa

SEQ ID NO: 7333 - DNA, 557 bp, Glycine max
gacgacagaaggggtcatggtgatttaaactatggatatttgaaggttgaggagagtgtggagaatgagacaagtagagggtattattcttctttgatgttgtaagaatgatagtgaagcaacacaattttttatcaaataaagtatgaaaaatgaaaatccaagaagcaaccgtaatgggtgattgtgctgccggagaatggtgccacttaaaagatgcagacaaagatttgaggttctgcgactgattttttgtaggtttggtaagctgaaaatatgtaactctctttggcaaaatatttatctattttttattaattctttcttaattatttaaattttgattagttcaattaataaattttatgcatgttcgatataattgagggccactcaaatataactatcatcttatgctcatacattttggttccaagggatagaacatataaataatgttagtacgtaaactataaaaaagaaaatgcatgtcatgagacggcttgatgttttatctgaaaccggggtgaatggagacttgtgggaagttttgtgcc

SEQ ID NO: 7334 - DNA, 383 bp, Glycine max
ggccgataccaagccagctgtttcactcttttctctctttccctttctattatctctccaacttcactccttttattcccttatcacttcttagttctttccttatcctttcgctatccagacatgtaatctctcctttaccaagttttgttttactatttgatcggatcggatcggatcttgctttcgccattaattactcatggagatccgtgccgatgcagataccagctccttttcaagtttgttcgcagctgtgtcatatggatttacatcaatggccatggtttttatcaacaaggctgttcttatgcagtatgcatattcaatgactctcctcactctgcagcaattggttaccaccttgcttattcactttggta

SEQ ID NO: 7335 - DNA, 395 bp, Glycine max
cttagttctttccttatcctttcgctatccagacatgtaatctctcctttaccaagtaaatccatccttcttccattcatttctcatccctttgttctacatttaatcacctcatttactaatttttctttctttcttagacctttgctcgatctgattttgaaagcttgactttgggtttaggttttgttttactatttgatcggatcggatcggatcttgctttcgccattaattactcatggagatccgtgccgatgcagataccagctccttttcaagtttgttcgcagctgtgtcatatggatttacatcaatggccatggtttttatcaacaaggctgttcttatgcagtatgcatattcaatgactctcctcactctgcagcaattgg

SEQ ID NO: 7336 - DNA, 716 bp, Glycine max
tacgtgcgaagacgacagaagggggaagttcaaagtgtaggacgagaaagtagacacagccatgtccactactggtactgttctggcttccactccaacacaaaggctattaggcaaagtggcattggttactggtggagcgtctggaattggagaaagcattgtgcgcctcttccatatccatggtgctaaaatatgtatagctgatgtgcaagacaaccttggaaagcaggtctgtcagtctcttggtgatgaagcaaatgttgtttttgtccattgtgatgttacagtagaggatgatgtttcccatgcagtggacttcactgtgggtaaatttggcacccttcacatcatagtcaacaatgccggaatttctggatcaccttgttccgatatccgcaatgcagacttatcagaattcgataaggtgtttagtgtaaatacgaagggagtgttccacgggatgaaacacgctgctcgaattatgatcccgaagaagaagggctcaatcatttctttatgcagtgtagcaagtgccataggtggcttaggaccgcatgcatacacagggcccaagtatgctgtattggggctcacaaagaatgttgcagctgaattggggaaacatgctataagagtgaactgtgtgtcaccttatggtgttgcaacaggtttggccttggctcatttgcctgaggatgagagaactgatgatg

SEQ ID NO: 7337 - DNA, 841 bp, Glycine max
cctcgagccgaatcggctcgagagttgtgtggcagttgcagcgcgtcggttcacacttcacacggagaacggagccgaagaagccgttttcgcatgcctgcaactccacccagtaacaaaggaagaatctctaccctcttcgctttcactcctcgccaagttttgttaagcaaccaaacaatgaagcacaccactgacaatggaacccccatctcggaacacaaagttcttcttcaccaatccattgcccgttacttggaacgcagtggcttctccaaaactctgaaaaaatttctctccgaagcgcatatcgagaaaaacgatttggagggatcaccagttgatctggaagaaatgtgtctcaagtatttagaaatatgtggcaaagatgggaagtcaaatattaatgatcaaaatgagcaagttgcaggtgggcacagcaaaaacaaagaagagggtaaatccaaggaaaagaagaaaaagaaaagcaagttagtttctgaatctcttgctactaatgtggaagacaatcatttagagtcagtagctactgttgaagaaaataaagtaaaggatggtgtttctacagatgccaaagttatcaatggttctgagaaagagaaaaaatccaagtctaaaatgaaaaagaaggacaagcaaagtggtcaaggtgatgtaatagagcagattggagatcccaatgaaactgtttcgaaggaagagaatattgaagcatcaaacaaagaaatgatgcatgaggtggagaaagattctaagaaaagaaaaagaccaatttctgaagaaaatggtcaacaggttgcagatgaagaaactaaacgcc

SEQ ID NO: 7338 - DNA, 585 bp, Glycine max
ccaaaccttcgaacggtggcaaaagaccaaagaaagggaacaaaagtaatggaaattgcagagagagaaagacgtgtgaagtgtgagtgaagaagctcttgatgttttctcttgcaacctctgaatctgtaggcttcagttgtgctatttaacagtgtagggcactgcgtgtttacgaaataataagtttgtataattactgtaattaatatcagtatgggtgaggaagaaccagcgaatgaagtttccaagactgattcaaatggaaagagcttgcaggagaaaactttggatgaaactactgagaaaaaggacttggaaactgatggaggaaaagtcttggagaacaatggaatcaaagagaatattgtaaaagaaattgaagataagaaagctgatggtgtggaaaaggtagaagaggacaagaaaattggtgttgtggaagatgcaaaagaggataagaaagaagatggggtgaaagaagctaaggaggataagatagaagaaggggtggaagaagtaaaagaggataacaaagaagatggagtggaagaagcaaaagagaataagaaagaagatggggtg

SEQ ID NO: 7339 - DNA, 753 bp, Glycine max
cgggccgacccacgcgtccagacggggggggactgacagtggcagagagagaaagacgtgcatagtgtgagtgaagctctctgttctgttctaatgttcttctcttgcaacctctgaatctgtacggcttcagttgtgcaatttaacagagtgtgcttaagaaatagtaattttgtatatttactgtaaataagatcagtatgggtgaggaagaaccagcgaatgaagtttctaagattgactcagatgagaagagcttgcaggagaatactttggatgaaattactgagaaaaaggacttggaaactgatggaggaaaagtcttggagaacaatggaatcaaagagttgaaagaaaatattgtaaaagaaattgaagataagcaagctgatagtatggaaaaggtagaagagggcaagaaagttgatgttgtggaagaagcaaaagaggataaggaagttgatggtgtagaagtaaaggagggtaaggaagttgatggtgtgaaagaagtcaaggaggatacagaaattgatggtgtgaaagaggtcaaggaggataaggaagttggtggtgtatctggtgtgaaagaagtcgaggaggataaggaagttgatggtgtgaaaaaagtagaagataaaaaaaggtgatgagttgaaagaaatagaagaggataagaaagatgatcatatatctgagaatgataaaatggatgaagaccctgaggttaaggaaacaattgaaggtccgcccgct

SEQ ID NO: 7340 - DNA, 348 bp, Glycine max
attcacatagttacgtccgtctgtcgctggcagagagagacagacgtggagtgtgtgggtgaagaagctctctgttgatgtttacctcttccattccaacctttgactctgtaggcttcagttgtgctatttaacagtgtagggcattgtgtgcctaggaaatagtaagtttgtataattactgtgcataaaatcagtatgggtgacgaagagtcagtgaatgaggtttcagagactgattcatatgggaagagctttcaggagaaagcttcggatgaaattactgacatgtaggacttggtcactgatggacgacaagtcctggagaacattggtatcaaaaagaat

SEQ ID NO: 7341 - DNA, 491 bp, Glycine max
cccacgcgttacttcttcttcttcttcttcttgtagttcttctctctcgaattttcactcactttctgtgcatcaatggcggcgataagtctccggaaggggaacacgcggcttccgccggaggtgaaccgcgtgctgtacgttcggaaccttcccttcaacatcaccagcgaggagatgtacgacatctttggcaaatacggcgccattcgccagatccgcatcggcaccaacaaggacactcgcggaaccgctttcgtcgtctacgaggacatctacgacgccaaaaccgccgtcgaccacctctccggcttcaacgtcgccaaccgctacctcatcgttctctactaccagcaagcgaagatgagcaagaagttcgatcagaagaagaaggaggacgagatcgcgcgcatgcaggagaagtacggcgtctccaccaaagataagtagattaagtacttccttctcggaaatgccgagggttagggtta

SEQ ID NO: 7342 - DNA, 564 bp, Glycine max
gggactttctcagtgttgattctcagagagaaaactgcagtgctgaaagtaaagaggctgttttgggagcaagaactaatgttgaggccaatggattgaggtcaaaagtaaacagcacacctctttctctgccaaaaaagagtacacatgaacctagaaagtcatttgacaattctagcagcaatacagacattcaagcacagaagagtgcaccttctcccaataacttgcagaagacagcgaaagaaagagataattcagatcaagtttctgaagtgcaccatgatgcttccgatgcttttccaacagagtgggtgccaccaaatttgagtgtacccattttggatctggttgatgttatcttccaggttcatgatggtggatggattaggcggaaggctttttgggttgctaaacaaatcttacaactaggaatgggtgatgcctttgatgactggttgatagagaaaattcagcttctccgtaagggttcagtggttgcttcaggggtcaagcgagttgagcaaatactctggcctgatggaatattcataaccaagcatc

SEQ ID NO: 7343 - DNA, 546 bp, Glycine max
cccacgcgtccgcccacgcgtccgcccacgcgtccagctgagtggactgaaatcggtggagaacgcgcacgatgattcggtgtgggcggtcacctgggtacccgcaaccgccaaccgaccaccgctcctcctaaccggttccctcgacgagaccgtcaggctctggcgctccgacgacctcgttttggaccgcaccaacaccggccactgcctcggcgtcgcctccgtcgccgcccaccccctcggctctgtcgccgcctcctcctccctcgacagcttcgtccgcgtcttcgatgtcgattccaacgccaccatcgccaccctcgaggctcctccctctgaagtttggcaaatgcgcttcgatcccaagggtgccattctagcagttgctggcggaggtagtgcatctgtcaagctttgggacacttcctcatgggaacttgttgccactctgtcaattcctcgtccagaaggacagaagcccacagacaaaagtggcagcaagaaatttgtgctatcagttgcatggagtcctgatgggaaacg

SEQ ID NO: 7344 - DNA, 466 bp, Glycine max
  unsure (1)..(466): unsure at all n locations
ggtgtgtgtgaaaagaagaaactttgtaagctcaatttgtttccaaggttgctctgggaatccgaggttctaaactctgcaactaactttaatggcaactgggcaagtcattaataaacctccttcacttcctccgtaccctgagatgattcgggaggcaattgaagcactgaatgaagagaatggttcgaataaatcatcaatttcgaagtacatcgaatccacctatggtggattgcctcaggcccacaaggttttgctcaatgtgcacctcgcgaaaatgagggaaagtggagtgctagtgttttggaagaacaactacaccaagcgtgacccaaatgcgccgccacggcggtgccgtggcaggccacccaagcccaaggagcctctgccaccgggcactgtcttatcaccgcccaggcccaggngccgtccttcgaaggacccaaatgacctgcagaagcct

SEQ ID NO: 7345 - DNA, 525 bp, Glycine max
acacactcctcccatcatcacaccatgctcacagttctggttctcctctcactccttcttaccatctccacttcccacaatatatcataccctcatttccaacaactcaatgtcaaacaaataatcctcacagaaaccaaactctacccaaacccaacccaaccctccaaacacccccacaataaaaaactcaacagtgccaccgaagcatcttcatcagcaaaatataaactgaagctagttcacagagataaagtccccacctttaacacctaccacgaccaccgaacccgattcaatgcacgaatgcagcgagacaccaaaagggccgcctccctcctccggcgcctcgctgccggaaaacccacctacgccgcggaggcattcgggtcggacgtggtttccggaatggagcaaggaagcggagaatacttcgtgagaatcggagttggaagcccacctcgaaaccagtacgtggtcatggactcaggcagcgacattatatgggtccaatgcgaaccctgc

SEQ ID NO: 7346 - DNA, 494 bp, Glycine max
gacaacacacattcccatcatcacaccaacaacaacacaccatgttcacagttctgcttctcttctcactccttcttaccacctctacttcccacaacataatatcataccctcatttccaacaactcaatgtcaaacaaatcctcacagaaaccaaactcaacccaacaaatacctacaaacacctccaacaccaaaaactcaacattgccaccgaagcatcttcaccggcaaaatataaactgaagctagttcacagagacaaagtccccacgtttaacacctcccacgaccaccgaacccgattcaatgcacgaatgcagcgagacaccaaaagggtcgccgccctccgccgccatctggccgccggaaaacccacctacgccgaagaggcattcgggtcggacgtggtttccggcatggagcaaggaaccggagaatacttcgtgagaatcggagttggaagccaactcgaaaccaatactttgtcatcg

SEQ ID NO: 7347 - DNA, 849 bp, Glycine max
agcggacgcgtgggcggctccaaaaaaacaacagaagggggacatcataggcacccatttggttctaatcctcagaatcagcttcagcctttctctctaactccctcactcacactcacaggtaagcaatggcgggaaaaggagggaaggggcttcttgcagcgaaaaccaccgcggcgaataaggacaaagacaaggacaagaagagacctatttctcgctcttcccgtgctggaatccagtttcctgtgggacgtatccataggcagctgaaacaaagggtccaagccaatggacgtgttggggcaacagctgcagtgtacttagcctcaattcttgagtatcttactgctgaagttcttgaacttgctgggaatgcaagcaaggatctgaaggtgaaaaggataacaccaaggcatttgcagcttgctatcagaggagatgaggagttggacacccttattaaagggaccattgctggtggtggtgtcattcctcacatccacaagtccttgatcaacaaaacagccaaggattgagctcgctctttggccttctgatttcatgttgctgtttactgagaactaagtttgtgtttattgtgaattgatcacagtagtaggctagtacgaggatttgttttaacagttttagaactcaggtggtagtgtgtaaatggcttgcttgctagacaatgctttctttaactgttttagttggtctgtttttagagctttaaccatgttggattgctagacaatgcttgcttttagatacaatctgtgatctgttgttgtctttgttgcccattgaccccttcatatatggttgttttattttaatctttgc

SEQ ID NO: 7348 - DNA, 404 bp, Glycine max
  unsure (1)..(404): unsure at all n locations
atttggatgtaatttctcagattcgtcttcagtttcagcctttccctcccactcactcactcaaacaggtaagcaatggccggaaaaggagggaaggggcttcttgcagcgaaaaccaccgccgcgaataaggacaaagacaaggacaagaagagacctatttctcgctcttcccgtgctggaatccagtttcctgtgggacgtatccataggcagctgaaacaaagggtccaagccaatggacgtgttggggcaacagctgcagtgtacttagcctcaattctagagtatctgactgctgaagttcttgaacttgctgggaatgcaagcaaggatctgaaggtgaagaggatcacaccaaggcatttgcagctggctatcaggggagatgangagctggacac

SEQ ID NO: 7349 - DNA, 885 bp, Glycine max
  unsure (1)..(885): unsure at all n locations
actcgagccacgaaagcaaattcttcaatttaaacacagaaacaaaatcaccaccttcaaagtcttctctctcgagaatcatcgaataaaactagggtttccgatcgtcgtcgaggagaatgccgaagaacaagggaaagggaggaaagaaccggaagcgcgggaagaacgaggcggacgacgagaagcgggagcttgtgttcaaggaggacgggcaggagtacgcgcaggtgctccggatgctggggaacgggcggtgcgaggcgatgtgcatcgacgggacgaagaggctctgccacatccgcgggaagatgcacaagaaggtgtggatcgccgccggagacatcatcctggttggactcagggactaccaggacgacaaggctgacgtcatcctcaagtacatgcccgacgaggccaggctcctcaaggcctacggcgagctccccgacaccactcgcctcaacgagggcatcggcgccggcttggacgaggaggacgacgccaccgccaacgactacatcgagttcgaggatgaggatattgataaaatctaatccctctctcgccctcaattatcattcatataatatcatcatcatatctggctctagcaatatttcgttatctgcttgtctgcaactctccgggttggatttcgttttataattgtgcactattatttcaataaccccgcagaatatttctggattctcaatcttatgcccatgccccaattttgtgtcccttattgattgtgctcattatgcccgctgttgttgaatatttttataatggcttactggttaatttgggggaaaaacttgtaagggggatttggcnnnnnnnnnnnnnnnnnnnnnnnnnnnnnnnnnnnnnnnnnnn

SEQ ID NO: 7350 - DNA, 800 bp, Glycine max
cgcgagattagggtcggatcgctcggtctcgctaggtcggagagagagagagagagagagaatgggagtgtttgtttgtgtgtgatgcgagtgagagagaagtgtgaaaaggggcgaatagggtttccgttcggcgtcgatggaggatgccgaagaacaagggaaagggaggtaagaaccggaagcgcgggaagaacgaggcggacgacgagaagcgggagctggtgttcaaggaggacggacaggagtacgcgcaggttctccgaatgctcggaaacggtcgctgcgaagcgatgtgcatcgacggcaccaagcgcctctgccacatccgcggcaagatgcacaagaaggtctggatcgccgccggcgacatcatcctcgtcggcctccgcgactaccaggacgacaaggctgacgtcatcctcaagtacatgcccgatgaggcccgcctcctcaaggcctacggcgagcttcccgacaccaccaggctcaacgagggcatcggcgccggccttgatgaggaggaggacggttccgggaatgattatattgagttcgaggatgaggatattgataagatttgaaacaaatacaaataattagggttttggttttggtttgtgttgctgatgccttttttttttgtttttgtttttgtttgagattatatatgaaattgttatgatttggtgatggattcactttatggtatgtgatggtgttgcctctgtgtactgtggcatatggatatggtgactgaattttaatgaaataagagccggttatatggtgttgtagtt

SEQ ID NO: 7351 - DNA, 1016 bp, Glycine max
  unsure (1)..(1016): unsure at all n locations
gaggaagcaggaagccgacgtttgaggaaaatatataaagggtatggaatagggttgggagggatcaaaacccacaacacaacacggcactgagttattagtaattgtgttgtgttgtgttgagcagagagaaggatcaagaaaggataagaagaaagagggaatagggttagggttagggttagggttaggttgaggatgccgaagaacaagggaaagggaggtaagaacaggaagaggggaaagaacgaggcggacgacgagaagcgagagctggtgttcaaggaggacgggcaggagtacgcgcaggtgctccggatgctgggtaacgggcggtgcgaggcgatgtgcatcgacgggacgaagaggctctgccacatccgcgggaagatgcacaagaaggtgtggatcgccgccggagacatcatcctggttggactcagggactaccaggacgacaaggctgacgtcatcctcaagtacatgcccgacgaagccaggctcctcaaagcctacggcgagctccccgacnacactcgcctcaacgagggcatcggcgccggcttggacgaagaggacgacgccaccgccaacgactacatcgagttcgaggatgaggatattgataaaatctaatcaccctcgcaatcgcaattatcattcatatctgtcctctctctgtctgtctctagtagtatttcgctctctgcttgtttgcaactccccgtgttggatttcattttataattgtgcactattattcaataactcagatatttccgattctcgtctcatgccatgccattttgtgtccttatgattgtgctactatgcatcctgtttaattagatattagtctattgttagttccaagtataattgggggaaaattgaagggattcgtcttctttccccttttcccgnagtgtgagtaatcatggacaaatttggccgcaaaaaaaaaaaaaaaaaaaaannnnnncnagcgcgccgctctagaggatccaagcttgcgt

SEQ ID NO: 7352 - DNA, 425 bp, Glycine max
cccacgcgtccgacgtcgcaacgcaaagcaaattgttgtccatttttgaaacagagaaacaaaaaaaaaaaaaaaaaaactcttccaaagtagaggcagagaatctgaaagctagggtttgggatgccgaagaacaagggaaagggaggaaagaaccggaagcgcggtaagaacgaggcggacgacgagaagcgggagctggtattcaaggaggacggacaggaatacgcgcaggttctccgaatgctcggaaacggtcgctgcgaagcgatgtgcatcgacggcaccaagcgcctctgccacatccgcggcaagatgcacaagaaggtctggatcgccgccggcgacatcatcctcgtcggcctccgcgactaccaggacgacaagggctgacgtcatcctcaagtacatgcccgatgaggccc

SEQ ID NO: 7353 - DNA, 279 bp, Glycine max
tctcgagccgacggcagtgaagttattagaatctgtgttgtgttgtgttgtgttgagcagacagagagagtgagggataagaagagaatagggttagggttagggttagggttagggtttgattgaggatgccgaagaacaagggaaagggaggtaagaacaggaagatgggaaagaacgaggcggacgacgagaagcgggagctggtgttcaaggaggacgggcaggagtacgcgcaggtgctccggatgctggggaacgggcggtgcgaggcgatgt

SEQ ID NO: 7354 - DNA, 511 bp, Glycine max
acccaagcgtcagcccacgcgtccggctgatttcaatcttgtcgaaaaattaaaactcacaaagcaatgattgaaattaacaagctactgaactttgcattgcccccattatcactaattgtcatcttcatcttcacgccacctttgctcttagtgaagctgcttatgtgtgttaaaaagtttctatacaccgaaaacgtggcagggaaagtagtattaatcactggagcagcctcagggattggcgagcaagtagcatatgaatatgctaggcgcggagcaaagctgtctctggttgacattagaaaggacaaacttgtagcagtggctgataaggcacgatctttgggtagccctgatgttaccatcattggtgcagatgtatccaaggtccaagactgtaaccgctttgttgatgaaacggtgaaccactttggaagactggaccatctggtaaataacgctggaattagtcgtaagtctgtaggggtggaggattggcttgatgttt

SEQ ID NO: 7355 - DNA, 1050 bp, Glycine max
ctacaatctatgccccatgatgcacataccatgggtgtgcttgttaatgccatgagtgctctttctgtttttcatcctgatgcaaatcccgctctcagaggtcttgatatttatgactcaaagcaaataagagacaaacaggtagcacgggttagtggaaagataacaacaattgctgctgcagtttatcttagaatggcaggaaggccacctgtgcttccatccaaccacctttcttacacagagaacttcctatatatgctagattcttttggtaatcggtcatataaacccaatcctcggctaactcgtgtgctagacattatcttcatcctgcatgcagaacatgaaatgaattgttctacatctgctgtccgacaccttgcatcaagtggcgttgatgtatacactgctattgccggggctgttggagctctatatggaccacttcatggtggagctaatgaggctgtcctcaaaatgctgagtgaaattggaactgttcagaacattccagagttcattgaaggtgttaaagccaggaaacggaagctcagtggttttggacatcgtgtgtacaaaaattatgatccaagagcaaaggtcttgaggaaactggcagaggaagtgttttccattgttggccgggatcctcttattgaggtggctgttgccttggagaagattgcactatctgatgaatatttcatcaagaggaagctatatccaaatgttgacttctactctggactgatttatagggccatggggtttccacctgagtttttcactgttttatttgccatccctcgaatggccgggtacttggcacattggcgagagtccttggatgatcctgatacaaagattatgagacctcaacaggttatttcctttccttaaatcatttctctggttatatcatgatcttgcatattggcataatcattcttggttaatgtgtgctgatatgcttgtacgtatgatgtgctgatattcttagttgtatcggtgaggctgaattatatctttagcaatgggaaatatttg

SEQ ID NO: 7356 - DNA, 573 bp, Glycine max
acgcggctaggtacgcgtctaggaattcaggctcgacccacgcgtaagaatagagagctcctccaattagggtttttgtgatctgcagctacgatgggtaagggaacggggagtttcggtaagaggaggaacaagacccacaccctctgtgtgaggtgtggccgccgcagcttccacctccagaagagtcgttgcgctgcgtgcgcttaccccgctgcgcgcaccaggaaatataactggagcgtgaaggccattaggagaaagaccaccggaactggaaggatgaggtacttgcgtaacgtgcctcgcagattcaagagcggcttcagagagggtaccgaagctgcacccaggaagagaggagctgctgcctctgcctaagctttgaatgaatgacagcaatttttgctgggtcagtgaattataggagttaatgtttctgtgttggtgccaaactctttggaacacattttctttctgtcgttttaatttcatttaatatgtagtggctttgtatctcgacctgaggattgcaaggaatttttgttttttcaacgagggtttttgacatcc

SEQ ID NO: 7357 - DNA, 663 bp, Glycine max
gaaccctaaagccctctcatattgaaaccagggcaacagatatataaatacaaatcgccacgccgctacgtcttcttcagccatttagctccatagctgcagcattagggtttttcatctgcttcaatggggaagggaacagggagttttggtaagagaaggaacaagactcacactctctgtgtgaggtgtggccgccgcagcttccatctccagaagagtcgttgcgccgcttgtgctttccccgccgcacgcactaggaaatataactggagcgtcaaggcaatccgcagaaagaccaccggaactggcaggatgaggtacttgcgtaacgtgcctcgccgattcaagagtggcttcagagaaggtaccgaagctgcaccaaggaagaagggagcagctaccactgcatagacctttcaaagatcgttctttgttgggtacggatttacaggaatagattgcttttttgtgcttatggcaagtattttggaacacttatttttagagtctgattgctactttgtccttcatttaatttgtagttgctttatatttcaacaagatcataagacttattgattgttcactcggctttgtgacatttatagtttatggcaaaaaaagaaaaaaataaaaaaaaaaaaggcggcgccgtattat

SEQ ID NO: 7358 - DNA, 738 bp, Glycine max
cgcaggtccacaagccggtccattaacttaaaatgtaaaaatatgatagcatggttaggccgactacattgaatgatagcaaagaaaatattttgtaataacattaaaggaggcatgtttggactgttgaattgcccagtttatagcatggttaggcggactacattgaatgatagcaaagagaatgttttttgtaataacattaaaggaggcgtgtttggattgttgaattgccgagtttagctgcagaaggtagagagagagagagatggagagcatagagcacagaacggtggaagtgaacggcataaagatgcatgttgcagagaaaggagaaggagcagtggtgttgttcttgcacggcttcccagaactctggtactcatggcgccaccagattctagctctgagctccctcggttaccgtgcggtggcacctgatctccgtggctacggtgacacagaggccccttctacggtgaacagctacacgtgttttcatctggtgggtgatatcattgctctcatcgactctctgggtgtggacaaagtgttcctggtggctcatgattggggtgccatcatcggttggtacctctgcttgttccgaccagacagaatcaaggcttatgtgtgcctcagtgtccccttccgccccttcctcggaagaaaccccaaacagaaaaaccgttgacttttttcatttcttgatggagatgactactacatctgcagatt

SEQ ID NO: 7359 - DNA, 1429 bp, Glycine max
gggccagaactgacagcactgtaccgtaagtcttattatctccgaaagctttctaagaagagagagagagagagaggaaatgggtaaggggggaatgtcaattgatgaacatggagaaggcaaagaagagaatatggctgcttggcttgttggaatgaacactctcaagattcagcctttcaagcttcctactttgggaccccatgatgtcagagttagaatgaaggctgttggtatctgtgggagtgatgttcactacctcaagacactgaggtgtgctcactttatagttaaagaaccaatggttattggtcatgagtgtgctgggatcatagaagaagttggcagtcaggtaaagagtttggtgcctggtgaccgtgtggcaattgagcctgggatcagttgttggcgttgcgaccactgcaaacacggtcgatataacttatgcgatgatatgaagttttttgctactccaccagttcatggttccctggctaatcagatagtgcatcctgcagacctatgttttaagctgccagacaacgtgagcctagaggagggagcaatgtgtgaacccttaagtgttggtgttcatgcttgtaggagagctaatattggaccagaaacatatgtgttgatcatgggagcagggcccataggacttgttacaatgctggcagctcgtgcgtttggggcacccaggactgtcattgtggatgttgatgaccatcgtttatctgttgcaaaatctcttggtgccgatgacattgttaaagtctcaacaaacattcaggatgtggctgaagaagttgtgcagatacagaaggttatgggagctggtatagatgttacctttgattgtgctggttttgacaaaaccatgtctacagcactgagtgctactcagccaggtggcaaagtttgcctagtgggaatgggacattctgaaatgactgtcccactcaccccagctgcagcaagggaagttgatgtgcttggagtttttcgctatatgaacacatggcctctttgccttgagtttctaaggagtggcaaaatcgatgtgaaaccccttataacgcacaggtttgggttctctcaaaaggaagtggaagaagcctttgaaacaagtgctcgtggtggtaacgccatcaaggtcatgttcaatctttagatactggactgccactttacaaactgtcttattttgaacagagtatgtaatttacatgttcctgctcatgttaaataccaatgtattgataataaggtggcttcaagaaggacttgtaaaacatgtgagtggtaactgcagcatctacagattcagttatgcggtgaaaccttttcttaatatgtaaatgagaaaaccctcaatttttttctgtagtcattgagaatttcaatgcacaataaaaaattccaatac

SEQ ID NO: 7360 - DNA, 378 bp, Glycine max
cactgtagcgtaatcattgttatgttgaaggatttcattcatgacatgggagagagggtgagaggagctggggaaggggggaatgtcaattgatgaacatggagaaggcaaagaagagaatatggctgcttggcttgttggaatgaactctctcaagattcagcctttcaagcttcctactttgggaccccatgatgtcagagctagaatgaaggctgttggtatctgtgggagtgatgttcactacctcaagttaaagaaccaatggttattggtcatgagtgtgctgggatcatagaagaagttggtagtcaggtaaagagtttggtgcctggtgaccgtgtggcaattgaacctgggatcagttgttggcattgc

SEQ ID NO: 7361 - DNA, 712 bp, Glycine max
gggagagcattgagaacgttcaaactccacaactaacaaagattatccaaagtgcgattcgcatggccaccaacattcgtagagcaacctatcgctttctccctgccatggacacagattctttctccgattccaccttcgaattccacgaatccgatctctacaactccgcgcgcgctaactctcccgaacttgccaaatccgtacgctcctccagatttcacaactactcctcttcctctgccgcccgcgtcggtgctccggcgtcgcttccggtgaacgtgccggactggtcgaagattctcggcgatgagtacggacggaaccagaggaggaactacgacgacgacgacgaagcgcggagcgatgaggaagatggagttgggagagtgcctccgcacgagtttctggcgaggacgagaatcgcttcgttctcggtgcacgaaggagttgggaggactctcaaaggacgcgatctcagtagggttcgaaacgcgatttgggctaaaacgggattccaggactagacccttaccataggatgataggatcataacataagttaattaccgtattaatttactactgtattaccaattgaaacgacttttgttgagaggtcatttttagatttttcattttttcgatcagcatctatgtgcatcagatcggaatttgagattttaatttgcaccgagagctttttgtttat

SEQ ID NO: 7362 - DNA, 570 bp, Glycine max
agggtggctacaaacgacaaagctgaagcagagaaaataatgcagataaagcgagcagaaggggatgcagaatcaaagtacctagcaggccttggagtttctcgtcagcgccaagccatagttgatgggctaagagacagtgttctagcattttctggtaatgtgcctggaacatcatcaaaggatatcatggacatggttctcatgactcaatattttgacacaatgaaggagattggtgcatcctccaaatccaatgctgttttcattccacatggacctggtgctgtgagtgatgttgcttcacaagtaaggaatggtcttctccaaggaaatgcaacaacagagtcttgaagacatacacatatatcatcataccatgatttcctcctccaggcacttgtagtttagctttgcaactaaatctttatatatgctactattatgaatcatccatggcaagttggcaactaatgccttctatatgcatatggtcttcctaatcaaccatggcaactttcggaaaaaaaaaaaaaaaaaaaaaaaaattaagcggccgctctagaggat

SEQ ID NO: 7363 - DNA, 585 bp, Glycine max
ggctctggcagtaaagaatccatgccatcttaacatggcagcctgtttgattaagctgaaccgctacgaagaagccataggacaatgcagcattgtactgggtgaggatgagaacaatgtgaaggcattatttaggcgaggtaaggctagagcagcacttgggcaaacggatactgccagggaagattttctaaaggcaagtaaatatgcccctcaagacaaagcaattgctaaagaattgagattgcttgctgaacatgacaaggctgtttaccaaaagcagaaagagatatataaaggaatatttggaccaaggcctcaaccagttcctaagccaagaaattggctcatacttatttggcagtggttgctttcagtattctatggccttgtcacgctcttcaagcgtcaaaggcataaatctgactaaacaagaagaccattgctgagttgagttgacaattatttacgtgcatcctacgaaaggccacgtcttgtgctactgaggaaataatcatacttctactattttgctttgcttgtggaacaatcaaacgttgaaaaagcagtgctgatttctctctt

SEQ ID NO: 7364 - DNA, 565 bp, Glycine max
gaaaacaatgacaacacttcccgaaacccccaccgtttcccccatggaaaacgaaaacaccatcctccgaaacggcaccgccaagaaacccaagctcacgcacgccatttccgaggctgagatccgcgaagaattctcccaccaccagcgcggcgtcgcaagaatcaacaacggtagcttcggcagctgcccgcgctccgtcctcaacgcacagtccatctggcagctccgcttcctccagcatcccgacgacttctacttcaactcgctccgccccggcatcctcgcctcacgcgccgccatcaaagatatcatcaatgccgaacacgtggacgacgtctcgctcgtcgacaacgccaccaccgccgccgccgtcgtcctccagcagatcggccgccacttcgtccgcggccactttcaccgcaacgacgccgttgtgatgttccactgcgcctaccaggccgtcaagaaatccatcgaggcttacgtcactcccatcggcggcaccgtcgtcgaggtccagctccccttcccggtccgctccgaggaagaaatcgtaacggaa

SEQ ID NO: 7365 - DNA, 622 bp, Glycine max
ggagtgtgacgataggagtggaaacgacgtgtcgcttcaatttgaagggaagtgcagtggaacgtgcgaaagaagtgcatcaatctggttcttctgggtagggcttgtgttgtgatagagtcttacagagaagagtgtgtgtgtgtgataattgggataagctctaatcaatcaatttcaatggcatcatccaattcgactcagcaagaagggaacaaacccgcaaagagaaaacccgtgttcaccaaagtggatcagctcaaacctggaaccaacggtcacacgttggtggctaaggtcttgtcctccgacaccgtcgtacacaaaccgcgaccctcttccgcccacaacctcaaacccactgtcatcgccgagtgcctcatcggcgacgacaccggcaccatcgtcttcaccgctcgcaacgaacaagttgatatgatgaaggctggagctacagtaattattcgcaatgcaaagattgacatgttcaagggatcaatgaggatggctgttgacaaatggggccgtgttgaggtaactgatcctgcagattttgaagttaaagaggataacaacctatctctggttgaatatgaattggtgaacgtggttgaagaataat

SEQ ID NO: 7366 - DNA, 390 bp, Glycine max
gactacacagagccacagtccaaagaatataagaagaggaaagcgaattcccaagcatccattcatcagagaaaccgcaaaatggcttcagtagcgactaagcagcaagagggtgagaaaccggccaagagaaaaccggttttcaccaaagtggatcagctgaaaccgggaaccaacggtcacactctggttgcaaaggtgttgtcctccaacactgtgttgcagaagggacgaccctcttcttcgcacaacattcgccccactctcatcgccgagtgcctcatcggcgacgacaccggcaccatcatcttcaccgcgcgcaacgaacaagttgacataatgaaaaccgacaacactgtgattcttcgtaatgcaaagattgacatgttt

SEQ ID NO: 7367 - DNA, 571 bp, Glycine max
gaacatgaacattagcagaaaataaataagacccacttgttagattggttactgacactactagctcgcagggttctgttctgctttgcattctccgccatcatcatgcaagcgcttcactctcccaccctccgcgcttctcccttggaccctcttcgtggccccaacaatgccgccgccaaccgccgctcctccagcgccaagcgcgtgttcttcgtctccgccacggtggcgccgaaggtgtccgccccgcagcgacagaaggaccccaagaagcgcgttgtgatcaccggaatgggcctcgcgtcggtgttcggtaacgacgtggagggttactacgagaagctcctcgccggcgagagcggcatcaccgccatcgaccgcttcgacgcctccaagttccccacgcgtttcggcggccagatccgcggcttctctgccgagggctacatcgacggcaagaacgaccgccgcctcgacgactgcctccgctactgcattgtcgccggcaaaaaggccctcgaaaacgccgagcctgccccagacaaccatctccaagatgtataggagc

SEQ ID NO: 7368 - DNA, 1443 bp, Glycine max
caggtggaagtgaaggaggagagggagaagaagaagaagaaaaagggaaaaacgcaagaaaaatagaggaagatcgatcgagatctccctcgcgtttgtctcagttgaagaaattaaaaagcagaactagagtaactcaacggtctcagaattttcagggttttcagtacttccatattttttcttccggatttgagttggaagaagatcgaagaggtttctagttgcttcaattgttcctctgggtggtggagacttgttatatttttaaaatattgacaattcgaaatgccaaaggagagaagggatagatctttgtcacatgaaagtagcagagcatcaccttacccaagtagctctagtcgtgttggaagatctgctcttaaagagtcagaggagaatgttaaagaatgggaagaagctaggtgtccagtgtgcatggaacaccctcacaatgcagttctcctcatatgttcatcccatgagaagggatgccgcccttacatgtgcaacactagttatcgccactcaaattgtcttgatcagttctgcaagtcatttgcagacacctcatcaaccattcctcaagtagaaggtcaaatttcagatacttttgaaagtagaattgatgtgcccgaagacagaaatgaggggactgtccaaagtagaattgatgtgccagaagacagaagtgagggtttggttacaatgcaagccttatcctgcgaaaatgatgcaaaatcaaagttagtatgccctctatgcagagggcaaataaaagagtggaaagtagtggaggcggctcgtcatttcatgaatgaaaaatcaaggagctgttcttgtgagacttgcaacttcagtggcacatacccagatcttaggaagcatgcaagacttgaacatcctcttgagcgcccatctgcagtagacccagagcgtcagcgtagctggaaggaggttggagcgccagagggatcttggcgacctccttagcacacttcaaacttcaatttgggggtgatggccccatagatgatggtggtctgctggctgtgtttttcctcattcttcagcctgcttccatgtccaggggtacgacactccaaatgcgaataaggagacccactactacactttggggggaaaattatgacggacaatctggatctgatgatgcaaatgaatcttcagatggaggctctgatagtagacctcgccgtgtccggaggcggcggacacctccaccatgatttacagatgggtcaaatttgaattatcattgatcctggctcgctcttcttcctcacccttctacctttcccgatgctcatgaatacatgtcggttattaattgtttatcagtatatttgatatttctgccatctttcccaaggattctgaacgattgagcttgaaataaaatctactgttgtgccagttctt

SEQ ID NO: 7369 - DNA, 449 bp, Glycine max
gcgagacgacgacagaagggtttaagtgaaggaggagagggagaagaagaaggagtatggggaagaaaaggggaaaacgcaaagaaaaaaagaggaagatagatcaagatctcccttgcgtttgtctcagttgaagaaattcaagagcagaacgagactaactcaacggtatcagacgtttcagggtttcagcacttccattttttttttttccggctttgagttggaagaagatcaaagagatgtctgttgtgtttgacatgagttttgatgtccaattcagttttgttcatgttgatgctatctgtacgtaggttcctagttgcttggattgttcctctgggtggtggagactttgtgtatttttaaaatattgacaattcaaaatgccaaaggagagaagggataggtctttgtcacatgaaagtagcagagccttaccttaccct

SEQ ID NO: 7370 - DNA, 358 bp, Glycine max
tagctatgacgtatgcatgcacgctgtcacgtcatgctcgggcttcggctcgagagtagactaacaagtcggaggatgagcaggggcctgcgcagagaatcgaagaggaagatagatcaagatctcccttgcgtttgtctcagctgaagaaattcaggagcagaacgagactaactcaacgggatcagacgtctcagggtttcagcacttccattactgtgttattccggatttgagttggaagacgatcaatgaggttcctagttgcttggattgtgcctctgggggggggagactttgtgtatctttaaaatatggtcaattcacgatgccaaaggagatacgggttaggtctttg

SEQ ID NO: 7371 - DNA, 422 bp, Glycine max
tctcgagccgattcggctcgaggggatcaacgaatagagaaagaaagaaagcgaaatcaaattgttagagaaacgcgagttaatccagaaatcaaagaaagcgttacttgacgttcgtttgaacattaacaacattaacacaaatggcaacacgaactggtcgcttgtttcaaaatcaaaacctgaatgtccacgttaatggaggaggaactgtttctgagaaggctgatttaacaggacagaggaaagttagggctgggggaagaaaaccacttggagatctatccaatgcagggaacctcatcaaccattttgatggaaagaaagcccttgatggttcattgtacacgggcaaaccctctgcctctcttgctcaagcaccgaaattgcacaagtcaaaagaatcctgaaagtgacaaaag

SEQ ID NO: 7372 - DNA, 1007 bp, Glycine max
gcgtgcggcagatgggcctgaacccaatcttatcctattctcacaagcattaaatacatcactcttctaatcaaacgctttcaatgcacaaaactgtaacgtgacgaaacagagggattataaaaagagaagttactcgatagttcaaatcagaagatggttcctgtcacaccaactcaataacagatcaaaccaaacccaaactgttaggtttcctttgtttggtgtgaagccatggctgattcttcttccaacctgaaatccgacgcgataatggagcagatgaagcaacacctcgccaccgacgctggcaaacaagtcaccaataaaattggactcgtttatcagtttcacattgctcctaagaaacttggattcgacgaggtcgtctacaccgttgatctcaagaaaggagaggtcaccaaagggtcatatgaaggaggaaagcctgatgcatctttttcgtttaaggatgaggactttgttaaggttgccttagggaagatgaatccgcagattgctttcatgaggggtgcgatgaagattaagggaagtttgagtgctgctcagaaatttactccggatatcttcccaaagccttctaagctgtgagctgagatttctgcaactacctgcacaaggttgctagaattatcgtttggctgcagtcaaacaaaatagatagcaatcatagtagcatcaaaagctgaggattataattatatctttagttaatgcatggatcatcattcctaaggttgttggtggttcatgattttaatatatctctgaacactgaaggatatttttagatactcttctgcaaatctgtcataggtttttattctactgtgattggatgtttcaagtttgaaaatagttagttcatcgtgcattatttagagctacttttccattcttttgtcataaattctcaccgagccaataattgtgggatggatgttaggaatcgtgttttctgactaaatgcattgtcaatatacatg

SEQ ID NO: 7373 - DNA, 682 bp, Glycine max
ggcagcaagaagaggaagcactgtgttcgacttcgtcaaaagcatcatgagccgctacgacagccgctccggcgacccagcttcctatcgtgatcggaggagtgattctgggctaggtgcacctacagggtttggtggttctgtacaacactcttcatcaaacaggagggattatgatgatggtgggtcaccaaagaggaacctcagtttggatggtttacctcattttgagaaaaacttctacattgagtcaccagctgtaagggcaatgacagatgctgaagttaatgagtatcggcagcagagggaaataactgttgaagggcgagatatcccgaaacctgtcaagacctttcacgatgctggttttccagaatatgtactgcaagaaattacaaaagctggctttactgaacctacacccattcaatctcaaggttggcccatggctttgaaggggcgtgatctgataggaattgcagaaacaggatcagggaagacacttgcttacttgttgcctgccattgtgcatgttaatgctcagcctattctaaatcctggagatggaccaattgtgctagttttaggcccccactcgtgaacttgccgtccaaatacaacaagaggctactaaatttggtgcatcatctaggattaagagtacatgcatctatggtggggt

SEQ ID NO: 7374 - DNA, 625 bp, Glycine max
atccaacattccaacccatttcatcactcttcacagaaacatcgagcagcagaagaaagaaactacagaaaaaagaaaaaagacatggcttccacttctgcagtttcattggctatgccagtaacttatgccagccagaagagggtactggtgcctagctctgatgcattattcctcaagccactgcctctacgttcttattcttccaaggcaatggcagcatcaaaagtacccaatggaaggtttcaggtgagggcttccatgaaggagaaagttgtgacaggcctcacagcagctgcattcacagcctcaatgatggctcctgatgtggccgaggccgccgtttcgccttctctcaagaacttcttgctcagcatcgccgccggtggtgttgttgttgctgccattatcggtgcggtggtcggggtttccaatttcgatcccgtcaagcgaagctgatcgatatatcaagttctcaggcactactgtgttttttctttttttttttttgttacctcttgtcataatatttgtaatgttcttcagaaatgaagtgaaccctctttcttgtgtgtactaatatgctactcttatgctacacttggagcataagcttttcagttct

SEQ ID NO: 7375 - DNA, 407 bp, Glycine max
cccacgcgtccgcccacgcgtcatcccaaaactaaaaacctcaccctcatctttctctcaactcccttaaccaaaaccaaaacaatggccacccaaagaagccatcattcccctatcttattttcgtccctcatcttaacccttttcgttctctacttcccaagatgccaccacgccattcccaacaaccccatcaaaaccgtcgtcgttttggtaatggaaaatcgctccttcgaccacatgctgggctggatgaagagactaaacccggccatcgatggcgtgaccgggtcggagtccaatccgctgtccgtgtccgacccagactcgaagcggttcttcttcagggaccgggcccatttcgtggacccggaccctggtcactcgttccaggccatccgggaaca

SEQ ID NO: 7376 - DNA, 873 bp, Glycine max
ccttcttatatttcccagggaaccaaacctgtggcttccatctctcaaaagctcaacaaccacttgccatggcagcagcagcgtcaatgtgtatgagcttcaacctggcaacagcattcaagggtctctctttttcttcttcttcctcatcgttcttcgctggaagtggtagttattctctccgcgcgggtcccacctcggtggtgtcgctgccccggcgctgcccgctgaccatagagaacgcccacaagaagggggcgggcagcaccaagaacggccgcgactcgcagggcaagcgtctcggagtcaagatatacggcgaccaggtcgccaagcccggctccatcatcgtccgccagcgcggaaccaagtttcatgcaggaaagaatgtggggcttggcaaagattataccattttctccttgattgatggagttgtaaaatttgagaaatatggacctgacaggaaaaaggtgagtgtttaccctcgagaagtacagcctgagaaccccaacagctatagagcaaggaagagagagtacttcacgagtgaggcgtgaacgcaaaaaagctagacaagaaggagcaatacttaaatctcaactggtgctggcttctgcagatgatgcagcaatcactaatccagtgtgttgattctgattcaatcgtctaaatgtgtaaaataccccggtccccattttttactcttgtttatccgtaaaacctttagcattgtattgagttttgttgaagtagcaatgcacaatcagtcatcatgcgccatttgaatcaaaacattgcttgatgaattctacagtatgagcatttgttttgtagtatttggaataacatctattgaatttttggtcgaaa

SEQ ID NO: 7377 - DNA, 755 bp, Glycine max
acgcacgcgtcagtacgcatgccaaaaaacacaaaaggtggcggcacaaagcattcactgtgtcggaaaaagaagaagagaaaaaagatgagcgacggaggaaaacgacaaggtggaagagcgttgccgccgccgccaagaggccctccgcctcctcccccctctcgccctcgcctcgaacccgtcgatcgcgaaaagacatgtccgttactgctgcgagtgttcactaagattgggagtcaccattccatggaagactttgccgtcagaggcaaagagcccaaagacgaggttcagatttacacctggaaggacgctactctccgagaactcaccgatcttgtcaaagaagttgctccggctgcaaggagaagaaacgccaaactctccttcgcctttgtattccccgacaaaaacggccgtttcaaagttcaagaggtgggcaagacattatcttatggaaatggaagattagatgatggcaaggctttagccgaacttggttttgaaatcggtgactacttggatgtggctattctgtagtttattatggatacttgcatgtggctggttatgtttgaaggccttgaaacacttattttagagttaagaagactgtaatcgtggaaatgtttagctgttaatgtttacatgaactaaaaagaggtccagtttctctggttgcaaaaatgatagattgaagattgctaatgcctatattatatatcacggtcccttcctggttcttttgttca

SEQ ID NO: 7378 - DNA, 534 bp, Glycine max
gtaattggagagaggtgttggcgcacagaaagcagtagaaagagaggagaggagaggataggggctgggtgagttgttgtctatctcttcttctctttgtgttttggctgtggacgtaaaataatggctctgtcttttggttttgggctcttgtcttcttcttcttcttcttcttctttatgtgttctccctccatcagaaacccacactttcatgatgaggccttctgcttcttctggtttgcgcatgatgcgtaccagtcgcattacctgttgcaccctttctcagtcttctaagccagcccgcaaaatccgtggtatcatgaaaccccgcaaagtctcccccgagatggaagacctcgtcggcgctcccgagatggctcgaacccaagtcctcaaacggatttgggcttacattaaggacaacaatcttcaggaccctacagacaagaggactataaattgtgatgagaagctgaagaaggtgtttgcagggaaagatcaagttgagatgctagagattgctcgcttgatt

SEQ ID NO: 7379 - DNA, 442 bp, Glycine max
aggggaggctgagttctgtaattgtgttttggctgtggacaatggctctgtcttctgggcttttcttgtgttcttcttcccgtgttctcccaccaccagaaacccacactttcatgaggaccaggccttcttctgctgccttgcgcaccatttccgttagctgttgcaccgtctctcagtcgtctaagccagcccgcaaaatccgtggtatcatgaaaccccgcaaagtctcccccgagatggaagacctcgtcggcgctcccgagatggctcgaacccaagtcctcaaacggatttgggcttacattaaggacaacaatcttcaggaccctacagacaagaggactataaattgcgatgagaagctgaagaaggcgtttgcagggaaagatcaagttgagatgctagagattgctcgctcgattagccctcacttccttaa

SEQ ID NO: 7380 - DNA, 441 bp, Glycine max
ccggccggaatccggtcgaccacgcgccgacggtgcaaaaggccacggaaggggaatgaaacaaaatattactacttcccttacctttctctctctctcaaaacctcatttgtcgtcctcttcatcaacctctttcttctgcctcaccaaccaatttgttttctttttgcaatgctggtgcttggaagcatctctccattgaatgtgatagcttcaattctccaacatttgtagaaatactttaacatcgacaagtgtgaagctctgatattaatttggtcagggcgatggtccagacagttatgttagtgttccatgcagcagtttgctcaccatagttacggttagatgtggacactgtgccaatttgctgacagttaacatgggagcatcacttcaaactttttcttctcaagacactactcagttacagagacagca

SEQ ID NO: 7381 - DNA, 349 bp, Glycine max
aaaaaaatgtcaatggacatgatggcaaccgaacgtgtttgttatgttcactgcaacttctgcaaacaccactctagcggttagtgttccatgcagcagtttgctcaccatagttacggttagatgtggacattgtgccaatttgctgacagttaacatgggagcatcacttcaaacttttccttctcaagacactactcagcgattttctaccgttggtaagttacagagacagcatctcagtgttcaagaagcatgcagcaaggaactaggatcatcatcaaagtgcaaaacatttgagaccgtagaccatgatcagcaacctacgattcctcctattcgtccttct

SEQ ID NO: 7382 - DNA, 898 bp, Glycine max
gtcatggaagatgttcacaagattggagggactcctgcagttatccgctaccttcttgagcaaggctttttagatggtgactgtatgactgtcactggaaaaaccctagctgaaaatgcagaacttgtccctcctctgtccaacgggcaggaaataataaggccagtagaaaatcccatcaagaagacggctcacattcaaatattatatggaaaccttgcaccacagggttccgttgctaaaattactggaaaagaagggctgtacttctctggtcctgcacttgtctttgaaggagaagaggcaatgattgctgccatttcagaggatccttcgagttttaaggggaaagtggttgtaatcaggggagagggacccaaaggtggtccgggaatgcctgagatgttaacaccaacaagtgcaataatgggtgcaggtcttggaaaggaagttgcattattgactgatggaagattttcaggaggttcacatggatttgtggttggccatatatgtcctgaagcacaggaaggtggtccaattggcttgattcaaaatggagacgtaatcaatgttgacatcaagaataggagaattgatgttttggtatcagatgaggagatggaagcacgcaggaaaaagtggactgctcctccatacaaagctaaccgaggagctctgtacaagtatattaaaaatgtgacacctgcttctagtggatgcgtaacagacgagtagaaagacatacctgcagagcaaaagctgatagtatgccttggtgaaattttgtcttgtgtttccagaacaagttggtaaaaattcaaaaacaaacctcatttcagagaatttacaacaatgggaatgaattgctactattgattagtgactatttaatatt

SEQ ID NO: 7383 - DNA, 573 bp, Glycine max
ggctgtggaaagaacgagcacacagagaaggaaacatggcgttggagcaagcagtatcatcgtcatcaagcacattgaggaacgttctcaccttccccaaaaccctaatttcaaaaccccaattccaagtcgctgcttctccctcatggaaaacacagcggcgttgggggaacttgaagtgctccatgacgacaacgccatcataccctaagccctcggagattccgtggcagaaggagctctgcaactccgtcaacctcatcggcaatgtcgcggcccccgtcgaaatcaaacacctcccctccggcaaggtcgtcgcctggacccgcctctgcgtcaagaaaagcgccacgcaatcatcgtccataagcctcacattctgggacgacctcgctcatgtcgcgtcccagcatctccagaaaggttaccaaattcatgtctccggtcgcctcataatcgacacggtcgaaaccgaggaaggcaaaacccaaacttactacaaggttgttgctcaacagctgaatttcattgagaggaatttctcttcggcgtcatcatcgcagggtcaagagt

SEQ ID NO: 7384 - DNA, 1128 bp, Glycine max
cccacgcgtccgcccacgcgtccgccgaaaccgattacaaattttccagttcccggatctagccgcactgtggaaagaacgaagacacgggaaagaaaaatggtgctagaacaagcagtatcatcatcaagcaccttgaggaacgttttcaccaatcccaaaaccctaatttcaaaaccccaattccaagtcgccgcttccccttcatggaaaccacagcagccgcgctgggaagggtggctggggataaacttgaagtgctccatgacaacaacaacaacgccatcatcataccctaagccctcggagattccgtggcagaaggaactctgcaactccgtcaacctcatcggcaacgtcgccgcccccgtcgaaatcaaatacctcccctccggcaaggtcgtcgcctggacccgcctctacgtcaagaaaagcgccacacaatcatcgcccataaacctcactttctgggacgacctcgcgcatgtcgcttcccagcatctccagaaaggtcaccagattcatgtctctggtcgcctcattaccgacactgttgaaacggcagaaggaactctgcaactccgtcaacctcatcggcaacgtcgccgcccccgtcgaaatcaaatacctcccctccggcaaggtcgtcgcctggacccgcctctacgtcaagaaaaagccaaacttactacaaggttgttgttcaacagctgaatttcattgagaggaatttctcttcggtgtcatcatcgcagggtcaagagttcgattttgcgatggctggtagtggtaggaaagtgagcaatgctgcaaacagtactggttctgtggtggaaacatggaatgcgttctttgctaacccaggggagtggtgggacaacaggaacaacaagaggaatccaaaagctcctgatttcaaacacaaagatacaggggaagctctgtggatagaaggcagatacagtccgccatgggtcaagtctcaactggaaatactagactcaagaatggggtcttttgctggccaaaatgctaggatgcctgtaggtatggtagctgcagatgaaatcgtgtctttctaatcacttatgccaaatctcgcccatgtaatattcaatttcaactgtg

SEQ ID NO: 7385 - DNA, 753 bp, Glycine max
actcgagccgcaacaattccacaacgcgatctctctctattctttgaaaccaaagttcaaactctgtcttccctgggttctatttcgaaatcaacgacgatgagttccacagaggcagcagccacagagaagaaaggtggaagagggaaaccgaagacttcaaagtccgtttcccgttcctccaaagctggccttcagtttcccgtcggccgtgtcgctcgctacctcaaggccggtcgctacgcccagcgcgttggctccggttcccctgtttatctctccgcggttctcgaatacctcgctgccgaggttttggagcttgcggggaacgctgcgagggacaacaagaagacgaggatcgttccgaggcacattcaactggcggttaggaacgacgaggagttgagcaagctgatgggatctgtgaccattgccaacggtggtgttctgcctaacattcaccagaatttgttgcccaagaaggtcgctggcaaggggaagaccgagattggatctgctagtcaggagttttagatttaaggctcttgttttcgtatgtagttggttgccttatatagtaagattaggattgacattggatgatgtatagtcccttaacatttgaaaataattagttgttttctaacatggttcctgcatagttttcatttatttgagtttctcgtgaatcgagatatcaattctctttttatttgtgtgtttgggcataattttagtgtggtgtttatgtcc

SEQ ID NO: 7386 - DNA, 470 bp, Glycine max
cgagaatactacagaatgggaccgcaaactctctctgtaaagtgcaaagcctctattttttcttgtgaatttgaaggacgatgagttccacagaggtcgcagccacaacgaagaagggtggaagagggaaacccaagaccacaaagtccgtttcccgttcctccaaagccggccttcagttccccgtcggccgcgtcgctcgctacctcaaggccggtcgctatgcccagcgcgttggttccggttcccctgtttacctatctgcggttctcgaataccttgccgctgaggttttggagcttgccggcaacgctgcgagggacaacaagaagacgaggatcgttcctaggcacattcaacttgcggtgaggaacgatgaggagttgagcaagctgatggggtctgtgaccattgccaatggtggtgttctgcctaacattcaccagaatttgttgcccaagaaggccgct

SEQ ID NO: 7387 - DNA, 1404 bp, Glycine max
gaagttgttcatgttcatttttgcattctcaaaccaaggaaaagtccaagagtttctccctttggttctgtgttttgaatgatgcatgcaacatagggtaggaaagagggacctgagtgaagcaagtggtggggttctctcacaaacatggaagaggaaaatgttaagcagccattgttggagaggaagtaccacgaggactgccctggttgcaaagtggatcaagccaaagagttgagtgagggacaaggtgtacccgttacaaatcttttcatcatatgggtggtggtgctgtgtgccgcgctgccaatatcgtcgctctttccattcctttatttcatggtaagggattttaatattgcgaaaacagaagctgatattagttcttatgctggttatgtgggttctgcattcatgcttggcagatgtttgacatctttgttgtggggaactatagctgatcgctttggtcgaaaacctgtttttgttataggaattattgcagttgtcattttcaacacactatttggccttagcacaagtttttggatggctgttatcatgaggtttcttctgggaagtttaaatggtttgcttggaccagtgaaggcctatgccactgaactttttcgagaagaacaccaagctataggactctcaactgtcagtgcagcttggggcataggtttgatcattggcccagcattggggggctatttggctcagcctgtagagaagtacccacatatatttccaaaggattccttttgggataagtttccatacttcttgcccaaccttataatttctgcattcgcatttgtagtagctattggctgtatctggattccggaaacacttcacaaccacaattgtagcaatgaatccacagacgatgccaaagctttagaaagtggaaacagtggagctggcaatgaaaagataatccaaaagaatgataacctcctcctgaattggcccttaatgtcatctatcattgtttattgtgttttctcacttcatgatattacttatacagaggttttctcgttgtggtctgttagtcctcaaaggatggggggtttgaactttacaagtgatgatgttggtaatattctttcaatatcaggtgttgcacttatcatttaccaacttaccttatacccatctgtggaaaaagctagtggacctattggtattgcccgcatctcagcgatgttatccatacctcttctacaaagctactccttcatagcattgttgtcaggcttggcactatacatagtgttaagtattgcttcaattctgaagaatattctgtctgtaagtgcacctcttcatttatttaatcgcttattagtgattttgagggtttaaaatttaattggatatacaaaacctcgg

SEQ ID NO: 7388 - DNA, 542 bp, Glycine max
gaccttgcgttgttcgtgttcattttttcattctcaaacccaggataggaccgagtccaagagtttcttcttcggttgtgtgtacgtttgtttttgtttcctcaacaaccattgttttttctccagaacaaagtggctttgacatcttttctgatcatctcttatgggtttgaatgatgcatgtaaaatgttgtaggaaagagagggacctgtgagtgtcacaaacatgggagaggagaatgttaaacaaccgttgttggagaggaagtactacaaggactgcccaggttgtaaagtggatcaagccaaagagttgagtgagggaaagggtgtacctgttaaaaatctttttatcatgtggatggtggtgctgtgtgctgcactgcctatatcatctctctttccattcctctatttcatggtaagggatttcaatattgcaaaaacagaagctgatattagttcttatgctggttatgttggctcttcattcatgcttggcagatgtttgacatctgtattatggggaattgtagccgatc

SEQ ID NO: 7389 - DNA, 391 bp, Glycine max
tccacgcgtccgaccacttgaaacaagttacatttattcctttagttatatacttttatcaaaattttgacatggtacaattcctattgcagaatagatattttgcgtaatgaatgacttatcaagttttcaggtcttgcacttattatttaccaacttaccttatacccatttgtggaaaaagctagtggacctattgttattgcccgcttctcagggatgttaaccataccacttttgccaagctaccccttcatagcattgttgtcaggcttggcactatacatagtgataagtattgcttcaattctgaagaatattatgtccatcaccattataactagtttgttccttctgcaaaaccgagcagtggaacaacaccaaagggggg

SEQ ID NO: 7390 - DNA, 477 bp, Glycine max
acgagtttgtaacgtgtcttgatataacatgtgagagtgacaagaccttgcgttgttcgtgttcattttttcattctcaaacccagggttgggccgagtccaagagtttcttcttcggttgtgtgaattagagggacctgagtgaaacaagtgtggcggagttctctaacaaacatgacagagaagaatggcaaacaaccattgttggagaggaagtactacgaggactgcccaggttgtaaagtggatcaagccaaagagttgagtaagggaccaggtgtatcctttacaaatctttttatcatatgggtggtggtgctgtgtgccgctaagcattaatttcactctattttgagtatttttaacttatgaaaaagttggttgttccagcctatgaaacacggagtcttatgcggacactttttgacacaattaatgtctaaaattttggacaccgcatacacataaatagatatt

SEQ ID NO: 7391 - DNA, 483 bp, Glycine max
  unsure (1)..(483): unsure at all n locations
cctagaccttgtgttattggtgttcatttttccattctcaaaccaaggacaaatcctagagtttctcctttggttgaaagagagggacctgtgagtgtcacaaacatgggagaggagaatgttaaacaaccgttgttggagaggaagtactacaaggactgcccaggttgtaaagtggatcaagccaaagagttgagtgagggaaagggtgtacctgttaaaaatctttttatcatgtggatggtggtgctgtgtgctgcactgcctatatcatctctctttccattcctctatttcatggtaagggatttcaatattgcgaaaacagaagctgatattagttcttatgctggttatgttggctcttcattcatgcttggcagatgtttgacatctgtattatggggaattgtagccgatcgctatggccgaaaacctgttatagttatggngattattgcagttgtcattttcaacacatta

SEQ ID NO: 7392 - DNA, 681 bp, Glycine max
ggaaagaaggttaagtgaaaagtgaaaagtgaaaatggacttggaagcagtgaagaggtacttagagaaaggaggagaaacagcatcggcggtggatgggttgcctccgaggtttctggaaccgttaataatgaacgctcttaaggtcgatctcatcgaaactggtcgcgttgtctgctccatgaagatacctccgcgtttactcaatgctgggaattcgttacacggtggcgccatcgctgctctggtcgacgtggtggggtccgctgcgattcccaccgttggatattcggctcccaatactggggtttctgttgagattaatgtttcgtatttggatgctgcctatgccgatgaggagattgagatcgaggccagggctttgcgtgtagggaaggctgttgccgttataagcgtggagttcaagaagaaaaaaactggcaaagtttttgcccaggggcgtcataccaagtttcttcctctttccagtaaaatgtgaaggccaaaatatgcacagaaataaatggttcaatgttggttcgcccttaatatgtggcaaattatatcttagtgccacttcttattaattttccagtatttcacccagttacttcatgtgtgattaccttaaattttctctaccagttcttattgttctatagggacagttacttcgttgtt

SEQ ID NO: 7393 - DNA, 561 bp, Glycine max
gaggaacgttatttttggacatttacctttacatactaactagaacctccctcgcgcttttcttcgtttccaaacccgaaaggcccaaccacagagtctccattgcccctcgctctctctattggttcacgcgcggcaattggagattcacgcgccaccatggcctcaccaccgacactccctatctcctcccaatccagcgcctccggcggctccgcctcgcagtcccagcctccgatcgcaacgccggcgttccgcgccttcatctcccgcatctcctcgtccctccgtcacgcctttgcgcagcgccgcccgtgggcggagctcatcgaccggagctccatgtcccgacccgacaccctcgccgaagcatactctcggatccgtaagaacttcgcctacttccgcgtcaattacctaaccctaatcgtgttggcgctcgcggtctcgctcatcacgcatccgttctcgctattcgtcctcttcggtctcctcgcgtcgtggtcgttcctttatctctttcgcccttcggatcagcctgtcgtcctcttcggacgcacc

SEQ ID NO: 7394 - DNA, 479 bp, Glycine max
ctggagccgctcgagccgaatcggctcggccaccccctctttaatttttttttctttagcttttggagtttggagtctcttgaaccatggctaagaatagaggagagttgaggattcatgagagtgtggatgagctaaggactgatttggcagactatgttgctgagttatcagaggcatctgtgaaagagcgaggagtctttgccattgctttatctggtggttctctcattggcttaatgggaaaactctgtgaagctccttataacaagacagtggactggtccaagtggtatatcttctgggctgacgagcacgttgtggcgaaaaaccatgccgatagcaattataagcttgctaaagatggccttttgtccaaggtgcctattgtccctagtcatgtgcattcgattaacgattccgtgtcagcagaagaagctgccgatgattacgagtttgtcattcgacagctggtgaaa

SEQ ID NO: 7395 - DNA, 469 bp, Glycine max
tggcttcttctgtgtgccaccccctcttttatttcttcgttctttagctcttggagtttggagtcccttgaaccatggctaagaatagaggagagttgaggattcatgagagtgtggatgagctaaggactgatttggcagactatgttgctgagttatcagaggcatctgtgaaagagcgaggagtctttgccattgctttatctggtggtcctctcattggcttaatggggtatttgtatcttatcttttccatataatagtttctttgctttcatgatttagtgttggtttaaaacttctgattgcaaacagaaaactctgtgaagctccttataacaagacagtggactggtccaagtggtatatcttctgggctgacgagcacgttgtggcgaaaaaccatgccgatagcaattataagcttgctaaagatggccttttgtccaaggtgtaggataggggcaca

SEQ ID NO: 7396 - DNA, 448 bp, Glycine max
tacggctgcgagaagacgacagaagggcatggaaacggtgatgaagaagaagaggaagaggaggagggtggttttgatttggagtgcagctatgcgattgtacagagagccaagcagcagttattgtataagcttcgtagatttgagaaactggcggagttggatccagtggaacttgagaaaagaatgcaggatcaagaagaggacgaggatgacacatttatggaagaggaagatggtcatgatgagaaaaaccaagcatcatgcaaagaaaatgacttcatagaactaattttccaagctctgtgccaatcaagggtccatgacagacagcaaatcccagaggactttaggaagctggtatctgatctcattatggaagaagagagagcacttgattccttagaagatatggacatggtgataagaaggatatgcaagaggctgg

SEQ ID NO: 7397 - DNA, 435 bp, Glycine max
  unsure (1)..(435): unsure at all n locations
cnctgttttctctctctctctctctcactctgttctcccattaaacccccccctcacccacccaacattcacactcaagcccctcactccaaaacaaaacctaaacattttactcttttcggttttttttttttgtttcacacatgccgtcgtcgaattccggcgagagtcgccgagcgagcaagccgcagagctcgggcggagcggcgccgccgccgccggagcaggaaaacctgccgtgcccgcgatgcgactccaccaacaccaagttctgctactacaacaactacaactactcccagccacgccacttctgcaagtcctgccgccgctactggacccacggcggcactctccgcgacattcccgtcggcggcggcagccgcaagaacgccaagcgctcccgcacccaccacgtcgccgccacatcatcct

SEQ ID NO: 7398 - DNA, 386 bp, Glycine max
catcatcccaatcccatatcatgagcattagagtgtaccttagtgtaattagtagtgaaatatgaaaatggaagtggtttcattttcacaatcaacacatacccaaaagtaacagagagtgacaatagcagagcgacccaatccaaacacagaacaaacttagtagtaaaagaaaaacatgacgacgggtatcgtacgcgaccagaatctggagaaacatattcacaagcagatggggtgcatggctggtttccttcagatcttcgaccgccaccagatgctcaccggaaaacgcatctactcccccaaacgcctccctccggcctcgcctgagccggagaatctcgcagtctcaccggcgcgttcaacgccgtcgccagcgagag

SEQ ID NO: 7399 - DNA, 385 bp, Glycine max
gaaaaacatggtggcgagtgagcgagcgatggaagaagaagattttgatttcgagaagaaggtttcgataaaggaatcgatgtcgatgtcgatgtcgacagagcttgatccagccaaagttcttcttttgcttcgtggtttcctccaaattcagcaacgcagggccgaagcatattctaagctcaaaagtgggttttctgactacatggcctctggaggggaattggcttacaagcagctctgcagtgaaatcacaatagagtttaacaattgctcgaaaaaacacaggtccttgaaatggagtcactgtttagaagccctgattactgccgagttgatctagcgcagctccttagagctgttcaagatcaggaaaagcacaaac

SEQ ID NO: 7400 - DNA, 586 bp, Glycine max
attctagggccgacccacgcgtcctgagagagagagagaaatggagaagacaggagtgttatcggcgaaggaggcattcgagaagcttgaaaaggtgggagaagggacatatgggaaggtgtacagagcaagagagaaggcaactgggaagatcgtggctctgaagaagactcgtctccacgaggacgaagaaggtgtccctcccaccactctccgtgaggtttccattctgcgaatgctctctcgcgatccccatgtcgttaggttaatggatgtcaaacaaggtcagaacaaggaagggaagacagtgctctacttggtatttgagtacatggacaccgatctcaagaaattcatacgctctttccgtcaatctggggaaaccattcctccccatatcatcaaaagcttgatgtaccagctttgcaagggcgttgctttctgccacggtcatgggatcttgcacagggacttgaagcctcacaatctcttgatggacccaaaaaccatgatgccttaaaattgctgatcttggactcgctcgagcatttactgtgccgattaagaaatatacacatgagatact

SEQ ID NO: 7401 - DNA, 472 bp, Glycine max
gggggtggtaagtagggggagcgggatttgaaattcaaaataacaaggaagccgttggagatggagatggagaagacgggcgcaggagtagcagtgttgtcggcgaaggaggcattcgagaagcttgagaaggtcggagaagggacatacgggaaggtgtacagggcacgagagaaggccaccggaaagatcgttgctctcaagaagactcgcctccacgaggaccaagaaggcgtccctcccaccactctccgcgaggtttccatcttgcgaatgctctctcgcgatccccatgtcgttagcttaatggatgtgaagcaaggccagaacaaggaagggaagacagtgctctacttggtgtttgagtacatggacaccgatctcaagaaattcattcgctctttccgccaaaccggacaaagcattccaccccaaactatcaaaagcttgatgtatcagctttgcaagggga

SEQ ID NO: 7402 - DNA, 565 bp, Glycine max
  unsure (1)..(565): unsure at all n locations
ctccttcgcactcctctttctctccgtgttgccgttcagtgacagcgagtgaaagaatagaagagtaaagaagaggagagaaaccgagaaagaagaagaaaactagggttttgcaattgctgcaatggcgcatcaaggagaaccggcgaactgcggtggggtgagctcgaggaggacgacggcgaggatctggacttcctcctgccgccgcggcaggtgataggccccgacgagaacgggataaagaaggtgatcgagtacaagttcgacgaggacgggaacaaggtgaagatcaccaccaccacacgcacgcgcaaactcgccaacgcgcgtctcagcaaacgcgccatcgagcgccgctcctggcccaagttcggcgacgccgtccacgaagacgttggtgcccgcctcaccatggtctccaccgaagagatcctactcgaacgccccaagcctcttggtgccaagtcagaggagccaaagaatgctggagacccattggctcaatttcagaaaggtgctgttcttatggtctgtangacttgtgggaagaagggtgatcact

SEQ ID NO: 7403 - DNA, 270 bp, Glycine max
gttcagatagagagaaataataagtgttaatggagtatgtgatacgtaaaggtgtcctaaattactgtattttttaaaaaaattaactctctggttaagcattaaagtcaagatttaaacttgaggtcaatttatatagtataggtaccaagtggtctatcatcagtatataatagctctaagattctgtgattgttaataggtgccagtcagaggagccaaagaatgctggagacccattggctcaatttcagaaaggtgctgttctta

SEQ ID NO: 7404 - DNA, 833 bp, Glycine max
ctcgagcgattcgcgtccggtttctttccttctctctctctggagctagcgcgagtgaccggagcggcgaagatagagtcagatcggaagcggaagaaggcgtcgacctcggcggcggagaaggagaaccggaataagcataagaagtcgaagatgtcgtcgtcgtcgtcgaagggtggtggcggtattgaggttagggcttcgcacatattgataaagcacgaaggttctagaaggaaggcctcgtggaaggatcctgaaggtcgcatcatcaagagcacaaccagagaaaacgcggtttctcagctcaaggccctccgcgacgacatcgtttcgggcaaggccacttttgaggacatcgcctctcgcttctccgattgcagctccgccaagcgcgggggtgatctcggtccttttggtcgtggccagatgcagaagccttttgaagaagcaacttttgctcttaaaattggtgaaataagtgacattgtggatactgacagcggagtccacattattaagagaacaaaatgagattattacggaataatctcctaatagggagagacattaacatctgtagaagatttccaggattcttgttcaactcaagatctgttgatatatgtttgagacatggcggtgtcatgtttttggatgatatattgttttctgacaattaaaaacatgtggtatgcttgtaattttgaaagacatttataaggtttggattctattgtctttgggctggagcttctctcaaactcggccgggaatttgtggttaaaccgggtaaaaaaaaaaaaaaaaaaaaaaaaaaaaaatcggccgct

SEQ ID NO: 7405 - DNA, 528 bp, Glycine max
ccaagcgcgggggtgatctcggtccttctgcatctggccacgaccaaaaggaccgagatgcagaagccttttgaagaagcaacttttgctcttaaagttggtgaaattagtgacattgtggatactgacagctggagtccacattatctaagagaacaaaatgagattattacacggagtaatctcctaataaggagagacattaacatctgtagaagttttccaggattcttgctcaactcaagatctgtggatatatgtttgagacatggcggtgtcttgtttttggatgatatattgttttcgtgacaattagaaacatgtggtatgcttgtaattttgaaagacatttataaggtttggattcttaaaaaaaatatataatgaaaatattaatataaatttatatttaaatcttatatatacattaaaataaaaaaaaggggggccgttctaaaggatccaagtttacgttcgcgtgcatgcgacggcatagctcttttattggggcacctaaaatcaattcat

SEQ ID NO: 7406 - DNA, 885 bp, Glycine max
taccctctcccgagcgattaaaacccaaaaagagatctaagaatgaatgcaagaataaaagaaaagaaatagaacaaaaaaaaacctggaataaattcctttgcattgataactcctgaagctcagtgtacatcgttggctttttaggcctgccaggccctagctaggggtttagccactcatggccattgagggcttacaactggggatgaaagaaaggctaggctaacaaaacaaagaatgtagagagggaagaaaactcaggcttgaagtactgagagtgatgctctgagatgggatcatttttccttgggactgcctctctatttatagtggctgaagtgggcttacgggccttcgtagttgcgctcagcgccacacctcgcgcttagcgcgttcagatcgcgcgctgggcgcgccatgcacgctgggcctgtgcttctgttggatcgggcgctgggcgcctgtgcgtctgttggatcgggcgctgggcgcctagctgggcttagcgcgcgtaacggtggcagcggtttctgccacgctaagcgcctccagttagttgctcgcttagcgcctgatgcgcgctgagcgcccctattggattgggcctgcttcagaatttcttctttttttttttctttctgggccacttttgctaaatgcaaccttatttttcgtatcttgatttgggcagttgtattatctgcaataactcttggctgcacttgcatcttctctacaacagcaacttcttggtctggtttggtctggtctggatttatttcttaatagcttcttgatcataaattcataactaaaaaattctgattatatcttaactgtacctttaatctcgaaattactaaccatatcaatagtgatttg

SEQ ID NO: 7407 - DNA, 1527 bp, Glycine max
gaaagggtcaaacctgctaaagcaacctcagaagacaatagtgatgcagaagatgatgggaagaactctgaagatgatcagtcctcttcatcacctgagaaaccttccaagaagaaagaagtttcaactcctgtgtatggtaaacatgtggagcacttaaagtctgttattaaagcatgtggaatgagtgttcctcctgtaatttacaaaaaagtcaagcaagtgcctgaaaacaaacgagaagagcagctaattaaggagttggaggaaatactgtctagagaagggctgtcttcaaatccatctgaaaaggaaatcaaggaagtaaaaaggaagaaggcgagagccaaagaacttgagggtattgatctaagcaatattgtgtcaagttcacgtagaagatcaacaagtagttatacatctcctcgctccaaagccgaaggttccagttgaaactagtggcattggggctgaatgtagtgataatgatgatgaagacaatgataatgaagaggatgatgaggaagaggatagtggtgacgatgatggaagtcagagtgaagaatttaatgatggtaaatctatttaaaatatgttaaggcttttctttgttttcagtttattgtttatattacatatcatagggaataatgtgttttctttagtgctttttgcagtggttaagtagtttgttgttaataataattactaactgctttgatagggtcgaaacatcattgatagttgttatcaattatcaaatgatttcaacattttatagcattgggcttaacccttctaacttatgttacgttttggtagctatctgatatcccgacagtaatacttaaaatatctggatattagttattactgaattctgataaggtccttgtattctaggacttgattagtaagtaacccgaggttctgaatatgctaagcacaccacagacaatggcagctaatcacagcacagtaaagaatctttgatttgaagaatcactcttgggaaataaagaatcttttcaagtttttcccttaattttcctgtagagatgggtgatgaaatattttgggtgcattttgcatttcatttttctatatcttttcgtttcctgttacccaatttccttctgtggttatcttttaagttttaattgtttcttaatataatagagaggaaaaggtgagctgcacttagtacacagcttattgtgaagcaattttacggaacacttgtcaaactgtctggtgaattatcttctctattatgataacacgtgttacattttttgggaagtggttgtccttacattctctctttctatgcagatgaagaggacagtgattgaactcgggcagattccacaataattattaaggcgaattttttcacaattaattaggaggtgatgatgtataatgtaatgtcttgtaacgtatttgctctcttgctttattttctgttgttccaaatatataatgtggtaatggccaatactttttgctagttgcagaagtatt

SEQ ID NO: 7408 - DNA, 566 bp, Glycine max
ttgtcttcaaatccatctgaaaaggaaatcaaagaagtaaaaaggaagaaggcgagagccaaagaacttgagggtattgatctaagcaatattgtgtcaagttcacgtagaagatcaacaagtagttatacatctccacctccaaagccaaaggttccagttgaaaccagtggcaatggggctgaaggtagtgataatgacgatgaagataatgataatgaagaggatgaagaagatgaggaagaggatagcggtgacgatgatggaagtcagagtgaagaatttaacgatgatgaagaggacagcgattgaactcggacagatttcacaataattaaggcgatttttttcacaattaattaggaggtgatggtgtataatgtaatgtcttgtaacgtgtttgctcttttgctttattttctgttgttccgaatatataatgtggtaatggccagtacttgttgctagttgcagaagtattaatttagtttcttccttggtccgttaatagtaacttctgctttgacagtattggtttaaatttagtatattttatttcccctacg

SEQ ID NO: 7409 - DNA, 795 bp, Glycine max
gaagtaaagtgcaagctttatgtgaagtcaagtgatccagcagataaagatgtatggaaagataaaggaatgggccaactgtccattaaatgcaaagagggtgtcagcaaggctaccaaagagtccaaacctacaattgttgttcgaaatgaggtaggaaaagttcttctcaacgccctgttgtatccaggaatcaagacaaatctgcagaagaactctcttgtcgcaatattccatacttcgggtaatgctgacggaagtggtggagataacgatagtgttgttgcacgtacattcttgatccggatgaaaacagaagatgatcgaaataaactggcttcaaccatccaagaatatgctccaatgtcttgagagtacaagagtcatgattattgtgccaccttgagccatttaaagtaatcgaatacgggatccaccttcaatttttcctttcaccattttatttttttatgatgtcatttgttagattctgtgtttccaaaccttgtgtttggaggctgttgcttatgtaccatatgagaaggttgcatttggtcggataaaatgccttagattaatgcaattgtagtttaaagttaaaagtgatgcattcatcaccttggacctgccgtactattttttaaagccagccaaacggcagataaaccgcatgtttacagaatttgaagacaaggtggaggactcgaaaaataatttaaatcaaaattatgaatgttgtggaaggtgtggctgtgaactcaacacctgaaaattcgaattgtgaaagggcggccg

SEQ ID NO: 7410 - DNA, 673 bp, Glycine max
gtgattagttgcgtgagggtcacagaggagcacattggtttggttggtctcctctcagtaccaataccaagcaagcttagtgaagaatgatgattactagatttgagtctcatctcaggtgccactcagtgtacggaacagtgtcataaccgttttcgcaacagtccaatctctgaaccttggtatttcggcaacgcttaacataacttgtttttctctttctctttctcaaccaatttgtactcgtcattattattattattataaatcaatagaaagacaggaaccaaaactaattaaaaaccacattcacattattcctccgaagatgacagtgacgagtggagaagaagaaggcgccgttggaggagttcagatccaacacaggagcagaatggtgctcccagattttctccagagcgtgaatctcaagtacgtgaaattaggttaccactacttgatctccaacctcgtaaccttattccttgtccctcttatcctcgtcacgctcattcaggtttttcagaccaccgacatcgaccacctccgccacctctggctccacctccagtacaacctcctcaccatcctcacctgctccgccgtcctcgtcttcggcctcactctctacgccgtcactcgcccacgggccgtctaccttcttgacttcggc

SEQ ID NO: 7411 - DNA, 850 bp, Glycine max
cccacgcgtccgcccacgcgtccgcccacgcgtccgcccacgcgtccgctcaaatttctcagtctccggaactcgtttctaccttcacttcgcacatctcgaaccctctctttccggcaactaggttaaagttcatcaatggcaggtcgaggcaaaaccctaggatccagcgccgccaagaaggccacctcaaggagcagcaaagccggcctccaattccccgtcggccgtatcgcccgtttcctcaaggccggaaaatacgccgagcgcgtcggcgccggagcccccgtctacctcgccgccgttctcgaatatctcgctgctgaggttttggaattggctggaaacgctgcgagagacaacaagaagactcgaattgtgccgcgccacattcaattggcggtgaggaacgacgaagagttgagcaagcttcttggtgacgtcaccatcgctaacggtggcgttatgcccaacattcacaatcttctccttcccaagaaggccggtggctcatccaagggcgctgctgctgacgatgactcttaaatagggattcgcttttcttgatttttttattatcaaatttagattatcttttggcctctctgttttgtagtttcttttttagttttgataattatgctctgtagttgtagttaggttttcattactgatgtgaatagagaatgctcttgttcttcaagaaagattgttgaaaatttgaatcattttaatttgtaatttttcagtctcgatctagcacttgattcctggttgtaatctataatattcgaattcaaactgttttaaatttgtttcccaatgttgatttggctttgattaaaaaaaa

SEQ ID NO: 7412 - DNA, 752 bp, Glycine max
acagctgctagaagaggagagaaggggaagtatataacttcttctaggtgtccggaaatcgttcctatcatcacttctcaaatctcgaaccctctcgttcgtgccgatcactaggtcacacttcatcaatggcgggtagaggcaaaaccctaggatccagcgccgctaagaaggccacctcaaggagcagcaaagccggcctccaattccccgtcggtcgtatcgccaggttcctcaaggccggaaagtacgccgagcgcgtcggcgccggagcccccgtctacctcgccgccgttctcgaatatctcgctgctgaggttttggaattggctggaaacgctgcgagagataacaagaagactcgaattgttccacgccacatccaattggcggtgaggaacgacgaagagttgagcaagcttctaggagatgttaccattgctaacggcggtgttatgcctaacattcacaaccttcttcttcccaagaaggctgggggctcatccaagggtgctgctgctgacgatgactcttaaatagggattcactgttcacaaagttcttgaatttagattctatgtttgctctctttttttttcctttttatttgtagttatgataattgtgccctttgtagtagtagttaggttttcagtcagatgtgtttaaagaatgctcttacgcatcaagaaaggttgttcaaaatttaaattattttaatgtcacctttgagtcttgatctagcatttgat

SEQ ID NO: 7413 - DNA, 704 bp, Glycine max
  unsure (1)..(704): unsure at all n locations
agctacgagacgacagaaggggagatatacattctcttgtcacagttttctgtgtcaccggaactcgtttctttcaaaacacttcaaacatctcgaacgctctctttccggcaactaggttaaagttcatcaatggcaggtcgcggcaaaaccctaggatctagcgccgccaagaaggctacctcaaggagcagcaaagccggcctccaattccccgtcggccgtatcgcccgtttcctcaaggccggaaaatacgctgagcgtgtcggcgccggcgcccctgtctacctcgccgccgtactcgaatatctcgcggctgaggttttggaattggctggaaacgctgcgagagacaacaagaagactcgaattgtgccgcgccacattcaattggcggtgaggaacgacgaggagttgagcaagctactcggtgacgtcaccatcgctaacggtggcgtcatgcctaacattcacaatcttctccttcccaagaaggctggtggatcatccaaggctgctgctgcagacgatgactcttaaataggggttttttttccgtgaaaagttatcgaatttattctctttggattctctctgtttttgtagtttttcagtttttgataattgtgttctgtagatgtagttaggttttcagtcactgatgtgaatagagaacgctcttttttttccaancccaanncccc

SEQ ID NO: 7414 - DNA, 564 bp, Glycine max
gccggcgcccctgtctacctcgccgccgtactcgaatatctcgcggctgaggtaattgccgcaattagtcgttcatttcgaattcgattttgaaattatctccctatgtgattagatctagggtttcgtaatttcgattagattcatttgccctaattgaatggtttgaacattgttttaggttttggaattggctggaaacgctgcgagagacaacaagaagactcgaattgtgccgcgccacattcaattggcggtgaggaacgacgaggagttgagcaagctactcggtgacgtcaccatcgctaacggtggcgtcatgcctaacattcacaatcttctccttcccaagaaggctggtggatcatccaaggctgctgctgcagacgatgactcttaaataggggttctttttccgtgaaaagttatcgaatttattctctttggattctctctgtttttgtagtttttcagtttttgataattgtgttctgtagatgtagttaggttttcagtcactgatgtgaatagagaacgctctttttcttcaagaaagattgttgg

SEQ ID NO: 7415 - DNA, 393 bp, Glycine max
ggtcctcctcctctgacgccgaacagagtctgcactcacacagagccagaacgcgcaagagagagaaaccacaacaacagacgaagcaaaaaaaaaaagaagcgagcgaatagagacaaagcgtaagaacaacaacacaacaaccctaacgttacttctcatggaaagcgtggcgcattctcggcaacctccagacaagaaaatcaccgccggcaccggcggtttcccagccgaaactctatacgaccacgtctacggcggagcggcgaagttcaccgccggcggccaccaccactccctctcgccgtgcttcgaggactacggcgagattttcgccagcttccacgagccgcgcgcctccgccattccggtgctggatcttccggcgctcga

SEQ ID NO: 7416 - DNA, 578 bp, Glycine max
cccgggacaacatcaacctaatccagtttcgttattcgcccgacacattttttctccgatcccctattcctctccattctccgttgtgtcgatttttgttactcaaaagggaaattgatttgatagatagacagatagatcgtttctatgggttaaagtgaaatccgaatccgaatctgaatctgaatctgatccaatcattttcatgttagggcgtgcgatctccaatcaagcgcggttgtgtttaggtttcattttgttgggcgtgtgagtcgtagggggtttcgaagagcatagaataatgccttcggtgcccgttgatctccgtctagttccttctttgaccgttttccatggtggatcctcttttcatcgtctgaaaaatcttgaaaaaagtgatcggcgtggtaatcttagttaacactaggtctttcgttttcttccaccctctctctctcttggtcgttgttggttctgctctgaacgaggtgtgatatattcggcaacggatcgggatcgagggattgatattgttgtttttttcccgtgattacttgctattttcagctcctgttttg

SEQ ID NO: 7417 - DNA, 458 bp, Glycine max
ctcctctatcccaacaaaaacaacaacctaatccagtttcgttcttcgcccgacacattttttttctccgatctcctattcctcctcctatttttgttactcgaagcgagattgatagatagatcgatcctctctatgggttaaagttaaatctgaatccgaatatgatctaatcattttcattttaggtctttctgatttggttttcggtgttgaattgagcgcggtggttgtgtttaggtttcgttttgttgggcgtgtgagtcgtagggggggtttcgaagagcatagaataatgccttcggtgcctgctgatctccgtctagttccttctctgaccgttttccatggtgaatcttcctttcatcgtctgaaaaatcttgaaaaaagtgatcggcgtggtaatcttagttaacactaggtctttcgttttcttccaccctctctctctcttggtc

SEQ ID NO: 7418 - DNA, 564 bp, Glycine max
  unsure (1)..(564): unsure at all n locations
acgagtgcaaaatagcgacgtaagagaggcggagacgaagaagtgaagagaagagaagagaagggatttggatctgaaaagagaagatggggggaggaatggaagcaaacaagaacaagttcatagaggattggggcactgccagagagaatctggagttcaatttccgttggactcgccgcaaccttgctcttgttggcatcttcggcatcgctattcccgtcctcgtctacaagggcatcgtccgtgaattccatatgcaagatgaagataatggtcggccgtacaggaagttcatgtgagagagtatggagagtcttttgtaataattcgtcaagttagaccttgatattatgaggctacaaaccatgtttttttttccttaattcgcaaaggcttgcttgcttttaagtactctagacctatcaaacctctccatgtttgcctgtcttcattcaaatttctgttatgctgtcaacttgttaccaccgtggttcaattaataatatttgtgcaaaaacatgttagtattatgtnnnnnnnnnnnnnnnnnnnnnnnnnnnn

SEQ ID NO: 7419 - DNA, 531 bp, Glycine max
cccacgcgtccgcccacgcgtccgaagaaattcaactttatccgatactaccgctttcaatctcatccttcgaaacccaaacttgagcttcttcttgtttcttgctcgtggaagcaaatgacaaccgcgccctctctaactggtcccttgtcaaacgcggtcggattcagtgactggaaaaaacatgcccctttgtcagcttctctctgtaaactaagctccagttcaaatatagttgacatgaagatatctcgatgtggttgtcggaaagttggacatggccaaagatgtttccgattatatgccctatttggaggaaaaaaggacaataatgggaaaagtgatgatgttccttctaaggccggaattctaggaaacatgcaaaatctttatgagactgtgaagaaggcacaaatggttgtccaagttgaagctgtgcgtgtgcagaaagaactcgcagcagcagagtttgatggttattgtgagggtgagttagtaaaggtaacgctgtcggggaaccagcaacctgta

SEQ ID NO: 7420 - DNA, 477 bp, Glycine max
agctgacaatgcaaaagtggaacaaaacaaaacttgtcccaaagatcataatcaccgccgaacctactcttcccttccaataaaaagaaattcaactttatccgatactctaccgctttcattttaatctcatccttctccgtttccttcaaaacccaaacttgaacttcttgtttcttgctcgtggaagcaaatgacaaccacgccctgtgtaactggtgccttgtcaaacgcggtcggattccgtgactggaaaaagcatgtccctttatcagcttctctctgtaaactaagcttcaattcaaatatagttgacatgaagatattatctcgatgtggttgtcacaaagttggaaatgaccaaagatgtttccgattatatgccctatttggaggaaaaaaggacaatagtgggaaaagtgatgatgcttcttctaaggcaagaattctagggaacatgcaaaatctttatgagac

SEQ ID NO: 7421 - DNA, 455 bp, Glycine max
gaagggacgaaaacgaaacgcgaacggataacagtagagtaagagtagcaggagcagaaagaaagaaagaacgaaaatggcgagcggcgcctcaccgcaactgcaaatgaggttgaagtcctctttcatcggagatcgtctcttacgctgttcaacttcaaggcaccaacctcttcctcaactattccgttacaaccctggaaccaagcatgtttcgatgcagttatctagaacactttctggcttgaccaatctcttttttaatagaagaaatttggatgaattgcctaacagcaagcgtaaacgtctgagacctgggaaagtttctccgcggcgacaggtgccgaagaatataccgaggcctccgtatgtgaattctatgattcctccagggattgccagtggagctgaagtgcatgacaagaaagggatagaatgcatgagagcttctggaa

SEQ ID NO: 7422 - DNA, 442 bp, Glycine max
ctccattccttcaacagttccaacttctcctttgaacaatggcttctcaaaaccctaatcagagaaattctctgtatccacaagtaatcgattctaaccccgatgctccctcacctctccttatcaccaatcactcgtcctcttcgcaaccctgcctctacccttccgttgactacaacgacctcgtcgagaacctattctctgaggatgccaccgccgcctgttccccctctgcgccgccggaggccaccgaggaagtcctcttccggatccccggcgcgatcctcaacctcgtcgacaaggactacagcgtcgagctcgcatgcggcgacttctccgtgattcgtctccggcagggcgacaacgccgtcgccgtgtacgcgcgcgtcgccgacgagatccaatggccgctcgcgaaggacgccgccgccgtgaaactcga

SEQ ID NO: 7423 - DNA, 484 bp, Glycine max
  unsure (1)..(484): unsure at all n locations
gcattcccggctcgacattctatcgcttcacacagagtgagatatagaatcactgaagagcttccttcaatggcggtttcttctctctctgttactcctctttcgctctcaaattcttccccctctctatcttccaagccaaagtttccatctttgtgttttctctctggcaacaacaccacattgagggtaacatgcccaaaacctctgcactcatccactgttgttcatgttgctaccgaagcgttggattcatcccctgatcccttggacccacctccagaaacccttgatgatgactctgacgccaccacctttgaggttggtgacttggggactcctagcacttcagcaattagcattggtggcgatgcagatacaatggcaccaaagcagaagattagaatcaagcttaggtcttactgggtgcccttgatagaggattcctggcagcagatattagatgcagcanggaataccaatg

SEQ ID NO: 7424 - DNA, 373 bp, Glycine max
gatagcacaaccttctatcgcttcacacacaagttcattcacacacacatacaatcactgaacagcttcaatggcggtttctctctctgttactcctctttctctctccaattcttctccttctctatcttccaagccaaagcttccatctttgtgctttctctctggcaacaacaccttgagggtcaaatgcccaaaaccttcgcactcaacaactgttgttcatgttgctccagaagcgttggattcttcacctgatcccttagacccacctccagaaacccttgatgatgactctgacgccaccacctttgaggttggtgacctgtggactcctagcacttcggcaattagcattggtggcgatgcagat

SEQ ID NO: 7425 - DNA, 756 bp, Glycine max
gggattcagcccaaagttcattcactggatttggggttccctaagcacaccattattttattatgaatgagtggcaatagcagcaacaacaacaatataagtaaaagaatctctgtgttgtcatcacacttcgctagatccagccccatcatggcttcagagaagcaagcggctcttgccgtcactccctctgatgctgatgctcctaccatatttgacaagatcatcaataaggagattccttctactgtggtttatgaggatgacaaggtgcttgccttcagggacataactcctcaagctcctacacatattcttatcattcctaaattcaaagacgggttaagtggtctatccaaggctgaggagaggcactttgagattcttggccgccttctgtacactgccaagctggttgcgaagcaagaaggactcgacgacggcttcaggattgtaattaacgatgggccgaaaggatgccaatcagtttaccacattcatgtgcacctcctcgggggaagacagatgaactgggcctccaggcctaaagtgtattgagaagtaataatcctgcttgtgctatccttttaataatggtttttaagacaaacttaataagtttgctaccattgaaggtgaccaccaatgtagtttaaaggataattccagtggttggaatggtgcttttaaaacacctttaatgttgggatgttagggcttactggcttactacctaaagttcccaaaggtccgttt

SEQ ID NO: 7426 - DNA, 1217 bp, Glycine max
gattgcatcgttgttgttcccttcttttttctttctccgccccttttttgttgttccttcttctcgttcgtcgctttgtgatctctctctgcaaccatgtccgtcgagaaagagagagagacccaggtttacttggccaagcttgccgagcaggccgagagatacgaagaaatggttgagtgtatgaagaaagtagcaaaacttgatcttgatctgactgtggaagaaaggaaccttctctcagtgggatacaaaaatgtgattggtgcacgaagggcctcttggcgcataatgtcctcaattgagcagaaggaagagtctaagggaaatgagcacaatgttaaactgatcaagagttactgccaaaaagttgaggaggaactctccaaaatctgtggtgacattctgactattatagaccagcatttgattccttcttccggatcagcagaagctagcgttttctactacaagatgaaaggtgattattttcggtatcttgctgagttcaagactgaccaagaaaggaaagaggcagctgagcagtcactaaaaggatacgaggctgcttctgccactgcaaacacagatcttccatcaacacatccaatccgtcttggacttgcactcaatttctctgtcttttattatgagataatgaactctcctgaaagggcctgccatttggccaagcaagcttttgatgaggcaattgcggagttggacaccctgagtgaagagtcatacaaggacagcactttgatcatgcagctgttgagagacaaccttactctctggacttccgatttaccagaggatggaggtgaggacaacataaaagctgaagaagccaaaccttctgagcctgagcattgatgtgattcagtagtcagaaatctaaggtactccccaagagggcatttttcagcttttcttgcaatggatttggaccggacaatagggactgtggtggccatttcataattcttgttctctcttaatatctttaccaaagccagaagatctgcacccttttttttcccttaaaactttttatttttattgccttctctgttttaagtggtcagttaagcaatgaacaatttacatttacccttaaaaaaaaaaaaaaaggggggcccgccgattagtaacctcttcgaccggggattaatttcgggacgggtacttgaaggggtaccagtttcccctatagg

SEQ ID NO: 7427 - DNA, 394 bp, Glycine max
agattgcgtcgttgtttgttgtttcccttcatctattttttcttcgcccccttttgtgtttctttttttggttgtttgttctttcttctcgttcgtcgctttgtgatctctctctgcaaccatgtccgccgagaaagagagagagacccaggtttacttggccaagcttgccgagcaggccgagagatacgaagaaatggttgagtgtatgaagaaagtagcaaaacttgatcttgatctaactgtggaagaaaggaacctcctctcagtgggatacaaaaatgtgattggtgcacgaagggcctcttggcgcatcatgtcctcaattgagcagaaggaagagtctaagggaaatgagcacaatgttaaactgatcaagagttactgccaaaaa

SEQ ID NO: 7428 - DNA, 652 bp, Glycine max
catccccagttcgagaaggatctgatgaagactcatcacctcgtgcatctgtatctgagaatggacattcaagtgctgcggaattcacaggggcttcacaagctttcaatgagcggggtgaacatcaggatgcttcctttgaggcaagagctcttatttccaaggtaactgaggagaggaattctgttgttgagcaaaacagaagacttcagcaagaactggagcttttgaggcgtgatgccggcagaagccgcggcggtgtaccattcatgtacgtagttcttgttggcatcattggactcatcttgggtttcctgttgaagaggacgtgacctgagtgatggccaagttctccaaaatgagatcaattgtagaaagcaacaagaaatatgtgcgatgatgtggaaaaaccaatttgttgtcttattgtcatgtattgctcctacaaatttggaatgtgtggtcaaaaaaataggtacttgtatcagccatagcaatcatagacaagtggacaaatttgtatcatgggaagtgtattgttatctgctgtggtacatgtgatcaattctttagcagctcctatttctcaccacgaccccgttggttgtctaattgcttaatcatggcaccatgatagtgcgtttttgaagct

SEQ ID NO: 7429 - DNA, 585 bp, Glycine max
tatatatctaaaaaccaagcgtgaaacccactcagttgaggaatcaatctctccctttcacctttctccatagcctaccacttttcttctttctctgctttcatctatctactctcacttctcttcacacactgagacacagagagagagagagaacaaaaaaagaaagggagtgatgggtgtgagactcagtgttttctttttataatgaacaaagtactacacatcctcttcttcactgaagaagatggcaattcagcaccacaatgaacaactagagcataatgaaaatgtctcatctgtccttgatgccctttactgcgatgaaggaaagtgggaggatgaagaggaggaggaagaagatgatgaagaaaggtgaagtaacaacaaacactggaacttctcttttccctctgctcatgttggagcaagacttgttctgggaagatgaggaactaaactctctcttttccaaagagaaggttcaacatgaagaagcctatgactataacaatctgaacagtgatgataataatagcaatgataacattaataataacaataatgtgcttttggactcttgtc

SEQ ID NO: 7430 - DNA, 425 bp, Glycine max
gagaatcaatctctccctttcacctttcttcatagcctaccacttttctgctttcatctactctcacttctcttcacacactgagacacacagagagagaaaaataaagggtgtgatgggtgtcttactgagtgttttctttttataatgaacaaagaactgcacaccctcttcttcaccgaagaagaagatggcaattcagcaccacaatgaccaactagagcataatgaaaatgtctcatctgtccttgatgccctttactgtgacgaaggaaagtgggaagaggaagaggaggagaaagaagaagaagaagatgaaggtgaaaatgaaagtgaagtgacaacaaacactgcaacttgtcttttccctctgctcttgttggagcaagacttgttctgggaagatgaggaactaaactccaacc

SEQ ID NO: 7431 - DNA, 1506 bp, Glycine max
gcagtgtgtcgacggtggaggagagaagccaagaggatcgagagagatggtggaaaatgggattgaaggccatttctgatggcaaattagctgtgttgcttttatctggtcgccaggggactcgacttggaagttcagatccacaaggatgtttcaatattggacttccatctggaaaatcactttttcaacttcaagctgagaggattttgtgtgcacagagactagctgctcaagctacaaatgagaattctgcttcttcagtgcaaatacactggtacatcatgaccagtccattcactgatgaggcaacacgcaaattctttgaaagtcataaattttttggtctcgaggcagaacaggttacctttttccagcaaggaacaatcccttgtgtttccaaggatggcagatttattatggagactccatacagggtagcaaaagctcctgatgggaatggtggagtgtattcagctctgaaatctaccaaattattggagcatatggcctcaaaaggaattaagtatattgattgctatggagttgacaatgcactggttcgagttgctgatccaacttttttaggttacttcattgataaaggtgttgctgctgctgcaaaagttgtccgtaaggcgtatccacaagaaaaggttggtgtgtttgtaagacgaggtaaaggtggtcctcttactgtagttgaatacagtgagttggaccagtcactagcttctgcagtcaatcaagcaactggccgtcttcgtttttgttggagtaatgtctgcttacacatgttcactctggattttctgaaccaagtggcaaatggccttgaaaaagacagcatttatcatcttgcagagaagaaaataccttccatacatggatatacaatgggattaaaacttgaacagtttatatttgatgcatttccatatgctcctacgactgcactttttgaggtgttacgggaggaggaatttgcaccagtgaaaaatgcaaatggatccaatgttgacactccagacagtgcgaaactacttgttcttcgactccatactcgttgggtagttgctgcaggtggcttcttaacacattcagtgcccttatatgcaacaggtgttgaagtgtcaccactctgttcgtatgctggtgaaaacctggaaccaatatgtcgaggaagaacatttcatgcaccttgtgagatctcgttctagttccaccctgtttgtgcggcttttttgtgacttacactacaatgagggagttctcagtcccatacatgttgcaagattactttgcgtatgccactcatcattcacagttatcaatgtatattatcttctccaatctgtttctgattggtttttggttttttcttttttggccactgatctgttttagtgtgctgaggaatgtacatgtatcataattttactgagcatttatttgcccatgcagactccaatatatcgccccattttcctttttttaaggaaaaag

SEQ ID NO: 7432 - DNA, 463 bp, Glycine max
gctggaggcttcttggttctgttctttgcttttgtgacagctatatatattggagcactatcactggccatctttgctatttccaccgtcactttttgggctgttgtggctattatcattactgctggatgggttggattcctttataccgtgtggctggtaactagcaagagccttggattggcaaagcaatctttgagtgtgactggctctgcaattactacttactcagctgcttggggtacccgtaaccttgcagacaaaaattcaatttaggtgccggtcacataaagaaggttgtgcacaaatcttacacaaacatgttttttggatggcaaaagcttcttctgttgactggtagagtctcatatccttcatcttgctcatggtttggtttcagtggctttcaatagcatgcttgtattatgttaataaaatgccacagtttggtttcaagtgtttt

SEQ ID NO: 7433 - DNA, 670 bp, Glycine max
cttcgaacggttggaagaaaaagagttatcgatccctttggggagataagaaaatgtggcttgtgcagctctcaaccccatttctgaacggacatggtcattccaccacccttctctccaagcacagttcggcggtgactcagacccactgggccccaccgagtttcctgcctcaaatcaatgcgatgaagacaatgcaggggagagtggtgtgctccaccagcgacaagacggtggcagtggaggtggtgcggctggcccctcacccaaagtacaagaggcgcgtgaggaagaagaagaagtaccaggcccacgaccccgataaccaattcaaagtcggcgacatcgtccagctccagaagaccaggcccatcagcaagaccaaggcctttctcgcactccccgttcccaaaaggtcctccaacaggcccgagccccagcccgatgagctttccattcccttcgagtcccagccccaggcctagattccagagttacacctcaatttcactctctcctacgcctactttttatccaaatccttcttttgcattcgcttggatgcttatgtgttgtaatttggatgctgcttgtgttttcgagcttcgctatatgtgcaattcttatcattctagctgactgctatcatatataatcgtctttttatttc

SEQ ID NO: 7434 - DNA, 497 bp, Glycine max
ggggagataagaaaatgtggcttgtgcagctctcaaccccatttctgaacggccatggccatggctccagccttctctggaaacccagttcggccgtgactcagacccactgggccccgccgagtttgctgcctcaaatcagatgacgaccccgataaccaattcactgtcggcgacatcgtccagctccagaagaccaggcccatcagcaagaccaacgcctttctcgcactccccgttcccaagaggccctccaccacgcccgagccccagcccgaggagctttccattcccttcgagtcccagccctagaagactccagagtcacccctcaatttcactctctcacgcctacttttgcattctctttcgtgcttatgtgttgtaatttggatgctgctagtattttgttactgctctattttttaccttcactgtatgtgcaattcttatcattctagccgcctgctatcatatatcatcgtgtttttcttccc

SEQ ID NO: 7435 - DNA, 499 bp, Glycine max
cccacgcgtccgcgccgctaatcactatgaaacaaaatcacgattctcatttcgaataaattgaaaagcaaggaaacgaactctccactgaactataagcaaacccttcagatcgagggtgagagttgctttcgccttggtcgctcagggattattcaaatcaaactcttcagttccgaagatgaaaacagtttccgattggatcgattcgtgttcgaaagagcaattgaagacttaccaggactggttcaacttagccgactcagacggagatggccgcatcactggaaatgatgcaaccaaattctttgctctctccaacttatctcgctctcaactcaagcaggtttgggctattgctgatgccaaaagacaaggatatttgggttttcaagagtttgttatggcaatgcagctcgttgccctggcacaggtgggacacgatatcaactcagatatccttaaaactgaaattgacaaggaaaatattaaatctccc

SEQ ID NO: 7436 - DNA, 393 bp, Glycine max
ccaagcctgaaatcatgtctagggccagaaagccagctctccctaaaaagcctgtagttcagaagagcaaaagggaacaggaagatgagattagacagaagatggaagaattgcggaacgaacgtcagaggagaattgctgaaagaactgcatcctctggtgttggtcgtgccgcgacaaagaaagaccaaattgaaggtaaaacagcaaggatttctgccaagagtgacaagaataagggaatcagttctgtcaaggtcaggggaatttagcaagccacacagtaaagtgtgtttaaataaccgttgattaaaatgaaatgaatagttttgttttctatataatctcaaaatattttgttttgtttcacggttgtatatcaatagattcctt

SEQ ID NO: 7437 - DNA, 634 bp, Glycine max
tctgcaaaaagacaacagaaggggaggaacaagaagcgaaaatataacaaataatttgtactttcatcaaaacaaaatcccgttgtatttttctcagatggctcgaacgaagcaaacggcccgcaagtccaccggcggcaaggcgccgcggaagcagctggcgactaaggcggctcgcaagtcggctccggcgaccggcggcgtgaagaagccgcacagattcaggccgggaaccgtggcgctgcgcgagatccggaagtatcagaagagcacggagctactcatccggaagcttccgttccagcgcttggtccgcgagatcgcgcaggacttcaagaccgacctccggttccagagctccgccgtctccgcgctccaggaggccgccgaggcttacttggtcggtctcttcgaagacacgaacctctgcgccattcatgccaagcgtgttactatcatgcccaaggacattcagctcgccaggcgcattaggggcgaacgcgcttaaacctaatccctgtccttttgtatagataatttcaagcgttcttagttagattgaattgcggttttctttgagaattctgtaatgttaacgctcccccaatgaaattatcgcttttgttcttcagcc

SEQ ID NO: 7438 - DNA, 531 bp, Glycine max
gaaaatagagaaaacacaaaaagttctgttctttttcccacccaattcagttttctcaaatggctcgtacgaagcaaacggctcgcaagtccaccggcggcaaggcgccacgtaagcagctggccaccaaggcggctcgtaagtctgctccggctaccggcggcgtgaagaagccgcacagattccgtccgggaaccgtagcgctccgcgagatccggaagtaccagaagagcacggaacttctgatccggaagctcccgttccagcgattggtccgcgagatcgcgcaggacttcaagaccgaccttcgatttcagagctccgccgtctccgccctccaggaagccgccgaggcctacttggttggtctcttcgaagacaccaatctctgcgctattcacgccaagcgtgtcactatcatgcccaaggatattcaactcgctaggcgtattatgggcgagcgcgcttaaatctaattattgattctctgtatagacgatttcaatttcaagcgttcttagttagaacttt

SEQ ID NO: 7439 - DNA, 411 bp, Glycine max
ctgccagaagagacagagagggaggaataagatgcgaatatataacaaataatttgtactttcatcaatacaaaatcccgttgtatttttctcagatggcgcgaacgaagcagctggcgactaacgcggctcgcaagtcggctccggcgaccggcggcgtgaagaagccgcacagattcaggccgggaaccgtggcgctgcgcgggatccggaagtatcagaagagcacggagctactcatccggaagcttccgttccagcgcttggtccgcgagatcgcgcaggacttcaagaccgacctccggttccagagctccgccgtctccgcgctccaggaggccgccgaggcttacttggtcggtctcttcgaagacacgaacctctgcgccattcatgccaagcgtgttacta

SEQ ID NO: 7440 - DNA, 834 bp, Glycine max
ggttattgaccctacagggtccaaaaattggattggaaaactaacagtacttgggccaagtccattggcacattggtatcaatcgctggagccttaataattactctgtacaaaggccaagcagtcataaagaatcatccatcaaataaattgttccccaaaaaacatgtttcatctgaacaatttgactgggtattaggggcagtgttgcttgcgggtcatagctttgttctctcattgttgttcatagttcagacatggataatcagaaattaccctacagagcttgtgatagtgctcactcgcggtacattagttgctatgctatctatcccaccttcactgatttcggtaacggatccaaaagctttgagattaggatttgatgtgaatttgatagctattgcattccaagcaatttttggtgtatcccttcgaagtattgttcatatatgggtcatgagcaagaagggccctctctatgttgcaatggttaagtcaattggaatcatctttgcggtcatcatgggaatggcatttcttggggactcaatctatcttggaaggcatacgtttctttcatgtcttaatcatatgaaaaattggagtgggcttggagcagccattatttgggggaaaagccaagagcaagcaaaggaagagtgtgaagtttataatgcctcggaatcatactcccccgttgtccctcttttgaagaacaagagaatggaggaatagaatcatagcgatcgtttaatttctcaagcttcaatataaatgtctcatgtaaaattttgaaaccaaattgtttttttcccaaaaatttggccctcc

SEQ ID NO: 7441 - DNA, 371 bp, Glycine max
gaccacaagcaagagcacttgttcaccaattacgagttctgaagaaattgagtatatatctatccatttgttttgaaaatggcttccaagagtattgcatgcattgttcttctctccctcaacctccttttctttaccatggtcagccccaacaccattgccccttcccctgcgatacaaccaccaccaccgccacgtgagtgtcccgagttgggtctttgcctcgatattttgggtttgggtcaagggtctccatcaaaagattgctgccccatcctccgtggacttattgaggttggtgccattgtatgcatttgcgacaaactcaggtccgctacattaggaatcaacatagatgttaatcttgccct

SEQ ID NO: 7442 - DNA, 717 bp, Glycine max
gactctgctgttttccaaaaccctaatttctcgaaaggtagggttttgcagagcctcctcctcctctcacggtttcttctttttatcttctcacctttcttcttccactgctctaatctaagatgggcaagtcaagcaagaaatcagctctcaaggtcgacgctgttccagctgtggttccgccatccaagtctgccaagaagggaggcaagagacaagctcaagatgaaattgagaagcaagtgagtgccaaaaaacagaagatagaggaggttgctcagaagcaaaagaaggaggcaaaggtgcaaaagaaggaaagtagttcagatgattcttcttcagaatctgaagatgagaaacctgcacccaaatctgctgttctttcaaaaaagatacctgctaagaatggtgctgcccctccaaagaaaggcaagctcgcctccagttcttctgaagatgactcctctgatgaggatggtgtgcgtgcaaagaagccacagaaaatggttgctgagaaacaaaagaatggagcaactgtgcaaaagaaaaaggtggaaagtagttcagatgattcttcttcagaatctgaagctgagaaacctgcagtaaaagctactgtaccttcaaaaaagacacctactaaaaatggcaatttaagtaccccagcaaagaaaggcaaggcagctagcagctccagttcttctgattcatctgaag

SEQ ID NO: 7443 - DNA, 467 bp, Glycine max
ggcgtagtatataatcacagtagccgcgagctcgtgaaacacactctgttgttttccaaaaccctaatttatcgaaaggtagggttttgcagagcctcctcctccgttaccagtttcttcttctttatcctctctcctttcttcttccattcctctaacctaagatgggcaagtcaagcaagaaatcagctatcaaggttgacgctgctccagctgtggttccgccatccaagtctgccaagaagggaggcaagcgacaagctcaagatgaaattgagaagcaagtgagtgccaaaaaacagaagatagaggaggttgctcagaagcaaaagaaggaggccaaggtgcaaaagaaggaggccaaggtgcaaaagaagaaggaaagtagttcagatgattcttcggaatctgaagaggagaaacctgcacccaaacctgtactttcaaaaaaggtacctgctaagaat

SEQ ID NO: 7444 - DNA, 1624 bp, Glycine max
cagaacggggaatagggttgttggattaggaaaaagggtttttaggtatttgagccgtgggagcgagcgagggttttggtttttgtaaggcaaaagcagtgataccaatggggagcacggcggtggagaagacggaggaagaactccgcaacgagatcgatgagcttcttcgccaacagcgcgagattacggagaggcttcgagatcctcgaggtcttcgcagaggttccttggcgggtcctgctctcccctctaacggtgctcgccaacgaccctttattcgtcctgttactggagacaggaatgattctgaagatcaacctcctgctaaacgtcgactttcatctgctgtcgttaaggtggatgatggggagttgcctgaagatgctggtgcaggacaggatgggaagacacaggattcagcgaacgaagctgtcaatgggactgctgcagtggtccagaatgatagcaaccctttcaattctcaccaaactgtatggtctaagagagataacaatcaaagaacttcaaaggcttctgacattcctactacggaacatgttccaagggtattgccaaagaacgaggatccaagtttggttaataggaacaaaagaatgttgggccagcttttgggaactctcgagaaattcagaaaggaagacaagcaactctcaggaacagaggcatatatgcgaagatctagttccttgcaaagagctgagcaaagggcacgtgaagaaagtgaaaggctcaggaaagaagagcgtgaacagattgctgaaaaacgaaggagagacttgactctcagggctcgtgtggctgctaagacagaagaaaagaaattggagctgctgtttcttcagtggactgagcatcataaaagactaagcaattttataaggactaaagcagaacctccaatctactatttgcctaacaagcccttggatgaagatcctacattacttgagaagcgcaaagaagaggcttttctagaatggaagaatgcaagaagagaggaagtgtccgagtatcagaaacagattggggagcagtatcttgccaatgttgagaaggaattggagagatggcagaatgcaaggaacgcaaggaaagttaacaatgaccagaatttacaggagacaatggacaaagagttggatactcataggctggagcatggtcccaagaaaagaaagatccctgacgaaaacaataatgacgacgatgatgatgtggaagatataaatgtgggagaggatgacatgatggatgatgaattagacgatgattctagtaggaggattgatgaaacaaccaagacggaagcaggtagtgccagttcagatcctgcagctgatgctgataatgcgggagggaagtgatcacccgcaaggacacaattttcaatagttttgagttatttatgtttttgtagtttattccttggtattctaacttttacgtatttggatttatagcctttgtattttctgtatgcaaatgaattttcttcacttattttctttgtattgctgactttagagaatcagattaatgcacagtatgtttgttgggtttgtgcccccaacgagcaaacttagcatgcatttatttcacg

SEQ ID NO: 7445 - DNA, 530 bp, Glycine max
ggtgggagcgagccagggttttggtttttgtaaggcgaaaacagtgagagcggtgtggtgcttagtgctcacaccaattaccaatggcagtggagaagacggagcaagaactccgcaacgagatcgatgagcttcttcgccaacagcgcgagatttcggaaaggcttcgagatcctcgaggtcttcgcagaggtgccttgccgggtcctcctgctctccgcactaacggtgttcgccaacgaccctttattcgccctggagacaggaacgattctgaagatcaacctccttccaagcgtcgactttcatctgccgtcgttaaggtggatgatggggacttgcctgaagatgctgatgcaggacaagaagatggaaagacaaaggatttgactaatgaagctgtcaatgggacagctgcagtggtccagaatgatagcaaccctttcaattctcaccaaagtggatggtctaagagagatatcagcaatcaaaaaacttcaaaggcttctgacgttcctaatacagatcat

SEQ ID NO: 7446 - DNA, 385 bp, Glycine max
cggaattcccgggtcgaccgcacgcgtcacgttgaaactattcctcctgcgccatctccattgctgttttctctctgcttgctattacaatccaattcaagaagttcgttcaactttgatgctcaagtctaacaacatatataaccattgacagatattcaaattcagcataattgtgattaaaattttggtccttccctggaatgaaaatactgtttgtcaataaatttgggagtgatttttgcggttatatttaatgggctgctactgttcaacttcaaagaaaaccgaagcacaaggttatgaggaacccactgttcttgcatctgtgacaccttttactgttagtgaagtacaggccttgcatgaactctacaagaagttg

SEQ ID NO: 7447 - DNA, 385 bp, Glycine max
  unsure (1)..(385): unsure at all n locations
agggggtaaattcccttcccttttttaaactcctgaattctgaatatcatcatcttcatcctcgtggagtagtattttcgattaatcaatcttctctgtttccaaaacattccaattatttcccttcattcacacatcatggactctttgtctttgcactcaaacctccattccgttaacaataagcgccgccaaatcacacaccaaaactccttcgctctcactccctcctggacttccctaaccgaacagcgcctctactcctccaagctcctcaactcgctccgccgcaacagcaaccctaccgccgccctcgaagtccgcgcctccgctgaacgcgtcctcgccngcactgccaaaggccgaactcgctggagccgcgcca

SEQ ID NO: 7448 - DNA, 375 bp, Glycine max
tgcatcaacactggtgaaggttgtcactttcaaaattccaacttcactcaaaatcggtctcagccagatgcagaaagtgctggcttttgcctttggcccttctaaagttgtggctccagggattgcgacttcaggagccaaaacgtctggcatcatgaaggcagcagtatctgctgaaaagattcgagctgttgctcacggtgttatagcctctgccggaaaaaccagtatttcagtcatgagaagcagctttctatgaaataatggggaagcgaaaggtgcagcctgttgggttccccttgccttgggctacattggcaggctgcattggaacttcttcaggcttgcttttgtatggtgatgggattgagtgtg

SEQ ID NO: 7449 - DNA, 607 bp, Glycine max
gcggcgttgtattgaatggtgtgctagattcttcatggtttggtagggctggtgaggtctccagtaacagcaacattgccacagataagttcaaggctgtttctggtttggggcatcttatggagttttcctgagactcggtcccatgtgcttgttacctccctactaatcagctggtccatcacagagatcattcgctattctttctttggctttaaagagacttttggatttactccatcatggcttttgtggcttagatatagcagcttcttagttttgtatccaacaggcataagcagtgaagttggtttaatatacattgccttaccattcattaaggcgtctgggaagtattgcataaggatgccaaacaaatggaactcatcatttgattacttctatgctgcgattgttgcaatgggaatctacgttccaggtagccctcacttgtacacatacatgcttgctcagaggaagaaagctctctccaaatcgaagagagagtaatgcaacatcagtaattttcattgattttgggtcaaacgtaggatatatacacatgtcatatcttggtttggattccaatataggtatcagggaaacg

SEQ ID NO: 7450 - DNA, 584 bp, Glycine max
atcctgggggtatctcaaagcaacgaggtgttccacaggcccatcatccgcaacagtttagaaggaaggagcaaatgcgaatgccggaataccctgcacaacagaagtcaagacgaatataaggtttctgctggaagagagactacgtgaagataaatttggggtcaatacttcagtgcctgaactcatgcaggacatttctggacagggtttgtctcaatacttgcaaacctctcactttattgcaatcaaagattgggtgcattcttctctggaattttgatgctaaaatgccaaatgtatgctggaacaccaatgaagccataaaagggtataaacgtatgaaagggttaagctactgtaagcacatgtatatcatgattataacaatgcaattctattgtatttctcagcttttgggcaagatcaatgtcagtaaaccaaatgttgatcatccattaggttttcaaaatggaacttttcttgattaaatctataccatgcaactttgaatttgtagaatattttgcctcacatccttgaagatagttccaatatcacttgcctatggtttaacaaggtaa

SEQ ID NO: 7451 - DNA, 960 bp, Glycine max
tttcccacgctttcgaccccacgtcttctctttttctctctctacactctattcaacccttcacattttctctcttctttatcttaaattacttttccatggaggaaagcaagaaacgagtccgggacgagtccagctactcacccgagtcccaaactcagctggtcgactctcccgagtctgaaagtcagcgggtcgactcacctgagtctaagattcgtcgagttgactcgtccgagtctcaactcgactcggtccttgactcggaggtgcgtctacaagacgacatttttaacatacttgacgacgccgataatgtgcctgagcgtgactcggtgcagggtcttgactcagtgatcaaaagcttcgaagatgagataaacgctcctggttcggattctggttcgggtgacccggcccaggaacccgactccggggagctacaatctaacttgggctatcttctagaagcctccgacgacgagctcgggttgccgccgacggtgggtgacggcgaggaaatgggtcgggctgccccggaaatggcggagcttgccaggttcgtgggttttgaagacgacatacccagttatgatgcattcgggtttgggtcagggtttgcggcggagagtgacggcggcgccggacgttttgtgacggtggatgggttgtttgactattcggacccggcggcggatgttttgtggcggtcggagtcattacaagctatgtaggtgaccgcggcgagattttgcgatggttttggcagaagggtgcgtaggggtggaaaatgtaaatctaggaaaatattggggttaaaataggaggaggaaaaaaaagggtagggtagcatagaaacgtggtaggtagatgtgaaaagttgtagggtttgttgttttggttttttcgttgaattcaattgaaacaaactggactacttgatgagccgtttcagttttg

SEQ ID NO: 7452 - DNA, 437 bp, Glycine max
gatccaaacacttatctttttctctctcttccctcttcaatcttcacattttctctatggagaatcatggcaacaagcgagtctgggaccagtcctctgactccaacactcagcgggtcgactcgcccgagtctaagattcgtcgagttgactcgtccgattcgggtattaactcgtccgagtctcaactcgaatcggtcctcgactcgtcggaggtgcagctacaagacgacatttttaacatgcttgacgacacggacaatgtgcccgagcgtgactcggtgcagggtcttgactcagtgatcaaaagcttcgaggatgagataaatgctccaggttcggattctggttccggtgacccggcccaggaacccgactccggggagctacaatctaacttgggctatcttctagaagcctgcgacgacgagctcggg

SEQ ID NO: 7453 - DNA, 1293 bp, Glycine max
aaaaaataatttttgggaatgaataaattggtaaaattgtaataactcctggttgagcatggttgtggccttagcaatttatgggaagagaagaaagtgctgaaaagagaaagttgttatccacaagacaacgtcatcaacattacacaaggcgcagggtggtctctgtgatggcaacctctttctctccgacagcctctgtcggctccatcatcttccaaaaccctcccaaaggccttcttcttctctcccagcagcagcaacaacgctccttcgcctcttctgcaagctatgcaactctcaagctccctcgcgccttcgcactttctccaagacccctcctttccaaagggagaacaacacttgtgagggctgctactatcgaagaaattgaagccgaaaaagccgcaattgaaaaagatgctaaaaccaggatggataggactattgataatgtccgtacaaatttcagttccataaggacagggagagcaaacccatccatgcttgacaaaattcaggtggaatactatggaagcccagttagcttgaagagcatcgctcaaattagcactcctgatgccagttctcttttggtacagccatatgacaaatcaagcttgaaggctatagagaaagccatagttagctctgatcttggtatgactccaaataatgatggagaatcgatacgactgagcatcccacagttgacatctgataggaggaaggaactatcgaagatagtggctaaacaagctgaagaagggaaggtggctttgaggaatataagaagagatgcattaaaagcttatgataaacttgagaaggagaaaaagctctccgaagataatgtgaaggatttgtcaagtgatttgcagaagctgacagatgagtatatgaagaaagttgacaccatcttcaaacagaaagaaaaggagttgctcacagtttgatgctttgttgcaaaaagtaaatgctgagttctatctaaagaaggtcaaattttgtgcctactttgctccagggttggatgatgaatgcgcatgttcattggttatacagaagacaaacttttgaattaaatagatgtttttcaaattggaaaggtgagttcatgtctgtaaattggatttatttcacgtaattcttcattgaaattagaccctcaccgaaccattgttgtcaaactcttgaggctatggtagactcttacaagtttatgattctaggtataaaaatcaagttagctgactgtcagactcattgatggaaaacatattgaactaaaaa

SEQ ID NO: 7454 - DNA, 297 bp, Glycine max
gaaaaaaaaaagagtggagaaaattgttatccacaacacaacatcatctccgttacacaagtctctctgatggcaacctcgacctctttctctccgacagcctctgtccgctccatcatcttccaaaagcaaaaccctcccaaagcccttcttcttctctcccagcagcgctccttcgcctcttccgcaagctatgcaactctcaagctccctcgcagacccctcctttccaaagggagaacgccacttgtcagggctgctactatcgaagaaatttattccgaaatatcagcaatc

SEQ ID NO: 7455 - DNA, 392 bp, Glycine max
  unsure (1)..(392): unsure at all n locations
gttattgcatgcttttggtctgatcacccattggtgtatgctgtcaagaactttagcattggtagagtagggctagataactgcattgctanggatagagtgtatggttttagtttttattatgctgtgattataatgctatttaaattaggctaagttcaacaagagggatctgcaaacggagtttagtttaaattagtctaaactcgcgagacatcggggtttagtacatgagtcttcggcatagaacacaggaacatctttaattagagaaatatctttaattgcatcaacttgtttagtaggaggacccaacgcctttaaataatctatttttcaaactttactgctcacatttattattttcataggatagaacacacttttacttc

SEQ ID NO: 7456 - DNA, 696 bp, Glycine max
gaagacgacagaagggggaagtgacataaccttctatgcttgaagacggtggattagaacctcaacaagagaaagagactcgtcagagaatatgatccttgcggtgctgtttgccaacgctgagggcaatatcctcatcgaacgttttcatggagttcctgcagaggagcgtctgcactggcgttcattcttagtcaaactaggagctgataatcttaagggtgtcaaaaacgaagagctcctagttgcttgccacaaatcggtttatattgtatacacagtgcttggcgatgtcagcatctatgtcgtgggcaaggatgagtatgacgaacttgccttgtccgaagtgatctttgtgataacctcagctgtgaaggatgtatgtgggaagcccccaagtgagcgccttttccttgacaagtatggaagaatttgtctgtgtctggatgaaattgtatggcagggatatttggaaaatacagaaaaggatagaatcaaaagactgataaggttaaagcccccaacagagttttgattgagtagtccagagcaagtcatagttcaatgactggtctgagtcctgtgggtcatagtgtggcatcctgtagttggatatgggcaagcaaccgaagattgtgctggatgtatgcgctttgcaacgaccgtattaaaatcttctcaatttttaacacttgc

SEQ ID NO: 7457 - DNA, 1026 bp, Glycine max
ttcggcacgagctcattctctcttcgttctatcaccgaaacccttcttccattaccggcgaacgaagtcggtggcagaaaaggaacaacctcgattcccaaatcgtaaaatccgatgacgaccgctgcaagacccacatgggcacctgctaaaggtggcaacgaacaaggcggtactcgaattttcggtccctcacaaaagtactcttctagggacatcgcatcgcacaccactctcaagcccaggaaggaagggcaggacactcaggatgaattaaagagaagaaacctacgtgatgaactggaagatcgtgaacgaaggcatttctcatcaaaaaataaatcttatgatgacagggatcacggaaagggtagccatctgtttttggaaggttccaagagagacattgaagatcgcattgttgctcgtagtgttgatgcagatgattctgatgttgaagtcaaaagtgatgatgacagtgatgatgacgaggatgacgaggatgatactgaagcattgctggctgagcttgaacaaataaagaaggaaagaacagaggaaaagctacgcaaggaacgacaacaacaggaggaggagcttaaagtaaaggaggcagagcttctgcgcggaaacccactgctaaataatccaacagcatctttcaatgtgaaaagaaggtgggatgatgatgtggtgtttaagaaccaagcccgtggtgaaaccaaaacagctaagcgattcatcaatgacaccatcaggaatgatttccatagaaaattcctgcataaatacatgaagtaagtccttgtgccagaagtccgagttgtttggactttggtctcaacagaacttattaatttgcagtttgtatctaaatgtatgattcaatgttgatggatatatttgtttctcttataaccgtattttaacatgttactcgtagttgctgtaacatggtgtatgcttgttaatgccaactgggtttaagagtcagaccttaaaataacattcagtgaggttgtctct

SEQ ID NO: 7458 - DNA, 557 bp, Glycine max
gcggcaaattctcgacgaagcaaccctgaccataaccacactctctcaagtcccaagaaagaaccctctcacctagctagctatcaaactaccgattcatagcactcttctcttcctcacttatgcgaaacgcaaacatggttctcgttctccttttccttatggcaatcttctccgccatgaccactccgtcaacctccgcgatcgacaccttcatcttcggcggctgctcccaggccaagttcacgccgggttccgcctacgaaaacaccgtcaactccctcctaacctcgctggtcaactctgcggccttcgccaactacaacaacttcaccgttccagcctcttccgacaccgtctacggcctcttccagtgccgtggcgacctccccaacgaccagtgctcgcgctgcgtctcgcgtgcggtcacccagctcggcaccctctgctttgcctcctgcggcggtgccttgcagctcgacggctgtttcgtcaagtacgacaacaccaccttcattgtggatgaggacaagaccttgatcagcaagaaatgtggg

SEQ ID NO: 7459 - DNA, 418 bp, Glycine max
ggagctccttacgtaaattctccacgaagcaaccctgagcagtgaccataaccacactctctcaagtctctagagagaagctaccaaactccacaacacatacccaattagctaacccctctcacacttacagaccatgccaaacgcaaacatgcttctccttttcctcttccttctggcgctcttctcagccatgacaacaccgtcaacctccgcgatcgacaccttcatctttgccggctgctcccagcccaagttcacgccgggttccgcctacgaaaataccgtcaactcgctcctcacctctctcgtcaactccgccgccttcgccaactacaacaacttcaccgtccccgcctcctccgacgccgtctacggcctcttccagtgccgcggcgacctcaccaacgaccagtgc

SEQ ID NO: 7460 - DNA, 751 bp, Glycine max
gagaactgatgagttgaataatcaaaggcaaaaagaagaagcaaaaccaaaggcagtactgtgttcaccgtggaactgttcttctctctcataacatgccctctgcccaggatccattttacgttgtcgaggccgagattcaagattctattgataagctgcaatctacttttcaccaatgggaaagcaagtccggtgctgcggaacaaggacatcttacaaaggaggttcttgctggatgcgaaagcatagagtggcaggtggatgaattggataaggcaattgctgtagcgtctagagatccttcttggtatgggattgatgaagctgaggtcgaaagccgaaggagatgggcaagcagtgctcgttctcaggttggcacaatgaagaaagcaatggaatctggcaagggctcaagtaccacaagccatgctagtgtaaatgggatgcgccgagaactgatgaggctaccaaattctcatcaaactgatagctccaaccagtatgctgccagagataatgatgatttcatacaatcagaatcagatagacagacgcttcttataaagagacaggatgaggaattggatgagctcagtgaaagtgtacgaagaatcggaggtgttggactcacaatacatgatgaactcactgcacaggaaaagattctagatgagcttggttctgagatggacagtacaacaaatcgtcttgattttgtccaaaaaaaagtggcaatggttatgaagaa

SEQ ID NO: 7461 - DNA, 372 bp, Glycine max
tctcacgcgtgggcggacgcgtgggtgaagaactaataagttctatcttgataggcaaaaggaataagcacaaccatacgcaaattttttggaaggcaaaaccaaacgcagggcgtgtgttcttctctctgaagtctgaaccattcgttcctctctcataacatgccctctgcccaggatccattttacgttgtcaaggccgagattcaagattctattgataagctgcactctacttctcaccaatgggaaagcaagtctggagctgcggaacaaggacatcttacgaaggaggttcttgctggatgcgaaagcatagagtggcaggtagatgaattggataaagcaattgctgtagcgtctagagatcct

SEQ ID NO: 7462 - DNA, 1182 bp, Glycine max
aacgcccttgtttgtggcctcccgaacacgaaagtcgaaacccgaactcacttcctcaccccatcatcgcagcctcgaaaccctgagtcgccagcgcagccccgaaacctagtccagtttgcagtttcttgcgcggtttatcatgggggatagtcagtattcgttttctctcaccacatttagcccttctggaaagcttgttcagattgagcatgctttgacggctgtcgggtctggacaaacgtctttgggaattaaagctgcaaatggagttgtcattgctaccgagaagaaattgccatctatattggttgatgaagcatcagtccagaaaattcagttattaacaccaaatataggtgtcgtatatagtggcatgggtcctgattttcgagttttggttcgaaaaagcaggaaacaagccgagcagtatcatcggttatataaagaaccaattcctgtcactcaacttgtcagggaagttgccgctgtaatgcaggaatttactcagtctggtggtgttaggccttttggagtgtccctgctagttgctgggtttgatgataatggaccacaattatatcaggtggatccatcgggttcatatttttcttggaaagcttctgctatggggaaaaatgtttctaatgcaaagacgtttcttgagaagaggtacacagatgatatggagcttgatgatgcagtccacacagcaatattgactctgaaggaagggtttgagggacagatctcaggaaaaaacattgaaattggcataattggagctgataaaaagttcagggtattgacaccagctgaaattgacgactatttggctgaagtagaataatctgcaatgaagaactcttgtgttcctgaagttgtttgtttcacagttgggtttaattggtagcttaattattgacattgtgatggcaatagtgaatttgcgagctactcgttgtgatgaccagcaagccttcagataaacccttttccaaagtcatcaacattttcaaacaaacctagtttgtttagacggtgcggaatgacttaatgactattgctaatttattattttcacccttttagaatctgattgttccttatctctgttatttttatatttccagttaagttcaatgcattattaattgcaaaaaaaaaaaaaaaaaaaagcaa

SEQ ID NO: 7463 - DNA, 412 bp, Glycine max
gacagacgcttctttagaacaagcaaacacaactctgctaccctcttctctctctctcggattgtgagtgcagatttcttgcgcggtttatcatgggggatagtcagtattcgttttctctcaccacatttagcccttctggaaagcttgttcagattgagcatgctttgacggctgtcgggtctggacaaacgtctttgggaattaaagctgcaaatggagttgtcattgctaccgagaagaaattgccatctatattggttgatgaagcatcagtccagaaaattcagttattaacaccaaatataggtgtcgtatatagtggcatgggtcctgattttcgagttttggttcggaaaagcaggaaacaagccgatcagtatcgccgtttacattaagacacaattcctgt

SEQ ID NO: 7464 - DNA, 404 bp, Glycine max
tgccacattaaaaaactggaggttgatagttaatctatctgcaacagcaacattgtgacagtgacagtgtcgtaggatggagaaggtggtatgtgtgaccggcggcagcggctgcattggttcatggctcgtccatctcctcttggatcgcggctacaccgttcacgccaccgtccaaaacctcaacgatgaagccgagacgaagcatcttcaatccctcgacggagcgtccacgcgcctccgcctcttccagatggatctcctccgccacgacaccgtcctcgccgccgtgcgtggctgcgccggcgtcttccacctcgcctctccctgcattgtcgaccaagtccacgacccccagaaggagcttctggacccggcgattaagggaaccatgaacgtgctca

SEQ ID NO: 7465 - DNA, 693 bp, Glycine max
cctagcgctgggtgaacgcgttttaaacgtgattatttcattgcataatagatttttgatgaggcggtgaaagactgaaaggcaaaatctttttgaacagacgaaggaaaaaaacgcagtgatcacgagcagacatgtatcatccaacaagaggtggcgttcgtggtggtcgagatcaattcacttgggaggatgtgaaagctgataagcatagggagaactatcttggtcacagtatcaaggctcctgttggaagatggcagaaagggaaagatcttttctggtataccagggataaaaagtcccaaaatgcagaaatggaggctgcaaaagaagagataaaaagaattaaggaagaagaggagcaggcaatgagggaagctcttggcttagctcccaagcgttctaaccatcctcaaggtaaccgtcttgataaacatgagttttcagaactggtaaagcgggggtctacagcagaggacttaggtgcaggtcatgctgaagctgcaagggttcaaggtcttggttttgcaagagaaccacgcccttgggaagaatccggttcttctaagctttcacttagtgacacaccagctgaggtggaaaatgtatctatgccaaatcaaccagcaccaaagactgaagatgattcagaagatgaaagtagaagaaagagaagacgtgaggagagga

SEQ ID NO: 7466 - DNA, 648 bp, Glycine max
attggtggagaaagcaaaagcttgggtggttggtgatccttttgatcctaaagttcaacaagggcctcaggttgacaagaagcaatttgaaaagattctttcctatatcgagcatggaaagaaagaaggggcaacccttttgacagggggcaaaagagtgggcaacaagggttactacattgagcctacaattttctctaatgttaaggaggacatgcttatagtacaagatgaaatatttggccctgtgatggctttgatgaagtttaagactattgaggatgcaattaagattgccaacaatacaagatatggcctagcatcaggcattgtgacaaagagtttggacacagccaacactgtgtcaaggtccattcgtgcaggcattgtttggatcaactgttattttgcctttgggaatgacattccttatggagggtacaagatgagtggatttggaagagattttggaatggaagccctacacaagtatcttcaagttaaatctgttgtaactcccatttacaattctccctggctttgaatatctctttgtgttgtgtgggtataaacaatcgtgaacaatgcagaagcttctttacacatatacttcatcagattaataaaattggggcaagttatctagtc

SEQ ID NO: 7467 - DNA, 658 bp, Glycine max
ggcctgcaagtgtgagtgatatttgagcttaaaccctagccgctcttctcttcattcttcactttggaaacaatcataatggcgttctgtaataaggttggaaatgtcttgaggcagggtgctgctcgcagcacacatgcccctgttgcgtccatgcttaattacatccgctgcatgtcttcaagcaagcttttcattggaggcctttcatatggagttgatgaccagtctcttaaggatgcattttctggctttggagatgtggttgatgcaaaagttataactgatagagacagtggaagatcaaggggatttggatttgtcaacttctccaatgatgagtctgcaagttcggcactctctgcaatggacgggaaggatctaaatgggcgaagcattagggtatcctatgcaaatgatagaccttctggacctcaatctggcggcggcggcggtggtggttatcgcagtgggggttttggcggcgggtggtgattttgcttctcgcaatggtggttggtgattcaatttttgcgtcttctgcttagttttgagattattgtctttatggttatgctttgcactttggtaaagtagtaatgagtgaatttttatgcttttcctgcttacatttcttggggatgccattctgagatgt

SEQ ID NO: 7468 - DNA, 821 bp, Glycine max
  unsure (1)..(821): unsure at all n locations
gacggctcagttgtgtattcacgagctgcacgaaggaaaaaccctagcttccgttcgatcaacaatgacaggagagacagtgaaccccaaagcttaccctttggccgatgcccaactctcaataaccatactagatcttgttcaacaagctgccaactacaagcagctcaaaaaaggtgctaatgaagccactaaaaccctgaacagaggtatctctgaatttgttgtcatggctgctgatactgaaccccttgaaattcttctccatcttcctctactcgccgaggataagaatgtgccctacgtgtttgtcccttcaaaacaagcacttgggcgtgcatgtggggtcaccaggccagtgattgcttgttctgtgacaactaatgaagggagtcaattgaaatctcaaatccagcaactaaaggatgctattgagaagnctttgatctgaaaaaatcaaaatcggtatgatgggcttcttgagctgtgccaattgctccttctgaggctttgactggacgagctggtttgttacccaaatgggggtatgtaaccctagttgattttctttataccatttaaggtattttggagtgtttattttggatagtattgtgatggctaatttgaacagtgattgtcaatgcaatattaatgggtgtgtttttggagtgtnatgagccctgatacttatctaaaaannaaaaaanaaaactgaggggngccgtcccattcggcctatagtagcgatagcgcgtaactgggcgctttaacagcggactggaaaccctgctcccacttaatgctgcagaattcccttt

SEQ ID NO: 7469 - DNA, 514 bp, Glycine max
gacgacagaagggggaacatgaatatctactcttttctgtttctcttattcttccgaaaatgcttctttttctttgcgggtattaaagaagcacgtttgtcaacttctttcaccaataaattaagcacggcaagttgtgtacgtagactatagagatcacgccgatggaagatgaagtgatgagtgaagtggctgctccacctcgtcgtgttcttcttgtatcggctggtgccagccacagtgtggcacttctgagtggaaatgttgtttgttcgtggggacgaggagaggatggacagttaggccatggtgacactgatgatcgactatttcctacaaaactgagtgcattggatggccaagacataatatgtgttacttgtggagctgatcatactatggcacgttctgagtctggcagggatgtatatagttggggaatggggtgactttggaaggttgggtcatggtgatcatagtgacttgctcattcctcatcccataaaagcattac

SEQ ID NO: 7470 - DNA, 1551 bp, Glycine max
cgttacattcttacccactgcctttcactattcccatttaccccttcattattgtttcccctcaatcaatctctattcctatcccctcaccccaatcattatttagctggctttaggacatagcaaattccagtgcaagaaaaaatgaccaagatcttctttgtattgctgttatgtctgatcatagcagcttcttctgggtttgtgaattgctttgatgttgaaaagaaggaaaagattggaatatttgagctcaataaaggtgacctttctttgaaggtcaccaactggggtgcttcaattttgtccctggtgattcctgataagaatggaaagttgagtgatgttgttcttggatatgattctgttaaggattacactaatgatacaacatattttggagcaactgttggccgggttgctaacagaattggaggagctcagtttactctaaatggaatccattacaaattagttgctaatgaaggaaacaatacacttcatggtggagccagaggatttagtgatgttctttggaaagtgaaaaggtatcaaaaagaaggtccaagtcccagcattaccttcagttaccacagtattgatggtgaacaaggattccctggtgatctcctagtaactgtgagctacattctaactgggaaaaaccaattggttatacttatgaaaggaaaaactctaaacaagccaacaccagtgaatttggcaaaccatgcttactggaacctaggaggccacaacagtggcaacatcctaaatgaagtggcgcacatctttggttccaaaatcacacctgtggacagcaaactcattccaacaggcaaatttgcttcggtgaaaggaacagcttatgatttccttaagccacaaactgttggaagcaggatcaatcaattggctgaaaccaaaggctatgacatcaactatgttcttgatggtgagaagggccaaaagatcaagctagcagctatagtgcaggataagaaatcagggagagtgttggagttgttcacaaatgctcctggtttgcagttctacactggtaactatgtcaaggatttgaagggaaaaggtggatatgtgtacaatgctcatgcaggactatgtttggagtctcaagcattccctgattcagtgaatcatcctaatttcccttcaacaattgtgacccaagaaaagccttacaagcattatatgctttttaagttttccaccaaaaatccgtacattagttcaaagtgagataggaggagtgagctttcccccatttttaatatgccacggtaagtcagtgtagcatttatagctctggatttcatccaaacttgggccccccttagaatgaataattagagtcccatggttagtctaataatttgtggcagcttcagaaccttccaagctgtttctctaaacatgttttggtttggatttgttgcttttcattgatattttgactctgcatgagtgatgcagaattttgtttataccccattctaatattaaattagtctttaaaaaaaataatttatt

SEQ ID NO: 7471 - DNA, 422 bp, Glycine max
cagaaaagccttacaagcattatatgctttttaagttttccaccaaaaatccctacattagttcaaagtgagataggaggagtgagctttcccccatttttaatgtgccccggtaagtcagtgtagcatttataactttggatttcatccaaacttggggtccttttagaatgaataattagagtcccatggttagtctcataattggtggcagcttcagaacctttcaagatgtttctctaaacatgtttttggtttggatttgttgctttttattgatattttgattctgtatttctaatgcagaattcttttttgatacatatgtgaattatatttaataataaaatcccttctcttttgggtggtaggaaaaccaaaaaagaagggattttattattaaatataattcacatatgtat

SEQ ID NO: 7472 - DNA, 734 bp, Glycine max
gcttactctcgttgtgattgataacgagaaattgagaattgttacagaaacgatcgtgtttttttttttattccatcgtaaaccaaaatttagttctccagttgagcgttcttcccacaaaccctaatgtcgtttcttgaagaatttcatgccaatttggattcactacccgttattcttcggaagaagtatacactgttgcgtgacctagataagagcttacaggatattaaaaggcaaaatgaacagcgttgtgaacaagaaattgaagatattaagcgaggtgttaggtctggaaacatcacgcctgatacttcggcaattagattctctgatgaagcgcttgatgagcaaaagcatagcatcagggttgctgatgaaaaagtagccttggctgtccaggcttatgatttggtagatacaaacatacaacaacttgatcagtatctgaaaaagtttgatgaggagattcggcgtgaaagagaaaacgctgcaataactggagtgcctgcttcaggtcctgagggtaatacaaaatctggaaggggtaatgaaagtggtactggtagaggagggcgaaaaaaaacacgccaaacgactgtcacacccgcagcaacagaagcacaagccactgcaaacccaactggcatggatttagagttaccagttgatccaaatgaacccacatactgcttttgtaatcaagttagctatggagcgatggttgcatgtga

SEQ ID NO: 7473 - DNA, 948 bp, Glycine max
cccacgcgtccgcccacgcgtccgtatattgcgtgtgtgagagaacgacagaagggggatgcagatgcagcctatcatggcagcctactaccccaacaacgtcaccactgatcacattcaacagtacctggatgagaacaagtccttgatcctgaagattgttgaaagccagaattctggcaagctgagcgagtgtgcagagaaccaatcaaggctgcagagaaatctcatgtacctagctgcaatagctgattctcaaccccaaccatctccaatgcctggtcagtatccttctagtggacttatgcagcagggagcacactacatgcaggctcagcaggctcagcagatgtcacaacaacagctaatggcttcgcgctcctcactcttgtactcccaacagcctttctcagtgcttcaacagcagcaaggcatgcacagtgcactcgggtcgagttcggggctccacatgctgcaaagtgaaggcagcaatgtgaatgtgggaggagggtttcctgactttgtgcgtggcggcagctccacaggggagggtttgcacagtggtggaaggggtatcattggaagtagcaagcaggaaatggggggttcaagtgaaggccgcggtgaagggggtgaaaacctctacctcaaagttgctgatgatggaaactagctagctagccacccaaaatgaacaagcttttcttagtttaattagttaggaagacatcaagggatagtagcttgctgctgctgcttaaatataatgtgtgcttcaacttgaggcaaacgcttgccttgatgtctctacattactattagtaacataaattagcacatcttctacttccttgcctaaatttctgatcacataacctgtttttctcatctccgagggcggattaaatttggtttcccatttatagtaggaccagtctttacatttcc

SEQ ID NO: 7474 - DNA, 498 bp, Glycine max
atgtgttgctcttctctctctctttcactttctattcacgctttctaatatcttgtttccgtgtggtagcatcattgcaatagccaagagatagaagggaaaagtgggaacacacagaaagccagagaaccagagagagagagagagagagagagagtgtgcttctctctgcacttgcactattgcaggcctcagctttgtttggttttggattgagaaagttgatatagttagagaaagagaaagtgtacatctttctatcatatagtgtatatatatatatatatattgcgtgtgtgagagatgcagcagcacctgatgcagatgcagcccatgatggcagcctactaccccaacaacgtcaccactgatcacattcagcagtatctggatgagaacaagtccttaattctgaagattgttgaaagccagaattctggcaagctgagcgagtgtgccgagaaccaagcaaggcttcagagaaatctcatgtactta

SEQ ID NO: 7475 - DNA, 473 bp, Glycine max
ggattcccttgtgctgcctgctttttaatgtttctgttcacacttcaaacctttctcttcttctcttttattattctgcttcttcctttgtcagcttctgctaatctcttgtaagatactgctaatcctaactgggtgcttagtcgtgtttgatcacattgtctgaatccgaatatatatgcttcaatttggagatcacaaaccttgtctctatcaaaacgtaccaacactctggactcttttatgacgcgtgcttttaatgcacatgcttctcttactttcagacttcaattacgccctctctgactgttatctggatgagaacaagtccttaattctgaagattgttgaaagccagaattctggcaagctgagcgagtgtgccgagaaccaagcaaggcttcagagaaatctcatgtacttagctgcaatagctgattctcaaccccaaccacccaccatgtctggtcagt

SEQ ID NO: 7476 - DNA, 469 bp, Glycine max
ggttccgtcaacctcaactctaaagcaagcaccattctctctctctcgtgtccaataaataataatatctttctcggtgtagtagcatcatttgtaagagaagggaaaagcgggaaaagagaaaaaacagagggttttgtttctcttttgcagttgcactcttgcgttgcaggcaggggcatctgtttcccgttctgctccgagcgatcaagtgagtgagtgagtgagtgtcatatatatatacatagtgcgttcgagaaatgcagcagcacctgatgcagatgcagcccatgatggctgcctactaccccaacaacgtcaccactgatcacattcaacagtacctggatgagaacaagtccttgattctgaagattgttgaaagccagaattctggcaagctgagcgagtgtgccgagaaccaatcaaggctgcagagaaatctcatgtacctagctgcaatagctga

SEQ ID NO: 7477 - DNA, 657 bp, Glycine max
catcacgtgagctactttttggagagagaaaaggacacgcagttctagagagtgaccccattgcagagaagaaagagcccaatcaaaccaggttgcctcaacctcaactccaaagcaaagcaaagcagacaagcaccaccatgctcttctctctccctgtgtttgtccaataaataataatatacttgctcggtgtaatagcatcactgtaagacaaggtaaaagcgggaccagagagaaaacagggggatttgtttctctctgcagttgcactcttgcaggcaggtgcagctgtttcccgttctgctcctctcccaacccctctgtttctttggagtgagaaagttttatactttagaaccagctagcgagcaagtgagccagtgtcatacatatatataaatagcgtgcgagaaatgcagcagcacctgatgcagatgcagcctatcatggcagcctactaccccaacaacgtcaccactgatcacattcaacagtacctggatgagaacaagtccttgatcctgaagattgttgaaagccagaattctggcaagctgagcgagtgtgcagagaaccattcagggctgcagagaaatctcatgtacctagctgcaatagctgattctcaaacccaaccatctccaatgcctggtc

SEQ ID NO: 7478 - DNA, 569 bp, Glycine max
gcaggcctagctttgtttggttttagtgtgagaaagagaaagtgtacatctttctatcatatagatatagtcatagtagtagtagtatataggtatatatatatatatatatattgcgtgtgtgagagatgcagcagcacctgatgcagatgcagcctatgatggcagcctactaccccaacaacgtcaccactgatcacattcaacaggaaccaatcaaggctgcagagaaatctcatgtacctagctgcaatagctgattctcaaccccaaccatctccaatgcctggtcagtatccttctagtggacttatgcagcagggagcacactacatgcaggctcagcaacaggctcagcagatgtcacaacaacagctaatggcttcgcgctcctcactcttgtactcccaacagcctttctcagtgcttcaacagcagcaaggcatgcacagccaacttggcatgagctccaatggaagtcaaggcctccacatgttgcaaactgaagccactaatgttggaggcaatgcaaccataggaaccggaggaaggtttcccgactttgtacg

SEQ ID NO: 7479 - DNA, 982 bp, Glycine max
aaattaccctagtcactagtgtttgtgtttttaccttctaatttcctaaactatcatatatcatatataaatataaaaagggtttttttccgctgaaggtttaagtttaaccttcgttttcggttgttcttcttcgcagtctctcaagcagccagcatttgttctctcaccaccccaccatccagatccagatcaaatggcagccatggctatgttgcgtttatcaccactctctggtcaaaaccatgcactttctttcccatcatcaccatcaccaccacctaagcttcagaaccgtcctctgtatctcaccaatttgcctcatttgccccaaaggttgaaactttccttcgccggcggcgacggcggagatggggtgggacgtggtggtggcagtggtggcggcggtggaggaggtgaaagctggggggatgatgatggaaaatccaaagattcatctcttggaattttgggtctttttctgaacggttggagatcaagggttgctgctgatccacaattccctttcaaggttttgatggaggagttggtgggtgtgagtgcttgtgtattaggtgacatggcttcaaggcctaattttgggttgaatgaacttgactttgtcttttcaactttggtggttggggctattctgaatttcactctcatgtatctattggcacctaccatgacatcatcagcatcaaacctgccagccctatttgcctcatgccccaagagtcacatgtttgagcctggtgcattttcccttttggataggttaggaaccttggtgtacaaagggaccattttttctgttgttggctttggtgcaggacttgttggaaccacactttcaaatgggttaatcaagatgaggcagaagatggatccaacatttgagacccccaacaagcctccaccaaccattttgaatgctctcacttgggctgctcacatggggattagcagcaatcttagg

SEQ ID NO: 7480 - DNA, 544 bp, Glycine max
tccatttctccgagaatacgactcgaacgcaacgtgtgcttgtcacggagaagccccagggcgttccattgagcattgtagggccccgaagcgtaaggtgcgaggtctaattgatacgggcgggctgaaatttgaggagaatcgcgtgtaaatcctgacgttgacaagagatgccacacatggggcaattttgaaagctgttgttaggtgtccctaaatgactcatcagggtttccaagtttatgccattattgtaaaccacagctacaatgttaaatgaaatggataaagttgatatctttgtccctcatcctctcacaaacgcatgtttgcttattcaactttcaccggaatgtgggtgcaagccattggtctgtttgctcaagcaacctgcgctcctgagtgttgacttccaagaccgttcaatcagagattactcatcttgcacgttggtgggggtgccgtaaaacaacgagcaaagttcaaaacaaataagtttcaaaatgtcaaataaaaaggcatttgattaaaggagtgttcaagt

SEQ ID NO: 7481 - DNA, 587 bp, Glycine max
tgatcccctatccactcgataattcaatggtagccataaccccaaccaaggttcctcaacctccatttctccgagaatacgactcgaaacgcaacgtgtgcttgtcacggaggagccccggggcattccattgagcattgtatgaccccgaagcataaagtgtgaagtctaattgatacgggctggctgaaatttgaggagaatcgcttgttgaatcctaacattgacaagcaacaccatacatggggcaattctggaagctgttgttatgactcatcaggattttcaagtttatgccattattataaaccacagttacaatgctaaatgaaatggataaagttggtatctttgtccctcatcctctcacaaacgcatgtttgcttattcaactttcactggaatgtgggtgcaagccattggtctgtttgctcaagcgacctgcgctcctgagtgttgacttccaagaccgttcaatcaaagattactcatcttgcacgttggtgggggtgccgtcacccaacgagcaaagttcaaaacaaataagtttcccaaaaaaaaaaaaaaaaaaaaaaaaaaaagcggcc

SEQ ID NO: 7482 - DNA, 677 bp, Glycine max
cccacgcgtacgaccacgcgtccggccgcggtgaggcaagggaagcaaggacgatgagtatagtatgagtaatcagattcagagtgtatagtgattctgattctttcattttccatagattagcaagcaatcgagcgagggagggagagagagagagagagagagagaatggttcgggaagtatcagagagttgcattgatagcttattgacggagatggtggcgtgctattgcaaccgattctacgcaaacaagcctgaactcgccgcacgccggatcgaggccattggatatcaggtcggtcaccagctctctgaaaggtataccatggatcggcctcggttcacggatcatctggaggccatcaagttcatctgcaaggatttctggtctgagctctttaagaagcagattgacaacttgaagacaaaccataggggtacatttgtattgcaagataataaatttcgctggcttgcacggatgtcaattgatccatccactgaaaatgttagtccagttgaagatattacttcacctacagctgaaagcaaggcagcacaagccatgagcatgcatctttacttcccatgtgggatcattagaggagcactttccaacttgggaattccttgtgcagtttctgcggatatatcaaaccttcctgcatgttcatt

SEQ ID NO: 7483 - DNA, 482 bp, Glycine max
gtaatttctattctgatgcgagcgaggcaagggaagcaagcaagacgatgggtatagtatgactaatgagattgagagtgtatagtgatattcctgaatcctgattctttcattttccatagattagcgagcgagagagagagagaatggttcgggaagtatcagagagttgcgttgatagcttgttgacggagatggtggcgtgctattgcaatcgattctatgccaacaagcctgaactcgccgcacgcaggatcgaggccattggatatcaggtcggtcaccagctctctgaaaggtataccatggagcggcctcggttcacggatcatctcgaggccatcaagttcatctgcaaggatttttggtctgagctcttcaagaagcagattgacaacttgtagacataccatatgggcacatttgtattgcaagataataaatttcgctggcttgcacggatgtcaattgattcaaccaac

SEQ ID NO: 7484 - DNA, 831 bp, Glycine max
gacgccgtttaaatttgaggtaaagctttgatacgaaggcccttttattactccgatagcagcgatgggaatcgatcttaaggctgggggtaagagcaaaaagaccaaaagaacagcaccaaaatccaatgacatctacctcaaattacttgtcaagctttatcggttccttgttcgaaggactggcagcaatttcaatgctgttatactcaagcgcttgttcatgagcaaggttaacaagcctccaatttctttgtcaaggttaattaagtatacaaaggggaaggaggataaaattgctgtaatagtggggactgtaactgatgatatcagagtatatgaagttccagcattgaaaattacagcactcaagtttactgagagagcacgtgcaagaatagaaaaggctggtggtgaatgcttgacatttgatgagcttgcccttagggctcctttgggacagaatacggtccttcttagaggccccaagaatgctcgggaagctgtgaaacactttggtcctgctcctggtgtgccacacagccataccaagccctatgtacgagcaaagggaagaaagttcgagagggctagaggaaggaggaacagcagaggatttagagtttaagaaatataatataactttgttctattttttttttttacaattgttcacttctgaaattaaactgtttgctctaggcgtcggtaacagtttttatgatatttctgttctgataacatatcgtggctcccatgttttacattgacgtgtattacaaaaaactagcatttgattttttgattccccttattgactattgagtggct

SEQ ID NO: 7485 - DNA, 431 bp, Glycine max
attgctgtaatagtggggactgtaactgatgatatcagagtatatgaagttccagcattgaaaattacagcactcaagtttactgagagagcacgtgcaagaatagaaaaggctggtggtgaatgcttgacatttgatgagcttgcccttagggctcctttgggacagaatacggtatgggtggctaacaatattgacctttgtaattttttggacggaattgttaagccttactactgtggttgtgtcagtaaatctaatattggttcttgctcacattgttgaatgatattttttatgacaccttcagattggagaataggtgtctattcttttgctggaatcccaagtttactgccatactactgtagcctctggtttaaataattttttcttggtagacttcatagattcaccaatggtcataacgt

SEQ ID NO: 7486 - DNA, 437 bp, Glycine max
cgcacgtgccgctgccggatgagaaggagattgagaggaggctgctggagaagaagaagaaggatctgttgagtaggtacgcgagtgaggggcttgtggaggagcagattgaggctaaggacatgctcaacattcagcgttaggttggtgggtgggttggtttgttcttgccaaggtttttgaaatgcagtcacaaggtttttgaaatacagtcacaattgcagtcacaatttgtattcttctttatctaatgggtgttgtgccagtcagttatttttcttttgtcactgattttcttttttattttgggttggcttggtttcttaatcagaatggcataatttgtgagctttaagtctctacaattataatatgatgccaatgccattgtttaatgactataaattgacataatatatattttagttgatgaaaaa

SEQ ID NO: 7487 - DNA, 550 bp, Glycine max
gtacaaccccctaaccattgatcttgttggagattctgatcagaagttggcagatggaatttcgttgtactctattgtgtctgattcgtacactaaagcaggaattcttgcacctctgataacagaacatgcgaatggaggaaagtgtattgttttcactcaaacaaaacgtgatgctgatcgattatcgtatgccatggcaagaagtgttaaatgtgaggctttgcatggagacatatcacaagctcaaagggagaaaactcttgctggcttcagaaatggccattttaatgttttagtggcaactgatgttgcctcacgtgggcttgatatacctaatgttgatcttgtaatacattatgatcttcccaacaattcagagatatttgttcatcgttctggacgaacaggtcgtgctggtaagaaaggaactgctattcttgtgtatacagaagatcaatcgagggctgttaagcttattgagcgtgatgtgggcactagattttcagagctaccacgtattgctgttgatagtgcatcagtggacatg

SEQ ID NO: 7488 - DNA, 540 bp, Glycine max
gagattcgtcctttcgttttctctttctttctttcgggcaacggagagcacactattttcactgcagcagcaacaatggcggagaccgagatcgagaagataacgacaatagacccagagacggagtttctggcgtcgaagcggaggaacgggaacgagtgggagaccttcaaggagaacgtgaggccgctcaagagaggccgcaacgtcaacctcttgaaccacgccctcaactcccacaccgataacgaactcaagaaatccctcatggaacaacgaagcaagctgattcaagccatccaagaataccagggtgacgatcctcttctcccctggatacagtgtatcaagtgggttcaggaggcctttcctcctggtggagacagttcggggctggtggtgatttatgagcagtgtgtgcgtgccttttggcactcagagcgctataaggatgatcttcgctacctcaaagtgtggctggaatacgcagataattgctttctagttggtgctggaatttcgggtttgtttgatttgatt

SEQ ID NO: 7489 - DNA, 439 bp, Glycine max
agtacgggtagaacatccgtcctgtaggacgcgtaaaaactactacaagaggctgcaagggacagataacatgaggtacattcctttaaaatatggattggttctcctggctttccaaaacaggccttgagccaaccctagtgtatgagtatggccttacttttgctcacaacgagcttgaagaagaagacataacatacttcaaccatgagtttctcatgagcatgggaatctccatagccaaacacaggctagagattctcaagcttgcaaggaaagtgaagggaaagagggcggcaccaccacgccctgtggcaaggctcatggtggcgatcaagaggacagagaggtgcttagccaattacattcgctcgttcatcagcacttggtaagaagagtcatcagcacttgtggtgtggccatcatcatcatcaaggtc

SEQ ID NO: 7490 - DNA, 580 bp, Glycine max
ttctttcgtccgaagaaaaagccgactccacgcgagcgaagaagaagagaaattagcaaaggagagagagaagagcgagcagaataaggtgtctctcttggactgattcggttcaatcgcatctctattctctactactcattcatttatctatctacctcttttctcttccttctctcccacccttaattaacacagaaaaaaaagaacatagttatttatttttggttcatggccgttcaagctcaatatccatccaatgtccttcttctaaacagcagaaacgggcaagaagagcatgagtattcttcattgcaaccacaaccaggaggagttgtactcttgaatcagcctcacatgttatacaacatcaatgacaatggaagtaacaataacaacaacaataccaattctcggaagagaggtagagaagacccgggtgttggcaacaacacaatcactgcagcttctaatgttatcgatcaattctctttacaatctcagcctccgcaacttgttcatctctctcagctccacaatcaccaccaacaacaaaataatgtggtgtccactggccttc

SEQ ID NO: 7491 - DNA, 483 bp, Glycine max
gaacgataacaatggcaacggtagactacttctaaagaaaaagctgagtgctccacgcgaggaagaagagaaaattagcaaaggaaaaaaagaaaaaagagaaagaaggagagagcgagcagaataaggtgtctctcttggactgattcgcttcaatcgcatctctattctctactactcattcatttttatatacctctcttccttctctctcccaccctcaacacaaagaaaaaagtggacatagttatttaatttatttttgttcatggccgttcaagctcaatatccatccaatgtcctttttctaaacagcagaaacgggcaagaagggccatgagtattcttcattgcaaccacaaccaggaggagttgtactcttgaatcagcctcacatgttatacgacaactgcaacaacgacaatggaagtaacaataacaacaacaatatcaattctcgaaagagaggaagagaagatcagc

SEQ ID NO: 7492 - DNA, 1197 bp, Glycine max
acgagggcttatccaaggcagcagcagagcgaaggaagtagaaatgcactctcactcacacccacataccttgccacgcccacattcactactcccttcttcttttcttcttcttcttcctccttcctctctccgcatctccaacactaagaggctgcaatcctcaactttcgccctctcccaaaatgaaaccaaattcccaacgcagccttacaagaattccaacaattcgcctcaatcacttgctcacatctccaattgcaaattccccttggctcggccccttgtttcttcttctcatccccctagtactaattcatccaccaagcttctcaactctatgctgctcttcgccttcctcacacttcaaccctcctatcctgcacttgctgcttcttctgacttctccactatatttggggatattggtgacttaagcacaggttttgcttcagcgtttctgctaatatttttctctgaactgggagacaagacctttttcattgcagcgctactagcagctaggaactcagctggtgttgtttttattggaacatttggcgcacttgcggcaatgactctgatatctgttgtccttggacgaacctttcattatgttgatgaaatcttgccattcaggtttggagaaactgatttacccattgatgatattgctgctgtttgcctattggtgtactttggggtctctaccctgctggatgcctcatctagcgatggccaaaaatcagatgaagagcagaaggaggcagaactagcagtttctgaattttctggaaatggtgctgggatactatctgctgctagcacagttgccagtacttttctcttagtttttgttgctgaatggggcgacaagtcatttttctccacaattgcccttgcagcagcttcttctccccttggagtcatagctggagcactggctggtcatggtgttgcaactttgctagctgtacttgggggttctttacttgggacgtatttgtcagagaaggttattgcctacatcggaggtgttctctttctcgtctttgccgcaataaccttatttgaaattgtgcaataggggttaaaagaaatgcaatataatctccgtgcaaagggttcaagaacgtaatgacctataaagttgcatgattctgcactctccatgtatggcggctacagaatgaaaac

SEQ ID NO: 7493 - DNA, 1247 bp, Glycine max
cccacgcgtctacactaggctcacgattcatccaaactgaaatggcggcagtagtatcagcatcttctcatctattgtttgttcttcgttcacaaccattatcatcatcaccctctttcatttctcttctcaaacctcttcttgtttcttccccctatgctgtatctacaccccttcggcatatccaagttccaccgcttcgaaaacctctcttctctacttcctcttccccctcccttaccgtttctcaagatagtgaagaattggaagaaaaagagattgcagacgatgatgatgaattggagactccaagaagagattttgaagatacccaattgggtcccacttgctcaccgttggagagaaagaggaaagagagtgtgaagttggaggttccgagtttgagtgtgaaagaaaggaaggagcttgcgtcttatgctcacagtttgggggataagctcaagacccagttggtgggaaagtctggtgttacgcccaatcttgccacctctttcattgagaccctcgaagccaacgagcttctcaagattagaatacataggacctgtccaggcgagttagatgatgtggtgaagcagttggaagaagcaactggttcagtggctgttggtcagattggtcgaactctcatcatatacaggcccagtttctccaaaatgaaggcagaagaaaagaagaaacaagctcggaaccttattcttaaaaaacaagtcaaacaaagactagttaacaagagtaaggaacaagtacccaaactatcgtggcctggttcatcatggagtggaaaaaaacgtagggcataataaactctctaattgtgtcgaggtttgtcatggtgcttggcttgaattagcttgaggcttttgcatgcataaataccaaaggtcatggtactggatgtattattggcacaagaaaaggatcgaagaacgcttacatactatgatagaatgtgtttgtgaccacagctgaagaacataacgatgaattgagtttggctagaattgtttaaagaccaattcagtagattctattgtatttgcaattattacttaatatgaaatcttattgtaatattgtatgggtaaaaaaatagtaaacctaaataaaaaaaaacgcaaaaaaaaactaagaactcaactaatattatttttattgagacatttgagcgcacttgcggcaatgactctgatatctgttgtccttggacgaacctttcattatgt

SEQ ID NO: 7494 - DNA, 391 bp, Glycine max
gatcgaagcgaagccagatgaaatgtaaaacggtgggattgagcctcgaatcttcaaaagttggagttgcagggattggtgtttgctcaagttaatgagagatggcatgaattcccgtatattgctggacgctgcaaaaagttgcatattggcttcttctcctgttttcagaaggcaacaattcttgataaggtgtgtgggaggctccactgatcaaagagacatgcaagccctaaggtctcttgaggttgactctcagagtagtattcgagcaattactcctgcccttgatcgctaccagacacatacgccaggcaagacatatagctgttattggaggttgccgggaatacacaggtgctccatagttttctgcaatttcggccttaaa

SEQ ID NO: 7495 - DNA, 731 bp, Glycine max
gaaagacgtgttgagctgttaccctgtccatttggaatcctatgttctcaatcttatttttttttttcattttgaaattgaaatttccattttccaacatctctcgctccctccgttgttgttattagttgggttttttaagacaccgttcgttgcgattgtacctgagagggccctgtttcgtaccactcattcaaacaagtcacagtgttctcgctctttcttttctctgaaaaacattccccgtattagctccctccgaatgtcacaatgtcttagcgacgcctcgctctgctttcttcctccacgcatctgtcaccgttatcattcctcgctctcatttcggtcctgacaatgagatcaaactcgtagtagtgttttactaccagtcttttttctcctcctttagctttcgaaaaaaaaaaaaagaaaaagaaaaacagagagggacattttattattatataaataatactacatctttgttgtgttggtgagatcaaaagcgaaaatggcaccaccgttgttcaattggggggtgaaggacactcacaggggaacccctgtggtggtgaagatggagaacccaaattggtcgatggtggaactcgagggtcccgaagaagaagacttaatgctaacaaattcaccttcttcgggcgtttcaagagacaaagggaggggcaaaaatgccaaacagctcacgtgggttctcctgctcaaagcgcacc

SEQ ID NO: 7496 - DNA, 397 bp, Glycine max
gtagttgagaggggcatgtttcgtaccactcatccaaacatgtcacagtgttctctctctctctctctctctgaaaaacattccccgtataagctctctccgaatgtcacaatgccttagcgacgcctcgctctgctttcttcctccacgcgtctgtcactgttatcattccctgctctcatttcggtccctgacaatgagatcaaacttctagtagtgttctactactaactatttttctttcaaaaaagaaaaaagagagggacattattattattattactatataaatatatatttgttctctgttggtgagattagaagcgaaaatggcaccaacgttgttcaaattggggggtgaaggacactcacaggggaacccctgtggtggtgaaaa

SEQ ID NO: 7497 - DNA, 558 bp, Glycine max
  unsure (1)..(558): unsure at all n locations
accggtccggaattggcccgaccgcacgcatgcgaccgctgccacaagactacaaaggggagagcgaaagagatgtcgttggtttcaagcatgttcgggtgtggagtggtgatggcggcgtcgcaagcaatgggaattggaaggagaagcgatggtggattgacgatagtgtgttcgtctaggccgcagaagaaagcgacggcgcatcacatgaagactcggcctcggaagacgcaggcatgggatagaaaccgcaagcccaccgtctacgatccactccctcctcttcctcctgattggaccctcgttattcccgctgacgcttcttctgctcccgttacgcctccgcctccaactccctctgcctagtcactctctcggtactctctctcgttttcatgtagtcttatctttaattccagcagcttttctttcatgttttcatctcaaatcaaaccttcatcatttgttttggatcaataaatgtttctgaattctctctccaaaaaaaaaaaaacaagagaaaaaacgacgcgcccgctctagaggatccnagct

SEQ ID NO: 7498 - DNA, 193 bp, Glycine max
aagtgttcggcttgcggcgacgtgagccgttcgctgcccgcgacgtcgtgagaagtccactgaaccttatcatttagaggaaagagatgtcgttggtttcaagcatgttcgggtgtggagtggtgatggcggcgtcgcaagcactgggcattggacggcgaagcgatggtggattgacgatagtgtgttcgtc

SEQ ID NO: 7499 - DNA, 656 bp, Glycine max
gtctggatcattcatgcctactgataaccaaggaacaagaagcaggactggtggaatgtcggtctcgttggctagccctgatggccgtgttgtaggtggcggagttgctggtcttcttgtagctgccagccctgtgcaggtggtggtgggaagctttttaccaagcagccagcaagaacagaaaataaagaagtcaaagtctagcgattatggagtagcaactgttactccaaccattgcagtgtctcctacaccaccacctccaaccaatgccgaaaaagaggatgtgaatgttatgggtggagcacatgtactgcaaaattctggaacccttaactctaacctcactcctcccaatgcctttagaagagacaactgggtcaacatgcactctatgccagactctagaaagtcagccactgatattaacatatctttgcctgatagttaggttggcgttcgacgggcgcactctcgatcctcaagaactcttgctgacaacattcatgactcagctgttttattaatgtttagtgttctctctctttctctcactctcattaaaaggtatcatcacatttcatttattttcaatgagtaattcatgtgaattttgtccaaggcactcaagatagttggggtagagacatacgaca

SEQ ID NO: 7500 - DNA, 779 bp, Glycine max
cggggtattattttttatcatcactaggaaaaaaatttagatccgcccagtgacattcccgttttcggctctctccgaaatttctgttagattgtttctcttctgtgtcagagaaatcagtgcaacaaaaatggacgacaccgaaaccaaaggaagaatcgaagagactgtgcgtaggattttgcaagaatcggacatggacgaggttactgagtctaagattcgaaaacaggcctccgaacaccttggcctcgacctgtctcagccttatttcaaagcctttgtcaaacaggtcgtgaaggcttttctccaagaagaagaacaacgaacagaaacaacagcaacaagatgaagatgatgattgatgaaggaagaaagaacaagggaggagttttccaagggcaagggagtacgaatgattgaaggcgatctcatcatcctgcagggctttcagataagagaagggggacgattcagggatttcagagggaaaacattggttctccatttcgggagtattataaaaaaggatggccaggagcttcctacttccaaaggaataagtttgacagaaagaacatgggtcacctttaagaaaaatgggcctgccctagaaaagccctttagaaaatggagtcagttgataccggttgacctttaaactcttaaagaatgtggttttcttgttcttttggggattttcctcaacatgtggcccttgtactggaccctttggtaaagacttgagtaccgtgaatgttatgggttggcaacctaat

SEQ ID NO: 7501 - DNA, 508 bp, Glycine max
caatcatttcacatgactctcctactgttactggtttatgagtttgcctattcattcctagttgatgagtagtgagagctacataaagcaaagttctaaactagaacagtgtatgaggtgagagctagaaactgaggacttagctagtagttagagatgcctgagttttgcgtgacaggtggtactgggttcatcgcatcttacctggtcaaggccttactagagaagggtcacacagtgaggaccaccgtgagaaacccaggggatgtggagaaggttggttttctgactgaactaagtggagccaaagagagactgaagattttgaaagcagatctattagtggaaggaagctttgatgaggcagtgagaggagttgatggtgtctttcatatggcgttccctgtgcttatttcttatgatgagaaccgttcaagtattttgccctttataccccacttgtagaatttttgtctttatctcaatgggctttcttacaaaaaaaata

SEQ ID NO: 7502 - DNA, 461 bp, Glycine max
ggtatgaggtgagagctagaaactgaggacttagctagtagttagagatgcctgagttttgcgtgacaggtggtactgggttcatcgcatcttacctggtcaaggccttacttgagaagggtcacacagtgaggaccaccgtgagaaacccaggggatgtggagaaggttggctttctgactgaactaagtggagccaaagagagactgaagattttgaaagcagatctattagtggaaggaagctttgatgaggcagtgagaggagttgatggtgtctttcatatggcgtcccctgtgcttattccttatgatgagaacgttcagcaaaatttgattgatccctgtataaaaggaactttgaatgtgcttaactcttgtgtaaaagcaactgtgaaacattttgtgctcactcttcttgctcttccataagataccgtgatgatgtgcaagaagtgtgtc

SEQ ID NO: 7503 - DNA, 753 bp, Glycine max
gtgggcggatgcgagaaggagagagaatgggggatcggagtaatgattaacatgggctctgttgaatgtagaacgctgctgccgaaacccttccggaaccctaaggtaagtgagtaatcagtggttgagaatggtggagaaggcgaagggtagaaaggaggaggtggttacccgtgagtacaccattaacctccacaagcgcctccatggctgcacatttaagaagaaagctcctaaagctattaaggagataaggaaatttgcccaaaaggccatggggaccaatgatgtgagggtggatgtgaagttgaacaagtttgtctggagccagggaatcaggagtgttccaaggaggattagggtaagaattgctcgcaagaggaatgacgatgaagatgccaaggaagagctatactctcttgtcaccgttgttgagattcctaaggatgagctcaaagggttaggcaccaaggttattgatgatgaggattgatttgtatttgtttgaaccctggagacatatatgtaggttttttgtttctgcaattcagtcttgtttttctaggttatcaaattactcctaattttgttgggttacttcgaattttgttgagacataatgtggcttgataatatcaattttagtttctgcccctgcagtttgtttatgcgtttgtgctattgtggaagaacaatgatacttaggatatatgaaaaatacgatggtaaacatggaatgaggacggtgatgta

SEQ ID NO: 7504 - DNA, 437 bp, Glycine max
caggagaacggaattgaaagaaaaaataaagttctgtcacgggtacatgcagcattgaaagaaatagctgatttggtgcctcttgcacccttgcgactatctccaatagttatccagaaaatgccgagtgtcttcagtaaggaaactgagattgtcatgtatgtcgagaatatgttgaggctggagagtggtgcacttggagaaactgttggttctaccatgctgcctgctcttgtggataggttgctagagttggatgtggaaattggatgggatggaatcctgcaagaagatgctaaaggcatatttgaaatggagttagaagatgttactgaatttactgatgaggatgagaattgtgatagtatgctttcgtcagagttgttaaataggaaaaatttgcaaggcaacttggtggttgagaattagatagccta

SEQ ID NO: 7505 - DNA, 606 bp, Glycine max
ttgaacatcactgatcacccatgatgtcttgcactttagctgttctgttacaaagaaagaacaccaaataatgcagtccatgttaaccatccgtgccacccatggccttcctctgtgtctctcagggatgattcaccctcttgctctctctcacgatgtgtgtaggatagcggatcacgaccgtaggagacgcaccatgaggaagcaaaggcaaagatcactcaccagagagggtgtagtgcatgatgcggttcgagaaattcactttgtggaggtcaaaggtgagaccgatttgcatgatctctcccacactcatcacctggggttgtcagcaagagctgcttaaaatttagctgcttctccaaaattgattaatctcgctagctcctaccactttgttatgcactttatttaatttcactgtgatggactctttcgttattatatatatcatgttaattaattactagttgtctcctttgttctgtactcaattcttattttctgtaaccacatatgtggaactttttcttgtactcttactcccatgattaatatattcttcttatgatgttgcatatatgatgctagtatatgccccttccc

SEQ ID NO: 7506 - DNA, 587 bp, Glycine max
tggaaaaagaaaaagagaagcagtgcagaggtgtaataaattggtggcaagtggcaaccggaaagccagagtgtgtggttccgtttgctgacctgacctcggaaatccaaagagggaaactcacggtgtttcgttgcgttgtgctctgctctgctcctttgggcctgggctgggctgggctgggctgggctgggcatggctattgcagcagcggccgtggtggtaccattgggcctgctcttcttcgcctccggcctccttgttaatctcattcaggcaatatgctatgtcgtcgtaaggccggtgtcgaaaagtttgtacagaaggatcaaccgggtagtagcagagctcttgttggctggagcttgtatggcttattgattggtgggcaggagttaaggtccaaatattcacagatcatgaaacctttcgtttaatgggtaaagagcatgcacttgtgataagcaatcacagaagtgatattgattggcttgttggatgggtttcagctcagcgttcaggttgtcttggcagcactctagctgtaatgaagaaatcttcaaagtttctgccggtcattggctggt

SEQ ID NO: 7507 - DNA, 850 bp, Glycine max
ttcagttttctcccactctttgtatatttttctttctcccttcttccttcacatccattgctctctcttctctcacccaacaaaaactcattccttttaagcacaatagaagaagaagaacaacaacaacaacagcagcatatctcagatatcatcatggccgttgaagcgcgccatctcaatctcttcccttctcaactcatcaccaaccggcaagtgatggattctggtgaggcgaatatgatgaacatgtacaacaacagcactccgattggtggttactcttcgtttctgccgttatccggcgccgtcacggagacggcgcttccgtcctcggttttcaaccattctctcgccaacgccgtcaaatccgaaagcggcgttacctacaacaacaacaacaacaacaacaacgtttctgtttctcccatgtcgagaaagcgttcccgagataataacaacaattacggttacaacaacaacaacaacaacgattcattttcgtttctcggccaagacgtttctctccagatccagcagcagcaactcgacatcgagcatttaatcatgcaacgcatggagaaggtgagaatggagattgatgagaagaggaagaggcaagcgaggaggatcattgaagcgattgaggttggagtgatgaagaagctgaagacgaaggaagaggagatagagaaaatcggaaaactgaattgggcgttggaagagaaagtgaagcatctctgcatggagaatcaggtgtggcgtaacatagcggaaaccaacgaagccacagcgaatgctctgcggtgtaatttagagcaggttctcgcgcagccggcggaatggcggc

SEQ ID NO: 7508 - DNA, 470 bp, Glycine max
cccacgcgtccgctccctttccctttccctttgctcattcgatcagctcttaaatctaagagaatccaagtttgaacgtgaggggtgatcagaaccaaaatggccaatcttagtagtcctggatttaacctctttttggtgtctctcttggttacgttggtccaaatccaaaccaaggtgcggtgctaccagtacaaagttggagatctagattcctgggggatccccatttcaccaagttcacacctctacgacaaatggtccaaataccactacctcagcatcggtgattccctcctgtttctatacccaccaagtcaagattcagtgattcaagtaacagcagaatcctacaagagctgcaaccttaaagatccgattttgtacatgaacaatggcaactccttgttcaacattacatcagagggggacttctacttcacaagtggagaagctggtcattgccaaaa

SEQ ID NO: 7509 - DNA, 1108 bp, Glycine max
cggacgcgtgggcggcagaagacgacagtaggggacactcgtttggtttcatctctttctctctctctctctctatctattctatcttattttctctctctctaaaatcctctgtgagaacgtgcacagcaatggctacagaggtaagctctctgattagggtgatgggtggcggctacaaggaggagcagcatcggactgtggggaatgagtcacacggtgagaaatcaacggctctcattactcgggacttgctcggtgggtcctcgattgaatcacaggaattggacctcgatttgcaggttcctagtggctgggagaagagactcgaccttcagtcaggaaaagtctatctccaaaagtgcaacaccacaataggctttccaccaatctctgaacacaacaagctgaatgcaaagccagcagggccaaaactccaagacctaaacttcccatcatcatccccctccaatgtgctattgaacctctttgatgaaacaagtttggaccttaaattggtctcatccacactcccctcaagcaacaactaccagagtgtgtgcacccttgacaaggtcaagtcagcactagagagggcagagaaagagcctattgtcaggaaaagaacctcattcttgaagtcacctctctcggtgtcgtcgccttcgtattcctcctcgtcgtcgtcgattagggaaaccacaattcaagaagatgaatgtgaagagaggctgaatgtttcatcatcacctatggctgcagggtgccctggttgcttatcatatgtaatgatcatgaagaacaaccctaagtgtcctaggtgtaactctcttgttcctattccttccatgaagaaacctaggattgacctcaacatatcaatttaagttgggtaattgatgaaaattgcctccattttcaatataatttgttattatttttttatatcaacgttttatgtaaatggaatgatagagatgataaatttaggtcgttttaagaataggatcatttgtttagtgatattggggccagggtttatgaatgtatattgaaaagtcactgccgtcctactaggaaagttaatagaaaattctccaatttctgc

SEQ ID NO: 7510 - DNA, 413 bp, Glycine max
tgcttctattaggcggcaaacatagagtttctaagctacacttcacagttgggaagcaatggattcgttctcaaatccatccagtggttcgtcgcaccaattatctgcgcacgatctcaaaaatcagttgaagaatcaacttgccattgagtatgctcaacaatttcttgaggtatctactttccccttttaacgaaagccagcctgggctagaactaggaagaaagaatctgactcataagctaatggcactattcattttttcgatgaaagtcattcgagtatacggaggaataggaatcgcactaggagaaaggagaaaacatcggtgggtggaaggagaaaacagtaatgggatgtggcagagggaagaattttctcgcatgggagtagaggagaggcataagaaattt

SEQ ID NO: 7511 - DNA, 397 bp, Glycine max
ctcgagccgctcgagccgctgttaggcggcaaacatagagtgcgtttctaagctacacttcacagttgggaggacaatggattcgttctcaaatccatccagtggttcgtcgcaccaattatctgcgcacgatctcaaaaatcagttgaagaatcaacttgccattgagtatgctcaacaatttcttgagactgtgggaagaaagtgttttgagaagtgtgttacaaaaccaggttcaagcctcggtgggagtgaaagcagttgcatctctagatgcgttgatcgatatattgaagccacaggcataattagcaaagcgttatttagttcacaatgaaatggacaaccccagtaaatcttgtttttgctcaacattgtgagtactaatttatagaca

SEQ ID NO: 7512 - DNA, 425 bp, Glycine max
aaaaagtctcgaggtgcaattgaatgctccagctacttgtaaattcttgaaaaatgtggataattattgagtactgattttgttcagtgtctcatctgctacaattccgctcacctttattttgcagacagtgggaagaaagtgttttgagaagtgtgttacaaaaccaggttcaagcctcggtgggagtgaaagcagttgcatctctaggtgcgtagatcgatatattgaagccacaggcataattagcaaagcgttatttagttcacaatgaaatggacaaccccagtaaatcttgtttttgctcaacattgtgagtactaatttatagacattggagattatgtgttctccgggtcttttcttccccattttctatttcccattacaatagacaattatgcaattatttttcattatacaac

SEQ ID NO: 7513 - DNA, 779 bp, Glycine max
gagaacaggtgatatgcacttgctagaaaattaaataaagctaaggagaaatattgagaagcaggaagaagcaagttatggcgacgaagcagcttccgcagatcgccattctgggagctggtatctttgtgaagactcagtaccttccgagactctccgagatctctcatcttttcattctgaaatccatttggagccgcactcaggaatcagctacagctgccgtagacatagctcgtaagcattttccccaagtagagactaagtggggagataacggttttgatgacatcattcacgatggatcaatcgatgctgttgccgtggtcttggctggacaaaatcaggttgacatctcactcaggttgctaaaggctggtaaacatgtccttcaagaaaaacctgcagcatcctgtacaagtgaattggaagctgcattgtctagctacaaatctatttcttctgatgctcccggtcaattaatttggtctgtggctgaaaattatcgatttgagcctggcttagtagagtgcaagaaactaattgctggcattgggaaaatgatgagtgtccaagtcattattgaaggatcaatgaacagttcaaacccctatttttcaagctcttggaggcgcaatttcactggaggtttcattcttgatatgggtgtgcatttcattgcagggttaagaatgcttgttgggtgtgagattgtttcagtttcagctatgacatctcatgtggatttgaccttacctcccccagataatatatcatct

SEQ ID NO: 7514 - DNA, 472 bp, Glycine max
aatatatagctaaggagaaatattgagaagcaggaagaagcaaggttcgatttgaaatctgaaaccgtgtatcacatgaatccgaattggtagatagctacatgacattacgtggtaacatttgcattgtgttgtagttatggcgacgaagcagcttccgcagatcgccattctgggagctggtatctttgtgaagactcagtaccttccgagactctccgagatctctcatcttttcattctgaaatccatttggagccgcactcaggaatcagctacagctgccgtagacatagctcgtaagcattttccccaagtagagactaagtggggagataacggttttgatgacatcattcacgatggatcaatcgatgctgttgccgtggtcttggctggacaaaatcaggttgacatctcactcaggttgctaaaggctggtcaacatgtccttcaagaaaaacctgcagca

SEQ ID NO: 7515 - DNA, 401 bp, Glycine max
tacgggacgacagaagggggagtgagtgagggggcattctgaacaaagttggggctgaaaaacagagtctccgacccagtaaggagaaatggactggtgggtgtcaatgccaaagatagaactgcatgctcacctcaatggatccattagagactctacacttctagaactcgctagagctttgggtgacaaaggtgtcatagatttctcccaagtcgaacatgttatccttaaaaatgatcgttcattaagtgaggtattcaagttgtttgacttaatccacgttgttactactgatcactcaagtattacgagaattaccaaagaagttgttgaagattttgcatttgagaatgttgtgtatctggagctgaggactacaccaaagaaaaatgattccc

SEQ ID NO: 7516 - DNA, 1836 bp, Glycine max
actgaactctcagtttgctaggacacaaatctcttctaaccaagggggacgacctactccgacactagtcaaggctgaggtgccatggtcagctagaaggggaactctctctgacaaggatcgcgtcttaaagacagttaaaggaatactaaataagttgactccggagaaatttgatctcctgaagggtcagttgatcgattctggcattacatcagccgacatattgaagggagttatttcgctgatatttgataaggcagtgctggaaccaacattttgccccatgtatgctcagctctgttctgatcttaatgaaaagctgcctccattcccatctgacgagcctggtgggaaagaaatcacttttaagcgagtactcttgaatatctgccaggaggcttttgaaggtgcagataaactgagggaagaactgagacagatgactgcccctgaccaggagatggagcgacgggacaaggaaagacttgtcaagattcgaacccttggaaatatccgtttaattggtgagctgttgaagcaaaaaatggttcccgaaaagattgttcatcacattgttcaggagcttttaggacctccagatatcaaggtctgtccagctgaggaaaatgttgaagccatatgtcagtttttcaacactattggtaagcagcttgatgaaagcccaaaatcacggcgtataaatgatatgtactttatccggttgaaagaattgagcaccaacccccaacttgcaccacggctgcggtttatggttcgtgatgttctagatttgcgttctaataactggattccaagacgtgaagaggtgaaagccaaaaccatcactgaaattcattcagaggcagaaaaaaatcttggattgcgtccaggtgccactgcaagtatgagaagtaaccgtgtagtttctggcgctcaaggaaataccggtccaggaggattcccaattgcccgacctggtacaggtggtttgatgcctgggatgccggggaccaggaggatgcctgggatgcctggaattgataatgacaactgggagatgcctaggacaagatcaatgccgagaggagacatatcaggcatgccaactggaggacatagccagtctccctttctttccaagacatccactgtgaactcaaagttactacctcaaggtagtggtggtattataagtgggagaagcagtgccctggtgcatggagctggtgctcctgttcgttcgccaaaccttggttttagtgctgagcccacacctcaaatcccttcacctgttaaagctgtttctgccataccctctgagaagccacaacctccagctgcaaaattgaatattgatgaacttcagcgtaaaactgtttctctactggaagaatatttcagtgtcaggcttttggacgaggcattacagtgtgtggaggaactaaaagctccagcttattaccctgagtttgtcaaggaagccatttcccttgcactagataagagtccaccatgcgttgaacctgttgcaaatctttttgaatatctgttcattaagaagattctttcagccagagacatagggactgggtgcatgttatttgcttctctgctggatgatatcggcatagatttacctaaagcaccaaataattttggtgagataatagggaaactagttttggctgggggtttggattttaaggtggtgacagacatccttaagaacgtggaggatgaccggttccagaaagcactattttcttctgcgctgcaggtaattacctctgcatctgggcaagctgtgctggatgcacaagcgtctgatattga

SEQ ID NO: 7517 - DNA, 430 bp, Glycine max
agataagacaaattaaatcaactccatatgttctctgtcaacacccttccctcccagttccctccgccatccccatgccgtcgccattgccgtctcaccgtcgtctgctcctccttccgccgccgcagtcgaagccgcagacgtcacaacaaagtatctcttcccaccaccacctccacctcttcatttgaaccgaagctcgaagccgttatcgacctcactcccctaaccgctttccaatctgaacttcgacggttcctatcttccggcaaagacgcttaccgagatttgcaaaccttggtcactctcgaccacaaccggaggcttgtcgtttcgtgtcgcccttccaccttgcattatcctcggaacttcggcggctttgaccttcctcgccttttctgttttcacggttatggctcaattgatttct

SEQ ID NO: 7518 - DNA, 990 bp, Glycine max
cccattcgtccgagggttccgttgagaaaagacgacggatgggggtagccatagaatttcacattttatcttttgcattgagcaactaactcactcgcgccatggctgctaccatcatcaccacatgcaagctctcactgcttttgagtcttctctcagtttcacttttgctgggtgtgaggtctgatacccttcagaatgtaggcgcaattccccccacatgcaagcgcatagagtgtcccagctatgatgtcattcacgtaggcaacggctacgaaatccgtcgctataattcacccgtttggatttcaaacagccccattcaggacatttctctcgttgaagccacaagaaccggcttcaggaggttatttgactatattcaaggtaagaataactacaagcagaagattgagatgacagcacctgtgatcagtgaagtattacccagtgatggacccttctgtgagtcctcatttgttgtgagcttctatgtgccaaaagagaaccaagcaaacccgcctcctgcgaagggccttcaagttcaaagatggaagaccgtgtttgtggcagttagacagttcggtggatttgtcaaagattctagtgttggggaggaagctgctgccttgaaggctagcattgctggaaccaagtgggctgatgcagttgagaaaagccagaagagagctggccatgcttctgtttacacggttgcgcagtacaatgccccttttgaatatgacaatagggtcaatgagatatggttcttgtttgatattgaaaatgaactgcaaaccgtgtgacaaaataagctttcaacatgaatgcaatatgcatagtgcagactgaggtgttaggacaaggacatcatgaatggatgaataaagtgttttgcatttagctaaaacactgctttctgtttgacttgctttttggttcatcgtagctatatagttcagaggtaattttactcttgaaaacttttca

SEQ ID NO: 7519 - DNA, 446 bp, Glycine max
tggtgaaaggagaaaacaaaaggagaaaaaattgacttgtgtagcttctaatgtgtggacattaaactcactttctctgtagccatagaaattcacattttatcttttgcattgtgcaacttcctcgcgccatggctgctaccatcatcacatgcaagctctcactgcttttaagccttctctcagtttcactattgctgggtgtgagttcatcagatacccttcagaatgtaggggcaattcccccaacatgcaagcgcatagagtgtcccagctatgatgtcattcacgttggcaacggctacgaaatccgtcgctataattcacccgtttggatttcaaacagccccattcaggacatttctctcgttgaagccacaagaaccggcttcaggaggtcatttttatctctctctgctaagtctaacttttttcaatatgttagt

SEQ ID NO: 7520 - DNA, 1220 bp, Glycine max
gtcaaaccctgactgggttttgtatgacttcgcagctgcttgggtcataacaatagccaagagctacaacattccttgtgctcactacaacattaccccagctttcaacaaagtctttttcgatccaccaaaggacaaaatgaaggattactcgctcgcaagcatatgtggtcctcccacgtggcttcctttcaccacaacgatccatatcaggccttacgagtttttgagagcatacgaaggtaccaaagacgaggagacaggtgaaagggcttcttttgatctcaacaaggcatattcaagctgtgacctttttcttctaagaacctccagagagcttgaaggagactggttggattatcttgctggtaattacaaggttcctgtggttccagttgggttgcttccaccatccatgcagataagggacgttgaagaggaagacaataaccctgattgggtcagaatcaaggattggttagacacacaagagtcgtcatccgtggtttatattgggtttgggagcgagttgaagctgagtcaggaggacctcactgagttggcacatggcattgagctttcaaatttgcctttcttttgggcattgaagaacctgaaagaaggtgtgcttgagttgccagaagggtttgaagaaagaaccaaggaacgtggcattgtttggaagacttgggcaccccagcttaagatcttggctcatggagcaattggagggtgcatgagtcactgtggctctggctctgtgattgagaaggttcattttgggcacgtgcttgtgactctgccttatttgcttgaccaatgtctgttttcgagggtgctggaggaaaagcaagtggctgttgaggttccaaggagcgagaaagatgggtcttttactagggtcgatgtggctaagacattgagatttgcgattgtggatgaggaagggagtgctctaagagagaatgccaaggagatgggcaaggttttcagttccgaagaccttcataataagtatattcaagatttcattgatgcgcttcagaagtataggattccttccgctagctaagcaggattcatgctttccattttcccccttcttcattagcgtgcttttttatcctgtaataaacaaggttatttcaaccctgattttaaaaaataattagcaaccgcgattttagttggaatgtcaagttaaggtttgttcttaaaaa

SEQ ID NO: 7521 - DNA, 814 bp, Glycine max
aaaatgtgttactagcaagtactagggtgcgacttggcacaaaaagaagcacccatagttttgggctaacacgtgaggcctccccatactcttcattcttcactcttcactcttcactcccaaccctagccaaacgcaaaccattcattcattcagttcagtaactcacctcaccatggccgcatccattacattgtccaggctcgtctcttccaccctcaccactgcctctttcttcccacccataaccctgccttccaaactctcctctctccgactccccacccgccgccaccccaagccactcagattctcctcctccaccatcaccgccaccatctccgtcggcgacaagctcccggaggccaccttctcctacctggactcgtccggcgaggtgcagacgacgacggtgtcggaactgacgaaggggaagaaggcggtgctgttcgcggtccccggcgctttcacccccacgtgctcgcagaagcacgtgccgggcttcgtggagaaatcgggggagctgagggcgaaggggatcgacacaatcgcatgcatttcggtcaacgacgccttcgtcatgaaggcatggaaggaggacctcaaggtcaacgaggaagtcctcctgttatctgacggtaacggaaccttcaccaaagccattggggtcgaacttgatctcagcgacaagcccgttggtttgggcgttaggtctaggcgttacgcgcttttggcccaggatggggttgtcaagctcttcaatttggaggaagggggtgccttcactttcagcggcgctcaggacatccttgat

SEQ ID NO: 7522 - DNA, 451 bp, Glycine max
cttctcgctgcactgcttcttcgttcttctctctggcgaccaaactcgaagaatccaaacaggtgtgttgtggaagatgagtggtgccgttagggctgcattgaaatccaccactagtgtttgtgcacttgtgcagagaagccatggcctcctcccaatgaggtgcttctccactgaggcagaacagccacctctgaattcaacgccccgccctcctccgttctttgagactgaccattcaggtttgacatatggtaatctgctcggcgttcgtaaacatgcactgaaaacagatatcatcaactttcttgaaggttgtaatttgactctggaggatgttaaaatggattatgaccgtagcttttccccagtttcaacgttgttgcaattccctactcgtgattcctttgaccatgctgtaaaagtgattttaaagaagggtcgcttgtac

SEQ ID NO: 7523 - DNA, 453 bp, Glycine max
gggggaagagaaatgagaagatgggcaccaccttgatgagatgctcccacgcaaacgctctcttcagagctctcaaacccaaaccccgcaattcttcactgccactttcttcaatggccatcaacaaaggtaatagtaataaggcatatgatgcattgctgttggatgctgggggcaccctattgcaattggcaaagccagttgaggagatttatgccactattggatccaaatatggtgtgactgtggatccagctatgataaagcagggatttaagagagcatttgctgctccgtggcctgaaaagctgcgctaccagggagatgggaggccattttggaaacttgtagtttctgaagccactggttgtggagatgaagattattttgaggaagtttatgagtactatgcaaaaggtgatgcgtggcatcttccagatggagcttttgaaa

SEQ ID NO: 7524 - DNA, 1429 bp, Glycine max
ggaccatcaataacattggccagtgtatcagaggttttagcatttgcagttgggagttttatttccatgcctgcaattcgtgtgttctccatgtttgctgcattggctgttcttttggacttcctcctgcaagttaccgcttttgtagctctgatagttcttgactccttacgggcagaggataagagagttgattgttttccatgcataaaagtacatgcggaccctgatataggaactggacgaagaaaacctggtttattggctcgatacatgaaggaggttcatgctcccattctgagtatttggggagtaaaaatagccgtcatagctatttttgtgggatttgcattggctagcattgcattgagcactagaattgaacctggtttagagcaagaaattgttcttccccgagattcatatcttcagggttatttcaataatgtttcagaatatcttagaattggacctcctgtgtattttgttgtgaaaaactataactacagctcagaatcaacgcatacaaatcagctttgctccattagccattgcaattcagactctcttttaaatgagattgctagagcggcccttgtaccagacacaagttatattgccaagccagctgcctcatggcttgatgattttcttgtgtgggtgtctccagaagcatttgggtgctgcaggaagtttacaaatgggagttattgccctcctgatgatcagcctccttgctgtgctcctggggaaagctcttgtgtttcagtaggaacatgtaaagattgcacaacgtgtttccgtcactcagatctccataatgatcgtccatctacaacacaatttagggagaaactgccatggtttcttagttctctgccatctgctgattgtgcaaaaggtggtcatggagcttacaccagcagtgttgaactgagaggctacgacaatggcattattaaagcatcgtcatttcgtacttatcataccccactcaacaagcagattgactatgttaattctatgagggctgctcgagagttcagttcaagagtttctgattctttgaagattgagatctttccatattcagtgttttatatgttttttgagcaataccttcatatatggaagactgcactggtcaaccttgctatagctattggtgcagtatttattgtgtgcttggttttcacgagcagtttatggagctcatcaatcattttgttggtgttggcaatgattgttgttgatcttatgggtgtgatggccattctgaatatccagttgaatgcgctctcggtggtcaaccttgttatgtcagtgggcattgctgttgagttttgtgtgcatatgactcattctttcactgtagcaagtggagacagagatcaacgtgctaaggaggctttgggtacaatgggtgctt

SEQ ID NO: 7525 - DNA, 550 bp, Glycine max
cccacgcgtccgggaagagtttgtggaatctagtgagagagagcagaggaaaaggggaagaaaaatgttgagtgcgacggcgatcggcgcgttattgggtttgggaacccagatgtactccaatgctctccgcaaactcccctacatgcgccatccgtgggagcacgtggtcggaatggggttgggcgcggtgtttgtgaaccagcttctgaaatgggaggcccaagtggagcaagacctcgacaagatgctcgaaaaggccaaggccgccaacgaaagacgttatatagatggagatgatgattaatgcatgtcttcatggattgtggcagttggtgaaaataatcatgaaatatgttgaacttgttgcctttgttttctgatttgatgatgttatgtttgtaaggctgttaaaactttttcgtgctaatcagcctattttttgcacaagtttttgcaagcagtggaactgcagtaaatgattatgtcatgcattggtgggttcattggtaataagattatcccgatatctgtgactccattacgtctt

SEQ ID NO: 7526 - DNA, 453 bp, Glycine max
gaagaaataggtttggtttctgagaggaagtttgtggaatctagtgagagggtagagaaagatgttgagtgcgacggccatcggcgcgttgttgggtttgggaacccagatgtactccaatgctctccgcaaactcccctacatgcgccatccgtgggagcacgtggtcggaatggggttgggagcggtatttgtgaaccagcttctcaaatgggaggcccaagtggagcaagacctcgacaagatgctcgaaaaggccaaagccgccaacgaaagacgttacatagatggagatgatgattaatgcctgtcttcaaggattgtagcatttggtgaaaataatcatgaaatatgttgaacttgttgcctttgttttctgatttcatagtgctatgtttgtaaggctgttaatcagactattttgtgcacatgcttttgaaagcagcgaaattg

SEQ ID NO: 7527 - DNA, 426 bp, Glycine max
tacggctgcggacgacagaaggggactgagaaaaaggagcaagcttaagctgttttctctgctctttgatcccgtgaaaaaaaaaaatggctggagatgaagaaaagcttcgaatagtgtgatgtttccatggctagcctttggtcacatgatcccaaaccttgagctggccaaactcattgctcaaaagggtcaccacgtgagtttcgtatccacccaagaaacatagagcgtctcccaaaaccgtcaccaaacacactcgataatcaatttcgtgaaccttccactccccaaagtccaaaaccttccagaaaacgcagaagccaccactgacatcccctacgacgtcgttgaacacctcaaagaagcctacgacgttctccaagaaccgctgaaacgttttctcgaatcttccaaacccgattg

SEQ ID NO: 7528 - DNA, 638 bp, Glycine max
aatttaagctgagggcacaacagtcagtggtccggctccagagtggagaagagaagtatcacagggcatggcagcaaatttgtgatattagtcaggctgaatttgaaaaggtctatcaacgtcttggagttcgattggaagcaaggggagagagctactataatgatttaatccctccaactttggagagattggataaattaggactgattgaagaagatgatggtgctcgtgtgatatttgttgagggtgtaaatataccaattattgctgtgaaaagagatggtggctacaactattcttcaactgatctagcagcactttggaatcgtctaaatgtggaaaacgttgagtggaatatatacgttacagatgttgggcagtggcaacaccttgatatggtttttaaggcctttaggcgtgcaggatggctgccaaatcatgaaaatgagttccccaaatgtactcatattggttttggtcttgttcttggggaagatggaaaacgatttcggacacgcagcagtgaaactgttagattggttgagctgcttgatgaagccaaaaggcgttgtaaagcttccctcctcgagcgtgacgctgttaaagattggtctgaggaagagatcgaaaagaca

SEQ ID NO: 7529 - DNA, 467 bp, Glycine max
gcttcaaagaaacacaaaaacggtgcgtttcgatcaggttggttttctccttcctcgctcgcacttcttcgttcagcatcagcatgatctgattgtgtttcgtctcaccccaccgttccgttttcagggaaatgggtctgtggactttacttgaggggtttcttcttcttgcaaatgcgctagcgatattaaatgaggaccgctttcttgcacctagaggatggggcttccaagatttctcgggtggaaggactaagtcgttcaaaggccagcttataggcctcatttatgcaactcagtacctcagagttcctctcatacttctcaattccatctgcatttttgtgaagttggtgtccggatgatgcttgactaggtgtttctgtcagatgattgcacaaaggttcttcaagaccaagtttagggttgccaaatccactgtaaaatatcaattgaataatgtcttg

SEQ ID NO: 7530 - DNA, 460 bp, Glycine max
tgcgctagccatattaaatgaggaccgctttcttgcacctagaggatggggcttccaagatttctcaggtggaaggactaagtcgttcaaaggccagcttataggcctcatttatgcaactcagtacctcagagttcctctcatacttctcaattccatctgcatttttctgaagttggtgtctggctgatgcttgccaagatgtttacttcttaagtattgcatgttcaggagtttttgtcagatgatttcccgaaggtctttaagatagtaggtttgccaaattcccctggagacatatcaactgaaatatttgtcctgttttttgtgactctatttattgccccaaaatagtgtttttctttacaatagtaacataggaagggcatcatgattttcaattcagagttgtattcaatttattgaggatcaattatcatttctcatttttttttgtttt

SEQ ID NO: 7531 - DNA, 490 bp, Glycine max
ccattgaggtgctctttttgggctccccaaacagaaaattagaaattcacacatataggtcaagacatagataaatactacatggtggggaatggaaataatagaaggaattaaaagaggaacatgaaaagggtctctgaatctaatctatttcttcttctcctttcccctttgtaatcgactttcatgctcagaagcgtttcgtttgtcctctaaaacccacataccatcaaccaaactcctaaagtgatatccagaagagtgagagaatggttactgggtggagaagagcgttctgcacatccatccccaaagacagagaacccaaagtgttaacagagaatcaacatcaacaaccacaacaacagcattgcgagaacaccaccaccaccaccaacaacaacaacaataatcacagttccaagtttggatttttctccaacccatcaagaccccggtgcgagtctcagccttcatcaacccctagcct

SEQ ID NO: 7532 - DNA, 417 bp, Glycine max
tctcgagccgaatcggctcgagacgacagaagggggtggcaagaagttcataactctcttggacttgaagcgtccatttaaaccaatgaaggatttggacatggacaaggtcatctcggacatcattgaggaaatatcaaagactagttgatttcagctgttttgcaagagcctttttatggcttgacttacagtgaagctagatatattttgttcacatggtagaaatcctacaatggaaacttgttcaaaatgtgttatagccatgtatgggagttttagtttgaggtgagacatcattttggatatgttccttgtctcggacaagtaccaattttaatttgcattttgagatcgaattacttgttatcatctccaaaaaaaaaaaaaaaaaaaaaaaaaaaaaagcggccctct

SEQ ID NO: 7533 - DNA, 672 bp, Glycine max
ggaaatgaaaattgtgggggactcaaattgattgaaatcaaacctcaccaccgctgctaggtcaagcttctctgtcggtcattgcatctccaatctcgcttcttctctcagattcagataccaattcggtttcttccgaaccaaacttgtttttgagaaattcggcaattgattttccatggccaacaatccgtcacagcttctcccatcagagttgattgaccggtgtataggttcgaaaatttgggtgataatgaagggtgacaaggagcttgttggtactcttagaggctttgatgtttatgtcaacatggtccttgaagatgttactgaatatgagatcactgctgaagggagacggataaccaagcttgatcagattttactcaatggaaacaacattgccattttggtccctggtggttctcctgagtcagaatgaacagtgctacttggttaccaatattaactctccaatgttgctctaggcacgtaattcctatattttaacgaggattctgagaccactaggtttttactttcttatgtttgtttttatgatatggttgtagtgtaatgcttattcaacttttaccatcatgttgaactgtggattgtccagtgtaacaagtaatgcccctaactatggcaattaattttgtgcgcctttag

SEQ ID NO: 7534 - DNA, 709 bp, Glycine max
atttgatgatctgactcatgtcaacttcatcgtcctcctcgtacgcatgcgctctgcaaccttaacctaagtacactgtgaggtgagttccttgggtacacgcgggaatggctgctgcatctggcatgccagaggaggagacagcgatgtttcccgacaaaagtgtccatcccaggttggatgtctacgtgtgggacatggatgagacccttgtactgctcaactccttgctgaaatcatcatacgctgaggctttcaatggtctgaaggatgtgcagaagggggtggaaatcgggaggacatgggaaaatctcattctacaaatatgtgatgattatttcttctatgaacaaattgaaaattacaataagccttttcttgatgctctggcccaatatgatgatgggagggacctatctgattatgacttcaaccaagatgaattaggttccccacatgaggatgatgccaacaatagaaaactggcatataggcatcgagtcattgcccaaaagtacttacagggtttacggaatattttagatcatgagaccataaaactctgggatgaattgtatgataaaactgatgaatacactgacaggtggctttcatcagcacggacctttttgaaggagtgttcgggtgaagataaagatgcagtttcctctgttgcttttgctaacactagctcaaactcaactaattc

SEQ ID NO: 7535 - DNA, 634 bp, Glycine max
ctcaacggttccttctctctcttctacctcttcgcagttcccagttcccaatctctaacaaaaacaaaaaaacagcactctctctctctctatgcaatgtaggtcgccggaggatggcaaactaccaccgcaacaacgtagaaaacgtcgtcctcggccaccaccaccgttccaagtccgcctccgtcgccggccacaccttccgcctatgtaccgccgcctccttccgccgcctcatctttgacgccgtcagctgcggcgccagctctcgctacgccgcgagatccaacacctcctccgacggcgagaaacagcaaaagcaaaaacctaagacgtcgtcgaggaagccgaacaatgcgaagtcggagaagctctcggatctgctgagcattgcggaggctgaagccgacgtggaaacgaagaagaaggaagaaaagctggaagaactgaagctcctcgtgaaggagcttcagcagcacgaagaagtagatgattcaacgaagaaaaaaagagaagctgcggcgaaagtgaggttgttggcgaaagaggatttggaagtaagaggaacgctcgctatgctaggagccattcctcctctcgtcgcaatgctcgatgaaaccgaactaaacgacgt

SEQ ID NO: 7536 - DNA, 526 bp, Glycine max
ggtggactcaacggttccttctctctcttctacctcttcgcagttcccagttcccaatctcctaacaaaaacaaaaaaacagcactctctctctctctatgcaatgtaggtcgccggaggatggcaaactaccaccgcaacaacgtcgaaaacgtcgtcctcggccgccaccaccaccacagccaccgttccaagtccgcctccgtcgccggccacaccttccgcctatggaatgccgcctccttccgccgcatcatcttcgacgccgtcagctgcggcgccagctcccgctacgccgcgagatccaacatctccgacgagaaacaacacctccaacaaaaacaacaacatcataagacgacgtcgatgaagaacaatgcgaagtcggagaagctctcggatctgctgagcattgcggaagccgaaaccgacgtggaaacgaagaagaaagaagagaagctggaagacttgaagcgcctcgtgaaggagcttcagcagcacgaagaagattcgacgaagaaataaa

SEQ ID NO: 7537 - DNA, 618 bp, Glycine max
cttgtgtctctacctctgcatcgtcccacgtggcagctgagttgagatatcaagcagaagaagcactctggttctgaggcgcaacctcgtcccaacaaccatggcggtccctgctacatcctcagcccctgtccttcgacccatccgcaccaatcactccttctcttcccctttccgctctctcccctctcccgccgccagaaaacccctaaccgtcttcgccatggcccccaaaaagaaggtgaacaagtacaatgataagtggaagaaggagtggtttggagcggggatattctacgagggaagcgaggaagtggaggtggacgtgttcaagaagctggagaagaggaaggttttgagcaacgtggagaaagcaggcttgctctccaaggcagaacaattaggattctcgctctcttccatagagaagctcggcgtcttctccaaagccgaagagctcggcttgctcagcttgctcgaccgagccgccagcttctgcccctccgtcctcgcctgcgccgacatccccgtcttcgtcgccgcaatcgccgtcgttgtcatcattcccgatgactccgtcgcgctcgtcgccgtccaggctgttgttgccgtcgcact

SEQ ID NO: 7538 - DNA, 299 bp, Glycine max
ctctctcttgatcgtcccacgtggcagttgagttgagatatcaagcagaagctgtagaagaagaagaagcactctggttcttctgaggcacaacctcgttccaacagccatggcggttcctgcaacatcctcagcccctgtccttcgacccatccccaccaaccgttccttctcttccccattccgttcactccccactcccaccacccgaatacccctaaccgtcttcgccatggcccctaagaagaaggtgaacaagtacaacgaaaactggaaaaaggagtggtttggcgcgggga

SEQ ID NO: 7539 - DNA, 568 bp, Glycine max
aagacgacagaacggggtaactgtcagcatcattctgccgtcgacgaagctgaaacttgtttcttcttttccttgcgcgaaccttttctactaaccccaatcgcttctctcccactccaattccccattcctcatctacataaccctaaccccacactctcacacaccaccaccaacatcatatattacatcgattctcaatcaaatcccaaacgttttgaaaccaccgtcacgatgatgctcagaattcgtagccgcgacggcctggagcgagtgagcgtcgaaaacccccacagcacaacagtgtcatacctaaaacggatcatcgaaacccaattgggaatccctgttcacaaccaaaccctgtccacaaaccagaacctcctcttggcaaaatccctagaagatctccaccgattcaccgacatgtccaaccccgacgcgcctctctcgtctctcaacctcggccacggctccatgggcttcctggcctacgagggtgagcgccgcgtggccggccccgccttcaaccccgccggctccttcggccgtaagatgaccatggacg

SEQ ID NO: 7540 - DNA, 464 bp, Glycine max
gaaacacacttgtgtctgaaattgagcagtgcagagactcctgaacgtcaacggctatggcagcttcttcctttacaacatcttccattctcttcccattcacaactagttctaaatcccctccttctcaactattcccctcttttccttgcaaacatcataccctccgtctcagacccgtctcagtctcagccgcttcaaccccaaccccctccatccaagccgacaaatccccggtctccgccactccctccaagcttctcccctttcggattggtcacggctttgacctccaccgattggaacccgggtatcccctaatcatcggtggaatcaacattccccacgatagaggttgcgaggctcattccgatggtgacgttctgcttcactgcgttgttgatgcgattctaggggcgctaggtcttcctgatattggccagattttccccgattctgatcct

SEQ ID NO: 7541 - DNA, 439 bp, Glycine max
gttcacctctgaatccaccgatcggtcaccgtttggttttcgcaacactattttttcaagtgaaaaaagaaaccgttccccctgatttcatttgaaaacacaaacacagaggatttcaatggcggatgatagcaaccgcagcgtgagactgctatgccgcccgaagcagctcaacacaaaaggatccgacccgggaatccatttctggcttatcggatccccattcttcccgccactcaccgtcgcctccttcctccgccgcatccacacgctcccctccgccgcttcccccgatttgcccaaggaatcggaggaccttcgcactctcatcccgagaggcttcgaagtcgtcggtgccctagcttccggcgatgacgcccacgctcgcgcggccgttgacgccgcgcgtacgttgaggaaccttctctacggcgaggga

SEQ ID NO: 7542 - DNA, 497 bp, Glycine max
  unsure (1)..(497): unsure at all n locations
gaagcttttcagtgctcgggacatggcccaaaagacagtcataggacaggatcaaattgtgtatagtactgacaaggacttacttgagcaagagtatgaagctcgcgaatgggataaaaagtttcgggagctagagaggtctgattaagggtcaactattaatctgttatacagggcgttgagctctcattttgccatcattgacaactttagcacagcatctaggctgccttctgtgaaagcattgggtttagccctggtttattgcaggcttttactggtccatgtatcaatcttaattcgtttctcttaggtccagcaatttaagtgataaaatttgtaatgtgatctataaaagaggaatagtgaaagtttctataggacaatcaatgtaacttaaattggcattgcctttgtatttatgattttatacgccagagtttcgaaatttattagcgcgtcgaagtaacatgaacctttatcaatttagcanaana

SEQ ID NO: 7543 - DNA, 476 bp, Glycine max
gacactccgaagtcaccctacaacaacaacacacacactcctcacacaataatggaagaagggcaaagaaaaacaacaacactacttctatgctcccacattgtggttcttcttttactctccctagtggccgagactagtgccaaggtttcagcagtgatcgtcttcggcgactcctccgtcgacgccggcaacaacaacttcatccccaccattgcacggagcaattttcagccatatgggcgtgactttgaaggtggaaaagccactgggaggttctgcaatgggagaatacctacggattttatatcagagtcttttgggctgaaaccttatgtgccagcatacttggatcctaagtataatatttcagattttgcaagtggggtcacttttgcttctgcagcaactggttatgataatgcaacctcggatgtgctgtctgtgataccactatggaagcaattagagtacta

SEQ ID NO: 7544 - DNA, 839 bp, Glycine max
attgaaatctctgttttcaatagttatatcactatatgcgttgtgttctctagcttgcgtgcgtaacataatcaattaagaagctgctattgtgattcgaaatcagaatgttgcgaagatggagcaaagcagttactccaatctccaaatttggatcgcagagtcatttgaatttcgtgaaggacgtctcgcgccaaacctacgccggggttgcacccgcgccaacaagatagaggacaaacctcaccgccccgtggttaaccttgacaaaatgttttggtctaagccctgttcgctggccctgccccgggactcacccctcagagctgaagaacctgattatcagggcatcaagcgtttcatgctcaagctcatgctgttttatagtaagcagagcaagtcaattcgaggcgctaatgttgtgtaccgaagaattgtttctcaaattgataaacctcccatttatgaagtgtttaacttggagaaaacattcaaaacaacattctctttacttgtgcttcatatgtggttctgtttgcgtcgcttgaagcaagagggaaatgagggtgttgaatttggccagtacctttatgagatttacaatcatgatgtggagctaagagtctctaaagctggagttaacctactactgactaagtggatgaaagagctcgagaagattttttatgggaacattgttgcttatgatactgccatacttccagaagctaaaccgggtgattttcctaatgttatatggaggaatatattctctgaagatggttcttcaacaccagatgctgctgcatctcaatcagtacaggcgatggccagatatg

SEQ ID NO: 7545 - DNA, 796 bp, Glycine max
cgcctctctttctctctctcactaattcgaagctgaatccgaatctcgaaactcgttccgctattatccatcaaaccgtggtgttgtcgtgtttctctctatcgctgcttcgactcgcggcaatgctattagggttagggttagggttacggtgactcttcgcgattgtagcggtaacagttcgtcgtcgcggttgcaaaagttttcgctcaattgataagttagagtttcggttatcatcatgtccgatccttcgaggggtcgcgtcaccattactctagggcgtacggtcatgttgtgaagagggatgtatctgctgcagatgtttcttctttctcttctcttcactcagctggcactaagcggtctgtaagagacagaattggaagtaatgcagatagttctgggtggcatggaaatggacatagcggcaataaacgacaccgaggagatgtaagcatgcaaaatggactggatggcaatgatctacgattgaagctcatgcgaaaaagtgcatctgggcaggctgacagcaatggcagtaagaggcatatggacctccgtgaaaagctgtcaaaggcaagtcaccctctggctaacacttataattcgaagcagcatgggccagattcaagggaaacaagtttgaggcaaattccctcagctagaagttctgataaattactgcgtatggaatccatgagaagctcatactctccttggacattggatcatattaggagaagatcaccagatgggtttccaagtacttccagggggatttccccccaaaggg

SEQ ID NO: 7546 - DNA, 1180 bp, Glycine max
gggtttcacattctgttaacattggccactgttcacacacacattctgtgcacaactttaagtacatttagtttgtttgtctgtgtgtgtgaacagtggccaatgttaacagaagatagaacaaactaaatgtacttaaagttgtgcattgggtttcacattctgtgctttttgccttttcatttaataggttgacatgaatggtgaactgtctgtcaagcataaattgtctggtcaccagaaacctgtttcttctgtttcatggagtcctaatgaccaagagctcctcacgtgtggtgtgggggaggctgttaggcgttgggatgtctctaccggtacgtgcctgcaagtttatgaaaaaaacggtcctggcctcatctcctgtgcatggtttccaagtgggaaatatatactttctggcctcagtgacaagagcatttgcatgtgggatttagatgggaaagaagtggagtcttggaaaggacaaagaacccttaagatttctgatttggaaataacaggtgatggggaacacatgctgagtatttgtaaagacaatgcaatactgtacttcaacaaagaaacgagggatgagagatatattgatgaggatgaaacaataacctccttttctttatcaaaggataacaaattcttgttggttaatcttttgaaccaagaaattcatctatggaacattgaaggtgatcctaagcttgttggcaagtacagaagtcataaacgcacccggttcgttatcagatcttgctttggtggtcttaagcaatcttttattgctagtggtagtgaggattctcaggtttacatatggcacagaagctcaggggagctaatagaggcattgcctggtcattctggagctgttaactgtgtgagctggaatccagctaacccccacatgttagcctccgccagtgatgaccggacaattagggtatggggcctaaattgtctgcacaacaagtaccaaaatgttcacagcaatggcatccattactgcaatgggggaacttagtatgacaaactcattccaattgatttctcttttttatcattgcaattgtgtaaataccgttactattatctcaagtggaccattcatgccaaacatgcatgtgacttttcatatatatatctcataataaatccgtgttccatt

SEQ ID NO: 7547 - DNA, 1302 bp, Glycine max
ggcagcacaagcagaaaaggagaaggtttgggattttagagcgtatgtggttttggttggtaactgaagagtgtgtggaggaagaagaaggaatcggcggtgttcaactgacgatcgcatctcaaagtttggtcacgatcgttgctttgcttgttcgacatttttttcccttttggtttttctgaggcattttcttagttgtatggttgtttgtgttgttttctcgctgctgaaattatatatgggctaagggggcacttttcatgggaggtgtggaagatgaagaaccatccatgaaacgaatgaaattatcctctaaaggattagttggcttgtctaacggttcttctaaagagcctgttggaggcttgtccagtgacttgatggctcggcccctaccatccaaaggggacgaacatgttggttccaaaggggttataaagaaagaagaatttgtcaggataattgcaaaggcattatactctcttggttacggaaagagtggggcacatctagaggaggagtctggaatacctttacactctcctggggtaaatctgtttaggcagcaaatacttgatggaaattgggatgacagcgtagccacattgtataaaattggtctggcagatgaaagtatggtcaggtcagcctcattcttaatattggagcagaaattttttgagcttctaaatggtgaaaaggtcatggaagcgttgaagaccttgaggacagagattgctccactttgcattaatagtagtagaattcgagaactttcttcctgcttagtttcagcatcttctaggctagacattctaagggtgaggtctcggtcaaaactactggaggaattgcaaaaactccttcccccaacagtaatgatacctgaaaagaggttggagcatctagttgaacaagcccttatcttgcaacgtgaggcatgcccgtttcataactcattggataaagagatgtcattatattcagatcatcactgtggaaaaactcagataccttctaggacattacagatattagaagcacacgatgatgaagtctggtttgtgcaattttcgcataatgggaaatatttagcttcagcatcaaatgatcgatctgcaatcatttgggaggttgacatgaatggtgaactgtctgtcaagcataaattgtctggtcaccagaaacctgtttcttctgtttcatggagtcctaatgaccaagagctcctcacgtgtggtgtggaggaggctgttaggcgttgggatgtctctaccggtacgtgcctgcaagtttatg

SEQ ID NO: 7548 - DNA, 377 bp, Glycine max
aggtttacatatggcacagaagctcgggggatttaatagagacattgcctggtcattctggagcagttaactgtgtgagctggaatccagctaacccacacatgttagcctccgccagtgatgaccggacaattcggatatggggcctaaagcgcctgaatgtaaagtaccctaatgtacgccccaattggcgcccattactgcaatggcggcgaacttagatgaacctacgcaaactgtttccaattccatttcttttttttaaccttgcaattgtacgtgtaaataccttcactatcacaagtagacgacattcatacctaaacatgcatgtgacttttcatcaatttcaaaataaattcttgtttcattttaaa

SEQ ID NO: 7549 - DNA, 1322 bp, Glycine max
atgtgatggttagtgtgaagtcaaggcgggttccaggtgctatgacagatgaagaactttttgctgtggaggatggagaaagcatgatgaatggggaaaacaatgatgagtatgatgatgtattgactgcagaggaaagaatgcaattagattctgccctgcatatggggaactctgatgttacttacgaggatgaggaacatggagcctttgatggtcaagaaaatggttctgcagcttcctgtgagacttctgaagccaatggtgtggttaaagaaaagaagagctggtttggttggaacaagaaaagtttgaagagtagcagtgatgatcctgaggattccaaagctgtgaagaaaaattccaggtttggctcagaaggtagcaatcagagatcagctgatcagcaaaagtcagcatctgactttctgagggaggatagtgtagactctaagaagggaaaagataaaaacattaaaaagaagaagaaaaaaggagcaaacaacaatgagtcaaagaatgagagtgagtataaaaagggtttaagacctgtgttgtggttgacgccagactttcctctgaaaactgatgagctgctgcctctgcttgacatcttagcaaataaggttaaggctattagaagactcagagagcttttgacaactaagcttcctcatggaacttttcctgtcaaggtcgctatcccaatagttcctactatccgggtgcttgtcacttttacaaaatttgaggagcttcagccagtagaggagttttcaactccgctctccagcccagctcatttctatgatgccaaatccaaggaatcagaggggtctggttcatggatttcatggatgaaaggaagtcgtggggggcagtccagtgactcagatagtcacagatacaaggatgaagttgatcctttcagcatacctgcggactacaaatgggtggatgccaatgagaagaaacgcagaatgaaggcgaagaaagccaaaagcaagaaacataagaagcagacagcggcaaaaggtggagatggagtgcagcatcagaggaccgaggacgtacaagaagaacagtaatatcgtgggttggtatctctgggtaaaattggggctttgataattgttgccagacatagtcttgctttgtgcacagccacaactgacattacagttctatgttggagggtttgtccaagaatttactagaaatttctcgggcaaccaattgttattagttaaggaaaaagtgcctttaattttttcctcgtatcacgaagaaagctttgtcctctacaaaattgctgtattgcc

SEQ ID NO: 7550 - DNA, 856 bp, Glycine max
cgaacacaccagtttccacgtcatcttatgtggatgacatattcggtggaatacatggggagagtgtcggtgttgatgatctgcttgataagattggtggcttaaatacaaacgctaaaagtccaaacgcaaaatcacccgcttttgatgatttgatccctggctttggtgtttccaataatggtgttgggatgaacaatccaagtgttactccaaacaaacctgctgcagcagcggcggcgtctcatgatgatccgtttttgatatttgaaactgcttcaagctcgccgtcttcagaatctttcctggacgcgctggagcagattagtaagttgaataattctaaagggacaaaaggaggttccccatcattgaagtctccacccaagccaatgagtaaagttaatagtctgagtgtatcaacaatcgatgagcttgaggactttgccatgggtgggacacagactaatgctagtagtagaaaggccaatgttaaagctgctgagactaaacaaaacttggcggctaggatgaacaatggtaaaagagttccagctgcaaaagtgaatcaggcaaacggtgtggatgatcttgaatcctttttcagcatgggctctcgatcaagcagcgtgccaaagtcaaggactccaactatggatcgtatgtatgataaccaaatgaagaacaaagggaaacctgaggtgtcaccaagagtgccatctagatcctcaacaaatgtgaataaatctccaaggaagatgtatattgatgacctgtctctgatgtttgggggttccccgtcatctgaatttcaggaggttgaaggggaaactgaataaagacgaaaagcaagatt

SEQ ID NO: 7551 - DNA, 615 bp, Glycine max
tatttttggtatacctgcttctggtgagtaagacagtgaagccagaaacaggagataaggtaaggcaaggcacgcaactccaatcttgaatcactctgcactctgcactctgcacaatgctttccctctccgtccctcctctcaacctcaaacccataacacccaatgacctctttctctcatcagcctctccctcacctcaccgtcgctacttcgtgaaacccatctccgccgtcctcaactcatcttccttcaagaaacctgagcagcctctgctgccgcagcatcaagtctaccagcccttccgccctcccccgtctcccctcccctcgcaattcggcaccctcgacatcgccggccgaatcgacatcctcgccaaccgcctcggcctctggtacgagtacgcgcccttaatcaattccctaatccgcgaaggcttctcccctccgacaatcgaagaaaccaccggcatctccggcgtcgagcagaaccgcctcatcgtcggggcgcaggtccgcgactccctcgtccactccaaggccgaccccgacctcctcgctgccttcgagaccggcggcgccgagctcctctacgagatccgtctcctcagcgcct

SEQ ID NO: 7552 - DNA, 352 bp, Glycine max
gatcagcaacttatatatcatgattttaatctacgtctgggcaccgatacacacatacatcaccaactgatatataatactagatttcttgcagtctattattagagagaagaattgagttggaagaacccagaaaaagaaacaaaaaataaataaaacgatgtggtggccattcagcagaataggatcttctgggttttcatcatattctactgccgaggaagttactcatggaatcgatggaagtggtctcactgctattgttacaggagcatctagtggtcttggtgctgagactgctcgtgtccttgctttgggtggtgtccatgtgattatgggggtgatagatatg

SEQ ID NO: 7553 - DNA, 394 bp, Glycine max
gatagtagcaaagtgttacaattcaaaagtcacatgtaaacaggaacaaagaggtgttccaagaaactacaaaactagtactcaatcccatctttttgcaatcccagtttcaccgatctctaggagaggatggattatcagtacattctaggagggattatggcttgtagttttgcttttttgtatgttgtgtacagttttggagcaaagaggtcacagattcaagttcaatacatgtaaagagtaatgagtgtgcaaagacatcatcagaaggtggaatatgttcttcagatgaggatgcaggaagtgctgacatcatcattgtgggtgctggggttgctggtgcagctcttgcttacactcttggaaaggatggacggcgagtgcatgtaat

SEQ ID NO: 7554 - DNA, 398 bp, Glycine max
gaggctgagcttcttgcagctgctagtcagcccctccctgacgatgatgaggaatcttttgagtagagggctgtgtgtctgagtgcgctggtagttgtatgctactgtatgtgctgttgggggttgtagtgttgacatttttggatgcgaattcgaggatctgaatcaattatcatccagatttgttgcttaaatttagaacctcagtttaatatatcaaccatgggcgttaaaaagatgaggattttggttgtttcgacaaaattttggggttctttttaatataccatgcgaattggggtttagccgatggagggtagagtttgttcctttttgggtttttttttcaagttaaactcgatactattgattagaaaaatgagggtttatgttccttt

SEQ ID NO: 7555 - DNA, 465 bp, Glycine max
ggaataacgctaacctgaagaaaagagtgtaagagtaggaaacgagattgacgaaccctaagctgaaagaagaaaaaatgtctggcgtgaagagagcactgaggcagttcaccttcggaaccggcaagaccgccggtcgcaactcggcggggcgcataacgtccttccaccgcggcggcggagccaagcgcttgcaacgaaccgtcgatcacaaacggaataccgcttcttctctcggcgtcgtcgaaaggatcgagtacgaccctaaccgctcctccaaaatcgccctcgttcgctggatcgaaggcgtccatcaccgtcgccgccgcgctgcctccgccaacgccgcttcgcccaagctcctccatctcgatcccgccactaacgacgctaacagcattcgcggcgttttcgctctcaattcgatgctgccgcacactcacgctggaacatcctccagagagc

SEQ ID NO: 7556 - DNA, 396 bp, Glycine max
  unsure (1)..(396): unsure at all n locations
ggacacactcatcttcttcttcttctttttggttttctctctcacagtgagtcagcagcaatggactccatttccccaagagctcaagagaataataacactacggcgaaggccatgatgacgagatccgaaccagcgaacccatacccgacaacgttcgtccaagctgacacatcctccttcaagcaagtagtccaaatgctaaccggctcctcggagacagcgaaacaagcagccgccggcggctcctcgaaaccttcgaactcgatcccacccatgaaatccatacccaacaaaaagcatttttctaagctctacgagcgcagagcaaactccctgaacctcaagaacatcaaccccctcacctcgtttttctcganacacaacactaattcc

SEQ ID NO: 7557 - DNA, 886 bp, Glycine max
gactcatttttccaatattcacacaatacctctatcttgtgccacttatatagtacgtccatcctagtgaaacaaaccatggcttccgaaacaaaccagtccaagaatgtgtgtgtaattggagctggaccctcggggctattggcagcgagggagctgagaaaagaaggtcacaaggtggttgtgttggagcagaaccatgatattggaggtcaatggctatatgacccaaatgtacaagaggaggatcccttaggaagagacccttggctaaaggtgcatagcagcatctatgagtctttaaggttcatgtctcccagagagatcatggggtcaactgatttcccctttttagtcaagaaaggtagagacacaaggaggtttcctagccagacagagctccttctctaccttaacgacttttgtgaatggtttgagttgagagacatgatcaagttcaatacaaaggtgcattatgtgggaccattaaattatggtgtccctagtgaggatttgaaatgggttgttagaagcaaagagaacaagagtgaggaggaagttgaacaagtctttgacgcagtggttgtggccactggccatttctctaatcctagattgccctgcattcaaggaatggacacatggaaaagaaaacaaatgcacagtcatatttacaggtcttcagagccattccgcggggagatagtggtggtggttggaaattttttaagtggacaagaaatatcaatggaacttgtgaaagtagcgaaggaagttcacctcagttcgaaatctcttatcatttttgagggtttatccaaagtcatatccaaaaacgagaattttcaccttcgtccacagatagacacccttcaagaggatggga

SEQ ID NO: 7558 - DNA, 568 bp, Glycine max
  unsure (1)..(568): unsure at all n locations
gcgcgagctctagctctaaaaaacacactagcttccaaagtcttctaatctcttgcaagttgcaactcatcaaccatggcctcatgcaaatccttcatcacagctttctttcttcttgcaaccttctcatcaagcatgagtttgagcctagcatcatctcgtcacctcttgcaaacaaccacaacaccaaatttgcccggcatcactcccactttgcctaaccctacaggattgccacctttgccttcaaaccctacactgcctcagggcaatgttcctcctttgcccactatgccaactcttccatcacttccttccatttttccaacactcccttccctcaccctccctccatttccagcctcttcattccccaaaatgccctcaatcccaaacagtatcccgtccttccctttcttctccccaccaccttcaacatctagcccttaaaccatgttcacaagtttgcattattatgtgcttagcataaattgcatgcaatacacattgcagcatttcgntagtctatgtgagaggattatattataaccttatgattgtatctttg

SEQ ID NO: 7559 - DNA, 423 bp, Glycine max
ctgagagttacaagcacgaaagttgcaagcacacagaagagaagagaaagatgacgtcatcgcgtccccctccgtcgaaatccgtggatctggacctaacaatcgtgtcggcgaagcacctgaagaacgtgaactggaagaacggcaatctgaaaccctacgtggttttctgggtggacccggagcggcgcctcgccacgaaatccgacgactccggcaacacctcccccgtctggaacgagcgtttcgccctccctctccctctccccctccacgactccttcctcaccctcgagatctttcactccaaaccctccgacacccccaaacccctcgtcgccaccctccgcctccccctcaaagacctccacgacctccacgactccacgcgccttccgaagttccccctctctcgcccctctg

SEQ ID NO: 7560 - DNA, 490 bp, Glycine max
cgcgagcggccgctcgcgatctagaactaacgactatcccgagctgtagaagaagatatgaggggggtgtttcttccatggaacccaccttgcttccacgacgcactccatctcccttccgtctcgctcctgccaacgagacccttcttcttcaccctctcagcctcctccaccccctcagcgcccgtggagtccgcgtcgcagctcagcgcgcgcgagaggaggcgcgcgaggagcgagaggagggagacgaggagcggcgcgaagaactggagggaggtggtggaggagaggctcatggaaaagcccaagaagcagaagggctcgtggatggacgagctgaacctcgacaatctcgccaagctgggtccacagtggtgggtcattcgggtctccagggttaagggaaacgacattgcgcaactcctcgctcgctcgctcgccaagaattatcccgatatggagtttaagatatatgctccatctgtca

SEQ ID NO: 7561 - DNA, 339 bp, Glycine max
ggaaagttgatctcactaagcaatgggtattatatcacagccccagctggtgccatttccgttattgatgaatgggaattacacagcaagcaccattccttggaggctcccttccgacgatccaagcattcccacacccatcgagctaacttggcttaatctcttcctcaacacaatccccaccttcaagaagcatgctgagagtgatacttctgttcctgatgctgtgaataaagctgaagaatttgctcaaaggtttgctagaataattgactatttcatgatagatcctgcatttcaatgcgtgcgtcttgacgtccttcttccatgcagacttcg

SEQ ID NO: 7562 - DNA, 960 bp, Glycine max
cccacgcgtccggacgacagaaggggataacgttatccattaacaaggtcactgatttgtgcaaatgatgtctttgcagaggaccaagttgtttccttttttcattgtccttgtttccttcacatgtagtctctcccttgctatgtccagtaaccagttggagcagtttgcttcggaggaagaagtgtttcaactattccaagcgtggcagaaggagcataagcgtgaatatggcaaccaagaggagaaggcaaagaggttccagatattccaaagtaatttgaggtacatcaacgagatgaatgcgaagaggaagtcacctacgacgcaacatcgtttgggtctgaacaagtttgctgatatgagtcctgaggagtttatgaaaacctacttgaaagaaatagagatgccctactccaacttggagagtaggaagaagctgcagaagggtgatgatgctgactgtgataatcttcctcattctgtacattggagggacaagggagctgtcactgaagttagagaccaaggaaaatgccaaagccattgggctttcagtgtcacgggggccatagaaggaataaacaaaatagttactgggaatcttgtttccctatctgtacaacaagtcgtggattgtgaccctgctagccatgcgtgtgctggaggcttttacttcaatgcgcttggttacgttatagaaaatggtggcattgacacagaagctcattatccttacacagcccaatacggtacttgcaaggcgaatgcacacaaggttgttagtattgataatcttctagttgtggttggagcagaagaagctctcttgtgccgtgtgagcaaacaacctgttagcgtgagcatagatgcaactggccttcaatttatgcgggtggagtctatggtggtgagaactgctcaaagaattcagcaatagcgactcttgtgtgtttaatc

SEQ ID NO: 7563 - DNA, 461 bp, Glycine max
gggatgagcatcctaagttgtggatggagctacatgtcaaaaacagggagaagcttctcacatcccttcgtcaacacctctccgactcttctcgttctctccatggcttcgtcctccttcaaggtggcgaggagcaaacgcgttacgacaccgatcacttggagctcttcaggcaagagagttacttcgcttacttgtttggagtcatagagcctggattctatgcagctattgacgttgcaactgggaattctatcctatttgctcctaggttaccttctgagtatgctgtttggttgggggagattaagccactctcctactttaaggaacactacatggttaccacgtgttgcttctcagatgaaattgaaagtgtattgcaacaacattaccagtgttccgggaaacctttgctgtttctcttgcatggccttaatacagatagcgataattactct

SEQ ID NO: 7564 - DNA, 450 bp, Glycine max
ggacaagtggcgaaaccagtttgaacgctatttttgtttgtgttcccagcgaaagggcaaaacaaagtataagaccttgctttgatttgcttcccttttcttgttgtcgtgtcaaccatggcgtcgtttgggtctctgaaatccaccattttcgaaaaagaagagagaaaacagcagtatcagtcgcatattcgaggcctcaatgcatacgaccgtcacaaaaaattcatggacgattacggtaatgtttctcttacaaaatccttaaatcatttattattcactacctcttttttaaaaaataaaatataaatataaatttcctgtttcatgataaatgtcgttttgtttagggttgatggacaataaggaattgatcaaacttgtagctgctggtttggttggttccttataataataataatgtcctatagcaaatggatgatgaac

SEQ ID NO: 7565 - DNA, 351 bp, Glycine max
gtggcgaacccagtttgagcgctatttttgtttgtgttccgagcgaaagggcaaaacaaagtataagaccttgctttgatttgcttccccttgcttgttgtcgtgtcaaccatggcgtcgtttgggtctctgaacatccaccattttcgcccaagaagagagaaaacagcagtatcagtcgcacattcgaggcctcaatgcatacgaccgtcacaaaaaattcatcgacgactacgttaaattttatggaaacgcaagaccgtcaaacctaaagttgcctattaaaacagatcaagatacactaagagaaggatacagattcatccggtcagaggaagatgatatgaatcc

SEQ ID NO: 7566 - DNA, 368 bp, Glycine max
cgagcttgctatgctatgctaagctaagctggaaagaaaaaaggccctctgagtgagtgagagtgtgtggttaaagaggagaggaagaagagaagaggaggcggtgcgcaccttagcatggattcctctccgtcatcttctctctcctctctcgcttcgtccccacggcaccatcgtcctctctccaattgagaaaggcaccgattcccattctcattctcactctggctgacataaaggcaacccttgcctctctctcttccatcgatttcaatttctacggcaacaggaaaagcaagaagaagaaggccaggctctgctttggtttccgccgcgtcaaaatgctgtggctgatgagattctcgggc

SEQ ID NO: 7567 - DNA, 588 bp, Glycine max
ctcgagccggaaaaaagcccacctgtgtgtccgtgcaactgcaacgtgcttacccctttcgttccgaattccaatattagagagaaagaaaacattggttaaagagaagcggtgcacgatgagaggaagaagagaagaggaggcggtgcgcaccttagcatggattcctctccgtcctcttctctctcctctctcgcttcgtccccacggcaccaacatcctctctccatttgagaaaggcaccgattcccattctcattctcactctgcctcacatattgccaacccttgcttctctctcttccatcctcaccaccgccgatttcactttcaacaataagaacaataaggccagggtctgcttttgattccgccacgtcaaaatgttgtggctcatgagattctcgggcttcttctccgccgcaatgctcgtcattctcctctccccttcccttcaatccttccaccccgccgaagccatccgctcctcccaccacctcgacggcctcctccgcctccctccgcctcgcctttccttccgccccgcccctcgtttccgcaatgccgccgacgccaacaaatgcgcct

SEQ ID NO: 7568 - DNA, 563 bp, Glycine max
ggagggagctggagaggatcgggatccgtgattttgattcatctgtacttgtagagcctttttctactgcaaagggatggatgacaagtgctaactaagcactttcttcttcttcttcttcatcccttcatcgccaaacacaatgaaggaattgggcgtggttgcaatcctcttttcaatagagttcttggacgttatcgtctacactgtaagcaaagcagccatgaagaagggcatgaatgactttgtctttgtcatgtactccaatgccttcgcaacttgcctcctccttcccataaccttcttcttttacaggaaaagacctcttcctccactcacatatttcatagttgcccaattgtttattaatggctttttaagttgcagtgttcagatgctcaggttttttggaataggttacagctctcccactttggccactgctatgtctgatttaatccctgcttttaccttcattcttgccatcgtcttcaggatggaaaaattggattggaaaactaacagtactcgggccaagtccattggcacattggtatcaatca

SEQ ID NO: 7569 - DNA, 500 bp, Glycine max
atacgcccacgcgtccgtttgctttttgcaggaatagaacacttccgccactctcctgtaacacgcttggcctattccgtggggttggcatgctcagttgcattaatcagtcgatcaagtttttcggcataggttacagctctccaactttggcctcagcactgtccgatttggtgcccgcctttaccttcatacttgccgtcatcttcagacacggatagtgagagaataccctgcagaactggtggtggtactcagtcgcattgcattaacatctatactatctgttcctgctgcactgatttcagtaaaggatctaaaagctttgagactggggtttaatatggagcttatagctattggatgttcagcaatttttgtcttatcctttcgaggtgttatccatatatggatcatggggaagaggggccctgtctatgttgcaatgtttaagccactcgaaattgtcttcgcagtcatcttgggggttacttttcttg

SEQ ID NO: 7570 - DNA, 520 bp, Glycine max
attacattatccgattcagaattgtgtggactggaaactcctctgtccccaaacaggacgatgaaggaactgggcttggtttcaatgatgctgatggcagagttgttggacgtgatcgtcaacactctaagcaaagcagccatgaagaagggcatgaatgactttgtattcatcatgtactccaatgccttcgctgcatgcctcctccttctcttagccttattcttttataggaaaagaacacttccgccactctcctgtaacacccttggcctattccttgttgttggcatgctcagttgcattaatcagtcgatcaagtttttcggcataggttacagctctccaactttggcctcagcactgtccgatttggtgcccgcctttaccttcatacttgccgtcatcttcaggatggaaaaattagattggaaagctaatagcactctggccaagtccattggcacagtggtatcgatcgctggggcattgttattgtctttgtacaaaggccaagtca

SEQ ID NO: 7571 - DNA, 406 bp, Glycine max
gagggttgtaacagtgtgaaagagagggggtcccaagtggaatttattgtttctacctatcgcatgcatccgttttgttttctttttattttagatgtggtgttgtgaaatctaatggcatgcttagaaatgtacaacaactcagagcacaacaagaacaacaagggtgataatcatcaccatcatcatcaatgcgctccaatgagcccaagaatctctttctcaaatgattttgtggatgtgcaacaagccatgaagctgcaagaacaaagaggtggctcatccagattagacacgccagtgtcttcagacttcgagttttcagtggcaaactacaccatgatgagtgctgatgagcttttcttcaagggaaggttgatgtcgtccacttatgttaacacggaca

SEQ ID NO: 7572 - DNA, 561 bp, Glycine max
gaccacagaatcaaacaaaacaaaaccccttcccttccacatacactcttctccaatctcaccccaaaaaaacttgcaacaaaccaaaaaccatgcttgatgaatcagtctcatccaccccaacattcttgggcagcctgtacagctggttcacccccactgtcttcttcctcctcctccaactagtcattggcaccattttcatcatctcaaaccttgccaacacccacaaacaccaacaacaagaaccacaacaagcacatgactttccacaccaccatcttcccagatccccttccatgctccaaagactcaaatccatcaacttttacccttcttcccctttcagatcccaagaccttcaaaaccctcattttcacaacgctcatgaaaatgaacaacctcaacttgctagatctccctccgttctccagagactcaaatccatcaacctctacagttacttccctaccgaacccttcacttccaaactcccacccgaccagcacgtgccggagaaaccgtacgtgcgagaacaaaaccaaccgcaacaagtggtgg

SEQ ID NO: 7573 - DNA, 401 bp, Glycine max
ctcttacactttgttactacttactgattccaaccatatactactaaaatggcttccttccgtgtgcatctcttatcattcttcttcattgctttgtcacttttatccattagcaatgtccaagccagtagaaaacttctggcacccacaatgcccaatatgggaaattatcctcctcgcgtgatatatcctccattccccccagtaacagactggccagagtataggttgccagcacccttaattcgcacacttccacccttctcaccacctcctaaccctaccaatccttgagtagtagcattatttgctacactccacagtagattaatgtagcgtaatcaatgttgctatatatgtgcagtcaaataaaggttcatcacgaacaagctttcaattgc

SEQ ID NO: 7574 - DNA, 288 bp, Glycine max
ggtaaccttggccttgcgttgcagaaggaagaggagatgaaagtggagataagtgctcttctcaaggagaagaaggaggtggaaaagagcgttgaaacgttaacagaggaaaaagatggtgttcgtaaggctttgaatgttcttcagaaggagttagaggataagcagcacgagcttgatgaagctgttagagtgaggagtgagatcgaggaggtcaagggcaatctcgagaatgaaattgttgagttgctagggaaagtggatgagttgaaagagtcttgggaaaat

SEQ ID NO: 7575 - DNA, 280 bp, Glycine max
ccctagatgaaccctaatagtcacaccgtcccttcagatatggccaaaaaggaagtctctcaatctcacgaccccaaggaatcccaaaacgtaaagcaacccttgccaatggctactccaaccgatggctcctcagaactgcagattcagaacctcaagaacctcaacgccgtccttctcaaggagaccacccaacgccgccagcagatccactctctccagtccgcgctccagcaatccgccgtcacctcagacaccaacctcgcctttgacgtccaaa

SEQ ID NO: 7576 - DNA, 461 bp, Glycine max
aaataaaataaactttccctgttcaagaatctcagtttcgactttgaagccctatctgccgcaacgcgacgcgacttcctccgactaggcaaccagagtgcttataaaaggaatagtagtaagcacattcatctcccctagatatgaactcagttgcaaggcgtttatcaagcttagtcagacattcaggtttcacacctgaacccttcaataatgggcatcatcaaatgcagcagctccagcaatgcagaggcataagagtgaaggtcatgggtgggaacttggaagcagcattgggattgatgcagcgtaagatgcaatcaagtgggattgagaggatgataaagcaagaacaaagattccatatcaaaaactctgagaagcgtgttttagcccaaaagaacttggagcggaagattcgatctgaagatcttgctgagaaacttatcgccattatgatc

SEQ ID NO: 7577 - DNA, 446 bp, Glycine max
gtttcaaatcttacattcttgaatgctccagcttatagcatacacccagtttattgcagccatgtacatattcacactgtttcaatctctactcctcctgaatccccttatactgttggcatagtgccagattcttcctgataatgtgtgtatagaagattgtattgttgccatgggatttgatgcaatttctctcaaaagtggctgggatgagtatggcattgcttatggaaggcctactgagaatgtacacatcagaagggtgcaacttcatgcattttctggctctgctcttgcatttggcagtgacatgtctggtggcatttcaaatgttctagtggagcatgctcatcttttcaactcaaatagtggcattgagttcagaaccaccaagggaagaggtggttatatgaaagaaattgttatgtcagacatacaaatggaga

SEQ ID NO: 7578 - DNA, 389 bp, Glycine max
atgattcggagccaaagaagagaagaaagaatgagacaacttcaagtttgcctaaagagaagcaatctgctgcagctaagactggcaagaagggggttgataaaaaagcttcaggtgcttcccttttcatctcatttgggccaggatcctctctgccttcaaattcggatcttaccacactgtatggtaagtttggagctctgaatgaatcagaaacatctatgctctctagtgattgcactgctcgtgtgttcttcctgaaagcctctgatgctgaaaaggccttgagccattcacagaacatgaacccctttggctcttccgaagcctctttcagacttgagtatctttctgctggttccaagtctgaaaaatccaagtttaaagct

SEQ ID NO: 7579 - DNA, 461 bp, Glycine max
ttaaaggagcaagtgggactagtattgattgaatgattgatagaggagtgagtctcggggcatcaaagaagaaagatgggagacgtagcagataaattggcgtatttccaagcgataaccggtttagaagatccggagctctgcacagaaatcctggctgcccacaattgggacctggaactcgctatctctactttcacctcttcctcaaaccctaacaaccctccaccgcctcccgctctggcttggaaactcatcaccctacccgtttccgtcatctccgccagtctaggcttagtttccgccgctatcggcttgggcctatgggccgcggggggcgtcctctcctattccctcggcctcgtgggcctgggctcgccctcggccccattggtttccgtcacggccgccgcttccgaggcgatggatttcgtggccgctttcgagagggactacggctc

SEQ ID NO: 7580 - DNA, 766 bp, Glycine max
gattcctctgcattcattcagcgttcatctcaatctagatttgtgtgcggtgcgtctccggtgaagagaagaagatgtcgaccgtaccaggacagctcatctgggagatcgtgaagaagaacaactctttcttggtgaaagagttcggaaggggcactcagagcgtgcagttcagcagagagcccaacaatctctacaacctcaacactttcaagtactccggtttggcgaaccagaaaactgtcactgttcaacctgctggtaaagaccagtccgtgttgctcgcaacaaccaagacaaagaagcaaaacaagcctgctgctttgcttcacaaatctgtcatgaaaaaggagttccgtaggatggcaaaggctgtgcaaaatcaggtagcagataactactacaggcctgatctcaaaagggcagctctggcaagattgagcgctgtcaataggagcctcagagtagctaagtctggtgtgaagaagaggaacagacaggctgtgaaggtccccagcaggaagtgaatttagaagagttaaattgcattctaaatttcttccatcctttccccattttgtagtttgtgttccagaactcaattctagattttctagttttgtttggagaggcaatttattgtgttttcaatatacaacaaccggaactactatgttatagctttcaacaactgggttggtttttttttttcaataaaaaaaaaaacgacacaaaaaaaaaaaacacaccagctgcaaaaacaaga

SEQ ID NO: 7581 - DNA, 766 bp, Glycine max
  unsure (1)..(766): unsure at all n locations
tatgcatgcaagtaaatattttggttttatgtttgggtacaacgttgcatgttcctcgtttgaattttgggttatgtacaggtaatgggtaattgtttttgaaataggagtttcttggcattttgtgaattgaaacccttatttttctccacatgtcaagttagttttgaaggttcgaattgaaagtgatagatttactcttggtgagaatttgagccatcatcatctattttattcggtgtattttgccccattgattgcttgcacaatagccttggcttgactcttgttgatacttcttgcttcacatgcatgttgggagatgatttaggcattttgttcgtataagcctctagccaaatgagcctaccttgaattaattcctttgatagcccctttgagcctatgttcccctttctttgttttgaagctcattacaagccttaagtggaaaaaaccatgatttcaccctacccttaaggaattttggagctttggaattgttttgggaataagtgtgagggggggtatctttcattggatgatatgtttttgttggccatgcttgatgatgtattttggtcatgcttcatgtgtgtgtgtgtgtgtgtgtgtgtgtgtgtgtatatatatatatattgcttaattgttgctttatttttcaaatgctttcaattgctactgttcatgttcaaaagnaaaattcaaaanaaaaaaaaaaaaaaaaaaaaaaaaagcggccggtttaggggatccagctacgtcg

SEQ ID NO: 7582 - DNA, 466 bp, Glycine max
gtcccagcaataatgctcgttgcacaggtcgctcctctttccattcgaaatcatgtcggaacccaagatacgtgatgtgctgatcagctgcgccgaagacacacaccaaggttttgtgggccatctctttaaatctctcacagatctcggattctccgtgaaggtagtctcaggagaccatcgggatcttaaggaagaggaaattgaatgcttcagggttttcattattgttttttcccatcactatgcaacttcttcatctcgcttggataaacttaccgagatcataaataagtacggtgcggcagaagatcgacgcatttttccatttttcttcgaggtggaaccgaatcatgtacggtttcaaagtggtagttttgaaatagcttttgattctcatgccaaccggtgtggagtccgagtggttaccgaggtggaaaattactctgaaaaaagtaactgattt

SEQ ID NO: 7583 - DNA, 2489 bp, Glycine max
gctggagcctccacgcgcggctggcacggccggctctattaatctagctcggatccccccgcgaggcctgacaggcaagttcttcttcttctccctttcttagattctccctcttttctctctgccctccgccatggctgaggataaggagatgtcttcctctgtcaccaatggcgatgattccctcactggtcacatcatatctacaactattggaggcaaaaatggggaacccaaacagactattagttacatggcagaacgggttgtaggaactggatcatttggaattgttttccaggcaaaatgcttggaaactggggaagcagtggcaattaaaaaggttttacaagacagaagatacaagaatcgtgaactacagttaatgcgtgttttggatcatccaaatgtgatctctttgaagcattgtttcttttcaactacaagtacagatgaactttttcttaatttggtgatggagtatgttccagagtccatgtatagagtcattaagcactatagcaatgctaatcaaagaatgccaatcatctacgtaaaactttatatgtaccagattttcagggggttggcttacatccacactggtcccaaagtttgccacagagatttgaagcctcaaaatatactggtggatcctcttacacaccaagtgaagctatgtgattttggaagtgcaaaagttctagtcgaaggtgaagctaatatatcatacatatgttcacgattctatcgagcaccagaacttatatttggggccacagagtataccagttcgattgatatttggtcagctggctgtgttcttgctgaacttcttttgggccagccattattccctggcgaaaatgcagtagaccagcttgtacatattataaaggtgcttggcacacccacccgagaggaagtacgctgtatgaatcccaattacaatgactttaggtttccacagataaaagcacacccatggcacaagatattccacaaaaagatgcctccagaagctattgatcttgcatcccggcttttgcaatactccccaagtctccggtgcactgcgcttgaagcatgtgcacatcctttctttgatgaacttcgtgaacctaatgctcgcttgccaaatggtcgtccatttccccctctatttaacttcaaacaggaattatctggagcatcttccgagcttgttaataagttgatacctgaccatgtgaagcggcaaatggggatacagtttatgcatctgggaggatcgtgacgataaagcttaggggacatagtgtatactagctgataagttaaaaaaaagtggcaccattattttttgtcttaataccatgttctgtgacctggcgaatgtagtttcaagctgaaccgagactgagattcgcgatgccggatggccgcagttgatccgtcagtatatgtaccttttgattcccttgtgctaactggtggatcttatttcctcaggcaaaatagcctttgtttattgtaaacgtctacatgtcatatagtagttaagtatacttggcctgaaatggtcagaacttagattgcttctgtaaggggaaaaccaaagccttagctggaaggagggggagggtccacacagagttttgatggggggttgttgggtgttcggtttcctcttgttaatatgtgcctcatttgtaatgttgtaatgcacaccagttcctttccttgtgaaatgtaatgtgctatctatctgtttttcttcaaaccaaaaccgaagaatttggactttgctcaagctgcttctcttcctctagcaattgagactgcttatgagggtttggagaggactggatttgctcctggtaaatctattcttgttctaaatggttctggacgagttggtagcctagtgattcagctagctaagcaagtttttggagcttcaagagttgctgccacttcgagtactagaaatttggacctattgaaaagcttgggagctgatttggctattgactacacaaaagagaactttgaagatttgccagaaaaatttgatgtagtttatgatcgccattgggcaatgtgacagggcagtgaaggctgtgaaagaaggcggcagtgtggtggcactcacaggtgctgttacaccacctggcttcagatttgtagttacttccaatggagaagttctgaggaaactaaacccttacttagaaagtgggaaggtgaagccaattgttgaccccaaaggtccattcccctttgataagcttgctgaagccttctcttaccttgaaacaaaccgagccactggaaaggttgttatacatcccatcccttgaatcaagtaaaagggataggcaattttgccgtgtctgtctagtaaacttcatattctatgtaaatcagagtttagattaaagctaaaaaacaaaaataaagaacttcatttttacattcttagtgctttaaacttaccattacaattg

SEQ ID NO: 7584 - DNA, 615 bp, Glycine max
ctcttaaccctgttgatgccaagaggaggcagggaaagtttaaagccactgattctcctcttccgactgttccgggctatgatgttgcgggtgtggtggtgaaagttggtagtcaagtgaaggactttaaagtgggtgatgaagtgtatggagatgtaaatgagaaagcacttgaaggtcctaagcagttcggatctttggctgagtacacagctgttgaggagaaattgttggcaccaaaaccgaagaatttggactttgctcaagctgcttctcttcctctagcaattgagactgcttatgagggtttggagaggactggattttctcctggtaaatctattcttgttctaaatggttctggaggagttggaagcctagtgattcagctagctaagcaagtttatggagcttcaagagttgctgccacttcaagcactagaaatttggacctactgaaaagcttgggagctgatttggccattgactacacaaaagagaactttgaagatttgcccgaaaaatttgatgtagtttatgatgccattgggcaatgtgacagggcagtgaaggctgtgaaagaagatggcagtgtggtggcactcacaggtgctg

SEQ ID NO: 7585 - DNA, 712 bp, Glycine max
ccttaactcattttgagacgaattccgccgacgtgaaaatgataaaagcaaaaaaaaaaaaaaaacatgaaactcaatcaagtacgaggtcttcctaaggggcaaagctagtcaaggaaattgggaaaagtccaaaaaaaagaaaaaagaagacagaggaaagaaaggagagctggaatcacatggacttgtctttctctttctgggtctccattaaatttttcttctctcccttctttctctctctctctctctgaccattctcttcttcttctttttcttctcctctctctctctcccctccgccatggctgaggataaggagatgtctacctctgtcatcaatgggaatgattccctaactggtcacatcatatctacaactattggaggcaaaaatggggaacccaaacagactattagttacatggcagaacgggttgtaggaactggatcatttggaatcgttttccaggcaaaatgcttggaaactggggaagcagtggctattaaaaaggttttacaggacagaagatacaagaatcgcgaactacagttaatgcgtgttttggatcatccaaatgtgatctctttgaagcattgtttcttttcaactacaagtacagatgagctttttcttaatttggtgatggaatatgttccagagtccatgtatagagtcattaagcactataccaatgctaatcaaaga

SEQ ID NO: 7586 - DNA, 982 bp, Glycine max
gaatttatttcttgcttgagttatgcctatttaatttccattcacttggattttttttattctaagatcgatcatcttcaatttccctatattacttgcaatattgattgaacactactagatcatgtgtataacgttgtatagctagctagctagctttctattgtctaatatacctttgtctgtgttgtaaattaaggtgcaagaagcaagtaatccctcataatacacacacacacatatatatatatataatggcggattggggtccagtggtgatagcagtggtgctgtttgtgttgctaagccctggtcttgtgtttcaattgccagggaagagcagagtggtggagtttgggaacatgcaaaccagtgcagtgtctatcttggtccacacaatcatcttctttggtctcattaccatctttcttgttgctattggctaaatgcttggaaactggcgagccagtggccattaagaaaggttttactggacaaaagatataagaatcgtgagctacagttaatgcacttgatggatcatccaaatgtgatctctctgaagcatcgtttcttttccactacaagtgcagatgaactttttcttaatttgattttcagggggctggcttatatccacactgttcctggaggttgccacaaagatttgaagcctcaaaatatactggttgaccctcttacacaccaggttaagatatgtgattttggaagtgcaaaagtgctggtcaaaggtgaagctaatatatcacatatatgttcacttttctactcagcaccagaacttatgtttggtgccactgagtatactacttcaattgatatttggtcagctggctgtgtccttgctgagctgcttttgggtcaggctactcaaatgaagcaggagcatgacaagaggcaagcaagcctcatagctgaacacaacgaacagctaaagcgtacccaactgcaagctgaaaat

SEQ ID NO: 7587 - DNA, 578 bp, Glycine max
gtaaaattgaaaagcagttagatacttcgttcatcacggcggtggacaggtacattaccaccagtagctataaaggccaagtcttcaaaatctcatctttttctccacttttttatccaatcccatcccattaacgtcctcttacctcatgtcagatcacaaccacgagatatccacttccgctgatgatggtaatgattctctgaatggtcacatcatatctactacagttggaggaaaaaatgggaagcccaaacagactaaaagttatatagcagaacgcattgtggggactgggtcatttggaattgtcttcctggctaaatgcttggtaactggcgagccagtggccattaagaaggttttactggacaaaagatataagaatcgtgagctacagttaatgcgcttgatggatcatccaaatgtgatctctctgaagcatcgtttcttttccactacaagtgcagatgaactttttcttaatttggtgatggaatatgttccagagtctatgtatcgagtctcaaagttctatagtaatactaatcagagcatgccacttatttatgtaaaac

SEQ ID NO: 7588 - DNA, 626 bp, Glycine max
agtttgatccaccactggttcttatggtgtgatttgtcagtatgctatacagatgaaattccttttgtgagcagtgcttggttgggtggtttttgttccattcctgaagtgaatctgcagcagggagaggctgtagctgactgataatgagagggaacacaacaggaacaagcacagtttgaacaaagtagaagcaaaactcataaaggtaccaccccataacctcaaaccctgagggcttctctcccacttcctcagtgtacccattataaggctctctagccctcaaaattttcatggcactgttgtgtatgtctggcctaaccgtggttccttttccaccctcttgcaccactcctggtgctcctccttcagcttcaaccgtcacctctttcatcactttgtttgaaggcagaagaaaaataatgaagagacacaggtaggtgtcagagagagagtaatggctgaggaaagaggaagaagaaaaaaaagagtggagttggaagtttaacacaaaggtgacactagggaatatctaaagggtgggttgggtttggtttggtcttgtttgtcgtatgtggtgtgcaactgtacacagctggggctaatgaaactttctagggcgt

SEQ ID NO: 7589 - DNA, 373 bp, Glycine max
agtgcaatttctatcttggtccacacaatcatcttctttggtctcattaccagctgtcttattgctattggtgtgcatatctacactggctaggctttaccctattctctttttggttaaaggtttagtaaattttcatcttgttattcttttaaggttagttgattgcggtttcccattttctcatgtcctcatcgaataataactctacttctctttagtctttgagattccaagattaggacaaccttgggtagtatagagccatagaatggaatcactggcactgcacacactgatatcatatcacatggcttgatgttttatgctttcatgttcgttctcttcaatcaaattatttacgtactgcccc

SEQ ID NO: 7590 - DNA, 407 bp, Glycine max
gactagataatgtgtatgaagttgtagctagctagctagctttctattgtctaatacacctttgtctggggtgtaaattaaggttcaagaagcaacaagtaatcactcataatacatatatataatggcggattggggtccagtggtgatagcagtggtgctgtttgtgttgcttagccctggtcttctgtttcaattgcctgggaggagcagagtggtagagtttgggaacatgcaaaccagtgcaatttctatcttggtccacacaatcatcttctttggtctcattaccatctttcttattgctattggtgtgcatatctacactggctaggctttattctattctctttttggttaaaggtttaggaaatttttatcttgctattcttttaaggttagttgat

SEQ ID NO: 7591 - DNA, 553 bp, Glycine max
ccttcacattttctctctcaccattctcttcttcttctccctttcttagattctcccttttttctctttaccctacgccatggctgaggataagatttttgcactctgctgctagctgttgctttgtttgaatttattttagccacataacacgttgtgttccgatcagttcttactttcaacattttcaattgaagagatgtcttcctctgtcaccaatggcgatgattctctcactggccacatcatatctacaactattggaggcaaaaatggggaacccaaacagactattagttacatggctgaacgggttgtaggaactggatcatttggaattgttttccaggcaaaatgcttggaaactggggaagcagtggctattaaaaaggttttacaggacagaagatacaagaatcgcgaactacagttaatgcgtgttttggatcatccaaatagtctatgtatagagtcattaagcactataccaatgctaatcaaagaatgccaatcatctatgtaaaactttatatgtaccagattttcagggggc

SEQ ID NO: 7592 - DNA, 637 bp, Glycine max
gggttgcaacaccacaacttcctttgctagcgtctcatctgtgtcgacattgcatcaacgactacatccctagtattattgctcatattgattgaacactactagatgatgtgtataacgttgtacagctagctagctagctttctattgtctaatatacctttgtctgtgttgtaaattaaggtggaagaagcaagtaatccctcataatacacacacacacatatatagagtatgataatggcggattggggtcctctgtagttgttatgagggtgaagctaaaattatgagatgtcttcctctgtcaccaatggcgatgattctctcactggccacatcatatctacaactattggaggcaaaaatggggaacccaaacagactattagttacatggctgaagcgcgttgtcggaacttggatcatttggaattgtgttccaggctcgatgcttggactctggggaagcagtggtccatcaccaaattaagaaaaagttccagagtctatgtatcgagtctcaaagttctatagtaatactaatcagagcatgccacttatttatgtaaaactttacatgcgccagattttcagggggctggcttatatccacactgttcctggaggttgccac

SEQ ID NO: 7593 - DNA, 449 bp, Glycine max
gattcatgattcaacaatgaagaattgattcaattcatagtctcaatcttccaaatttatcacagatccaaatccaccaccatgattcccgatctacccctccccttcctcttctccttattcatcatcttcttccacctcgctgaatccaaaccctccctcaccgccacgccaaccaccctcccagcctccggcgccaccgtcaatctccgctggtccggcatcccttccccctccgacctcgacttcctcgccatctattcccctccgacctccccgcacgacaacttcatcggatacctcttcctctcgcagtccgccacgtggcgcaccggctccggcaacctctccctcccccttcgtcgacctccgctccaactactcgttccgcatcttcagcttgacccgcgccgagatcaaccccaagcgccaggaccacgatcacaacc

SEQ ID NO: 7594 - DNA, 1133 bp, Glycine max
attaaaatcagaatccaaaaccagatcaaaatcaaaattaaatacatataaaaggagaaacatatgatgtggggtggttgttagttgactagttgcaagttggtgagttcagttattaagctcttttggcatgcttcttgctggtcttagggtgaacttttgatgccataaaaaaccatcccatattagttctatttctctctctgcctctccctttgtttcaagttccctctgcttattctgcacaggaacgatgtctgagaaaaccacagctgagaaccttattgaaaaccttgtggacacatttgttgataagaaaaaatctgtatcattctttgaggatgataagtcagactcagtgagttctcagatcaatagactgtttggacgccagaaacccgtgcaccatgttttagggggtggaaaatctgcggatgtcttgctatggaggaacaagaagatttctgctagtgttttaacatgtgcaacgattgcatgggtgcttttcgaatggcttaattataattttcttactattttatgctttgttttggctcttgtcatgcttgcacagtttctttggtcaaatgcttccggcttgtttagcaggtagccatctaaagttccccgttttgtcctcccagatgatatcttcgtgaatattgcaactgtagttggtgctgaggttaaccgtggtttgaggtttctccaagatgtttcttgtggaggaagcctaaaacaatttcttattgttgtagtaagcttatgggctggtgctgtgattgggagctggtgcaattttttgactgtcatgtatattggttttgttgctgcacatacactcccagttctctatgaaaggtatgaggatcaagttgacaactctgtgtacaaggtctttgatcagatgccaaatcactatcagaagctggatactggtttgctcagcaaaatccccaagggaaagctcaaaggaaagaagtatgaatagactcttccttttgtaaatggtttgattttcaatatctctttctctcacttgtgatggaattgggaaaggctgagggatgtgatgtaactagggaacaaatctatgttccggtctttaaaatttgttgtatctcttctgtcgg

SEQ ID NO: 7595 - DNA, 426 bp, Glycine max
cccacgcgtcgttgtgcgtgtccactactactttgttcggtagctacttcgcttctaccctccattccattctctgaagtgcaggaacaatgtctgagaaaatcacagctgaaaaccttttaaacacccttgtggaaacacttactgagaagcaaaaatctggatcattttttgaagaagacaagtcaagctcagtgagctaccaattcaacagactgtttggacgccagaaacctgtgcaccatattttagggggtggaaaatctgctgatgtcttgttatggaggaacaagaagatctctgctagcgttttatcggcagcaacagctatatgggtgctttttgaatggcttaattataatttcataactattttattctttgttgtggctctcggtatgcttggacagtttctttggacaaatg

SEQ ID NO: 7596 - DNA, 388 bp, Glycine max
ggtcttctgtttttttttttctttctaaaatgtaaagaaaacagttttcaatcagcaaaatctacagtttcaatctttcggatcttgttggtgttgtgtggatccttggatcgtgatcctctactcaatcctcattctggtcggttctctttctggggttttagatctctttgttctgtgcacttcaagtcgctgcttgcgtcagtggtgtttcagtgtcctccttttcatggcattttgactacccttttgccaggctagtgtgagtgatggatccaattaacattttacctgctgatggggttgaagtggttcaccaaaatggtgttcatgatgaaccttcgaattctggagaggatggtggcgtttcataagaattaaaccccaa

SEQ ID NO: 7597 - DNA, 280 bp, Glycine max
actcactcgccatttccagtaacacacagcgaattcaccttcaatcccatttcaaaaccgctccttctccttctccttatttataacacttctctctttctctctcttctttgccttttggttttctctaataccatgtaaacaaaaaaaaaaatacaatctttcaatcagcaaaatctacagtttcaatctttcggatcttgttggtgttgtgtgtggatccttggatcgtgatcctctactcaatcctcattctgggtcggttttctttctggggggc

SEQ ID NO: 7598 - DNA, 496 bp, Glycine max
tgatgacaatgctgaatgatcggtaatctgccatcttttagtccactataaagtatagctattgtaatgtcaatcacccaaaattgctgaagcgtaagtggtcacgagcgtttcgcttcatataccagaagaaattgactaaataatgtgtatgcccatgtggatattgataatagtcacctattctctgcctcctttgtctttccttttttcgcccatttcttaggcacaaattaggcctcctttcttgctttccccttcgtccggtcctggtaagggttggatgatgtggggttacagctgtagagttctgctgataaacctatgtacaaatagaaattctgaaaccggctcatccaaggaattacctcaacggattgattaaccctatgtgaaaagttggacctttggattccagaattgtattttctgtatcttggataatatttgtatcatccatttttttatttcatgtattatacatttttttttgctt

SEQ ID NO: 7599 - DNA, 662 bp, Glycine max
tttccctgtcacaaacacagattcacttcgaaactgaacgctgcagcagaagatgttcaaaaaattttctggcgaagatgtatctgcacagaaccaagtgaaggcatctgttcaacgaaaaatacgacaaagtattgctgaagagtatccgggccttgaacctgtgttggatgatatacttcccaagaagtcccctcttatagttgctaaatgtcagaaccatctcaatctggttcttgtgaacaacgtgccactgtttttcagtgtccgtgatggaccatacatgcccaccttgcgacttctccatcaatatccaaatataatgaaaaagttacaagttgaccgtggtgcaattagatttgtcttggcgggtgcgaacataatgtgtcccggtcttacatctcctgggggtgttttggatgaggaagtaggggcaaatgtcctgtggccatcatggctgaaggaaaacagcatgctcttgctattgctttcaaaaatgtcagaaagacataaaagcaatcaataagggcattggggttgacaacttgcattatctcaatgatggtcattggaagatgagaagctgattaagatgtcgtgagctcatgctactatgatgatgatcctgtgtctggactgatcagtctaggatcgagtgactg

SEQ ID NO: 7600 - DNA, 452 bp, Glycine max
ctgaaaacaatcccgcttggattttcgtgactccctcgaacgcaatacctaataatacaatgtacctcgatctgaagacaatctcgttccccctcaccacgcaaaaccccgtcgttcccttcattgcgccaaccgtggttctcagcaacaccgccagccgctctagaggtgatgaaaaggattgctgaagaggtgatgtcacagaaccatgagaaggcatctgttcaacgaaaaaaaagggaaaagtacagttgaagagatcgaaatataatgaaaaagttactggttgaccgtggtgcaattagatttgtcttggcgggtgcaaacataatgtgtcccggtcttacatcttctgggggtgtttaggatgaagatgtaagggcaaaatgccctgtggccatcatggctaaaggaaaacagcattctcttgctattggctttacaaaaatgtc

SEQ ID NO: 7601 - DNA, 467 bp, Glycine max
acggctgcgaagacgacagaaaggggaataatatctagagaagaagctatatagccatggcctctaagtgtgaaagttggatgattttgggtttgttgattgctatttcgttctcaagcatgcatatggacatggcattcgcagcaaggaatctcctgcagacagaattgatacctgagctgcagccagtagtgccacctgtcatacagcctagagagatagacatctctgacttgccgccactgctaccagtaccatcaccaccaattacccttcccatcccctaagcacttggatttggattcataaataatcactcatctccactctccattttcattcagttccctgttgttattgttgctttcaataagtgatcttttttcacatctgtcttggtcaatttcttctgttacacatgctctgagacttttcaatcttcctttgcactttttcatgtacctgga

SEQ ID NO: 7602 - DNA, 785 bp, Glycine max
gaatttatctttgcctttgatgtttgtcagctttttcttgcttccatagttcatatggcgtgtgttcaagtcatcacagttcttctctttgcattggctctagctaaaatttacccctcaacatgtcaagtggtgcagggaaaagtctcctgcgttgactgcactcacaactatgacttatctgatattaaggtttcagtgaggtgtgatggtgtgaaaaaactggctttggcaactacagaaaatgatggctccttcaaggttgatcttcccttagaccacacaaaaccttcttcttcgtgaagaattgcttagcaaaacttcttggcgggccagttcagctttatgtctcaagggaaaaccaggtatcccaaattatcaagggcaaagatcaaaacagctacaccatctccacttcccttagtttcaggacatcatgccccctaaccacaaaatgcaagggtgggaaacaggttggttcatcgaaaactgtggatctacctctgcctccagagtggggattggcaccaagtagctattatgttcctttcttccccatcattggaataccttgatcatgggctcaagacttcaagtgatttgtaatcacttgattaataatacttgtaggggataatagactgttatactgtcttatatgttacatatgattattatagatatgtgtcatgtgtagtgtgaaagaatgatgccacttatagttgtggcatgtactgtatgatacgttcgggaaggcagtttattactctactggtttgtcaact

SEQ ID NO: 7603 - DNA, 1344 bp, Glycine max
ggctcgacttttttgtttaacaaaaatctaaaagaaacgaagaaacaaagaaaaaaagaaaaactatatcagcgattctcgtgatcttcggcctcgaatcgagaggtaaaagacccaactccgcctctgtttttgtgatcgaaaaccataaaaaagttgtttccgatcactgccttaatcggattcagctgttgttcctcctcctcaatttcgaatattgaaaggctttagttgttgattttggtcaagtctctagtcaacctgtgaattttttattcaagtttaaaaatatatagagcaatgagttttgtttttcgaggaacaagagcagatattgaaaatgggtttccagggtttatacctgagaggcgagcattgcgcgttcatgcaacacgtcctagtaattccaattcactcacttttctcgtgacagttcttctgttattcatgatactgaactctcaccagatgtccccaaactttctgctctggctggtgcttggtgttttcttgatggcaacaatgttgaggatgtatgcaacatgtcaacagcttcaggtgcaggcccaagctcatgcagctgcagccagtggcattcttggccacacagaattgaggttgcatatgccaccatcaatagctcttgcaagccgagggcgtctacagggtctcagacttcaacttgcacttcttgatcgggagtttgatgatctagattatgaaactttaagagctctagattcagataatgtttctactgcaccctccatgaccgaggaagagataaatgctcttcctgtccacaaatacaaggtttctggtcctcaatgtggtggttcctcaatgcaacaagcatcatcttccactcctgctgagaagaagcaagataattcaaatgctgttgggagcatgaaagcctctgatgatgacctcacttgcagtgtatgcttggagcaagttaatgttggtgacgtactgcgtagcttaccttgcttgcatcagtttcacgctaactgcatcgatccctggctgcgccaacaagggacatgccctgtatgtaaatttcgagctggatctggttggagtgacaatggacataatgatatcatcgcggacatggtctgaatacctcgtctaattttatttatggacgtgtgattataatcttctacaactgtaacttactctcgtcatgtatcaagattagtagctcatgactagtattcgtgtaattaccccgacgtgtaggtagggaacagaagaacggcctagtgccgtgtaacaaccatacaaattatacaatttgttgcccattaaacttacatttcttgggtcgctgtgctg

SEQ ID NO: 7604 - DNA, 426 bp, Glycine max
aaaagacccaactccgctctgtttttgttatcgaaaaccataaaaaagttgtttccgatcacagccttaatcggattcagctgttgttcctcctcctcaatttcgtattggatgattttaaagatgatcccggtaggctttgaatgtgaatattgaaaggctttagttgttgattttggtcaagtctctagtcaacctgtgaattttttattcaagtttaaaaatatatagagccatgagttttgtttttcgaggaacaagagcagatattgaaaatgggtttccaggatttatacctgagaggcgagcattgcgcgttcatgcaacacgtcctagtaattccaattcactcacttttctcgtgacagttcttctgttattcatgatactgaactctcaccagatgtccccaaactttctgctctg

SEQ ID NO: 7605 - DNA, 1520 bp, Glycine max
  unsure (1)..(1520): unsure at all n locations
gaactacccagcaatagtaagtgcaaaaccgaaaacaaaaaaccaaacccaaacgaaaccgaccaaaatctcgccaacttcactttccgcttcatgtagtttctgcgttcccaactccttctcccgactctaccctgactcgcccgagtccacactcaaacccgcgctcatggcaaataacccttccgacgctcccgccgatgacttccttgaacaaatcctcggcctcccgaacttcgcttccgccgactccggcctttccgctgccgatgtcggcctcgccggtgcggccactcaggctccgatgatgctgcaactcaactccgccgacgccaacgctcacctcgccggcgccgccttccacgcgcccgtgtaccagctagggctgagcttggaccagggcaaaggtgggttcatgaagcccgaggaagcctccgctagcggaaagcgctttcgcgacgacgtcgttgataatagagctaagcatgtttttcatgggcaacccatgcctactactatgcctgctgctcctcatcctccagcaatacgtcctagggtgcgggccagaagaggacaggctacagatccacacagcatagctgatacgattacgcagagaaagaatagcagaaagaatcagggctttgcaagaactggtccctagtgtcaacaagacagatagagctgccatgctggacgaaattgtggattatgtcaagttcttgaggcttcaagtgaaggttttgagcatgagtagattgggtggagctggtgcagtggcaccactggtaactgatatcccattatcgtcagtcgaggaagaaggcggtgagggaagaaaccagccagcctgggagaagtggtcaaatgatggcacagaaagacaggtagccaagcttatggaagaaaatgtgggtgctgccatgcagtttcttcaatcaaaagcactctgcatcatgcccgtctcactagcttcagcaatataccagtcacaaccctcaggcacttctagtatagttaagcctgaaactaatcctccttcataatcatagtcagaactctggcacagatgcaccatccagtggtcccatcaagggctcacctaacactgctaggacccacgtgtaattcgcctgtttcaaacccccttaaccttagtcattggttcgcatcaagttgcattcaaggttggatgccatagtctttcctttttgcgttctttcaactttttgtctagacagggtntgtgtcaatgcccttcanaacacaagcaaaccccatcttgataaatntcatgtaaagggaaagaaatagngntaggtacttgatatgctctttccctttgtatcaattannngggggggtttaggacgtgatgaagcgctttttaatagnggggggcttggggttatgagnggcagtggacccttcttaaagggtnatggggggnggggtgataatttattaaaaagtgactctttaagggaattgaaattggcgagctggaaatgggatatgga

SEQ ID NO: 7606 - DNA, 377 bp, Glycine max
gagggaaaacgcaaaagacaaaagaagggtgttccgtcgtggcggcgtggtggaacttcattcacagtgggtggcttgcgttttggaaaaacggtgtcgtgcggaaacagaggctacgtttacgactctcatcatatggacagcttacgccaggagaaagttcaaagatttgaagaatttgttgacaaacgcctgaaacctgatcttgttcatgctattgctcagcgggacaaggtatttgaacaacagaaaattttcactgatttgagaaaaaacattgaaaaccttgagaagaatagtgtaaccagtctaagaactttggtcaatattgggtctgaagtatacctgcaggcagaagtgccagatacacaacacat

SEQ ID NO: 7607 - DNA, 566 bp, Glycine max
attatttgaattcttaaaagttgtaagtttgtatttgtaaaataaaaaatatgctaaaagagattgcagattagagaaaacgctgctcactcactgcagctcccttgttcacgtggaccggagggcgacaaacgcacgacggagggtgacggacgcgggcttttccggcacgggctctcttcagtcttcgctctcccttttccggcacggcccgaggcggtctcacttctctcacccttttgcgacgaggtcaccactgtgtctgtgttttccggcgaggactctcatcatatggacaacttacgtcaggagaaagttcaaagatttgaagaatttgttgacaaacgcctgagacctgatcttgttcatgctattgctcagcggcccgaggcacttcaacaacagaaaatttttgctgatttgggaaaaaacattgaaaacctagagaagaatagtgtaaccagtcttagaactttggtcaatcttgggtctgaagtatacctgcaggcagaagtgatttggattccatgtggagtttacttggtcagaagctctgaactacatag

SEQ ID NO: 7608 - DNA, 654 bp, Glycine max
ctctctcgtccgcggacgcgtgggcaactttttgactcatcgggctttgtctctccaacccgaaaagtaggagtcagagaacgaaacggcactgttgaggtgaagtccaatttcgtagctcttgcgtttagcaaaaacggtgtcgtgcggagaaagaggctgcgtttaaagattgcagattagagaaaacgctgctcactcactgcagctcccttgttcacgtggaccggagggcgacaaacgcacgacggagggtgacggacgcggtcttttccggcacggtctctcttcagtcttcgctctcccttttccggcacggcccgaggcggtctcacttctctcacccttttgcgacgaggtcaccactgtttctgtgttttccggcgaggactctcatcatatggacaacttacgtcaggagaaagttcaaagatttgaagaatttgttgacaaacgcctgaaacctgatcttgttcatgctattgctcagcggccagatacacaacacatatttgtggatgtaggatttggattccatgtggagtttacttggtcagaagctctgaactacatagaaaaaagggaagaaaagatagccaggcagatagatgagtacacccagttgattgcatctattaaagctcagattaagct

SEQ ID NO: 7609 - DNA, 460 bp, Glycine max
gaagcgaggaaaaaagcacaacagcaaacaacgtgaccccaccctctcttcccttccctcttcctataaatgctcacactctaacaaaccgaatacctctcccacttgcaatcggaagaaagagatcatcaaaccctaacacgctctctctttctctctccgaatccgaattttttatcaccttctcctcgatcattgtgattgagattgagattaaccctaacgcacacgctcactgttgcgattccgagttctatggctatgagcggtgcgtcttcggatcattcccccaagcccggcgtctcctcgccctgcagccagatttgtcggcgcgctggtcggccttcctcaaactcccggccgactccacccgtcgtcaaggcctccgtcgcggtcaattctccgccgacggaagattctgacaacggcggcggaaacaatgtcattaccggcaaaaggc

SEQ ID NO: 7610 - DNA, 769 bp, Glycine max
agacaacatttggacgcggtagagaagaaagaaaggaaagggtagggtagatcaggcaggcttcagttcagccatgagaactcacactcacacttacacttatactattttctctctaattcttctctccttatttcttcgaacccattccgaggttataacgttaacctctgatacatttaatgataagatcaaggagaaagacactgcatggtttgtgaaattctgcgttccctggtgcaagcattgtaagaatcttggttcattgtgggatgatttggggaaggcaatggaaggagaagatgaaatagaggttggagaagtcgattgcggcatggacaaagcagtgtgttccaaagttgatattcattcctatcctacctttaaggttttctatgatggcgaagaagtagccagataccaaggtacaagagatgttgaatcaatgaaaacctttgttttggaagaagctgaaaaggcagcagcaaaagcacttgaaagtgacaaagaattataacaacttttgaggtgcagtcattatctggattacaactagctctttactgtgggtggtgcacatcccagataagtaatcacctttgggttcaggctgagacattcattcttctctgttctgatcaacaatttgttgtttgacgtagcagttgtgagttaagaactaatttcgtacactacctcaatttctttctgctatactccacaattttcttttttaggtttatttatactctactaaactgatagtggc

SEQ ID NO: 7611 - DNA, 836 bp, Glycine max
tcagacagctgcaaaagacaacagaaggggagatttcgcgaaaaatatcacgtgctgacaacacggtatcgcaagtcaacctttccccaaaccgtcaattccaattcccacaatcttaaaccttcaaattcttcacctttccttcacttcagagagcgagtgtgagacagacaacaaaacagaatgggtgtggtggtgatcgacggcagcaccgtgcgcgacttcgtgaacgacgaaaccgccttcaccaagagcgtggacgagcagttctcggcgctggacctcaacaacgacggcgtcctctcgcgctcggagctccgcacggccttcgagtccatgcgcctcatcgagacgcacttcggcatcgacgtttccacgccgccggagcagctcgcgaagctctacgactccatcttcgacaagttcgacggcgaccggagcggcgccgtcgaccgccgcgagttccgcgacgagatgaggaagatcatgctcgccatcgccgacggcctcggatcgttccccataaggatggtcctcgaggacgatcccaatagtcttcttcagaaagccgcggatcttgaagcctccaagacctgaaatccaaacggcgacgttttgagttcggttcgcttaatagtaattgatcgtgctttcgtgagttcactttgttttttttttccttaataaagggtttatgtagagagcgccctgactgtgtttcgaagctgaggatctgttctgtgtgtaatgtatgtgacactgttattattatggagactgttgatcggttatgtaattctaggaataaagattaaagactcataccggttgctgat

SEQ ID NO: 7612 - DNA, 406 bp, Glycine max
cccgtgtgtgccatccacagatttcgcgaaaaataaaaaaatatcacgcgctggtaccacctttccccaaaccatcaattccaatcctcccaatttccacaatcttcaaccttcaaattctgcttcacctttcttcatttcacttcagagagagagaacaaaacagaatgggcgtcgtggtgatcgacggcagcaccgtgcgcgacttcgtgaacgacgaaaccgccttcaccaagagcgtggacgagcagttctcggcgctggacctcaacaacgacggcgtcctctcgcgctcggagctccgcacggccttcgagtccatgcgcctcatcgagacgcacttcggcatcgacgtttccacgccgccggagcacctcgcgaagctctgcgactccatcttcgacaa

SEQ ID NO: 7613 - DNA, 953 bp, Glycine max
cgcgtgcacacgcacggaattcggcactactcggtttccactttctctctgtttaagaactcaccacttcttcaacttggtgccgttgtttcatggaccagaacaacgcctcatagctcctttctcatttcacacacacaaagaaccttgagacatcatgaagattccaagttccaagcaactggttgtgggatttgcacttggaaatgaaggataggcaacgttggagagctgaagaggatgctttactacgcgcatatgtcaaacagtatggtcctagggaatggaatctggtgtctcagcgcatgaacacacctcttaacagggatgccaagtcatgcttagaaaggtggaagaactacctcaaacccggcattaaaaaaggatctcttactgaggaagagcagcgtctagtcatcaatcttcaagcaacgcacgggaacaagtggaagaaaattgcagcacaagtccctggtcgcactgcgaagaggttagggaagtggtgggaagtgttcaaagagaagcagcaaagggaaaccaaggggaatagctgcactattgacccaattagcgatagcaagtacgagcatatccttgagagttttgcagagaaactagtgaaagaaaggccttcaccatcatccatcatttgttatggctacttctaacagttcttttctgcacgctgatgcaccggctcctccaccggccttgcttccatcttggctttccaattccaatggcactgcacctgtgaggccaccttccccttctgtgactcttagtctttctccctcgacggtggcagcgcctccgccatggttgcagccccccgtcagaggaccggacaatgctgctcctcttgttttggggaatgtggcgcctcacggggcagttttagcatttggtgagaacatggtgatgtctgagttggtggagtgcttcaaggagtt

SEQ ID NO: 7614 - DNA, 512 bp, Glycine max
gtctattctcattttctctctctgtctctttgccccatttcagtgctctgtcttctcccccaccaccgcactctctcagatattatcatttcatatcacacattcacatcctatcatcatcgacaacacgctatccccattgcttcttctcttctccctctctcgtttcctacttgacggcgccgtttcgttctccagaagatgcttctgagtacttcgcgctgcaactagacatgatgagttcaagtttcaagacatgggctgtgggatttgcacttggaaatgaacgagaggcaacgttggagagctgaagaggatgctttattacgttcttatgtcaaacagtatggtcctagggaatggaatcttgtgtctcagcgcatgaacacatatcttaacagggatgctaagtcgtgcttggagaggtggaagaactacctcaagcctggcatcaaaaaaggctctcttactgaagaagagcagcgccttgtcatccacctttaagcaaaata

SEQ ID NO: 7615 - DNA, 717 bp, Glycine max
cttgtgctccccacgatttactttccccccactcccccgcactaccctaattgccctcttctctcttccttcgtcccagcgaccacaaatcactgcaattcaaggtttgaacttcccatggcgagcgctgttgatgcttccggaaacccgatcccaacttctgcggtgttgatggcgtcgtcgaagcacattgggataaggtgccactccgagaatttggagtttctgaagtgcaagaagaaggatcagaaccccgaaaagtgcctcgataagggtcgtgatgttacccgttgtgtccttggccttctgaaggatctgcaccaaaagtgcacaaaggagatggatgaatatgttggctgcatgtactaccatacaaatgaatttgacttgtgtcgcaaagagcagcaagcattcgagaataagtgctctttggaatgaaattatgcactgctgttgtcgaaaataatatcacaggcaattacgagtgagtaaatgagcctgttttccaaaaattcattggccttttccgtttgtatgacagtgttggaatctataccattaactatgttggtcgtctaaatttttctagagaaatgcatccaagcaagacaaaacaagatcctcttcaaacataataactgacaagaatttttgaagttggaacatgcttgtaatttgatctctacgtttgaaatgcatatttcttgtgctttaaaa

SEQ ID NO: 7616 - DNA, 692 bp, Glycine max
  unsure (1)..(692): unsure at all n locations
cgacagaaggggaacaaacacttattatatattcatctttctcttttttagcttttcttttcctctaaaagtgagtccttccttcttcgatcacttgttaaattcacatatcatagcaatggcagcacgttcctacagccccatcatggttgccctctctttgcttcttttggtcacattctctaatgtagctgaggcttatacacgcagtggaacacttcgtccttcagattgtaaaccaaagtgtacttaccgttgctctgcaacttcacacaagaagccatgcatgtttttctgccagaagtgttgtgctaaatgcctatgcgttcctcctggtacatatggcaacaagcaaatttgcccttgctacaacagctggaagaccaaggaaggaggacccaaatgcccttaaaccccttaattgcctaatatataaataatttaataagcaatgtaatcctatatgactcttcatgagcaattttctatctctacatagataagcaatgctgttttaattgtttagttgatagcacctggggacacatttagttatgttcccttcagttttcaaagggaaaactatatttttagcaaattgtattttgtggtgctatatattatatatatagtctatattttttaattgactttggcatccgggcatttgagactgnnnnnnnnnnnnnnnn

SEQ ID NO: 7617 - DNA, 694 bp, Glycine max
ggtccgatatatccgggtgccgccacgcgtccgtaaagaaggcgccttgacgctgctgcagctgtatcatcaccatcgcgcccaagagagagagagagagagagaggcgcgaaaatgagcggacgcaaggggaagaagaagggagcgagctttgtgatcgattgcgcgaagcggtggaggataaaattatggacattgcttctctggagaagttccttcaggagaggattaaggttggcggcaaggccggtgcactcggcgattccattactgtcactagggacaagagcaagatcaccgtcacctccgacagcaacttctctaaacggtatctgaaatatttgaccaagaagtacttgaaaaagcacaatgtgagggattggcttcgcgtgattgcatccaacaaggagcggagtgtctatgaattgagatacttcaacatcgctgagaacgagggtgaagaggaagactgaagatctaattctgtgtcttgaggcattttctgtttaggtttagttattgtggagtctcttttatctgttttatttatttaacttgttactggtttaaatattcctgtgttttatttggaccgacgttatgtcttcatatgaaatttcatagaggttattggagatgttgtcattaaaagtcagatgcaatacatgctactttatgttggcaatgtatcttt

SEQ ID NO: 7618 - DNA, 528 bp, Glycine max
gattcccaacgaaccaacacagcctcacaagtaacaaacttataacacacactctctctctctctctctgcaatggctggaatggttcccctttgcattgcatcattggtcactctttttgttgcaacaagtgctagaattcctggggttttcaatggtggtgcatggcagggtgcccacgccactttctacggtggaaatgatgcctctggaacaatgggtggggcatgtgggtacgggaacctatacagccaagggtatggcgtgaacaccgcggccttgagcacggcgctgttcaacaacgggttgagctgcggcgcgtgcttcgagataaagtgcgcccaagatccgaggtggtgcaacccgggaagcccttccatcgtcatcaccgccacgaatttttgccctcccaactttgcccttcccagcgacaacggcggctggtgcaaccctcctcggccccacttcgacgtcgccatgcccatgttcctcaagatcgctcagtatggagccggcatcgtgcccgtc

SEQ ID NO: 7619 - DNA, 554 bp, Glycine max
gagagaggatggagtatttaagctcacaccgtaacacataataaccatactaaattcgtaaacccttttctcaaagcacaggcttagttatataccttcttcttcttcgaccttcgatttgggcccaacacaaacgcaccattggctccgatcactgcgcgacccaattccatggcggctggccctacaacaacatcaccctccgatcgacccaccatggtccctcccccaatgctcgtctccgactccttcgccaaggacgccatcctcgcctggttccgcggcgagttcgctgccgccaacgccatcatcgacgccctctgcgcccacctctccgcctcctccgcccacgattacgacgccgtcttcaccgccatccaccgccgcaggctcaactggatccccgtcctgcagatgcagaagtaccactccatcgccgacgtcacgctcgagctcgccagactcgacgacagaaaccacaactctgccgccgacgaacacgaaaccgacgacaaaacgacgccgtcggagagtgtcggaaatggtggtggcgg

SEQ ID NO: 7620 - DNA, 284 bp, Glycine max
cacaggcatagctatataccttgttcttcttcaacctttttcttttttccttcgatttgggcccaccacaaacgcaccattggctccgatcactgcgtatcatcacaattccatcgccgctggccctccatcactctccgatcgatccacgatggtccctcccccaatgctcgtctccgactccttcgccaaggacgcaatcctcgcctggttccgcggcgagttcgccgccgccaacgccatcatcgacgccctctgcgcccacctctcctccgccgctgcat

SEQ ID NO: 7621 - DNA, 491 bp, Glycine max
ggctttatgaaacttgaaactagtgaaacagagaggtgaaggagaaaaaaaaaaaaagtgtagagtggataatggcttcgttatcgctttgcatagccatgagagcacccactccctcagcttctctcattctcactaccccaaaaccatcttcactctctttgaaccttacccgcacttgctccagcgctcgctctccgctcctccattgctccttcctctcttctccttcccatctctcttccccttcctccgtttcaggcttgtcacttggattggatttgacatctaatgttgggaccagaagaggaaaaggttctggcctagttgtgagggcaggcaaggctgctctttgtctgactaagagaagcagatcaagaaaatcattggcacgcactcatggtttccgcaaaagaatgagcacaccaggtggaagagctgttttaaggcgacgacgcgccaagggactgagagtcctatgcaccaagacg

SEQ ID NO: 7622 - DNA, 799 bp, Glycine max
ttttcatttccgatccataattgtcccaacgcgatacaccaattcttccttcctttcatctcgtgaaatccaaagagttgcgacacgttaaattgttttccaggttgcgcatatccagcatgcaggcatcgcgggcaaggctgttcaaggagtacaaagaggtgcagcgggaaaaggctgttgatcttgatattcaactagtttgtgatgattcaaacatttttaaatggaccgctcttatcaagggaccctctgagactccttatgagggtggtgtgttccagcttgcgttttctgttccggagcagtatcctctacagccacctcaagtccggtttttgactaaaatatttcacccaaatgtgcattttaagactggggagatttgcctagatatcttgaaaaatgcttggagccccgcttggacacttcaatctgtctgtagggctataattgcgttgatggcccatccagaacctgacagcccactgaattgtgattcaggcaatcttctgcgttcaggcgatgttagagggtatcaatccatggcaagaatgtacacgagacttgcagcaatgccaaagaaaggctgaatgattttagataacttgcttcctatgttctttgttccaatcttaattgtttgaaatgtatgcattttaagacatgatattgattgtttgattatatgtattaaagtagtgacttgtacaatgtacagagtgtaggtgtgacctcgcatatctggattcatgagagaactcaggtccccatattcaaataatccttatagaatgag

SEQ ID NO: 7623 - DNA, 559 bp, Glycine max
gcgtgggggacgatctaatctcttgtggaaatattactgattagttcccaccatcggtgttggtaactaaagacttcttggtgggtccactgttttagggtttgtttgcacacttttcatttccgatccataattgtcccaattctttccactcgcgaaatccagagatatcgatcaacagattcgtgcgacacgttaaattgttttcaaggttgcgcatatccaggatgcaggcatcgcgggcaaggttgttcaaagagtacaaagaggtgcagcgggaaaaggccgttgatcctgatattcaactagtttgtgatgattcaaacatttttaaatggaccgctcttatcaagggaccctctgagactccttttgagggtggtgtgttccagcttgccttttctgttccggagcagtatcctctacagccacctcaagtccgggttttgactaaaatatttcaccctaatgtgcattttaagactggagagatttgcctagatatcttgaaaaatgcttggagcccggcttggacgcttcaatctgtctgtagggctat

SEQ ID NO: 7624 - DNA, 390 bp, Glycine max
gaaagcaatcctctagcttatgctcacaatggcttcgtcatcttgttctgctgccaccatccactccaccctgctttcaacatccctcttctcagtttcctctttaccattaccacatgaatcaacttccacaccaagcaaaaccttcttcctgcccattaagatagacgcagcaaccaacatgtgctacaccacaattggcactggaactccccaacacagcacaaatctagtgattgatcttggcggagaatacctctggcatgactgcagcatcagacgctacaattcatcatccatacgtaagatcgtttgtaagtcaaagaaatgccccgagggtgctgcatgcgtttccactggctgcattggcccttataaaacaggctgcgc

SEQ ID NO: 7625 - DNA, 669 bp, Glycine max
ggaccgaccttttccattttttatttatttgtttgagataaagttgtgccacgtgggagggtgtgagtggacccagagggtgatgttagcagggcgagttgagttcttcgaacacttaagtcggagggactgctgaagacgcaacccaaccaaccatggctgcttctgatcccaacaagttgatggccaaagctgataaacaaacaagactcagtctcacgaggtggagtgcggattggaaaagtgctactgttctatatgagcaggcagctaatgggtttagagttgccaaggactatgagaatgccaaaatagcatatgagaaagcttcgaaaggacaagagatgctttcttcaccttgggatgcagctaagcacatggaatctgctgctgctctagcgaaggatctaagacactggcaagaagttgtggacttctatcgaagggcatctgaattgtatatggagtgtgggagaccccaacctgcatcagacgctcttgcaaagggagcccgtgctctggaagatagtatgtctgaagaagctattcagctatatacagatgcttgtacgattctcgaagatgatggaagagaacaacatggcctttgatctttatcgtgctgccactaatgtttatataaaacttggaaaatatacagatgcagca

SEQ ID NO: 7626 - DNA, 705 bp, Glycine max
cacaattcagtttgtaaccaatgttatcattcatggcttgcacatgcatgattgcaaacctactggaaatgctatggtgagaagctccccaacacattttggttggaggacaatggctgatggagatgctatctccatatttggctcaagccacatttgggttgaccacaactccttgtcacactgtgcggatggccttgtggatgctgtcatgggctcaacagccattactatttccaacaaccacttcacccaccacaatgaggtgattctactaggccacagtgactcttacacaagagacaagctgatgcaagtgaccatcgcatacaaccatttcggagagggacttatccagagaatgccacgttgtagacatggatatttccacgtggtgaacaatgactacactcactgggagatgtatgctattggtggaagtgctaaccccaccatcaacagccagggcaacagatacaatgctcctactaacccttttgccaaggaggtgactaagagagtggaaacagcagaaacccaatggaagggttggaattggaggtcagagggagatttgttactgaatggggcctatttcactccatctggtgctggagcctcagccagctatgctagagcctctagcttaggagcaaaatcttcttcctggttggttcatgacttccatgctggtgcataggttgc

SEQ ID NO: 7627 - DNA, 876 bp, Glycine max
gtggagagagaaatagagagagaggggaaacagatgggttaggctgaaaagggagttggtataacattgttggtttggtttagtttagtttcctcggtagagagggctcttttttttattttggtggtgatggaagtgggaaaattgaatggcaggaactttttcaagaggctgaagcatgtttcagagtggtggcagttgcacaagcaacaagaagagaagaagagtggaaagaaacatagctgggagtgcaaggaatcaacaacccattaggaataagtgcaaagcttcattaaaagctggaagaggaaaatcacaacaggggtctgactctggatcctcacaggaatcatcatcatcatcatcatcttctgcagcaacaacaacaaccacctcatcatcctcatcctcaaaatctgattctaaattcaataagacatgttacagaccaagaaggagaaaaccaagaagaccaagaatctcattctcatcctcaccaattccatatccaattccaacctcttcatcatcaacaagaacaacaacaacaacaatcttacacaggtttagacacggagatcttaaacccactccaaccaccgaagaaacggtcttgcctaccgcctcttccgccgccaccaccgccgccttcgtcgcttgcttcatccgaacatgcaagaaaaatgggagagctacaacaccatcaacaacaggcagcagcagcagcagcaccgtcgagagcggcgatgagaggcgtcggcggcggcgagattgtggaggtgcaaggcggccacattgtccgctccaccggacggaaggaccgccacagcaaagtctgcaccgccaaaggccccagagaccgccgcgtgcggctgg

SEQ ID NO: 7628 - DNA, 463 bp, Glycine max
aagagtttgatgttgcgttgagatggcttacacgctccctacccttccataattgttggtctctttcagtgcctcagtttggtgttttcaacaagttgattggatgggatttgctttgtcttttggttccttgcctgttttggtttcctcttatgactttgctaccccaaataaagaaattcaatggctggggtctgtcttcactggcatcatcttctgtgttgttgtttatagattgactgctattttgagttctctgttgttcaagggatatggcaaattgagtagtgcacagaaaattgaatggaataaccggggattctcaacatttcatgctctgtttgcatcgtttatgtcattttacctcttggtgttatcagatattttcaacaaggattcacatgaagaactcgttattaatagatcatccactttctcaaatttggtactggggatttctata

SEQ ID NO: 7629 - DNA, 1645 bp, Glycine max
  unsure (1)..(1645): unsure at all n locations
caagtcttggcggaataactttactggtaaagcaccattatacaagaacccgagccgagcgattcactaatcattattaacacacacaacacgcacattcgtcccaaaccctaatccccaattttgattccaattccgacgagatcccagggagcatagcagagccctcaaatctaaattccgttcggagagatcctagtctcttcttcatggcgcatcgaggagccacgctgttcttccttctattcgctatctgctattctctcatcgccattgctggaaagagctattacgatatacttcaactgtcgaagggtgcatcggacgagcagataaagagggcgtataggaagctagcattgaagtaccatcctgataagaaccccggcaatgaagaagctaataagaaatttgctgagattagcaatgcgtatgaagtgttgtcggatagcgagaagaggaatatttacgataggtatggtgaggaaggtttgaagcagcatgctgctagtggaggcagaggtggtggaatgaacttccaagatatttttggctctttctttggtgggggacaaatggaagaagaagagaaaattgtaaaaggagatgacgtggttgttgatttggatgcaacacttgaagatttgtacatgggaggtaccttgaaggtttggagggaaaagaatgtactaaagccagcatctgggaaaagacgctgtaactgtagaaatgaggtttatcacaagcaaattgggcctgggatgtttcaacagatgacagagcaggtctgtgagcaatgtcccaacgtcaaatatgtaagggaggggtatttcatcactgttgatattgagaaaggcatgcaagatgggcaggaggtgctattttatgaggacggtgaacccataattgatggagaatctggagatttaaggtttcgtatccgtactgcacctcatgacgtcttcagaagagaaggcaatgacttgcacactactgtcactataactctggttcaagcccttgttggttttgagaagaccattaaacacctagatgagcatctggtggacataagcacaaaggaaatcacaaagccaaagcaggtgaggaagttcaaaggggagggtatgccattgcatatgagcaacaaaaaaggagatctttacgtcacttttgaggttctatttcccacgtctctaagggaggagcagaaaacaaagataaaagcaattcttggttagaatacgcgaacaagataggcgttatttcgctcattatgtcctcaatgtaacatggttaggtggttatagtaaacgcataccttgggcttctcgtccattccccttttttttgttagttgacaaatagatacctttttcccccgttcgtaatgatgcgcatcctgtaactcttgccgtccattgaattcaattgccttcttggcggtgctattttgatacaaggaaaataacactcgctgaaaagaaaaaaaaaaaaaaagggcggccgccgnnnnnnnnnnnnnnnnnnnnnnnnnnnnnnnnnnnnnnnnnnnnnnnnnnnnnnnnnnnnnnnnnnnnnnnnnnnnnnnnnnnnnnnnnnnnnnnnnnnnnnnnnnnnnnnnnnnnnnnnnnnnnnnnnnnnn

SEQ ID NO: 7630 - DNA, 414 bp, Glycine max
ttttcggtttcactttcaggtccgccactgtaaaagcaccacccacaatacaataacccaacccaagcgattcgattccattcaataatcaataacacaacacgcacattcgattcctcgtcccaaaccctattcccctatttcgattcctattccaacgagatcccaagtaacacagcagatccctaaaattaaaattccgtttcggagagatccaagtctcttcatggcgcctcgtggagccacgctgttgttccttctatgcgctctctgctattctctcatcgccattgctggaaagagctattacgatatacttcaactttctaacggtgcgtcggacgatcagattcagagagcgtataggaagctagcattgaagtaccatcctgataagaacccgggcaatgaaga

SEQ ID NO: 7631 - DNA, 784 bp, Glycine max
gaacgttatattcatcagaatcactccaacatttcaaccgaaagaaacctctctctctctctctcccatgcgtttctcaaaaaaccaaagctattagtttagttgcttccttattttcttcgccagagatcgcaggatgtcgtcgccgaggttcccaggtggtggagcctccgatttctacggcggagcaggaggatttcccagtcagttcacggcggttcaacccaccatgaacaaccactccgccaccacaccccgccctctctaccgatcccaaccttcaattctgcttaacccctcgtcccacatcgcccaacaccaaccatcccctctcatcgggaaacgcaccctcgccgaattccaaacccacaacctcaaccagcagcaacaacaacaacgataacccactcctttcaaaccatctacttcgttctgtgaagcccagaactttccagcacacagaattatccacctttccgtcacgtcgttacggcctaccccttctccaccaccttcgccctaacgctgttaacgcacaacaacaacccgttacgaattcgatcctcgccaatacaaattatttgtctccggttcacagcagactaaccgcaacccacgaaccggagaagaacctaatagcccgccgcctccaggagttggaaaagcagcttctagaagacaatgaagacgaacaaggcgacgccgtttcggtcattaccaacaccaccaccacttccgaatggtcacacacaatacaaaacctaatcactccgcagaaacccac

SEQ ID NO: 7632 - DNA, 434 bp, Glycine max
ctttcaaaccatcaacttcgttctgtgaagcccagaactttccagcacacagaattatccacctttccgtcacgtcgttacggcctaccccttctccaccaccttcgccctaacgctgttaacgcacaacaacaacccgttacgaattcgatcctcgccaatacaaattatttgtctccggttcacagcagactaaccgcaacccacgaaccggagaagaacctaatagccctccgtctccaggagttggaaaagcagcttctagaagacaatgaagacgacgccgtttcggtcattaccaccaccacttctgaatggtcacacacaatacaaaacctaatcactccgcagaaacccgcgtcttcgtctcccacttcctctacgacgtcgtctaacacctccgtagaatccagcagttacaaacagtccctaac

SEQ ID NO: 7633 - DNA, 511 bp, Glycine max
ccctcgcgtccgaaaaccattcaatgcatcagctggcatttccctttcaaaacgttaaggtgcccccacaaacacaactaccacctttgctaataaaaaatatctccttttttccattttcattttgaatttcctttcatcttctatatgttattgccattgctacacaaacaatacaaaacaccaccctttaaccgtttgcaacggttgctttgaacgaagggagcagtaacggctatgttataatttctgagtttgtgttgtagagagaagttacgttctgagaggccaagatggattttacttcgttcttgacgtccctggggacttcctttgtgatatttctggttttgatgattgtgtttgcgtttctgtcaagtaggccagggaacaatgtggtgtactaccccaacaggatcttgaaggggttggatccgttggtaggagggtacaagagccgcaaccctttctcttggatcaaggaggctttgacttcttcagaacgtgatgt

SEQ ID NO: 7634 - DNA, 416 bp, Glycine max
ggagcacaagcaatccataacgtaaaggtgccgccggaaacacaactaacacaacctttgctaatgaaaaatatctccttttttcatttgcaacggttgctttgaatgaaggaagcagtaacggctatattataatttgtgaggaggcattgatgtggaagaacaagaacacgtgaaggagtttgtgttgtgttgtagagaggaaaaattagtgagagggcaagatggattttacttcgttcttgacgtccctggggacttcgtttgtgatatttctggttttgatgattgtgtttgcgtttctatcaagtaggcctgggaacaatgtggtgtactaccccaacaggatcttgaaggggttggaaggagggtacaagagccgcaaccctttctcttggatcaaagacgctgtgtct

SEQ ID NO: 7635 - DNA, 760 bp, Glycine max
cacaaacaaacgctgaatctctcgtcgttctttttatttgcggtttcttcttcttctcacgttctacctaacctcgggagactgcgtagcgacccatcagagaagatcgcgatcttctgaaacatgtctggggaagaggaagaaaacgccgcagagctcaaaattggagacgagtttttgaaggcaaagtgcttaatgaactgtgaagttgcattgattcttgagcacaagtatgagcagcttcaacagacatccgatgatcccatgaatcaagtttctcaggtatttgaaaagtcactgcagtatgtgaagcgcttcagccgctataaaaatcccgatgctgttagacaagttcgagaaattctcgccagatatgaattggctgagtttgagttgtgtgtccttggcaacctttgcccagaaactgtggaggaagctattgctatggttccatctatcaagtcaagaggacgggctcaggatgatgaagcaatcgagaaaatgttaaatgacctgtcgttgattaagaaatttgaataaatacgcagagtgtgtgatatagtgttgttggtaccgtataacatatcacttgactgcaagcatacattcatgtggtttgtattacagaaaacccttggtaattatatttagtagtttattttgtgacagttatcaataaggattttgacacatggtgctggtgtatgttatgataattatgcgaatgtgatagcaatctggactcagatgctaatcgcag

SEQ ID NO: 7636 - DNA, 826 bp, Glycine max
ttgattcggagaacgcaatacactgtcctcctccaacgcagcattttaataccagacactaaacacacaaacgctgaatctctcgttcgattcttggcattccacttctcgccctcgttctttttttgcgttttcttcttcttcttcttcttcttcttcttcttcttctcactttttacctaagattttgtggaacatgtccggggaagaggaagaaaacgccgcagagctcaaaattggagacgagtttttgaaggcaaagtgcttaatgaactgggaagtttcattgattcttgagcacaagtatgagcagctccaacagacatccgatgatcccatgaatcaaatttctcaggtattcgaaaagccactgcagtatgtgaaacgtttcagtcgctataaaaatcctgatgctgtcagacaagttcgagaaattctcgccagatatgaattggctgagtttgagttgtgtgtccttggcaacctttgcccagaaactgtggaggaagctattgctatggttccatctatcaagtcaagaggacgggctcaggatgatgaagcaatcgagaaaatgttaaatgacctgtcgttgattaagaaatttgaaataaatacgtcaaagtgtgtgatataactgacatatcacttaactgcaagcaaacattcttgtggtttgtattacaaaaacgcttggtaattatatttagttcattttgtgactgttatcgagtaggattttgacacatgcgaactggtgtatgaaagtgcttttgacctgttatgatgattatgaaaatgtgattattgtcttactataaccaaa

SEQ ID NO: 7637 - DNA, 412 bp, Glycine max
ggcggagagtgcaatacttatagtctccctgtcctgaaacgcagagcattcaacatctcgcaaaactattcaaaaccagacacacacacaaacaaacgctgaatctctcgtcgttctttttatttgcggtttcttcttcttctcacgttctacctaacattttctaaaacatgtctggggaagaggaagaaaacgccgcagagctcaaaattggagacgagtttttgaaggcaaagtgcttaatgaactgtgaagtttcattgattcttgagcacaagtatgagcagcttcaacagacatccgatgatcccatgaatcaagtttctcaggtatttgaaaagtcactgcagtatgtgaagcgtttcagccgctataaaaatcctgatgctgttagacaagttcgagaaattct

SEQ ID NO: 7638 - DNA, 1658 bp, Glycine max
catcttcactcttaactgtagaaaagaaaaaccgaagatgagcttgttgaatgaggagagaaaaccgcacgctgtggttactccatatccagttcaaggacatgtgaaccctttgtttaaactagcgaagctgcttcatctcagaggctttcacataacctttgttcacactgagtacaactacaagcgtttgctcaagtcaaggggtcctaatgcccttgatggcctaccagattttagatttgagagcatcccagatggtcttccgccattggatgatgataatgttactcagcacgttccctctctctgtgactctatcagaaaaaacttcctcaaacccttttgcaaacttgttcatagacttaaccactcttctgccactgagggtctcatacccccagttacttgtttggtctctgacggttgcatgccttttactatacaagctgctcaagagcttggactccctaactttatcttttggcctgctagtgcctgttctttcttgtctatcatcaactttcccactctggttgagaaaggtcttacaccactcaaagatgagagttatctgacaaatgggtatttggactccaaagtggactggattcctggaatgaagaacttccggctgaaggacatacctgacttcataaggacaacggatctaaatgatgtgatgttgcaatttctcattgaagttgcaaatagaattcaaagaaacactactattcttttcaacacttttgatggacttgagagtgatgtaatgaatgctctatcctctatgttcccttctctttatcccattggtcctttccctttacttttaaatcaaagtccacaaagccacttgacatctttaggttccaatctttggaatgaagatctagagtgtcttgaatggctagaatctaaggaatctcgatccgttgtttatgtgaattttggcagcatcactgttatgtctgcagaacaactcttggagtttgcttggggtttggccaatagcaagaaaccctttttgtggatcattaggcctgaccttgtcattggtggatccgtgattttgtcgtctgagtttgtcagtgaaacaagagacagaagcctaatagcaagttggtgtccacaggaacaagtgctaaaccatccttcaattggtgtattcttgactcattgtggatggaactcaactactgaaagtgtttgtgctggagtgccaatgttgtgttggccattttttgcagaacagccaacaaactgtagatacatttgcaatgagtgggaaattgggatggaaattgataccagtgcgaagagagaggaggtggagaagctagtgaatgaattgatggtgggagagaagggaaagaagatgagagaaaaggtcatggagttaaagaggaaggcagaggaggtcaccaagcctggtggttgttcatacatgaacttggacaaagtaattaaggaggtgttgcttaattagacactgttagattgaagggttttctttttttctttttcttaatgctttaatttatcatgatagttcattgatcttctctagaattttctgcattgtagaaatggtgccctggaagtgccactttgtgttttgtttattgtggtatgtaatatcttagtcttgatatttc

SEQ ID NO: 7639 - DNA, 511 bp, Glycine max
tacaaatcgaatctaactttagcagttgaaaatgctgaaaatttagcagtgttgtgaaattagtaaaaaaaaaaaaacggagaagccgaaagagaaacctccggtgagacgatcgatggcggaagagaggtggttctggctttggagagtttgctgagctctgaaatcgaaatcgctaatcaccgaagagagcatcgaagacaagcctttcgccagcacgtcggagctctgccggaggtgatcgtcgccgtcggaaccgtgggaactcgaaggctccgtcgtttcgactacgacgctgtcgttttccgctgcttccattgtcgtttggttcagttcggtgcgcagaaggaagtgatgctgtgactgagaaaaatcgttcatgtccttaacaaccaaattgaacgggttaattttgggatattactaaatggcacccacgtgagtagtaccaatagcaacacacttgttattttttgtctttcgaaccctttctgctcccattcgatccttt

SEQ ID NO: 7640 - DNA, 376 bp, Glycine max
ggagtctgcgactgagaagtgcgacgctgctgcaaagtgcaagcggatttggtcttcttctttactcccaatcatttctctgtgcaaggataagtgtgttatctatctaaaaacacaagatgtcagctgggcctggacttgaatctctagtagatcagacaatttcagtcattacaaatgatggacgaaatatagtgggagtcctgaaaggttttgaccaggcaacaaatattattcttgatgagtcccatgaacgggtttattctacaaaggaaggtgtgcaacaacttgttcttggtttgtacatcatcaggggtgacaatataagtgttgttggtgaactggatgaaaaactagattccaatcaggatttgtc

SEQ ID NO: 7641 - DNA, 395 bp, Glycine max
  unsure (1)..(395): unsure at all n locations
ggagtctgcgactgagaagtgcgacgctgctgcaaagtgcaagcggatttggtcttcttctttactcccaatcagttctctgtaatctcctatctcattgtcgtagcgaatttcaagtgcgaggatacgtgtgttatctatctaaacacgacaagatgtcagctgggcctggacttgaagcgctagtagatgagagaggttgagtcattgcaaatgatggacgaaatatagtgggagtcgtgaaaggttttgaccagggagcaaatagtagtcggtgggcagtcccatgaacgggtttattcgacaaaggaaggtgtgcaacaacttgttcttgggttgtagatgatcangggtgacaatatgagtgttgttggtgaactggagtaagaactaga

SEQ ID NO: 7642 - DNA, 1109 bp, Glycine max
cggaatcggctcgaagaaatctcgcgggccaaaaaagatgtgtaattgagacagaagaccaaaaaggatgtgtcattgagacagaagaagaagaagaaattggagggggtgtgtgatcgggtcctcaggtgaagatctgaggctgttggtgtctcttttcttttctccgagttccaaagatgagcgcttctaggttcatcaagtgcgtcactgttggggatggtgctgtgggcaaaacctgtttgcttatttcctacaccagcaacacttttcccaccgattatgtgccgactgtttttgacaatttcagcgcaaatgtggttgtcaatgggagcattgtgaatctgggtttgtgggatactgctggacaagaggattataacagattaagacctttgagttaccgtggtgccgatgttttcatactggctttctctctcataagcaaggccagttatgaaaatgtctctaaaaagtggattccggagttgaagcattatgctcctggtgtccccattattctggttggcacaaagcttgaccttcgggatgataagcagttctgcattgaccatcctggtgccgtacctattaccacagctcatggagaagagcttaggaagctgattaatgcgccagcttacattgaatgcagttcaaaaacacaggagaacgtgaaggcagtctttgatgcagccataagagttgtccttcaaccacctaagcagaagaaaaagaagggtaaagcacaaaaggcctgttcgatattgtgattcactaggtgttaacatttgactgccctttgttctccctgtattaccctccccttctttatttttatcatttccttgctattgaagaagttgtagtttatgtgggtgttcctcagacaaatactctagatctccttgaagcataaggtgggttaatgctttgctttctttgaattattgtcaactctaatagtcaaatttgcatttcatggttcccacctttttttcctataactttcgttttgatttatgtattaatagactggaatatcccagttaggataacgaccttgtttgcttgaagatatatattggaattatattatttttcaattc

SEQ ID NO: 7643 - DNA, 484 bp, Glycine max
ctcctctcacagtcacagggtctgtttgttagggtttccttttttttccatttcccccctttctcccacactatctctttccgcattttcccaattagggtttgttctttctttcgcttgttacccattctctcttccttcttcttctgttcttcattcattcattattattgttattttgtggcgcagatgtgtcattgagacagaagaagaagaagaaattggagggggtgtgtgatcgggtcctcaggtgaagatctgaggctgttggtgtctcttttcttttctccgagttccaaagatgagcgcttctacgttcatcaagtgcgtcactgttggggatggtgctgtgggcaaaacctgtttgcttatttcctacaccagcaacacttttcccaccgattatgtgccgactgtttttgacaatttcagcgcaaatgtggttgtcaatgggagcattgtgaatctgggtttgtgggatact

SEQ ID NO: 7644 - DNA, 277 bp, Glycine max
gccttctcctctcacagtcacagggtctgtttgttagggtttcctttttttccatttcccccctttctcccacactatctctttcctcattttcccaattaggatgtgtcattgagacagaagaagaagaagaaattggagggggtgtgtgatcgggtcctcaggtgaagatctgaggctgttggtgtctcttttcttttctccgagttccaaagatgagcgcttctaggttcatcaagtgcgtcactgttggggatagtgctgtgggcaaaacctg

SEQ ID NO: 7645 - DNA, 423 bp, Glycine max
cgtttttcctctacggcgtttctcatgtccagcttctgtgcggctttctctgtgggtgaagcgagttttggcgatggagaaaggaggaaagggcgcttcgctgttcagcaaagggggactaggatcccaaaaagggaaagatgacagtgcaacaaaatcagcaaagaagaggatggttcagttttcttctgatggtccatcatttgaatctggagtaagcagtagttcactcccttcacaaaaatctggtggaaaaggtaagaatgtattcccaaagttcttattgtgttcatcagtttggtaacattgcatttgagcgcatcttgattacaatctttaaattgattgctcataattttcttgctttcttagtcaagttactttttactggactgcttgttttttttcatggtgattttattg

SEQ ID NO: 7646 - DNA, 465 bp, Glycine max
agggaaaatcccaatttcctcctcctccgttttcccccaacggcgtttctcttctccagcttctgtgggtgaagcgagttttggcgatggagaaaggaggaaagggcgcttcgctgttcagcaaagggggactaggatccctaaaagggaaagatgacattgcaacaaaatcagcaaagggaaggagggttcagttttctactgatggtccattatttgaatctggagtaagtagtaactcagccacttcactaaaatctggtggaaaaggaggaatgggagacaatgttgcaaaaggtggaaagaattctcagtcaaaagactcccatccatcagattacagagttgatcaaaagcttccagaaaatatcaaatgcctgatggactgtgaggctgtggatattttacaaggaattcaagagcggatggtcatgttatctagagattcaactgtcaaaatgccta

SEQ ID NO: 7647 - DNA, 350 bp, Glycine max
ggttccggtgttttagcaaaatcaaaatgtgggcaagcgccgcagaaggtggtgctccggaggtgactctggaaacttccatgggttctttcacctttgagctgtactacaagcatgcgccgaggacttgtaggaacttcattgaactgtctcgccgaggttactacgacaacgttaaattccataggatcattaaggacttcatagtacaaggtggggatcccactggaacaggaagaggaggagaatccatatatggtgcaaagtttgaagatgagattaaaccagagttgaagcacactggagctggaatcttatccatggcaaatgctggcccaaacaccaatggt

SEQ ID NO: 7648 - DNA, 711 bp, Glycine max
aattcccggtcgactcgacgcgtgcgaaaatgttgaggaaggaggagtggaggggaacggatctgctgggtgggactagataaagtgaagcaagctgacaagactaagggaagattggatggtggaaatggaatcggcagctgaaaaccctaattacccggcggtggactacaagcgaccttccatcttgtcatttcctcggaggcccgccctcagagttacatccgagttcgatagtgaaagcgcagtcttcttccataagatttcctgcaagttgttggacagccttgccaagttcaagttttcgttcaaccacagcggtaagggcggcgacatctccgaacctcaattcagctttgtctccaagcaccttagcctccactacgacctcgaagaccataatgctctcgttaagacctccatcgatcttgctcccagtttgcaactcactgcttctcatgatctcaaggctcaacaaggagaggttaccgtgcttgcaaacctcgccgatcctgcctattcacttcaactatctactccacttccatccgttggattgccaaaagctaccttcagatttcctctggggaactttcgctgcaggagaaacaagaggaggaagtcaataatttgttgtcagtcgatggggttcttaaaggacaattgtttaatgggctctgctctgcccattacaaggacgaagaactgaaa

SEQ ID NO: 7649 - DNA, 702 bp, Glycine max
tgacactatacagagcatagcgtgactgcacagcgcacgcgtaggtcagctcggagttcgaggaagagggatagtcttggtgaagaagttgtgaaaccatatactcctacaacattggatactgatgttggatactttgaattggttgtgaagatgtatccacaaggacggatgtctcatcactttagggagatacgtgaaggtgattacatggctgtgaagggaccaaagggacgttttaagtaccagcccaaccaagtaagagctttgggtatgattgctggtggcactggcatcaccccaatgtttcaagttacaagagctatattagaaaaccaacaggacaaaaccaacataaatttgatatatgccaatgtcacatttgatgacattcttttgaaggaagagctggatgcctttgccattaagttccctaatcaattcaaagtttactatgttctaaatcagccaccagaaatatgggacggtggtgttggattcgtcactaaggaaatgatccaaacagatttccctgcaccagcatcagatattaagatattaaggtgtggaccacctcccatgaacaaggctatggctgctaatcttgaagctcttggatacagtccccaaatgcagtttcagttttaagtcttgaataaagctcatctatattaaattttttaaaatacacacagcattcga

SEQ ID NO: 7650 - DNA, 477 bp, Glycine max
ggcacgcaagcagactagcaacttgtattgttgctacaaggcatataaattttcagcattgcaagttgcaaccattttgaccaaaaaccaataataagctttcgaccaaaagaagaaagaagaacccatttatcatcgttggaaaaaatcccagatctcaaaaaatggaattttcgcagagtcacagggtagagatgataagcatggcagttgctcttgttgccattgttggtggcaccgcttactattactacgtcaccaagaagccaaaagggtgcttggatcctgagaacttcaaagaatttaaacttgttaaacgcactcaactcagccataatgttgccacgttccgatttgatcttcctactcctaagtcagtgttgggacttcctattggacaacatatcagctgcagagggaaggatagtcttggtgaagaagttgtgaaaccatatactcctacaacattggatactg

SEQ ID NO: 7651 - DNA, 710 bp, Glycine max
  unsure (1)..(710): unsure at all n locations
gacaacaacaccagaatcatgtaaggaaccgcatctatgtttcatgcaacaaaaaaaaacaactacacacaccaaggtttcaaatttttcttctttttttattttgtttgccaacttcaagaagcaacaattaggacaccgaatcaagccattctcattgcactccaaacacctcttcaacaccccttcatcctcatcaaacaccttcctactcccactgcagttcccacacggcacaaacctcacatcaccacaactctcacaaacgaacccacccttcgttctgggcaacccttccagaaccttctccagctcccccacctcccacatgtgcttgatgacgtcagcaccccccacgtgccgcccccttataaaaacctgcggaagcgccacgtgtcccttctttttgttgttgttattgttattctctccaaacaacgcgctcatcaactccttacggtaattcgcgtccatcgaaatgtcgcgctcgtcaacccaaaccctaaatccccgaaatatcatccgcaccgcgtagcaatcttcgtaggttcttcgaattccacgcaagctagtgaagtacaacacgatccgatcctcggttcccggtaatcggatcgccggcgaatcgagcgatttcgacgcggaatcggagtttgagttttcgattaatttcgagggtttgagccttgngatattgttgtttttccgga

SEQ ID NO: 7652 - DNA, 636 bp, Glycine max
cagtctagagtgactggggctaagtattcataccagtggatggccttggcccagcagaacaactggcatgtcttgctggatgctggatcattgggccccaaggacatggattcccttggcttgtccctatttcggccagattttatagtcacatcattttacagggtttttgggtatgatcccacaggttttggttgtcttcttatcaagaaatctgtgatgcaaagccttcaaaatcagtctggttgtactggatctggaatggtgaagattacccccgagtttcctatgtatttgagtgattctgtagatggtttggataaatttgttgggattgaagacgacgatgaaatcactgggatgggtgataagacgtctgaaactcgtcagggaacacagttgcctgccttttctggtgcattcacatctgcacaggtcagagatgtgtttgacaccgaaatggatcaagacagctctgaaagagatggaactagcaccatatttgaggagactgagagcatatctgttggtgaggtgataaagagtcccatctttcagtgaggatgagtcatcggacaactcattttggattgatttgggtcaaagtcctttgggatctgacagtgctggtcaatc

SEQ ID NO: 7653 - DNA, 1857 bp, Glycine max
ctccattcatttcatcaattcactttccttagtttcttgcagcttcacactgtgccactgctccgttttagggttgtttcaacaatggcgctgttccttctctacgaatccgcttcgggctacaccctgttcgaggttcacggcctcgacgaaatcggccagaacaccgaagcggttcggaactccgtttcggacctcaacaggttcggcaaagtcgttaagcttcgctccttcaaccctttcacttccgctctcgatgctctcaaacagtgcaacgccgtctccgaaggcatattaactgatgagctgagaacggttttggagactaacttgcctaaagtgaaggaaggtaagaagtccaagttcagtttaggtgtgtccgatcctaagattggttcccagatatctgaagtgactaagattccttgccaaagtaatgagtttgtgagtgaacttcttcgcggtgtgcggttccattttgatacgtttgtcggtgatctcaagtctggagatttagaaaaggcacaacttggtctggggcatagttacagcagagcaaaggtgaagtttaatgttaaccgtgttgacaacatggttattcaagctatcttccttcttgatacacttgacaaggatgttaattcgttctccatgagagtcagagagtggtattcatggcactttcctgagctggtgaaaattgtaaatgataattatctgtatgccaaagttgcaaaatttattgaggataaggcaaagttggctgaagacaagattccagccttaactgacatagttggagatgaagataaagcaaaggagattgtggaagctgccaaagcctccatgggacaggatttgtccccagtggacttaatcaatgtccatcaatttgcacagagggtaatggacctatctgagtacagaaagaacttatatgattacctggttgctaaaatgaatgatattgcaccaaatttggccactttaattggtgaagttgttggtgctcgtttgatttcccatgctggtagcctcacaaatttggcaaagtgcccctcttcaactcttcaaattcttggtgcggagaaggctttgttcagggcattaaaaacaagaggaaacactcccaaatatggtttgatattccactcttcttttattggtcgggcatctgccaaaaataagggtagaatggctcgttatcttgcaaacaaatgctcaattgcatcacggattgactgcttttctgaaaagggtactactgtttttgggcagaaactccgtgagcaagttgaggaacgacttgacttttatgacaagggagttgcccctcgcaagaacatagatgtcatgcaggctgctattgaaagtgctgaaaacaaagatacagagatggaaacagaagcacctgctgaagtttcaggcaagaaaaccaaaaagaagaaacaaaaagctgctgatgctgaagatgacgtggctatagacccaaatggtgatgctgtggaggatcataaatcagagaagaagaaaaagaaagaaaagaggaaattggaacaggagatggaggtcgacgatcaggctgaagatgatggtgctaatggggtcacaagtgaacaagaaggaacagtgaaaaagaagaagaataaaaaggatagtaacggagaagctttggaggctggtggagagtctaagaagaagaaaaagaaatcaaaaaagaaggatacggagtaaactatgatgtattgcagctttaactgttgaaatcgaatcttttatgttatagttttggacaatgttaaatttgctttgtactttaccagttgctgcaccagtataaacttcatgttgacttac

SEQ ID NO: 7654 - DNA, 523 bp, Glycine max
gggttccgggggggggtaccgagtaggccgctgcaagtgccattttattttgctctacctcctcacttctagggttcgcagcttgtctctcaaacaatggcgctgttccttctctacgaatccgcttcgggctacaccctgttcgaggttcacggcctcgacgaaatcggccagaacaccgaagcggttcggaactccgtttcggacctcaacaggttcggcaaagtcgttaagcttcgctccttcaaccctttcacttccgctctcgatgctctcaaacagtgcaacgccgtctccgaaggcatattaactgatgagctgaggactgtcttggagaccaacttgcctaaagtgaaggaaggtaagaagtccaagttcagtttaggtgtgtccgatcctaagattggttcccagatatctgaagtgactaagattccttgccaaagtaacgagtttgtgagtgaacttcttcgcggtgtgcggttccattttgatacgtttgtcggtgatcttaagtctggag

SEQ ID NO: 7655 - DNA, 509 bp, Glycine max
ggctcgagttttatcggtcgagcatctgtcaaaaataagggccgaatagctcgctatcttgctaacaaatgttcaaatgcttcacggattgactgcttttctgaaaggggtactactacttttggggagaaactccgtgagcaagttgaggagcgacttgttttttatgacaagggagttgcccctcgtaagaacatagatgtcatgaagtctgctattgaaagtgttgaaaccgaatatacagcgatggaaacagaagcaccagttgaagtttcaggcaagaaagccaagaagaagaagcctaaagcttccgttacagatgatggtgataatatggctgtagataagatcacagagactacaaatggtgatgcattggaggatcataagtcagaaaagaagaagaaaaagaaggaaaagaggaaattggacttggaggtggaacttaacgatcaagccatggatggtggtgctaatgggcctgaaagcgaacaagatggagcagttaa

SEQ ID NO: 7656 - DNA, 967 bp, Glycine max
caattctcttcacacaaacaccttatcagactctctctgactttcctcgaacacaacacacaacaacatagttagccttagaagtttaaaccttagcagcgtcgacaatggccggcgaggagctcgccggagaccacacgccggagctgctgtgtctggtccatgacatcgccggaatgtgctcggcgttatcctcctccgccggctccgccggcgccatgttccgcaaggactgcaccgatctggttcgccggatctccctcctcacccacctcttcgaggagattaaggaactcagcaacaacgttgtcggtggttcttcttcttctccttctccttcttcctcggcttcttcaaagtggtcttctgatctggtcctcgcgcttcactccgcaagacgcttgctttccgtcgctagaaacttccgctccaattgctcctctgatggagctgcaaagaccattgtcttccaatttcagtgtgtgacatggaaattggagaaactgttgagcaatttgccatatgacgatttggacatctcggaggaagtcaaggagcaggtggatttggtgagaacacaattgagacgggccacggataaatatgggtttatgatttcaaagatgccatctcatgaattatcccagccactggctgaagaaattagtcaggttcttggcaaatctgtgagtaggttgcacaaacaacacagctgccctgaaaatttatcagaactagacagcattcctatcaactatgaagggaaatgctgcagcacaaatcctgccagatctcgcttggaaagaacaaggagcatccctactgaagttgaagtttccttaaatgcaactgaacctgaaagtcaagaaatttctgagacaaagagtctacctgagggttaaaaaccgtgggggttttgtccccccagaagattttctttgccctatatccttggaactaatgaggg

SEQ ID NO: 7657 - DNA, 490 bp, Glycine max
ttcggctcgagctccgtattgttataaccctagctcggaagaactaccatctctcgtccattgtctgcgtctcactcatcctcaactcttcctctcttttcttccaaacccgaatctggattctcctctctcccgatttcaattctcacggtcttcaccgatcgccagatctctaagcaccgctcttgttttcatcgattaaataacaaacaaaaattggctcaattttattttaacatcctaaccaaaaacaaacttttcacccgattttaacattcgagagtaaatttagtttacttgttgatttttttttttgtttgttttgattaagtttctgtttctatttaaatcgataaacggcgaggtcgagcgttagaattcgaatttcggagaaaaaaagttacaggtattattaggggaatcgcgtggaagcgttgaggagagtgtttgatctgaggaaggaaaaaaatggtgggaggtggaaacagga

SEQ ID NO: 7658 - DNA, 453 bp, Glycine max
tatcgagccgattcggctcgagcttcgtttcgttataaccctagctgggaacaaataccatctctcgtccattgtctgcgtctcactcatcctctcccttctcttacattgttcatttctcaactctttctctcttttcttccaaaccctaatctggattagcctctcatcggatttcaattctcacggtcttcaccgaccgccagatctcttagcaccgctcttcttttcatcgattaaataacaaaaaattggcttaattttattctaacatcctaagcaaaaactaacgttttcacccgattttaacattcgagagaagagttagtttattttattgtatttttttattaagttactgtttctatttaaatcgataaacggcgaggtcgagcgttagaattcgaaatccggagaaaaaaaattacaggtattattatcaggggaatcgcg

SEQ ID NO: 7659 - DNA, 1252 bp, Glycine max
  unsure (1)..(1252): unsure at all n locations
ggtgagcgttatcgtggagttcaacttcgagggtttccttcacaactctgtaatttctaattccacagttactcttgtgatttagcgagattcggagtgagtgatggctgcgaaggaagagaatcgaatatttgttggaggtttatcctgggacgttacggagcgtcaactcgagcatgcctttgctcgttacggcaaaattctcgaatgccagatcatgatggaaagggatacaggccgtccacgtggatttgggtttatcacatttgcagaccgtaggggaatggaggatgcaatcaaggaaatgcatggacgggaaattggtgatcgtatcatctcagtcaacaaagcacagcccaagatggggggtgatgatgcagaccaaggttacagaggtggctactcatcaggtggtaggggaagctatggtgctggagatagggtaggacaggatgactgcttcaaatgtgggcgtccagggcattgggcccgagattgtcctttggcaggaggtggtcgtggtcggggtggtagttcatttccttcacgtcctaggtttggagctgctggtggacatggggatcgcctgggtggtgaacgtgatcgatacgttgatgatcggtatgagggaggacgttatggagatagggatcgttttgacaaccgtgactacaaatatggcagccgtgatcgctatgctagtgacaggtatccaaccagtggagatcgattcgcaagtgatcgatatggcggtggctcagattacccgcaaaatggttatggcaaggaaagagggtatgaccggtacggtggtccacgaggaggtgctgataggtatggaagtggaatgggaggtcgagatgaaggaaggagttataggggtagacctggtccatatgaccgcccaagcaggggttctcgttcatcacttgatcgctactgatttctactgctgatgtttttaacgggaaatccaaatgcagaagccacattagagacctagttcttgttcttgttacgtaggacatcctgtttgggacaactgctactgctagattgtagtttcatagattgtggatttcgtagtttgtttccttatttatagatcgtgccaatccctgttgattttccccctcctttgcctgacgctttgactaacttccctaatgcaagtaagcatgatttaccgctgcattccgcacaanaaaaaaacttttttttccttttaataaaagttttaaccctaaatata

SEQ ID NO: 7660 - DNA, 709 bp, Glycine max
aggtagttcggctcttctggatctctgtcgcgacatagcgaagacgacgacgctctcttcgccccgaagatgactagcaaagggttgctgagaggagcttcgttaactgcaaacgcagtttggcatagaagcagtttcttcccaaaggtaacggttagcgtccaccccaagttggtgaaatttcagagcttctcatcaaccaccgcttgctcctctcttccacccccggatttgcctcgtttggcaaaaactgctcaaatttcacttaccccaaacgaggttgaagaaattgctcccaaaattcaacaagttatagaatggtttggacagctgcagggtattgatcttgaaagtgttgaaccctcgatcagagcagagactgaaaacaatttgcgtggtaatgctcctgaaacatttgaccatagggacgccttgatcgcttctgtcccgagctatgaggagccttatattaaagtgccgagggtcttaagcctggactaaaggtaaaattgcttagatgagctatttggtataaggaaaaatatattcagactattatgtgttggactttgaacgctgaatctctttggttctttgcgaccctgctcttaattttgcatctttaggagggacacaaagctaatgcagggcggccgatctaaacgatccacgcttacttacgtgtgcatggataaggatacctcttcta

SEQ ID NO: 7661 - DNA, 417 bp, Glycine max
ggtagcaaagggttgctgagaggagcttcgttaactgcaaacgcagtgtggcatagaagcagtttcttcccaaaggtaacggttagcgtccaccgcaagttggtgaaatttcgaagcttctcattaaccaccacttgctcctctcttccacctccggatttgccgcgtttggcaaaaacggctcaaatttcacttaccccaaacgaggttgaagaaattgctcccaaaattcaacaagttatagaatggtttggacagcttcagggtgttgatcttgaaagtgttgaaccctcgatcagagcagctgagaatgcgtggttagtgtggttgttttatgccaatccgtttccagaggcacattaaatgtcaatcccatgctcgctcatggattattagcattcaatgtgagcaaacaaa

SEQ ID NO: 7662 - DNA, 451 bp, Glycine max
  unsure (1)..(451): unsure at all n locations
tgcttcgttaactgcaaacgcagtttggcatagatgcagtttcttcccagaggtaacggttggcgtccaccccaagttggtgaaatgtcacagcttctcatcaaccaccgcttgctcctctcttccacccccggatttgcctcgtttggcaaaaactgctcaaatttcacttaccccaaacgaggttgaagaaattgctcccaaaattcaacaagttatagaatgattgtttttgcagtgagccaaacttttgaatttggattgaactgtcttgtgtggcaggtttggacagctgcaaggtattgatcttgaaagtgttgaaccctcgatcagagcagagactgaaaacaatntgcgtggtaatgctcctgaaacatttgaccatagggacgccttgatcgcttctgtcccgagctatgaggagccttatattaaagttccgagggtctta

SEQ ID NO: 7663 - DNA, 487 bp, Glycine max
ggttggcctaattgggtcagtcccaaacctgtctgaacgcaaaaccctagcgcttgatgtaatattgcatcgcactgcactgaattggattgggtttgcagcagaagcagcgaaggatatggcgattcttccttctcttgcagttccttcaactcccatttctcgggtaaagctgtttcaatgccaaccctgtcaattccatagatgcacagaactatatcttcctcatcaaacatattatactcgaactacatcaattaaagtatcaatggcagaccaaaatgagccgagtgaggttaatatgcagattgggatcatgagggagaaacttaaagaaacactgccagtctcagttcaagaatttccttggaaaaaagctgagcatatactcctagacagactacttaatcttgcacaagagacagtgaagtggtctcttggactgagtttcatctttagctctgtatctgacgttgtatatacattc

SEQ ID NO: 7664 - DNA, 459 bp, Glycine max
  unsure (1)..(459): unsure at all n locations
gacattttcttcgttgagcagaaagctaaaggctaaagcctagaaccttcttcctttacacctcgctggaaccagcgatggatcctcagcctgagccagtcagctacatatgcggagattgtggaatggagaatacgctgaagcccggtgacgttatacagtgccgtgagtgcggttaccgtattctttacaagaagcgcactcgtcgcattgtccagtacgaggcacgctgaagaaaactgctataacgtttgcaagtaatttccatgaagaaattgttactacatctgtgttgtgtatattgaagaactacttttaattctacagtaccattgcttttgggtgatgtttagaaaaggataaaaactttgaaatgtgaatatgttacaaatatttgtgtttcattagtttgcaattttatcactacgacggttnnnnnnnnnnnnnnnnnnnnnnnnn

SEQ ID NO: 7665 - DNA, 416 bp, Glycine max
ggtgtgaaattgagttggttgcatttcactttcaattgctccaaatttctattgtaccaagcaaatttaacatagtttttttttttccaaatttttagcctccctagtttctatcttttcatttgctttgcgactaaatcaagcacatccttaattttctcattcccttttgtcaaatattaaaaaggatggcatgctgttgcttcatggacttgggatgcccaggatgagacctgtgggatttgtaggatggcctttgatggatgttgtcctgactggtaacttcctggagatgacttgccattgagtaagctactcttgatgatattattggcgactttcatcggtattatggtttgcaccaaattgtcttgagttatttttcttaactaatcctttatattttgagaattcta

SEQ ID NO: 7666 - DNA, 290 bp, Glycine max
ctcactccttccccatttcaaatcttcgtctccaattcgcgctcacataaaccctaccctcaatttccattcgcaatttttgttgctgctgagcacggaatcggagatgaaagtgaagatcttgcaatggcatgctattgcttcttggacttgggatgcacaggacgaaacgtgtgggatttgtaggatggcctttgatggatgttgtcctgactgtaaacttcctggagacgactgcccgctgatttggggtgtatgcaatcatgcgtttcatacgcatgtatcctgaa

SEQ ID NO: 7667 - DNA, 557 bp, Glycine max
  unsure (1)..(557): unsure at all n locations
cctangctttcgcccacgcgaccgagagacccaggcaagagacaaacaatatctttctctctctgcttggcctggcctcttgctgtaagaagccagccacactattacgcttctgtggaaccatcgaccccactcaatgggcctttgcaagttccacatcggttgagctttgtgtcaggtggcttagtgttatccttaattattcttgtggtcagtatttctcttctttctttcttcttttccaatgagctttgatttgtataactgtataagaatttgcgattcaatatattttttctattgttagctttttaatttcacttgtgacttcattgatttctattattatcatgttttagatttgttttgaagaaactgtgtgtttagattcaatttgaagcttagctagttcaagctttcttaaacgatttactatgcagattgctgaataatcaaactcatatgtgtcctaatttagtttttttcgaggatagcaatctcaattctcaacctctgaaatttgtcttcaacttattctgaatactgatctaagcttc

SEQ ID NO: 7668 - DNA, 469 bp, Glycine max
agacgacagaaggggggagagaatagagatccagtcaaaacaatatctttctctctctgtttggtttggcctcttgctgtaagaagccagccacagtactgttgcgctcctgtggaaccatcgatgggctttaacaggttccacatcggttgagctttgtgtcagatatgccaatagtgttatccttattcttgtgatatactagtttgtatgatcatattttctcggattgtctagcaagtttagctcaattggacgttgaacgaattattataaatctattaagattatcttcaatttctacgaaaaaaaaatattttatagaattttgagattatgggtagaagtagaggaaaaggtaaaaagttaactattagcaatgaggaggatgccataagtgaagaagaagaaaaggttcctaagcaaaaaagaagagggaggccacagaaactgtataaggaagactttg

SEQ ID NO: 7669 - DNA, 487 bp, Glycine max
gtgatccagtcaatagacaaacaatatctttctctctctgtttggtttggcctcttgctgtaagaagccagccacactattacgcttctgtggaaccatcgatcccactcaatgggcctttgcaagttccacatcggttgagctttgtgtcaggtggcttagtgttatccttaattattcttgtgacatactagtttgtatgatcatattttctcggattgtttaggaggtctagtttaattgacttgaccaggatggatgaattattataaatcttaaccttcacttcatattgatcgataaaacaaaaatattttctcggattttgagattatgggtagaggaagaggaaagggtaaaaagttaactattagcaatgaggaggatccaataagtggtgaagatgaaaaggttcctaagcaaaaaagaagagggaggccacaaaaactggttaaggatgactctgatgaagaagaaattgaggaaa

SEQ ID NO: 7670 - DNA, 382 bp, Glycine max
gattccattttctaaaatggcaagcaacaccaccatggtagacgagcgtgcaggggcggagatcgtgtatggcgcggaggaatgccaccgcagctccatggagctcctggaagagcttggattccccaaaggggtgatgccattgaaggaccttgtggagtgcggccgggttcgcgaaacggggttcatttggatgaagcagaaggcgccaagccagcacttcttcgaggcaaccaagaccctcgtgagctacgcggcggaggtcaccgcctatgtggaaaagttcaagatgaagaagatgaatggcatcaagagcaagcaagtgttcatttgggtgccaattgctgagatgagcattgatggggacaatgggaaaagatac

SEQ ID NO: 7671 - DNA, 396 bp, Glycine max
gggtcctcacataggaaaagaagcggtgttcgaatttgaggggtgaatggatcaatcgttccttgtaatggtctcgaatctcctccagctccacaactccctggaccccaccagctccctcctctccaacgccgacggcgcatcctccctcctccactcctcctccgtcgcccctctcctcttcttcaccatcgcctccgtcctctccttcgtcgcctccacgcgcccctctccttcctcggactactctgtctctgccttccgcaccctctccacagaacacatctggtccctggaagcccctcttcgccacgcccactggcgcttcctctacggcctctcctaccccgtcttcaacacggtcgtcgacaagctcaggccccacatcgccctctc

SEQ ID NO: 7672 - DNA, 529 bp, Glycine max
gcggtgtaaaagtaacagaggcggatagaaccgaaaaacccaacccgaccccgtgagcgtgcgtgactgtggcagtttctaatccgttctctctctctctctgctacctcttacctagctcgctacctcacgtaatcgttcaccgttcacctttttcttctccaatcgcaaccaaacttctctctctccctctctccctctctctctctcatgttcttgtagcggaaccgttcttgcttctcggagaacatggcctccatctcctccgccgaactcaattacctcgtttatcgctaccttcaagaatcaggtttcacgcatgctgcttttacttttggttatgaagctggtattaacaaatgctccattgatggaaatttggtgccgtcaggtgctcttgttacatttattcagaagggtctacagtactttgagatggaagccaacttgagtaattgtgatgcagacctggaagaagatttttcattcttacaacctttggatcttatcacgaaagatgtgcatgaac

SEQ ID NO: 7673 - DNA, 510 bp, Glycine max
acgctgacttccaaaaagaagacaaaatcctctgcgagagagaaagagagaggcggtgatgtcttcaattagattcctatggatcctgatggtgtctttgacggcatcatgcgcgttaagccaaccgcagaagctatcggcgtacgatgttctgatggagtacgggttcccggtgggtcttcttcccaagggagccatagggtattcgctcaacagagacagcggcgagttcgcagtgtatttccaaggagcgtgcagcttcgacatagagtcctacacgctcaagtacaaatccaccatcacgggtgttatctccaacgggcaggctctataatctcaaaggtgtcaccgtcaaaatcttgctcctttggctcaacatcgtcgaggtctctcgtcaggggaacgatatttacttctccgtcggaatcgcttccgctgattttggcgtcgagaacttcctcgagagcccccaatgtggttgtggcttcgattgcaaaacgctccccttaa

SEQ ID NO: 7674 - DNA, 258 bp, Glycine max
gtctaagagtccagtgtctctatatctatctaccatatatcttccttccaaaatccatcctctgcgagtgagtgtttcgttggagtcagaggcgatgatgtcttcaattagattcctatggatcctggtggtgtgtttgacggcatcatgcgcgctaagccaaccgcagaagctatcagcgtacgatgttctcatggactgcggcttcccggtgggtcttcttccgaagggagccatagggtattcactgaacagaga

SEQ ID NO: 7675 - DNA, 350 bp, Glycine max
gataagtgccataacacataaacagaatggcttccacgtttggcgcatcttcaattaccttcctctcttcacgatacttctcgtcccaggcccttgccaccgattctccctctctaaccacagtgcagatatttgggcgcaagttttgcggcggaggaaatggatttcacagcgtcaagggaaggtctctgttcccggttgcgagtgttcttgccactcaacttaactctgcacaacaggctcagaagattgcttttaccgagagccagaggtcagtgtacccattttcggctatagttggacaggatgaaatgaagctttgccttctcctaaatgtgattgatcccaaa

SEQ ID NO: 7676 - DNA, 416 bp, Glycine max
ggtgatagtcagtcgagttaatcagataaaggatcttgagaaacaggtcaaggatcggaaagattgggctcatgagaaggcacgccacgcggcataaaagctaagcagtgatctgattgagctgaaaaagttcaagatggaaagagaggagaataaaattctgccgaaggagacaggggcagctgaggagctggacaacccaaccatgatgagactctcagaaatggagaatgccttgagaaagactagtggtcaaatggaccaagcaactgcagctgtcagaaaacttgaggcggagaaagctgaaatcaaagcagagttagaggcttctaaattaagtgcatcagagtcagtcacaagctgtttgcaagttgcaaaaagggagaaaaagtgcttaaagaagcttttgacttggg

SEQ ID NO: 7677 - DNA, 1272 bp, Glycine max
gacgtctagaccacgcgtacgtaaactcggaatacggctcgagcaattttctcctccttttgtgcttccaactcttttctttgttatattattctctttcactttctgccaacccttggagtcaacatgactatcctcattgagcaatctgatcactttggggctgaagtagaggcaaagactgaaccaataaatgagagagaactggtgttggatggtggatttctgataacacagaccaactcatttgggcacatgtttagggcttataatgatgctgaaagtgagaggcgtgaaggagtggagaacttctacagaaaaaatcacacttaccaatcagttgatttcgtgaagaaaatgagagaggagtatgcaaaattgaacagggtagagatgagcatatgggaatgttgtgaactccttaatgaagtggtggatgagagtgaccctgacttggatgaacctcagattgaacacttgctccagacagctgaagctataaggagggactaccctgatgaagattggttgcacctaactggccttatccatgatcttggcaaggtgctgaatttgcctagttttggaggacttcctcaatgggctgtagtaggggacatattccctgttggttgcagatttgatgagtccattgttcaccacaagtattttaaggaaaatccagactacaacaatccagcatacaacactaaatatgggatttactcagagagatgtggacttaacaatgtgatgatgtcatggggacacgatgactacatgtatctagtggcaaaggagaatgatactacactgccctctgcggctttgttcattataagataccattcattctatgcattacatccggaaggagcctataagcacctgctgaacgatgaggatgttgagaatctgaaatggctccacattttcaacaaatatgacctttacagcaagagcaaagttcgaattgacgttgaaagggtcaaaccatactatctctccctcattgaaaagtacttccctgcaaagctgaagtggtgaagagttaattggagccatgaagtgccaataatttaccatgatagccaactagttttgtatggagtagagagaattaataagctataaagctgttgttgcattgtggtataagatattcttgtaagttgtatgaaataatatatgcagctataaagtcctatcagaaatatttttccttttaaaaaaaatgtaacaaaacaaaaaaaaatataaaaaaaaatttaa

SEQ ID NO: 7678 - DNA, 388 bp, Glycine max
ggagaaatgaaagtgaagagaggaagcagagtgtgtgactgttccccaatttcctgtgcttagagtgaagaagcatttagaaaaagcaagacacgatgccttcggctcaagatccattctacgttgtcaagcaagaaattcaagaatctattgataagctaaaatccacttttcaccaatgggaaaacactgctgatgttggcgagcgatccagtctatcaaaggaagttcttgctagttgtgaaagcattgcatggcaggtggatgaattggacaaagcaatttctgtggctgctacagatccttcttggcatcgcattgatgaggtggaggttgaaaaccggatgaagtggaccagtgatgctcgcatccaggtgagcaaagcaaa

SEQ ID NO: 7679 - DNA, 547 bp, Glycine max
acgcggccgagcttagtagaagagaaaaggaggagcaggaggcatcaccattgccacaatggttaaaggtcgccaaggagaacgtgtaagactctacgtcaggggttcaattcttggatacaagaggtccaagtcaaatcaatacccaagcacctccctaatccagattgagaatgtaaactctaaggaagaagttgcgtggtactgtgggaagcgcatggcttacatctacaaagcgaaggtaaagaagaacggaagccactatcgctgcatttggggtaaggtcaccaggcctcatggtaacagtggtatagttcgagctaagttcaagtccaatctgccacctaggtcaatgggtgcaagggttagagtattcatgtatccaagcaatatatgagattctcaggattcgtgtgtcgtggggctagtttgtcagagtatttgaaaggaatttgcattttgcgagttaaatttgtgtttttcttagcagggtagtatccttgtttaggatgaagagaatgtaccgcatgttttttctttattctca

SEQ ID NO: 7680 - DNA, 599 bp, Glycine max
attcatatgcatataaaactcaaccgagtccacaagccttacaactgtagaagccgatccagtgtgttggcagcgaaagggtgagacaagaggcttcacctgtaatcagacaattgtggtcaatgcgagagtcataccattacaatgcaagtaaatgaaggacacaacagaccttgctcagacccatttttacagtggagtaaatggcagttgcttgattctcttttacctactggtggatttgctcattcttttggcctcgaagcaacagttcagtcccacttagtgtctaattccaatgaccttaagacatttgttatccatatattggagaatacaggaagcttactccttccttttgtgtactcagcttccatgttacccaatttggaaacttggcataagcttgacaaaatattggatgctaccctaactaatgaagtgggtccaaaggcatcaatctcgcaaggatctgcattaatgagggtggcttcagctggggtttccgagggtccctccctcaaaaccatgagagacccttctctgggtttagagactggatcttttcatcatgctcctgtatttggacttatatgtgg

SEQ ID NO: 7681 - DNA, 324 bp, Glycine max
ataaaactcaaccgagttcacaagccttacaactgtagaagccgatccagtgtgtttgcagcgaaagggtgagacaagaggcttcacctgcttccatggtacccaatttggaaacttggcataagcttgacaaaatattggatgctaccctaactagtgaagtgggtcgaaaggcatcaatctcgcaacggtctgcattaatgagggtggcttcagctgtgttttccgaggttccctccctctaaaccatgagaggacgcttctctgggtttagagactgtatcttttcatcatgctcctgtatttggacttatagtggagcac

SEQ ID NO: 7682 - DNA, 949 bp, Glycine max
gacacaagattgagacacgaaacagaaaatgccaggactcacagcaccttccgattactcccaagaacccccccgccactcttctcttctcatcaacgccaaggaacctttcaatgcggagccaccgcgtgctgcgttggttgcttcctacgtcaccccttccgatttcttctataagaggaaccacggtccaatccccatcgttgagaacatcaacagatattccgtgaacgtgtccggcttggtggagcgtcccaaacagctcttcatgaaagatatatggatgcttccaaagtataatgtcactgccacgttgcagtgtgcaggtaatcgaaggactgctatgagcaagaccaaaacagtgaagggagttggctgggatgtttctgctattggaaatgctatttggggtggagccaaattgtctgatgttcttgaactcattggaattccaaagttgactagtgtcactgaatttggtggaagacatgtggaattcgtaagcattgataagtgcaaggaggaaaatggaggcccatacaaggcttcaataccactcagtcaggccacaaatcctgaagcagatgttctactagcttatgaaatgaatggtgaacctcttaacagggatcatgggtatccattacgtgtggttgttcctggtgtcattggagcccggtctgttaaatggctggaagatatcaatatcattgaagaagaatgtcagggtttcttcatgcaaaaggactacaaaatgtttccaccatcagtgaattgggataatattgattggtctacccggagaccccaaatggatttcccagttcagtgtgttatatgttctcttgaagacgtgagcacaataaagcctgggaaggtaaaaattagtggatatgcagcatcaggaggtggcagaggcattgagagagtagatgtgtctgttgatgga

SEQ ID NO: 7683 - DNA, 911 bp, Glycine max
aggtggaatttcagaacaaccaaataggagagcccaaggtgacatttgaggggaatattgaggaatacaacgaaaatgatgctgtattgttctttgatggtgagacacttcgattggagcggcttcatatggctgttaagcaactgcggcatctacgaatgcctggtgaatctgcaggtgctgcatctacagttgtcgctgctccatctggaccagctttagatccgcgatcatcccctgttgggaagtctgtaaaaccagcacctcttggcaggagctcatttccggctgtgccagttgaagtggtacgcattgatattggtgaacccgagaatactggaatcaaatctggttctaagaggtcatttgatcatctaaatgaactgcccattaatacctcaccagatgctaaaaatgaagtcgaggaacatcaagatatagatattcatgacctttttggcagcgaaacacctgaggatgaccataatgttgaagaaaaagataatgttggatttgacatgaatgttccacacactgatgatgagatcgccgacgtggatgatagtggtgatgaggtggacaaaggacccaatgctgcagaagctctcgaagaccaggtgaatgcactggggagggatgagcagacatctacttctagcagcagtagtggtagtagcagtagtgaaagcggaagtgaaagtggtagtgggagtagcagcaatagtgatagtgaaggcagtgatgaggactcggttcactcaatctgaagttatacaaccgtgatttctttcttttccttttctcattggtcgttactttttgcaaaacaatcaacacatgatgaattgaatgtgtttgtccgtcctggcttagaagaattttataagccatcctcagtgtgctgagggtta

SEQ ID NO: 7684 - DNA, 410 bp, Glycine max
gtcgtcatagcatttctaagccatatccaccattccacctagctccccaatcacatcttcaccacaccataaaccttcttaatttctctcttcattttctcctctattgtcataatcatggggaccttccctcgcttcgacccaatcaccacccaagaccggtccaaccagaccgtggcctccgaccttgacggcaccctcctcgtctcccggagcgccttcccctactacctcctcgttgccctcgaagccggcagcgtcctccgcgccctcctcctcctaacctccgccccctttgtctactttacctacctcgtcctctccgaaaccctcgccatcaagacgttaatcttcataaccttcgcaggtctcaaactaaaagacgtcgagctcgtgtcccgctcggtgct

SEQ ID NO: 7685 - DNA, 1014 bp, Glycine max
  unsure (1)..(1014): unsure at all n locations
agaaaccatacaanagaagaacaccagcgaacggcaggaagcngaaccgggancaaacatcaacgcaaagggctgtaagtgggcatgatggcgatgccaatgaaggacattctgatagtctaatacctgggcagcgcaagagaaggcgacagaaggctgctgctccccccgcacaaactgctggtgaatcaagatataatttgagacgactcaaaactggagcaacaacttcatctgctagagctatgtctggtggtggcaaagaaagtcagggagaggttgatcgtgtaaaagatacagaagagggaattattgactcaaaaacttctcattcacattcagtgggcattactaatgagaatggtgaaagcatacatcttgagcagtctctgaaaggtgtggagacaagggccggttatggtggtgataccacggagacctttgccaacaatatggccttgagtgaggaggtgaatggaacagcagatgatgtggaggagaatgatgctgagtataggagtgaatcccgtggggaagatgctggtggagttgacaatgaggatgatgaagaagattacctgcaacccggtgaagcttcaatagggaagaagctttggaatttttttacaacataacaacacaagcttattgataacaatgaagctgtgtcttgacctcatcaactttagggatgatgtcggaagttatcttgtattaacacaattggaagtagatctctaaattataaccacgaggggtagtacttaggtgaggtgattgagtttctctattttttttttcttgtacgttttcatggatgttttgatggaacctctggtatttgtttatagttttaggcattcgatagtgtagctaaagtttagatattggattttagctacctccccttggaaattgattgaatccaaatgtttgtatctcttctgcttaaaaaaaaaaaaaaaaaaaaaaaaaaaaaagggcgggcggttttagaggatccaagcttacgta

SEQ ID NO: 7686 - DNA, 369 bp, Glycine max
ggacgtgttggtgtgcagagaggcaagagagaagttgaatggaaacggtggtctctcgcgctgtcctcgttctctgcactccgcacccaaccacaactcaccctttcactaaacctaacaaactcctccgttcctccctcagccgcggcgccgcttccttatccgccaccagcaaatgggcggagcgcctcattgccgatttccaattcctcggcgacgccgccgcctccacttccacctccactctcagcccctcctccgtccctccccgcctcgatcctcctgagcgctacgtgtcgatccctctcgacctgtaccgcattctcggcgccgaaccgcacttcctcggcgacggcattcgcaaggcct

SEQ ID NO: 7687 - DNA, 858 bp, Glycine max
tgcaattccactactcataaggcttatattgacgcaaagtgctggcatcttcacctgcaaagcttgtatactatacttgctcatattaccacattagccatggaaacttcttatgacagaatattgctcattgaattccccgaccttctgaagctctctataaatcttgttaataatatatccgcactgatgaaagaggcatgcctcataatttgatattactgccgccacaaaacatttgcctaccacttatgggactgaaatgaagatgactggattacaagatacttctttactggaggaactatgccttcggcaaatctacttctttatttccaagatgatgttactgtcaccaaccattggctagtaaatgggaaacactacgcacagaccagtgaagaatggctcaaaagaatggaccagagaatgactttcatcaagccaattatgcaatcaacatacggcaaggactcagctaccaagtggactgcttattggagaacattcttcatagctgtagcagaactttttggatacaataacggtgaagaatggatggttgcacacttccttttcaaaaagaaataaataagccgaaacctagtctttttatttgactatttgagaacggccttaggacaaaaaagctgctaaacgaggttgcacccttcaataatgttgtatacttttattagttaacttgttttagttggttgcttgtctttatttttccctgttgtaatggtgttgccactccaaccttattttatcttaaattttgggaaagcccaattcaaccctcggaaaaaaaaaaaaaaaaaaaaaaaaaaaaaaaaaaaagcggacgcgtggaaa

SEQ ID NO: 7688 - DNA, 1467 bp, Glycine max
atggaattctgcccaggtggtgacctccatactcttaggcagaagcaaccagggaagcattttcctgagcaggcagtaaaattttatgtggcagaggtcctactggctttggagtatcttcacatgcttgggattgtctaccgtgaccttaagccagaaaatgttcttgttagggatgatggacatattatgctctctgactttgacctctccctccgatgtgctgttagtccgaccctcgttaaaacctcatccacggattccgagcctttaagaaagaattctgcttactgtgtccaacctgcatgtattgagcccccttcctgcatccagccatcctgtgttgctcctactacgtgcttttcaccccggctcttctctagcaaatcaaagaaagaccggaagccgaaaactgaaattggtaaccaagtgagtccgttacctgagctcattgcagagcctacggatgctcggtccatgtcatttgttggaactcacgagtacttggcaccggagatcattaagggtgaaggtcacgggagtgcggttgattggtggactttcgggatctttctatacgagctgttgttcggtaaaacacctttcaagggatccggtaaccgagctacgttgtttaacgtggtcggtcagccactgcgatttccagaagcacccgttgtgagttttgcagcaagggatcttataagagggttgcttgtaaaggaacctcagcacagattggcttacaaaagaggcgctaccgagatcaagcaacaccctttttttgaaggtgtgaattgggcattgatcagatgtgccaccccacccgagatccccaaggctgtagagtttgagaagataccctcaccagcttcatcaagtggtggtgaaaaggctgctaaccatatctcaatagctaatcagaaaggttctgataattatctggagtttgatttcttctagagagagagagagagagggtggagacaatatattgattgcaaatggtttctgttaaagagggggaggaactgtttttcaatgtttcaggaacagatatgatatgatgaggaattgtatgtttgtttttgttggctaatttacagtttcaaatttgtatggcataattaatgcatagcttctctgtcatctcaaaaaaaggcttataaaaacaacatttcaacactgcctgccaatgcactactaggaattccaaccagccaatggtggtgatgatgctcttaaggtcccaatggtattggtaagtatgtaattgtggaaaatggagcacatgggcatcaaacaaaatgaagatttagtatatttttatttgctttgtaaacaagtgtcatgtcatcacaaaaggacttttttccgcttagaaattcaccattgcctgaatgcactgtcatagaatctaaatccaaaaatcaattaaaatgcagaattagtctgtttatgtgtttt

SEQ ID NO: 7689 - DNA, 484 bp, Glycine max
cggtttcagcagatcaacaatttgtggtcttctgtgaatctgtcttgccctttctcccgaattggaattggcatatagataccctttcattaggaaggcttttgcaatgtttacaaagtatgtagggagtctatctatctcgaagaatggaggagttctagtcgtggatttagaaggaaaaccaactgcacattattatgatcccaaattagcattgactagtgcgattaaaattgggaatcatatatatgctggttccattttctacccctttgtaacacgttttgatgttgagaaatatcctgctctccccacagtttgagcaacagtgaacatcttgtaaggttaatgatgtacaagaaaatgtttagtttctggagtgtcatgatgtgaaaatgtttagtttctggagtgtcatgatgtgaaaattccattcatgaatctgttatatatatttttatataataaaaatggaatttctttt

SEQ ID NO: 7690 - DNA, 371 bp, Glycine max
tggaagccaaatggaagattcttcagctataatccagcaacaaagaagacaaccctgcttgcccaagacctctactttgccaatggggttgcagtttcagcagatcaacaatttgtggtcttctgtgaatctgtcttgatgagatgcaataaatatttcgtcctgggccctaaaacaggaaccatagagaagttctgtgacctgcctggcatgcctgataacattcattatgatggacaagggcactatttgattgcaatgttcacggccctttctcccgaattggaattggcatatagataccctttcattacgaaggcttttgcaatgtttacaaagtatgtacggagtctatctatctccaagaatgg

SEQ ID NO: 7691 - DNA, 670 bp, Glycine max
gagactaagctggcacgcctgcatgagctgggaatggagtgagtagtgagaatggagtttcaagggttaccggaaggttgcattgctagtatactctctcgcactacgccggcggacgtgtgtaggttttccgtcgtatcaaagattttccgttcggccgctgaatcggacgctgtgtggaaacgttttctcccttccgattaccattccatcatttcccagtctccttcgcctctcaactatccttccaagaaggagctctatctcgctctctcggatcgccctatcatcatcgatcagggtaaaaagagctttcaattggagaaaaagagtgggaagaagtgttacatgcttgctgctagagctctcagcattatttggggtgacactgagcaatactggaactggacaaccgataccaattccaggttcccggaagttgctgaacttagagatgtgtgttggcttgaaattcgtggggtgctaaacacccttgtcttgtccccaaatactcagtatgcggcttatcttgttttcaagatgattgatgcccgtggatttcataaccgtcctgtggagttatcggtcaatgtctttggtggccatggtagtaccaaaattgtctgtttggatccaaatgaagaacttccacacagaagagtcgagggac

SEQ ID NO: 7692 - DNA, 832 bp, Glycine max
ccacgcgtccaccaagcgttccttacgcttccaaaagaacaacaaaagggaattaatagtgagaatggagtttcaagggttaccggaaggttgcattgctagtatactctctcgcactacgccggcggacgtgtgtaggttttccgtcgtatcaaagattttccgttcggccgctgaatcggacgctgtgtggaaacgttttctcccttccgattaccattccatcatttcccagtctccttcgcctctcaactatccttccaagaaggagctctatctcgctctctcggatcgccctatcatcatcgatcagggtaaaaaggtaggtagcgtgttgtgtgtttcgcatcccttaaaaccttttctgttgatttaatttgacggttaattctctgatgtctggaacgcagagctttcaattggagaaaaagagtgggaagatagtgttacatgcttgctgctagagctctcagcattatttggggtgcctctgagcaattctggttctggtcttccgataccaattccaggtcagtcccttcagcttttccattgtaatttttggatcatggttagtgtatctgcctatcatgatttctgggatattctattttttctgcaacgagataattgcacttatttctgtcatgttcccacccatatctggctagttatctacgaactattctagcagaatttaaattaaaaaaataaaaaaaaacgtcttactgtgtttggatggagtatttcaaaatttcaggaaatttaaaattcaggaaaattaaaatgcatcaattaaatccttgaatttttaaaattccttctttgaata

SEQ ID NO: 7693 - DNA, 402 bp, Glycine max
gatgcgtcgttttgaggaaaagaaatttgagatgcgcaatggcgcaaagaagaaagaccaacgaagttcaaaaccattaattaaccaattctcattcgttggttcattcaattctcgatcccccatctaattagggtttccatgctctcccaaacaagaagcgattaagattagatttttcagcaatgaacaacaccaacccaaccaagaatgctgcaacgccgtcgtttttcaccaaccctggaacaccctccatccccatgaaccaccttctctcccaaacgcagcctcaaccacaaggtgccacgtcacacttccacggccactttcagctttcacaaccccaaacccacgtgctcgcaccacaacaacagccacaccctcatcctcatcctcaagtgc

SEQ ID NO: 7694 - DNA, 632 bp, Glycine max
  unsure (1)..(632): unsure at all n locations
cagcaagtggctttggagcatggcctcatattggtagacactaagtatgagtttgggaaggcaaatgatggttcaattatgttgattgatgaggtccatactcctgattcaagtagatattggattgccaattcttacctggagcgctttcaaaatggtcttgagcctgaaaatattgacaaggagttcttgaggctgtggtttaaaagtcactgcaatccatatgaagatgaggtccttcctgatgctcctgaagatcttgtctgtgaattagcctggcgttacattttcttgtatgagactataacaaaatcaaagtttgaggtgcccttgaccgaggagcctatacatgaccgaatttcacgaaatgttgcatctgcactgtcatccttaaagtagcctgggaattatagggcactgttgtaattctgtattttaatatcttaatataaactatatcaaaaacttaaattaatggagaacttctccaagcaagtttttatttttcctaagtataacttaaagcagaaaggcaaaacaacagacagttttcagaaatttgacatgtgattttttttaagaataaagagctgtttttggaagcnnnnnnnnnnnnnnnnnnnnnnnnnnnn

SEQ ID NO: 7695 - DNA, 451 bp, Glycine max
ctcgagccgttttcttgtatgagactataacaaaatgtatcgccaggctaattcacagacaagatcttcaggagcatcaggaaggacctcatctgtgaattagcctggcgatacattttcttgtatgagactataacaaaatcaaagtttgaggtgccatcgactgaggagcctatacatgaccgaattacacgaaatgttgcatctgcactgtcatccctaaagtagcctgggaaattagggccgtgctgtaattctgtattttaatctttgtataaactatatcaaaaacttaaattaatggagaacttctccaagcaattttttatttttccaaagtataacataaagcagaaaggcaaaacaacagattcagaaatttgacaccttgtccttgtgattccttcttttttttttttttttttaagaataaagagctgtttctggaagc

SEQ ID NO: 7696 - DNA, 534 bp, Glycine max
atctgcagttgtcagcacttaagcaggaatttgaagaggcaaagcaatccatgttagaatcagagaagaaactaaatttcaaagaagaaacagctgctgctgccatggcagccagagatgcagcagaaaagtctcttaagttagcagacttgaggtcatctagactaagagacagagtagaggagcttactcatcagctcgaagagtttgagaacagggaagattcaaggagccataatcggcctagatatgtatgttggccatggcagtggctcggcatggactttgttggatttcagcagcgacccgatacacaacaggaggcttctaacgaaatggaactttccgaacctctattataattgggcattttcttttctcttcttttttatgttcttttgtgtatttatgttaatttcttcaaattaatgttacaaagttgtagtttataccatcaacatgttccaccatctcttagaatgcaaccatggtggttactggttgagcattaggctcctgtaaagtgagaaagtg

SEQ ID NO: 7697 - DNA, 695 bp, Glycine max
cccacgcgtccgcccacgcgtccgcccacgctcaacatggctgccaaactcactctatcttctcccttttccttcaaaacttcatttctgccaaaatcaccatcattttctctaggtttatgctcccccagaactaatgttaccggtgtcaaagtccatgctaaattaggtggtggagatgaacaagccaagaacggaggcaagaagaaattcataacaagagaggaagaaccacaacagtattggcagacagcaggagaaagagaaggagagaatcccatgaagactcctcttccttacataatcatatttggtatgtcaactccttttgtaatcttggccattgcttttgcaaatggttggattaaggtgcctgttcgatgagacaacactttacttctcattctcaaacttcaccagagaaattctttactttttcacatatgttatggctcgttttaatgaacaaagttcacttatgaatgtcggattgaggaaagcataaatgaggtttcttgtttcaagaatagcacgttggtgatccgaacaccggacctgcctgctaatatgaaatggttggtaatccgactgttccatggaaaattaacaatggaattttttacaccttaagtttttctttctttctgctccttgcttataaaacaggataaagaaaatgggaagaaggttagatc

SEQ ID NO: 7698 - DNA, 275 bp, Glycine max
catggctgccaaactcactctatcttctcccctttccttcaaaacttcatttctgccgaaaatcaccatcattttctccaggtttatgctcccccagaactaatgttactggtgtcatagtccatgctatattaggtggtggagatgaacaagccaagaacggaggcaagatgacattcataacaagagagggagaaccaccacagtaacaattcataagtttgatttcccccattcccataattttctggtgacgtcacatatgtatcccaaaa

SEQ ID NO: 7699 - DNA, 402 bp, Glycine max
gacctgaaaattgtaccaagatggcttcacttccatgtctcctcttttccatccatttcattgttatcatgtcaagttccttacccacaaatagtgatgaagtgtttgcaaaacagtctccaatgtctccatccacaaaacccgtggaaaaaatcacccaactacacttctatttccataacaacgtaacggagaaaaacccaactgctatgagaattgttgggcctcccaagggcttcattactcagtttgggactgttgtgatgatggatgaccctctaactgaaggaccaagtccaagttcaaagcttgttggaagatctcagtgaatctatgctttggcttctcaacatgagtttgggtcgttgctcatggtgacgaattttttcttcactgaaggta

SEQ ID NO: 7700 - DNA, 437 bp, Glycine max
actcacgcgtcagctcacgcggtcagaaagacgacagaaggggcccagtttcccgcacacacttcttgtctcttctctctctctctatattttgggtttcattgttgggtgctgaagcaaatttgcggtgtagcagaggcaatggaggttcaaagtctcagctttgagaataacattttgtgggttggctcttttgtggaggctttggtgcttgacactttccttgccactgccaaatctcttgcttgctttgtcatcttgactggatctctccttacggatgtcaataatttagtgtcaccgatggtggatggaaggtttcctttagaccaactgtgcaagggaaaacatacttttgaagaaaacaaggatgctagtgatacagacgatgatgatgatgacgacaatgtgaatgatggagatgacgacaatgatga

SEQ ID NO: 7701 - DNA, 393 bp, Glycine max
ggtgttctattatcttcaaaatgacaaaatccttaaaaaaaagaaaactcagcattgacttaagctaccgcaccattagttcttcttggtctgaaccattaaactagactcacacgcgcacccatcaccgtctgatctcgatcgcacggacaatggcgtaccgcagcgccatcgtgcgcagagcccaagaggccagccaccgcgacacatggcgagccgctctctccgaattcatctccacactcatcttcgtcttcgccggctccggctcctccgtggccgtcaacaagctcaccgtcgacaagccctccgccctcgtcgtcgccgccgtcgcacacgccttcgccctattcgtcgccgtctctgtaagcactaacatctcaggcggccacg

SEQ ID NO: 7702 - DNA, 489 bp, Glycine max
agcatgagaatcgttgaataacaaaattttcctagaaacgttttctaatcggtcgcagagaaatgaaaaagctggcaaggaagttgcacaatgaagaagacgaaaacttatctcttccggttcacgacggagactctcgtcccttggaccctcaagagcaagaagagctggttcgttctcttgaaaggagtcaagctcagcagagtcgcttatggaggacggtatttgcagctctattcttctgttacatcgtgtttcttttgtactccatcttccagcaggcttcatctccatgggaactgcggtatcacgcttacttcatggaggagatctactcgtggatgattatatttgcagactgggtggctgttttagcatgctcatttgccatcataggattgcttgaccagtcaatgcatcgcatgagatggatccattactcatggtacacttgccgtattctggccatcttctggctatattacatgt

SEQ ID NO: 7703 - DNA, 268 bp, Glycine max
gtcgcggagaggttgcagtcggcgacgaaggaagcggggttaactctccggaccagaaggtgagggatgatgtgttcttcctcttctgcttcgtgatccgatcctgttttgaatgtggaacgagaaagatcatctttaatgatttgttactagtgagaagacctcaaagctcttataccagacatttgcgagttatgaacaatatcttgtctttgggaatatccatggattctcccctgttgatggttttgtggagataagcattgct

SEQ ID NO: 7704 - DNA, 793 bp, Glycine max
cccacgcgtccgaagacgacagaaggaagtgaaggagtttaagatatctggagcatagtgtgttgttctctgtttcgaagcagcggaaacaaacatgtcgtggtgttactgcgctaagcctatgactttgcagttgccgttgcaatcaagagcagcatcatcgttccattcccacgttggaggagtaacagtaacattctcaacactgtctcttcgaccctcttctcctcttgttctgacccacaacctccacttccaacccaaactcaaacgcgcttccacaaccattcgctgctcctctgcgttgactcctcaattgaagtctaccttggatcaagttattgcttcaaataaagtagttgtgtttatgaagggaactaaagactttccacagtgtggattctcaaacacagtggtgcaaatattgaagtctctaaatgtgccttttgaaaccataaatgtgcttgaaaatgacttgttgcgccaagggctgaaagagtactccagttggcctacctttcctcaagtctacatagaaggagagttttttggtggctgtgatatcactgttgatgcatatcagaagggggaattgcaggagctgttggagaaggcaatgttgtcctgaagctatggaaggaatgagaggccttcccaagtttgcactttgtaatcttccccctaaagttatactggggcccagtgccaatgggccaaataaattgtatgatgcattttgtgtccccaattgcctattatgattactgcaaacccaatatcccggtatttgagt

SEQ ID NO: 7705 - DNA, 1510 bp, Glycine max
atttggtgctgaaatggtttttagttccaaggacagtacaattacagatgaggatattgacagaattattgctaaaggagaagaagcaacagctgagcttgatgctaagatgaaaaaatttactgaagatgctatcaaatttaagatggatgacactgctgagttgtatgattttgatgatgagaaggatgagaacaaatttgatttcaaaaaaattgtgagtgaaaattgggtcgagccaccaagaagagaacggaagcgcaattactcggagtctgaatacttcaagcaaacaatgcgccaaggtggccctactaaaccaaaagagcctcgtattcctaggatgcctcaattgcatgacttccagtttttcaacacacacaggctgagtgagctgtatgaaaaggaagttcgctacctcatgcaagcacatcagaagaatcaggtgaaagactccatagatgttgatgaaccagaagaggtgggtgatccattgactgccgaagagttagaagaaaaggagcagttgctagaggagggattttcatcatggagccggaaggattttaatgctttcattagggcctgtgaaaagtatggccgaaatgatataaaaggtattgcttctgagatggaaggaaaaacacaagaggaagttgaaagatatgcaaaagtcttcaaagaaagatacaaggaattaaatgattatgatagaattattaaaaacattgaaagaggggaggcaagaatatcccggaaagatgagatcatgaaagctattgggaagaagttggaccgctacaagaatccttggcttgaattgaagatacaatatggacaaaacaaagggaagttatacaatgaagaatgtgaccgattcatgatatgcatggtgcacaaacttggctatggtaattgggatgagttgaaggcagcttttcgaatgtcgcccttgtttcgatttgattggtttgtcaagtctcgcacaactcaagaactggctaggaggtgtgacaccctcattcgactggtagaaaaggaaaaccaagaatatgatgagagggagagacaagctcgcaaagagaagaaacttgccaaaagcatgaccccatcgaagcgtgctttggcaagacagacagagagtccatcttctttgaagaagcgcaagcagttaaccatggacgattatgcaagcacggggaagagaagaaaataatgaacatatgctctatattgcgtaggataagtaaggggttgttgggttttaaagtccttggtgatttggatgtggcccagacttggcaattgatggccaggcttgccttccaaaagccgtgctagtttgctaacaacctctaacttgtgtaggctccaaatatctgttgtatggctagttagagaatatcaagtagaaatgggttgttgtattgtaagtatgtatatctacaaaacaaatccttagatttgaacgactagttcaatgaaatatatgtagttctaacttaatgct

SEQ ID NO: 7706 - DNA, 391 bp, Glycine max
ggtcacttaatccaaatacaaaagctatcctcacaccccataaaatcacaatgacaacaaaaacaacttctctcctcctccttcatgtaattctcctcgccacggcggaagccgccgccgccggcggccactggaaggtcctccagcaaagcatcggcattgtggccatgcacatgcagctcctccacaccgacacggtggtgatcttcgaccgcaccgacttcggcctctccaacctctccctccctgacggcctctgccgccacgacgccgccgagatggccgtgaaaaccgactgcaccgcccactccctcgaatacgacgtctcctccaacaccttccgccccctcttcctccagaccaatgtctggtgctcctccgcctccgttgc

SEQ ID NO: 7707 - DNA, 823 bp, Glycine max
tccattcaaacattgtcaggcagtccctgtctcaccaactcttgatgtaaccagaggccttacaaacacacccatatatatgcatacatgctagcaccaccttcaagcaaagtcgcaaattctcctcctacaccaacaaaaatggcaccttctccacaagaaatcatcttccgatccccactccccgatattcccatccccacacatctcccattgtactcttactgcttccaaaacttgtcaaagttccatgaccgtccatgcctcatcgacggcgacaccggcgagaccctcacctacgccgacgtcgacctcgctgctcgccgcatcgcctccggcctccacaaaatcggcatccgccagggtgacgtcatcatgctcgtcctacgcaactgcccgcagttcgccctcgccttcctcggcgccacccaccgtggcgccgtcgtcaccacagccaaccccttctacacgccggcggagcttgcgaagcaagcgacggccacgaaaaccaggctcgtcataacgcaatccgcgtacgttgagaaaatcaagagtttcgcggacagcagcagcgatgtcatggtgatgtgcattgatgatgatttttcttatgaaaacgacggcgttttgcatttctcaacgctcaccaacgccgacgctacggaagcccctgccgttaagattaaccctgacgacctcgttgcgcctccgttttcttctggcacgtctgggctccccaagggcgttatgttatcgcatgacaacttggtcaccacgatagcgcagttagttgacggcgaaaacccgcaccaatacactcaca

SEQ ID NO: 7708 - DNA, 410 bp, Glycine max
ggaataccaaggtagttcgttggtcactacctgctcatagcgacacacacagctgctggctacggatacataaaatcgttcccagattcaaaacctgagatgcttttcttgagctggggtcgcccctctccccaagaccaaaagacttgcatcaacaagtcaggtactttcaactatgatgacaaatataaaggagctactgctaaatcagtggcttcccttaaagcagacgagggactctccaaagatggatttttactaaacgaggcgcgagttctggttggttctggtattgagacctttgaaaagggcaagagtgctcttagaagttggaggcattttggattgaattgggcatttgttgattcgaagacaccagtccaacaaggagtgaagttctgtgtttgtgt

SEQ ID NO: 7709 - DNA, 964 bp, Glycine max
  unsure (1)..(964): unsure at all n locations
gaaacttaaaattggagaagacgaaacaatttagaaaagaaaaatgaaaatagtagaaaagaaggcattaggttaagagtgaaggcagtgagcgaaagagagcatagtaatacttactgagtgcttacagttgctgcgtcgcaaggtaccggcggcgacggagaactatcttctcaattttcgatcactgcattggttctgttgacaagggttttgttcttcctgacttgcatacttgatggcttcaaagttgcagaagttgcaggccacagcatctcaagcgtctcaatttgtatccagtcgtggaactaactactacaagcaattgctggaacagaacaagcaacacattcaggagcctcctacagtagagaaatgcaacctgttggcaaagcaattgttttacactcgccttgctagtattccgagtcgtaatgagtccttttggaaggaacttgattatgccaagaatttgtggaagaacaggaaagagctaaaggttgaagatgcaggaattgctgctttgttggcctcgatgctttgcatgttttgcgctgtgagatgttgcagagattactttcaacggtatatgtctgatatacccttttgaagggaatttatcaggttaaacatctaagcaactgcttgcatttaaacatggtgtatgattctattgcaatttgttatagctaataccccctgatgaagcgagaaccttgagtttttattgtgaaactagatgccccccggatactctgcattctttttagggtgggggagatttattatatctntntgatttttttcaaaagaaaaaaaaanaaaaaaanaaaaannaaaannnaaccnggggcgcctnntttttttgttcccgtgtgggttaaggtgaacgtcttatgaaccttctggngttagacannnnnnnnnnnnccccactcatgagtctcttgtgaggggtgcccnc

SEQ ID NO: 7710 - DNA, 735 bp, Glycine max
  unsure (1)..(735): unsure at all n locations
ggcggctacncaaaactaggtgctcaatttccgaggagctggttgcttctcttgaccaggcttttcttctacttgacttgcatacttgatggcgtcaaacttgcagaagttgcagtccgcagcatgtcaagcatctcaatttgtatccagtcgtggaactaactactacaggcaattgctggaacagaacaagcaacacattcaggagcctcctacagtagagaaatgcaacctgctggcaaagcaattgttttacacccgccttgctagtattccgggtcgtaatgagtccttttggaaggaacttgattatgccaagaatttgtggaagaacaggaaagagctaaaggttgaagatgcaggcattgctgctttgtttggcctggaatgctttgcatggtattgtggtggtgagattgttggaaggggatttactttcaccggttactatgtctaataataaccacttggaaagtgtagattttatcagggccatatactcctaaagccaactgctctggtcatttatacattgtgtggattattgcattctgcatggcaatttttgttatgataagcctcaataaccccttgtagttgaaagcgggatgaaccttgtgttgttctcttatcatgttggaaagctagtgatggtactccacagtgatgatactcctgcaattcttttaacatttttgtcatgctttttaaaaaaaaaaaaaaaaaaaggacgaa

SEQ ID NO: 7711 - DNA, 625 bp, Glycine max
ttatcatacacacttgcacaaaaacaaaactctcttcccaattccgatcctcaaggccgaacccgaaaacttctcataccacattgctctttccgttgtttccacttcctctcccactctgagtcagttcccatttaaaaacaaagactccctctaacccttgtcctcatcatcatcatcgcatttttcactctttcgtaattttacattgatatataattatgcaaccctgtagcagagaaatgcaaggcctcaactccctcttaaactcttcctcccaaatctccctccaagaccttcaaaatcacaccactaaccagatccaaaattcacacatgaaccaccaacaccaacttgctcactttgattcaacttctcacgacgactttctcgaacaaatgctctcttcctgctcttggacagacctcaacccaaacaagcccttattatgggaccctaacaccctcaacgacatcaagccccccgacgaaacgacgccgtccaacaacaacaacgacgctactactaatgtcgcatctttttcctccttcgatgagcactccaccttagcctccaagttccgcaaccaccagatcagctccaataacaacgcgcccaaaaacgc

SEQ ID NO: 7712 - DNA, 730 bp, Glycine max
ctcttgcacagaaacaaaactcgcttccgagttccgatcctcaagacagaaacccgagaacttctcataacacaatgctctttccgttagttccacttcctctcccactctgactcagttcccatttaaaagcaaaccctctcaaatcaaagactctctctaacccttgtcctttatcattatcatcacattcataactctttcacaatttggatatataattatgcaaccctgtagcagagaaatgcaaggcctcaactccctcttaaattcttcatcccaaatctcccttcaagaccttcacaatcacaccactaaccagatccaaaattcacacatgaaccaccaacaccaccaccaacaacaacaacaacaccaacaacaacaacaccaacttgctcactttgattcaacttctcacgacgactgtctcgaacaaatgctctcttcctgctcttggacagatctcaaccataacaagccattattatgggaccctaacacccccaacgacatcaagccccccgacgaaacgacgccgtccaacaacaacgacgacgctactgctaatgtcgtttttccctccttcgacgagcactccaccttagcctccaagttccgcaaccaccagatcagccccaacaacgccccaaaaaacgccgcggcggcggctttcatgctccaacaccaactccttagagactctgtcttctcaacatgccactttcct

SEQ ID NO: 7713 - DNA, 966 bp, Glycine max
gaagtaacatatgcgtgagcgtgaaaatgaattttggagcgaaaccccattacgtattgttgtgttgtgtggtgtgactgggatcagatctgcccctttctctgtgcaattagcgtgccctaggcctggccatgggagacgaagaagaggaggaggtgctcggttcgggtcaatcagcctccaccaacagcttgccacctcccgccgatagcacactcctcaaattgaaccatctcgacatacatgctgatgatgctgtatcacacgcttctcttgctgccaagaagaaaaagagaggcggccaacgggctgttggacctgataagagtggaagaggtctccgccaatttagtatgaaagtgtgtgagaaggtagaaagcaggggaagaacaacatacaatgaggtggcagatgagcttgttgccgaattttctgaaccaggcaagagtgaattgccccctgatcagcaacaatatgatgagaaaaacatccgccgaagggtctatgatgctctgaacgttctcatggcaatggatattatttccaaggacaaaaaggaaattcaatggaggggccttcctcgtactactgtgaatgatattgaagaactaaagacagagcggcttgggctcaggaatagaattgaaaagaaaacagcctatctgcaggagcttgaggagcaattcataggtcttcagaaccttattcaacgaaacgagcagttatatagctcaggaaatcctcccagtggaggtgtatctttaccttttattttggtacagacacgccctcatgcaactgtggaagtggaaatatcagaagatatgcagcttgttcattttgatttcaatagcactccttttgagctgcatgacgacaattatgttctcaaggcaatgaaatttggtgagagaccactggatgataatatgacacacaatcttactgacggatgtgaaatttcta

SEQ ID NO: 7714 - DNA, 598 bp, Glycine max
tgcaaacacttgttccggtgtccctctctctttcgcttcatcttcaacattaggtcttctctgactctgtggttgtcactgttcaacgtctttgagagtttatgctgagtagttcggctttacctcaaaagtcctgatcaattgaattcagtttcccttggtaggatttattgccgggccttgaggtaagcagcttaccaacatgggaacacaaccccagcaaacatttcgggaggaagaggaggaggagatgcaaggccgtggaaccactatctcaggtcaatcaatgtcaacaagcagaagtttggggtctccatccagccggagtgaacagacaatggcaacacctgctagtgatagcacttttcttaggttaaaccatcttgacatacatggtgatgatgctggatcacagggtgcagttgctagcaagaagaaaaagaggggccaacgtgctattggaggtgataagagtggaagaggtctccgccaatttagtatgaaagtgtgtgagaaggtagaaagcaagggaagaacaacttacaatgaggtaactgatgaacttgtggctgaatttgctgatccaatcaatggtgtt

SEQ ID NO: 7715 - DNA, 295 bp, Glycine max
gcgaaagcccagattcacgtattgctgtgttgtgtggtgtgactgagataagatcagatctgggcaattgtagaatcgtgccctaggcctggctatgggaggagacgaagaggaggaggaggtgctcggttcgggccaatccgcctccaccaacaacagcttgccacctcccgtcgataaaactattctcaaattgaaccatctcgacgtacatgctgatgatgctggatcacacgcttctcttgctggcaagaagaaaaagagaggcggtcaacgggctgttggaccgataaga

SEQ ID NO: 7716 - DNA, 721 bp, Glycine max
cccacgcgtccgtccaccggtccgctctgcgctctctctctctgtctcctacgattcgttttgccccttttgttgccctaatttcaaccatgcctcgccgtagctccggtggaagatctgcccgtcctgctcctcgggcagctcctcgtcctgctccagttcaccatgctcctcctccagcccctgctcagagtggtggtggatctatgcttggtggcattggttcaaccatagctcaaggtatggcttttggcaccggaagtgcagtggcacacagggctgtggatgcagtcatgggtcctcgtaccattcaacatgaaacagttgttacagaggctgctgctgctgcccctgcacccactgcaaatacttttggtggcgatgcatgcagcattcatacaaaggcattccaggattgcctgaacggctatgggaatgacattagcaagtgccagttttacatggatatgcttgcagaatgcagaaagaactctggagccacgttgagcatgtaactgctacatttgcctgttttggagtttgcatcagtgccctgtctcctatggtttgaactgttaatgtggctaggtattgcatttgaataaaataccatttgcccgaagatgcatacaaactaatataaagtcattttcaattggtactttattatttgatacctataattggtaacgtatttgatctgaataaaaaaaattgaatg

SEQ ID NO: 7717 - DNA, 381 bp, Glycine max
gacacacattagtagttaaagttctcacttgagttctgaactcctctgcattccttagtgaggctaatggaactacagttaatattggtgaaaatgatactagcactagcaatggccatgatgatgatgatgccatgttattcagttgctgtggacattaatcaacaagtgaggcaagtggcagcaaagcataacgtgtcttgcctcctagtttttggagactcaagtgttgattctgggaacaacaatgctcttcacaccactatgaaaagcaactttcctccttatgggaaagacttctttgacagccgcccaactggaaggtttagtaatgggagactttgcatagagctcgttgctgaagcattgaggtacataaaa

SEQ ID NO: 7718 - DNA, 467 bp, Glycine max
  unsure (1)..(467): unsure at all n locations
gcgtgaggactcttctctgttctcttaagtccttcccattccaatggattctgcgttctccatcaacaccaccgcgcaagtggcgctcttcagagcgctccacggtcatctccaccgagctcctcaacgcgccttgctccgccgcaacctaaaatgcctcgttacttcctataacagcagcagcaactgctgccgcattccgtgctctttcggctccgtgccgtcgccgtcctcgcttcgatccttccgcggactgctcccgcgaacgccgcgctgcatttcgagctccgcggcttcctttgcttctcctgccggcggtggaaatggcggcgctggaaccggcgacggtgacggaggtggcggttctggcggtgagtctggagatgctaatctcaaactggtaggagacgcgtctcangagctttccgcactttcgactgatgttatcaatctcgatgtttcgggaa

SEQ ID NO: 7719 - DNA, 511 bp, Glycine max
aatttctggaataaaacaacttattcatcctttggaggcatctggcatattggttaagcggactgatgaagagctgttaaaaacattggattcattcgttgttgtggaaagagaaggtcacataattgcttgtgctgccatttttcctcactttgaggagaagtgtggagaggttgcttgtattgcagtatctcctgattgtcgtggccaaggacagggtgacaaattgcttgattatatggagaagaaagcatcatctcttggatttaatatgcttttccttcttacaacacgtacagcagattggtttgtaaggcgtggattttcggaatgttcaattgattatcttcctgaaaagaaaaggagaatgatcaatctttcccgcaattctaagtattatatgaagaagcttctgccaaatattagtggaattactgttggtgtaaaatctgcttcaagttagtactattttatgttgtttccacctaccaggaatggagggtgattggaa

SEQ ID NO: 7720 - DNA, 506 bp, Glycine max
aatcgcatgaaaagcggcattgagtgagagtgtttcctctcctctcttctgttcaaacaatgtcgcaaaccgttgcatgctttcgtcgccaaaaatcttggctgtggaatggcagaaggcaagtgtctcccatgttcaggtgtttctggaagaactgctgctgtatattcctactcttctctaggtcatcacagaattcattcccgtgtccaagttagaggactaaagtgtggctttaggggtgcatcttttgtatgtgaagcaaagaggaacccagatttctcaaggcaaaacaagcatgggtcctccagaagcagaaatcggaatagtgatgggagagacagctttgagagctttgacgacgatatgttttcattaaaaaatggaccgcctgtgtctctttcaacctcaggaaaattccaggccacttcagcccctggtcctagggagaaggagattgttgagctatttaggaaggtccaggctcggttgcgtgagagggctgc

SEQ ID NO: 7721 - DNA, 364 bp, Glycine max
gagagacactctctataatgtttaaaaattaaacatgattttccttcctttcattaagagaaatttagaactggtaaggtagaaggaaaatggataaagctctcactaaactgggtagcacttggatctccaagaaagccaaggcagagatttcccacataaccgacgacctatcatctctctcaaatactgtcgaagagaaggcaaagcttttcatcaacaagctcaaaggtaaaacccagaaagccttgccagatctccttcgagagtacaacattcctccgggtctgttcccccgcaacataacatgctacgaatttgatgcatcaaagggaaagttgatcgtgtacttatcctcaccctg

SEQ ID NO: 7722 - DNA, 441 bp, Glycine max
cccaagcgtccacccacgcgtccggaagacgacagaacgggaagacacattgattgcactaacggcatagaaatacacaatacaacgtggtttatgtttatccgcctccacttggatatctccgtcctcggtcccaaataacaaactaaactgctccaaaccaaacacaatactcaacataactcattttcgcagatctttctgttccttcaaaatgcaatcttccatttcactctcttcttcctacgctcccaccatttcgggaccacgccactcttttcccctctccggtcgcactctcgcgccttcgaatctccgtttctgcggcctccggcgacaggcattcacttccactcccctcaaccaccacttccgcctccgccgacgccgcctcccgcattccgccgcggtatccgccgcgctttccgccaacggtacctc

SEQ ID NO: 7723 - DNA, 861 bp, Glycine max
tcgacccaggcttgacccacgcgttcgagagacacgaattgcagtcccaggcgcagttacctgttctgttattgagtcaaagggtgtgagtgagtgtgagcaagatgggttctttggcaaagaagggactcaacaattacgtcaaacagctccagcaacaccctttgagaaccaaggtaatcactgcaggggtactatcagcgatcagcgatgttgtgtctcagaaacttctggggatacagaaacttcaactcaaacgtcttcttttcaaagtgatttttggagctgcttatcttggaccctttggacacttttttcatttaatactggataaaattttcaaaggaaagagagattcaaaaactgtggccaagaaggttctgattgaacagttgacatctaatccttggaacaatttgcttttcatgatttactacggattagttgttgaaggccaaccttgggtgaatgtgaaagctaaagttaagaaggattatccatcagtgcagtatacatcatggacggtctggcctgttgtggggtggataaatcacaaattcatgcctcttcatttccgtgttgttttccaaagcttagtagcatttttctggggagtattcttgaaccttcgagcacgatctatggcattgattaaagcctgaagcaaagaagattactgtatatgctcctgcttgctaggaaactgttactctttccagtgtagtttgcattagtttaaactaatcaaaataagatctgctgttcatgttaatgtcttggcaagatcttttagtttgtctgattatttagacatggttaatttgcggtgctcggaatatacaagtttgcgaatgttctcgt

SEQ ID NO: 7724 - DNA, 295 bp, Glycine max
acgagattcatgcctcttcatttccgtgttgttttccaaagcttagtagcatttttctggggagtattcttgaaccttcgagcacgatctatggcattgattaaagcctgaagcaaagaagattactaggacactgttactctttccagagtagtttgcatcagttaaaacaaatcaaaagaagatctgctgttcaaattaatggtgttggccagatcttttagtttgtctgactatttagacatgatcaatttgtagtgctaggaatatggaagtttgtgaatgttaatttgag

SEQ ID NO: 7725 - DNA, 468 bp, Glycine max
ctcgagccgcttcggaataaacctgaagctaacgaaccaaccataaaccctatctatggccaccctcgacccaatccaaaacggcgtctcttcggacaatcccgccgccgctgaaccgccctccacccccgccgacgtccccccccccgaccccgccgccgccgagaagcggtggccggggtggccgggccactgcgtgttccgcctcatcgtgccggtgctcaaggtcggcagcatcatcggccgcaagggggagctcatcaagaagacctgcgaggaaacgaaagctcgcattcgtgtcctcgacggcgccgtcggcacctccgatcgaatcgtactcatatcagggaaggaagacctggaggcacctctttctcctgcaatggatgctgtaataagggtttttaaacgtgtctctgggttttctgaaattgatgccaagaataaagcatcagcggttgcattttg

SEQ ID NO: 7726 - DNA, 486 bp, Glycine max
gatttttgagtgtttgtgagtttgtctgtgacactctctctttctctctctctacgcttcacttttccgtaataaacccttcaaaagcgaaaaccgtttctcgttttgtttttggaccttatctttattcttaggttcgattctgcgtacgttgggaggaggaacagacacacatgaaggattcgaattcgaattcggatctgtttgacccggtcatggcgatggagtccgagtggtctcgcggcggcggcggcacctccgatgccgatttcgccttcgccttcaacgacagcaacttctccgacagggttctccggatcgagattatgaacgaccccgtcgacgcccgccccgattccgacgcctgcgccaccattgccgactgggcccgccaccgcaagcgccgccgcgaggatatcaaaaaggataacggtgtggatcttgcttcggtgccagatgagcaagttttgaacgggcatcaatctg

SEQ ID NO: 7727 - DNA, 321 bp, Glycine max
gattgaatttgtagtatctgacaatcatctgctgaaaaagccacatattctctaagggtcccgtcagtcggcggagaaaaaaaatgggaatgagagattttcaggatcaagcttaaggcattccgggtgaaacgttttttctttggaagaaggagaaatagatggagtgcaaacaagccttcatggatgattccaatatcacatggtcatcatgtggtggagcatcatgtaatcaaaggtgggtctgatgactcgaacttcgattcagttgtgatacagagagagcaaatgggtcacacagaactgtggtactttggaatc

SEQ ID NO: 7728 - DNA, 1370 bp, Glycine max
acgcgtctaacataaatcatcttcttgaaaagcttcgcaggtcttcctgggatgctgcagtgcaagatattgaagaccttaaggaattctccaaaagtcagggagcattggaagctggtgatttgactcattgggacattaccttttggagtgagaggctacgtgagtcaaaatatgatattaatgaggaagaactgcgtccctttttctctctgccaaaggttatggatggactctttaaccttgcaaaatcactttttggcattgaaattgagccagctgatggtctagctccggtctggaataatgatgtcaggttcttctgtgttaaggattcttctggtagtccaattgcgtatttttattttgatccttatagtcgtcctgctgaaaaaaggcaaggtgcatggatgaatgaagtctttgctcgtagtcgtgtattatcgcgtgatggcacctcagcaagattgcctgttgctcacatggtgtgcaatcaaactcctccagtaggaaacaagccaagtctaatgacattccgtgaggttgagactgttttccatgaatttggtcatgctcttcaacatatgcttactaagcaagatgagggtctggttgctggtattagagggatagagtgggatgctgttgagttaccttctcagttcatggaaaactggtgttaccatagagaaactttaatgggcattgcaaagcattttgaaactggggagagtcttcctgaagaagtatatttgaagcttgttgctgctaggacatttcgagctggctctcttagtcttcgacagttaaaattcgcatctgtagatctggaacttcatacaaaatatgttccagggggacctgagtcgatctatgatgttgaccacagagtttctgagaaaacccaagtgattcctccattaccagaggataggttcctttgcagctttagccatatatttgcaggtggatatgcggctggatactatagttacaagtgggctgaggtgctgtctgctgatgctttctctgcatttgaggatgctggattggataatgacaaggctgttaaagaaacggggcgcaagttccgggagaccattcttgctcttggaggtggcaagccaccactagatgtttttgtgcaattccgtgggagagaaccaacaccagatgcattgcttaggcacaatggcctattacaagttgcagcttcgtgatagatcgatagagttggccacttttatagtcaataaatgggactcgtacttacctaagaatatggggcctcatacttttttttcatatgtagttttttgtcatgttttttaacttaatttttccatatttaaaggaatctaaattttgaa

SEQ ID NO: 7729 - DNA, 759 bp, Glycine max
tgtttctctctcaactctcacaacccatctttcatatccaaattccaatgcttcttcttccttcttatttcaatttcaatcactactattattactctttcacgcttttgcttctcgatttttaaaccctaaatctatctatctgtctaatagataagatagggcaaaaacaaaacaaaacaaaataaaaccctagccaaagaaagaccttgttgagcagcagcagcagagagagagaggcttatggaaggagtaccgcacccaatacccagaactgtcgaagaggttttcaccgattttaagggcagacgcgctggtttgattaaggccctcactactgacgttgaaaagttttaccagcagtgcgatcccgagaaggagaatttgtgtctatatgggtttccaaatgaaacatgggaagtgaatttgcctgttgaggaagtgcctcctgaacttcctgagccagcattacgtataaactttgccagggacggcatgcaagagaaggactggctatcactggttgcagttcacagtgactcatggctgcttgctgttgctttctattttggtgcccgctttggatttggtaagaattaaaagaaaaggctttttcagatgaataatgatctgccaacaatcctcgaacttgtgactggaagtgctaggcaatcaaaggattaaccagctgcccataacaatggtagccaatgccaatcaagtggaaagtctcgtcagtctgagtctcacgccaagggg

SEQ ID NO: 7730 - DNA, 265 bp, Glycine max
ctcgagccgttttctttattattattgttattccaccctcttcttctcttccctgcagatcctgaaaagttttaccagcagtgcgatcctgagaaggagaatttgtgtctatatgggtttccaaatgaaacatgggaagtgaatttgcctgttgaggaagtgcctcctgaacttcctgagccagcattaggtataaactttgccagggacggcatgcaagagaaggactggctatcactggttgcagttcacagtgactcatggc

SEQ ID NO: 7731 - DNA, 382 bp, Glycine max
aggctcgagatccacaccaccaaatccaaattccaatgcttcttcttccttcttcttatttcaatttcaatcactactacttcacgcttttgtttctccatttttaaaccctaaatctatctatctaatagagataagatagggcaaaaacaaaaccctagccaaagaaaaaccttgttgagcagcaacagcagcagcagcagagagagaggaatatggaaggagtaccgcacccaatacccagaacagtcgaagaggttttcaccgattttaagggcagacgcgccggtttgatcaaggctctcactaccgatgttgaaaagttttaccagcagtgcgatcctgagaaggagaatttgtgtctatatgggtttccaaatga

SEQ ID NO: 7732 - DNA, 406 bp, Glycine max
ggctcagatcgaagaagcaaaacatagccaaaactacagttctctcaatgaagctcccagcacattgttttctggcttcaacttttaagtcacttgtccgtttgacagtactattactagttgtttccagcaacaaaacaaagggtgccgtggaacttccaccaaatgtctcagttccagcagtgttggtatttggagattcgatcatggacactggcaacaacaacaacaacttgataacatcagctcggtgcaacttcccaccatatggccaagattttatgggagggatccctactggccgattttgcaatggaaaggttccttcagacattccagttgaagaattaggcattaaagagtttctacccgcatacttggatccaaatctgcagcttagtgaatt

SEQ ID NO: 7733 - DNA, 311 bp, Glycine max
gaaaagaaagccaaaactacagttctttcaatgaagctcccagctttttcttcttctcctcctccagtacattattgttttctgccttcaacgacttttaagtcacttgtccgtttgacagtactattactagttgtttccagcaacagaacaaagggtgctgtggaacttccaccaaatgtctcggttccagcagtgttggtatttggagattcgatcatggacactggcaacaacaacaacaacttgataacatcagctcggtgcaacttctcaccatatggccaagattttatgggaggatcctactg

SEQ ID NO: 7734 - DNA, 529 bp, Glycine max
gggcgactgaaactgcgaaggtgactgactgagagagaagagaaaaacaatgtcagggctgaaggaattgctgaagaaagggttaggtttaggcgacatggcgttcaacgccggcggcggagccataacctggttccccggccacatggccgccgctacacgtgccatccgccaccgcctcaaactcgctcgacctcgtcatcgaagttcgcgacgctcgcattcccctctcctccgccaacgccgacctccagccacacctctccgctaaacgacgcgtcgtcgcactcaataaaaaagacctcgccaaccctaacatcatgcataaatggacgcattattttgagacgtgtaatcagaattgcgttgcgataaacgcgcacagcatgagttccgtgaagaagcttctggacgtggtggagttcaagttgaaggaagtgatttgcagggaacccacgctgcttgtgatggtggtcggtgttcccaacgttggcaagtctgctttgattaactccattcatcaaattgc

SEQ ID NO: 7735 - DNA, 460 bp, Glycine max
cccacgcgtccgttcaacttcagcagccgcgcctctaacttgtagcagcgatacctcttctcttatcactaaaaaatgaccaagagaaccaagaaggccggtattgttggaaaatacggcacccgatatggtgctagtttaaggaagcaaatcaagaagatggaagttagtcagcacagtaaattcttttgtgagttctgtggaaagtacgctgttaagaggaaggccgtgggtatttggggctgcaaagattgtggaaaagtgaaggctggaggtgcttacacattgaatactgcgagtgctgtcactgtccggagcaccattcggaggctgagagagcagactgagagttgaaagcagtttacacttttcatttgtttccaaagcttattttatgctgctcattcaattttggcaggtctatgttaggaatattagtaatgtgctactttaaagttct

SEQ ID NO: 7736 - DNA, 586 bp, Glycine max
gggacgagtcaaacggcagcccaaacgacacagaatggggtattcggcagccgcgagatcatcttcttacagccactcgaaaatgaccaagagaaccaagaatgccggtattgttggaaaatacggcacccgagatggtgctagtttaaggaaacaaatcaagaagatggaagttagtcagcacagtaaattcttctgcgagttctgtggaaagtatgctgttaagaggaaggctgtgggtatttggggctgcaaagattgtggaaaagtgaaggctggaggtgcttacacattgaacactgccagtgctgtcactgtccggagcaccattcggaggctgagagagcagactgagagttgaaagcagtttacacttttcatctggtttccaaatcataaattttgctgctgtttattttgaaattagcatacttgctttggatagttgatggaattttggcaggtctttgttaagaatattagtaatgtaactttgaatgatatttagttttgtattcttgagtcatttgatggtgagtgagttggtaaaaaaaaaaaaaaaaaaaaccgagactagttcctcgtg

SEQ ID NO: 7737 - DNA, 1162 bp, Glycine max
acgaggcgcgtttggctttagcatttagcattttctctctctctctctccacgctgttactttatcatataacctgactcaccccacccaatcctattcccatcccatttgaacctctccttctcgcagagtgagcgagcaagcgaatatcccaatcccacaccaatggcatgctcagccacctctgcttccctcttctccgcaaacccaacacccctcttctctcccaaaccctctctctccctccaccttaaccctctccccacgcgcccttctccctccctcacgcgcccttctctctccctcacgcgcccttctcactctcgccgctccttcgttgtcaaagcctcctccagcgagcttccgctggttggtaacaccgcaccggatttcgaagcagaggctgtgtttgaccaggagtttatcaacgtgaaactatctgattacattgggaagaaatatgttgtgctcttcttctacccgttggacttcacctttgtctgccccacagaaatcactgctttcagtgaccgacatgcagagttcgaggcactaaatactgagatattgggtgtttcagttgacagtgtgttctcgcaccttgcatggatccaaacagatagaaagtcaggtggccttggtgacttgaattatcctttgatttctgatgtcaccaaatccatatcgaaatcttatggtgttctcattcctgatcagggaattgcattgagaggtttgttcattattgacaaggaaggggttattcagcattctaccattaacaacttggcaattggtagaagtgttgacgagacaaagagaactctccaggccttacagtatgtgcaggagaacccagatgaagtttgccctgctgggtggaagcctggggagaagtccatgaaaccagaccctaaacttagcaaagactactttgcagcggtgtagctaggatactagatagttaagagtggctatctgcatctgtatcagtcagtgtgaattgcaaaagggtcttgtttcttaatgttttgtaagtccttaaattttgagccgcagggtatgggaatatactaataaatgcatgctggattttgaagtgtactatgtattaatttgcaatttattttgattatgatctctgtttcgtgttcaaactcgt

SEQ ID NO: 7738 - DNA, 718 bp, Glycine max
gaatcccaatcccatttcaacctctctttcttttcttctcgcagagcgaaatcccaatcccacacaaatggcatgctcagccacctctgcttctctcttctccgcaaaccccacacctctcttctctcccaaatcctccctctccctccctaacaactctctccacctcaaccctctccccacgcgcccttctctctccctcacgcgcccctcgcacactcgccgctccttcgtcgtcaaagcctcctccagcgagcttccgctagttggaaacaccgcaccggatttcgaagcagaggctgtgtttgaccaggagtttatcaacgtgaaactatctgattacattgggaagaaatatgttgtgctcttcttctacccgttggacttcacttttgtttgtcccacagaaatcactgctttcagtgaccggcatgcagagttcgaggcactaaatactgagatattgggtgtttcagttgacagtgtgttctcgcaccttgcatggatccaaacagatagaaagttaggtggccttggtgacttgaattatcctttgatttctgatgtcaccaaatccatatcgaaatcttatggtgttctcattcctgatcaggtatgttctgacatgaaattggtttaaaaaattgttacttatggatggatgaattataagacaatagaagtcaaataatttgtctgttttttctcacactaaatg

SEQ ID NO: 7739 - DNA, 612 bp, Glycine max
ggaaaacctggtcagacagaaattactctgaaagatgatcttcctgaaagggataggactgatctttacaagacatacttactttattgtctaactggtgaagtgacaagggttccatttggtgctcagatcactactaagaaggatgattctgagtatcttcttctaaatcagcttggtgggatcctgggattgagtagtcaagaaatagtggaagtgcacaggggtctagctgagcaggcttttaggcaacaggctgaggtaattttagccgatggacagttgacaaaggccagggtggagcagcttaataacctccagaaacaagtaggcttacctcaagaatatgctcagaaaataatcaagagtataaccactacaaaaatggcagctgccattgaaactgctgtaactcaagggaggctcaatatgaagcagattagggaactcaaggaagctaatgttgatttagacagtatggtatccgagaacttgagagaaaccctcttcaaaaaaactgttgatgacattttctcatccggtacaggagagtttgacaatgaggaagtatatgaaaaaatcccatcagatctcaacattaacaaagagaag

SEQ ID NO: 7740 - DNA, 852 bp, Glycine max
tactcgaccgaatcggctcgagggggagctgggtttgttttcggcctttgatcttcgattctctctctttttctctcgcgaaaaccgtatcagcaatgtctggagaatcagccagcgctattcacaagggtcaagtcgatctcttagacttcattgactggtctggggttgaatgcctcaatcaaagctccacccactctctccccaatgctatcaaacagggttatagagaagacgatggtttgcatctggagagtgatgcagacgagcagcttttgctctatattcctttcactcaagtcgttaaactttattcctttgttatcaaaggtcctgaagaagaaggccccaagacagtgaagctcttttctaacaaggagcacatgggatttagtaatgtcaatgattttcccccaagtgatgtggcaaatttgtctgaagaaaaccttaaggggaaaccggtacttttgaagtatgtcaaattccaaaatgttcgtagcttgacaatttttattgaggacaatcagtcaggttcagagatcacaaaagttcagaagatcgtgctgcatggtacaacagttgaaacaacagacatgaagggtctgaagaagattgaggatcattaacccctggaaagaggagattcaactttgctcctaatccctccttagaaattttgattggaattgtaatgttaacttggtgaatgatggtttatgacttctaatgtctatctgatttcaaataaaacagatgcacaatatatctacatggttgtgacaatttgtgattggaggtaacattcaagctgtatggttatctattgtgtccttttacatgttttgaaacatg

SEQ ID NO: 7741 - DNA, 515 bp, Glycine max
  unsure (1)..(515): unsure at all n locations
ggaaaacanaagacaaatttatagaaaagggaggtacgtagctcaaaaaggtgttccccaaaccaaggtatagctcaatggcatcatcatttgtgggtactttattacccaaccacttcacacaaaccaaacactcagctgttcctgcaagtagatcaggtgctccaagaaggaggagagtgcacttagcaacaacaagagcagagaccatgactactgtcatagaaaaactgggcattaagattgagaggaaccctcctgagtccaagctcactcaactgggtgttaggcaatggcccaaatggggttgccctccaagtaagttcccatggacatatgaagccaaagagacttgctatcttctggaaggaaaagtgaaggtctttcctagtgggtcgaatgagtcagttgaaattgctgctggtgacttggttgtgtttcccaaagggatgagttgcacttgggatgtgtctgttggtgttgacaagcactataattttgaataaatcctacaa

SEQ ID NO: 7742 - DNA, 577 bp, Glycine max
ctcacgggtcgacgcacgcctctaacagcagtcataatacaacagaaggggagaaggatggagaagaggttcacttcggataaaaaagtggaaacagtggaagcgaaggtgaaggaagttggagagaaattagggtttaggattgagatagggaagaacggtgctattgggttgggaaaggggaaggtgggtgttgtggttgaggtgtttgagattgtggctgacttgttgcttgtggcggtcaaagtggtggatggtgggctggagtttgaggagcttcattgggatgattggagaattggccttcaagatcttgttctctcatggcatgatgttggattggagctttagagaatacagtctaaggttttgtacagatggtcctagtagtcctttatgtttatgtgtttggttccttttgaatcagtaaaacagttttatgtcctctttttgttcatatttatatttatactagcctctgtgtgtgagagaatgagaaggaagaagccaattcttaactcgttaagaatgaataagatgtttcataatgaaaaaattagtaattggtttgatgacc

SEQ ID NO: 7743 - DNA, 596 bp, Glycine max
gattatctggtgaggggaacgatgatataaaacctcactctcactcgcagatctttcactcacccaaaaccaacctactccaaggaagtcccctaatcagaaccagagatggacaccaaacccaccgagatcagcagcggcaagatgttcggaggttacaacaagagattcaagcatttcagccttaccctgggatgctccatgaacttccacatctacttccctccatctccttctccctctcacaaattcccagtgctgtactttctctctggcctcacttgcaccgacgagaacttcatattcaagtcgggtgctcagcgtgccgcttccgccgagggtgttgccttggttgcccccgacacttctccgagaggcttgaatgtggaaggagaagcagacagctgggaccttggagtaggtgcaggattttatctcaatgccacacaagagaaatggaagaattggcgcatgtatgactatgttgtcaaggagttgccaaagcttctgagcgataattttccacaccttgaaacatcaaaggcttctatatttgggcattctatgggggggcatggtgctctaacaatctacct

SEQ ID NO: 7744 - DNA, 544 bp, Glycine max
  unsure (1)..(544): unsure at all n locations
ctcagtttatgccctttcgccgccttattctgattccagaaacatcttcaatcaatctcccctcgtctcctctcaatcaagtttgaagctgagaaataatcatggccggtggtgcgaatttcgtgcagagggttctctcttacgtggtgaatgaagtggttgtcaatggtcttgccaacagccctgcatttcagaggtttgcagtgaggacatcaaaaagaattgaagatatttctaacaaagctgttcagaagaggcaggagctagctgagcagatcaaggacatctcaaaaaatatggagtcattcaagaaccagtaattttggtattcttgctacattgctgaagttaatggagtcctgattttctttagccaaagatgttgctggtgacaaggctgggtgtttgtaaatttcttttgttgtaatatattttggttcttaactcgtgatctcaaaagttgggatgcaagggtttttcagtttgcttggtgaactgaaaacaggattaggaggatattatngctagtttacgatactatcac

SEQ ID NO: 7745 - DNA, 1959 bp, Glycine max
gatttacaattaaaaaataagaccagcttattttgactcgtgagtgtagaagacgaaaagagagtggagagagagagaagtgagagtgtgagagggagcacagtgaagaagagaacgaaggaacgaagatggagactcctcctccgcaacaaggcgtggtgaagaagaaggagacaaggggccgaaaacccaagccgaaagacgaacacgccaaggcgttgaaggaagggagaaaaacacagcaacaacaacatgatcagcagcaacaacaacaacagcaacatcaaccttcggtggacgagaaatacacgcagtggaagtcccttgttcctgtcctctacgactggctcgccaaccacaacctcgtctggccctctctctcttgcaggtggggcccccagcttgaacaagccacttacaagaatcgccagagactctacctttctgagcagactgatggtagtgtgccgaatactctggtgattgcgaattgcgaggttgtgaagcctagggttgctgctgctgagcacatttcgcagtttaatgaagaggcgcggtccccatttgtgaagaagtacaagaccatcatacatcctggtgaggtaaacagaattagggaattgccacaaaattccaagatagtggctacacatacagacagccctgatgtccttgtttgggatgttgaaagtcaacctaatcgccatgctgttcttggagctacaaactctcgtcctgatttgatattgactggacaccaagataatgcagaatttgctcttgcaatgtgcccaactgaaccctatgttctttcaggaggaaaggacaaaacagtggtgttgtggagtattgaagaccatataacatctgctgccacagactccaaatctggtgggtcaattatcaaacaaaactctaaatctggagaaggcaatgataaaactgctgatggccctactgttggaccacgaggcatttattgtgggcatgaggatacagttgaagatgtgactttctgcccatctagtgcacaggagttctgtagtgttggagatgattcttgtctcatcttatgggatgcacgtgttggctctagccctgtggttaaggttgagaaagctcataatgctgatcttcactgtgtggactggaatccccatgatgataatctgattcttactgggtcagcagataattctgttcgcatgtttgatcgccgcaatctcaccactaatggagttgggtcacccatccataaatttgagggtcacaaagctgctgttctttgtgttcagtggtctccagacaaatcatctgtatttggaagttcagctgaagatggtctcttaaacatttgggactatgagaaggttggtaaaaagatagagcgatctggaaaatcaataagttctcctccagggttgttttttcaacatgcaggtcatagggataaagttgttgacttccattggaatgcatatgatccatggacgattgttagtgtgtctgatgactgtgaaagtactggaggagggggaacgttgcagatatggcgcatgagtgatttgatctacagaccagaagatgaggttttggccgagctggagaaattcaaatctcatgttgtggcgtgtgcttcaaagactgaaaaatgacatacgtcgtaggcaaaaatgagttatattattattgctgttgtatttaatttaacatttgcggtggatgtttcatggcattttaaaaccattcatgtatggggctggagtagggaaaacctagattaacgtagatctgacgatgatttgtggttagtgttacttaattgatacaattctattttctgtttgaagatcatgatccgtggttcatgtggctcatttctccaacccctgagcgggacatacattgttaattcattatgatctttatgaaactttagacatgctttttacggttggc

SEQ ID NO: 7746 - DNA, 498 bp, Glycine max
cccacgcgtccgaagacgacagaaggggggggtgtgctgaccaatttcaggagttggctcaagtactccttggcttgttcgtatttcaacaatggctaagaaatctgtgaagtactatgtggttgacgcattcactgattcagcgtttaagggaaaccctgcagcagtgtgtttcttagaagaggagagggatgaagagtggttgcaagctgttgccaccgagttcaatgtccctgtcacctgtgtacttaactcgcattgccgagtcccatcacaaccttaactcgttccgtggaacctctaacattccacgttttcacctcagatggtttactcatactaatgaggttaaactttgtggccatgccacgttagcggctgcacacacactattttcgtatggtttggtgaatttcaatattattgagttttttactgcatctggggtactaactaccaaaaagatcccaccgatcaataactgtaccagtggctcaa

SEQ ID NO: 7747 - DNA, 1279 bp, Glycine max
ggttttcaacttcgtttttttttggtgtttcggtgtctctcagattaataggttgttcctacggctgctgcctccatcttcaccttgtttctcaacagaaactactgatctacctctccatcacccttctctacacaggaaatagtatcttcgtttgttcaatatgtttggttcatcaggcatggcacaggaatctggtatgttcatggttagccagacaattggcagtgttttgtgctgcaaatgtggaattccaatgcaacccaatgctgctaatatgtgtgtcaagtgtctgcgatcggaagttgatattacagaaggactgctgaagcgtcttgtgctggtgcattgccctgagtgtgagagttacttgcagccaccaagaagttgggtcaagctgcagctggaatcaaaggagttgctgacattttgcttgaagaaattgcagaagaatttgaattcgaataaagtgaggttggtgcatgccgagtttatttggactgagccccattccagaagggtaaaagtcaaggtcaaggttcagaaggaggttctgaatggagcaatactcgaacagtcttatcccgtcgagtatgttcaacaagagcatatgtgtgaatcctgttctagggtccaagctaatcctgaccagtgggttgctgctgtgcaactcaggcaacacgtttctcacaggcgtactttcttttatttggagcagctgattctgaagcatggtgctgctgccactgctatacgaatcaagcagatggaacaaggtatcgacttctttttctctaatcgaagtcatggagtcaaatttgtggagtttattgggaaagtttctccggtaaggagccgccatgataagcagcttgtttctcatgatccaaagagtaataactacaactacaaatatacattttctgttgaaatcagccctatttgccgtgaggatttaatctgtctgcctcctagagttgctgttagtttgggaaatattggtccacttgtgatttgcaccaaggttaccaacagcattgctttgctcgatccatttaccttgagacactgtttcatagatgctgatcagtactggagaacatcctttaagtcgttacttactagcagacaattggtggaatatatagtgctggatgtggagactgtttcatctgaggtcactattggtggcacgaaatatcgtttagcagatgctcaggtggctcgtgtttcagattttggaaagaacgacacgatatttaacatcaagactcatctt

SEQ ID NO: 7748 - DNA, 517 bp, Glycine max
gcaacgggtcagcatgcagtggcacttcagatgatcaaatcccattcccttaccttacttgttccaattcccaacgcttcttcaaatcttttatttcattcttcagaccaaaaaaagaaaaagagaacattgttcaacgaagcaagatgcttagcaaccgcatatggcagaggagagctttgatctccgcccggaccttattttctggctctgcttctcactcttcatcatcttcccatgcgatctcgcttcgcttcgccaaagctaatgctccttcttcttcacatgtcattttcaattttgcacgtgtggacagatattggttttctactcaacccgccctagagcttcccgcgagcaagatcgtggacgtgccgttggcacaaactggtgaaggcatcgcagaatgtgagcttctcaaatggtatgtacaagagggggattatgttgaagactttcaaccactttgcgaagtccaaagtgataaagctaccatagaaattactagtcgttacaa

SEQ ID NO: 7749 - DNA, 587 bp, Glycine max
ccatcgcacagttagtatggatgatatcattctcgtgaagaatgaaatgaaaacgacaatcaatgatgttttattgggagtaacacaagccgctctcactcgctacttgaatcgagcatatgatgtaggcgcaaatagcaacggtgtgaaacagagatctagtgtcctcaagaagattcgccttagggcatcaattcttgttaacattagacctgctggtggaatacaggaactagcagatatgatggcagagaaatcaaaagtcaaatggggtaattgcatgggatacatcatcctccctttctctattgttgtgtataaagatccattggaatatgtacgtcatgctaaggccacaatagaccgaaagaagcactcattagaagcaatttgctcttacgcttgtgcaaagctggtactcaatttattaggtgtaaaggttgctgctgccataacacgaagagttctctttaacactactgtagccttctccaatgtgcctggtcctgtggaagaaattagcttctatggtcatcccgtggcatacattgctcctagtgtatatggacacccacttgcactgaaca

SEQ ID NO: 7750 - DNA, 540 bp, Glycine max
gcagcaaaagacatttgaagcgccgtcgtttcaatctccatcgtcgccttgaaaagaaaaaccctaattacaagaagttgcaaaactaagtggaataagagctgaaaaaccctaataacaatgggaggaaaatgtccgcacaggaacgtgaagaagagaagatattctcacaagaccgcgcggcgaaccaaatttgagctgaaaggggacgacatggtttatgcgcagctcaacaaacccgatcaagagagaccccctttacccgtcgacgaagatttgcctgggatgggccagtactattgccttcactgcgatcggtactttgccaatataactgtgagggatgagcactttaagaccaaacgacacaagaagcgtataaaacaaatgatgggtcctgcaccacatactcaacttgatgccgatttagcttctgggatgggtatgccagacaatggaccaaagctaatgtctatgtaacttcgtttttggtagtgggtgggacgattgtcttgggagctggtgttataaagatatata

SEQ ID NO: 7751 - DNA, 485 bp, Glycine max
gggttgaagggtagggatgaaatgagagcgagaggagatgaagctgataaagggcagtgttgtgttaacaatcacaatcacattaagtagcgccattctgttgctactattgttcccacaaaaccaaaagccatcttcttcttccatgtcgagggcgcgaagctttgttctgtggcttcacggcctgggtgactctggtcccgccaacgaacccatcaaaaccttattcacttcttcccaattcagagacaccaaatggtccttcccttctgccccttccgcccctgtcacttgcaactatggttctgtaatgccttcatggtttgacattcttgagattcccgtggcagctgattctccaaatgacgagagtagtttacttaaagctgttcgaaatgtgcatgctactatagacaaggaaatagctgctggcataaaccctaacaacatatttatctgtggattcagtcaaggaggtgccttga

SEQ ID NO: 7752 - DNA, 726 bp, Glycine max
ccctactctctctcttcactctctctcttctgcaactctttcccgttgaacacacacaggcacaagacaacccaccaaattctctcgttccgaataatcaagaaaattttgaaaaaaaaaaagagaaaactttattcacacacattcattcatttatcataatggggaagcttctctgtgactcaacctccgtcgccgaaccattccaaggttcgccgccggccgcgcttccgtggcgggaacccaaaccagaacctataggaaccgtagatctcgtcgttccggccaacgtcggtggcgcgccgttcgccggcggtgggtgggaagacgtcgtcggtttggaggagcagcagcggcgccacctccagaggctccacgcgaggggagtgctctggaagccaccgccggaggaggaggattcgtcgtctccgctgtcgtcctccgccctcagatctgttgtcttccggctctctcacggcggtgaggtctccgccgacggaaactgcctgttcacggcgtcgcggaaggcaatgggcggcgaggacgttgacgcgcgcgagctgaggcggcggacggtggcgcggttcttggaggatctcggatctgtgagttttgaggagagagaagcgatcgacaacgcgattcggcacatgtactcgccagatctgaagaacggttgggggattcatgtcgttcaagaggtgaaattgtatggcgaaaaggagg

SEQ ID NO: 7753 - DNA, 423 bp, Glycine max
gagacagggaactggagacagatatggattggcatcacggcacaaagccacttgttcctcggccagagaccttaagcttcttctacaactataactacaacagtccatatccaggagtggaagtgaaacaagcagcattgatggagacaggagaagggtcagttccagcattaatggacagcagaaacaaagagaagaagaagcgattaacaaataaccagatagagttattggagaggagttttcaggaggagataaagttggaccctgaaaggaagatgaagctttccagggagctaggccttcagcctcgccaaatcgctgtttggttccaaaatagacgaacaaggtggaagaccaagcagcttgagcacttgtacgatgtgcttaaacaccaatatgatgtcgtctccaacgaaaagc

SEQ ID NO: 7754 - DNA, 699 bp, Glycine max
tcagtaaagctgcaacagcaagacaacgagagaatgggagtgaatgaataatgagcgtcattaatttacgattttgccactgttcccaactcctcctcctctcaccaaacccgaagctctcttcttcctcgcaaactgcaaagttaactctgagaaagaaaaacccaacgaccccttttgccatttcctgcaaaacccgtttctcttcttcaattcgcgcgtccatggcttcaccctccatcacagacgccgaaacaaagccgttttctgttctcttcgtgtgcctcggcaacatctgcagaagccccgctgctgaaggagtcttcactgacttagtcaacaaaagggacctcaattcgaagttcaaaatcgactctgctggcaccatcaattaccacgagggaaatgaagcggattcgagaatgagggcagcttcaaaaaggcgtgggattcagataacttctatttcgaggccaatcaagccctctgatttcgttgactttgacctcattcttgctatggacaaacagaacacaggtaaagtttggtcatgtgttatgacctgataaacttttatgtaagttcttatcagagtagaaaattagaatagaaagtgaattgaatttcttgtgtaagctaaaatcaatttatgcatctcagctgccggagaacttaaataaaagcacttatataaaagtt

SEQ ID NO: 7755 - DNA, 958 bp, Glycine max
cctcgagccgattcggctcgagagcaaatacccctttattaatcttaaaggttttattgtagggaacccagaaactgatgattactatgactataaaggccttcttgaatatgcatggagccacgcggttatatcagaccagcaatacgacaaagcaaaacaagtatgtgattttaaacaatttgattggtctaatgaatgcaacaaggccatgaacgaagtcttccaagattactcagaaattgacatatacaacatttatgccccggcatgtcttctaaacagcacatcctcaatagctcatgatggcgacagtaacggccctgaatcattaactaaggagagaaatgattatagactaaagaggatgagaatttttgggggctatgatccttgttattccaattatgcagaagaatacttcaatagaaaagatgttcagtcatcttttcatgcagatactaaaagagacactaacgtagcatggaaggtgtgcaagtggccttaagatttggatttacagtggagacgcagatggaagagtgccggtgatagggacacgatattgcgttgaggctctgggattacctttaaagtctaggtggcgaacttggtaccatgataatcaggttggaggaaggatagttgaatacgaagggctgacatatgtgacagtgagaggagcaggtcacttggtgccactgaacaagcccagtgaggctctctctctaattcattctttcttaacagaagaacatcttcctactcgtggataatcagcgtaatatatatatatgtacttgtgccagtattttggggttggcaatttttctcacaagaatgaagacccttgtatgatcaatataaataaatgaacagcaatgatatgtagacatcccttaactacaaatattcatttgattcgtctcataaaattataatcatttattatacctgc

SEQ ID NO: 7756 - DNA, 679 bp, Glycine max
gaaagcaaggtgtgatgtgttcttgaacatgttgctggtcagtgttggggttgtcatttcctcatatggggaaattcattttaatatagttggtacagtttaccaggtcacaggcatatttgcagaagctttaagactggtcttaacacaagttcttctgcagaaaaaggggttgactctaaatcctattacaagcttatattacatagctccctgcagttttgtgtttctctttgtgccttggtacctactggagaagcctgtaatggaagtttcgcagattcagtttaatttttggatcttcttgtccaacgctatatgtgctctagccttaaatttctccattttcttagtcattggtagaaccggtgctgtaaccatccgggtcgccggtgtgcttaaagactggatattgatagctctttcaactgttatattcccagaatctacaataactgggttgaatataagttggctatgctattgcattgtgtggagttgtgatgtacaattacataaaggttaaggatgtccgtgcctctcaattgcctgttgaaagtataccggataggatcacgaaggactggaaattcgagaagaagtcatcggatatttatgtgccagataacattggtgacgatgagggaagcagtggagctaatggtactgcttctgatat

SEQ ID NO: 7757 - DNA, 2035 bp, Glycine max
gttattatgttggatttgcgagaattggaaataggttaaagcttattgaaaccgtagtttattttctaccttgctgcagttggaacacctaccatctatggttactggtgtttggactgatgataataacctgcagctcgaggcgacgacgcagttccggaagctgctttcgattgaacgtagtccgccgattgaggaggttatacagactggtgtggtttctcgctttgttgagtttctcatgagggaagactttccacagttgcagtttgaggcagcctgggctttgacaaatatagcttctgggacgtctgaaaacaccaaggttgtcattgatcacggggctgtcccaattttcgtgaagctacttgcttctcctagtgatgatgtccgtgaacaggcagtgtgggcattaggcaatgtcgcgggggattcacctagatgtcgtgatcttgttctcggtcatggagctttgcttcctctgttggcacaattaaatgaacatgccaagctttctatgcttagaaatgctacctggacactttcaaacttctgcaggggcaagccacagcctccttttgatcaggttaaacctgcacttcctgctcttgcccgtcttatccattcaaacgatgaagaagtattgactgatgcatgttgggcactgtcatatctttctgatggcacaaatgataaaattcaagctgtaattgaagctggtgtttgtccccgacttgttgagctgctgctgcacccatccccttcagtgctaattcctgctcttcgaactgttggaaatattgtcactggagatgatatgcagacacaggttatcatcaatcaccaggctcttccttgccttctgaatctgttgaccaataattataaaaaaagcatcaagaaggaagcttgttggaccatatcaaacatcacagctggtaataaacagcagattcaggctgtgattgaggctaatctaattgctcctttggtcaatctgcttcaaaatgctgagtttgatatcaagaaagaagctgcttgggctatctcaaatgctacatccggtggttctcatgaacaaatcaagttcctagtaagtcaagggtgtattaagcccttgtgtgatcttctcatctgtcctgatcctaggattgtgacagtttgtctggaaggccttgaaaacatcttgaaggtgggagaagctgataaaaacataggcaatactggtgatgtgaatctatatgcccaaatgattgatgaagctgagggattggagaaaattgagaacctccagagtcatgacaacacagagatttatgaaaaggcggtcaagattcttgagacatactggttggaggaggaagatgagactatgcctccaggggatgcttctcagtcagggttcaactttggtagcagtgacgctcctgctgtgccgtccggtggattcaactttaattagaagatattcatgctctactggggagttttggttggtctatctgtgaagtcctcctttatgacacgacagcagttgggggacaagtcaacgtcttgtcattgtcctaatgtccttgggttgtacgaggtccagcaagtaaatacatggttgctggactgccttgggtttttgcaatgcctgatatttcatatctcatggtgtaaaatgctttgtggctatatttttttgccaccgtagagaatactagagtcttctttctgccaagtgatcatttcatagaattaatgaatgctcagtctcgtgattttttttccctttgttatatattgtcctagactggagtaaaaagttacgattgttggtttttttggcaaatgccaaatgctactgcctatccattagttacaaggaacgttttggagtctttcttttatcctcttcctttgtaagcttttttagttgacgtttaccccaaagttccatttctcatcacgttatgtaggccccggtacatttacattatttatttagtacttcaacttgggactatgttttcaaaagaaaacatgctgc

SEQ ID NO: 7758 - DNA, 572 bp, Glycine max
  unsure (1)..(572): unsure at all n locations
cccaaaccctcttcactttcattcactccgttgccatctcaaacccgaatccaaatccaaatccaacacgatgtcgtatcgaccttccgccaacgccaggaccgaggttcggcggaaccgctacaaggtcgccgtggacgccgatgaaggtcgccggcgccgagaggataccatggtggagatccgaaagaaccgtagggaagagagtttgctgaagaagagacgcgagggtctccaatcccagcagattccttcgtcacttcactctactgtaattgagaagaagttggaacaccttccagccatggttactggtgttttcaccgatgacaataacatgcagtttgaggccacaactcagtttcggaagttgctttcgattgaacgtagcccacctatcgaggaggttattcaagctggtgtagttccacgctttgttgagttcttgatgagggaagattttccacagctgcagtttgaggcagcttgggctttgacaaatatagcttctggaactttctgaaacaccagggtggtnattgatcatggtgctgtccccaattttggaaaag

SEQ ID NO: 7759 - DNA, 488 bp, Glycine max
tttgtccgccttcgcgtccgataaaagaaacccaaaatctctctctctctctcgttcgctttccgtatccatatatatcccaaaccctaccgttaggttccccaattcttcaacaccccgtgggaccggtgctctgcttcttagtagttcgtacggtttttccgtcgattgcctccgaaacgatgtcgtatcgcccaagcgggaactccaggaccgaggtccgccggaaccggtacaaggtggcggtggacgcggaggaaggtcggagacggcgagaggacacgatggtggagatccgcaagaaccgcagagaagagagtttgcagaagaagaggcgcgaagggctccaacctcagcagatgcctgcgtccgttcactctagtttggttgagaagaagttggaacatctaccatcgatggttactggtgtttggactgatgataataacctgcagctcgaggcgacgacgcagtttcggaagctgctt

SEQ ID NO: 7760 - DNA, 365 bp, Glycine max
tccaggtccacttccgcttctttcccaattcaataaaccctcttctctcttttcaaactcccaattcccaaacaataagacccgcaaaccctcattctctccattgccatcacaaaccctacgcttcggttatctaatccaaatccaagacgatgtcgtatcgaccttccgccaacgccaggaccgaggttcgtcggaaccgctacaaggtcgccgtggacgccgatgaaggtcgccgtcgccgagaggataccatggtggagatccgatagagccgtggggaagagagtttgcagaagaagagacgcgagggtctccaatcgcagcagattccttcgtcacttcactctactgtaatagagaag

SEQ ID NO: 7761 - DNA, 545 bp, Glycine max
agaaacagtgatgatgagcctgatgatggcgatgggggatatgatgatgatttggacaaactgatggataattcggatgatgagaaagggaaatcatagatggtgcttgaaattattggctgacattaaataaggggttgcaacatgcctgagaatatacatgatgaaatgaggcttaatttattgatgcgacacatacggtggctgatctgttccgtgatgcctacatttattctttcaaccctttcctgcccctttatttatgtagttgcttccccatgttgagggatgaaattcctgcccctttatttatgtagttgcttccccatgttgagggatgaaaaagttgggtttgtgattataaaaaagttaattatttggtgtctagttttgttagttttttatgtaaaaaatacacattaaatgtactgaaaggaaaaggaaaaatcattcagatattgcttgccccccgatgtgtatacttagatcctattgtattgcattgagaagcagagggaaatgtgtggatttgataacgtttaggg

SEQ ID NO: 7762 - DNA, 389 bp, Glycine max
gatgcacaagtttgttgagatagctagaagcaataagatgaaaatgaaagtgcttgttttgtttgttgctacagttttggtagcatatgaatgccatggcccagactaccagaagttccctctccaaatgaaaactgggtttggtgggcaatacagcaatgaggtggcatgtgccagttggaggcttggcgtggaagcaaacaacgtagtcaagtggcaaactgttcctgcagcttgcggagagtacatagctgactacgttctaggagaccaatatagatcagattccaaaacagttaaccaacaagcttatttctatgctaaatccctcatactcaccaactagagatgtcctttgtcctggacgttgacgacactactctctctaa

SEQ ID NO: 7763 - DNA, 616 bp, Glycine max
gggaatagcatcggcagcaccacaacactgtgccctctttctctctttccttcgcagaagccatggcctcatttgcacgtggagccgcatctttaacccgcattggtctttccacttccaagactccccttcaactcatccaccgccgtggcctcgccgatcaccatggccctcccaaagttgcctgctggaaagatccaatgagcccatctaaatggaaggaggagcactttgtgattgtctctttaactggttggggactactcatctatgggggatacaagttggccacaggaggcaagggcaagaaagaagaggaattggcaaaagcataacactgaggcttggagaatatttacaattcaaagtgttcttggtaataatgcgagctcccagacttttccgagattttcagactcggtcttgtttcatggcaaacaaatcttttggctagttatccattaacatttgcgaacagtaatattgggagatgatttttttttttcagaacaacgtgtttacatttaagttttatttgcccgttttatgcaaattcccgcattcctctaaaaaaaaaaaaaaaagaagatacaacatcaaatattactctgaacaa

SEQ ID NO: 7764 - DNA, 936 bp, Glycine max
agggaattgcgccggaattcagatctagcgtttgcactttgcacaatgcgagttctataggatcgtttggttataccgattagtgttactaaaacaacgtttttgtgatatcgagaaaaaagaaaaataaaaagtgatgtcgaggagaccggggaatccttatagaaggttcggtgacagtggcggtggactgttctcgaaatctaggtcgccaccggttttgtctattgcgctcgtagttgtgggaggtttgtttctcgttggctatgtgtatagaggctcaggtggaattggaaaccgtatagaatctgttagcagggttgaaggtgattatttgtgcagtagagaggtccaacaagcaattccccttttacagaaagcatatggagatagcatgcataaagttttgcatgttggtcctgatacttgctatgtggtctctaaattgctgaaggaggaggaaactgatgcctggggaatagaaccatatgatacagaggatgctgataataattgcaaaacacttatacgtagaggcagtgtgcgtgtgtctgatatcaagtttcctcttccatacaggccaaaatctttctctcttgtaattgtttcagatgctctggattacctgtctcccagatacctcaataaaactcttccggatttggtgagggtagcatctgatggtgtagtgatatttactggttttcccaccactcaaaaggccaaggtagctgatgtttctaaatttggaagagcggtgagtgtattttacataaagaaatattagaatgcaatccatgtttttgttgttgctttaaatttaaggtcaattactaagcctggatgaatagaagatccttgatcctagactctcaacctttttaatgctaaggatattatcacctaggtatatcttttatttattttatgtacaaa

SEQ ID NO: 7765 - DNA, 473 bp, Glycine max
ggatgaaagaaatataaatagaagcagcagcgggatttgctagaactagaaattgcaatgaagaagaggagctgcagcagtagtagttcagtttttgaggaggcgaatggagtggaggatgaggccgaacctcaacaaccttcatcttgtgcagcagcagcacttgatgagttgcataaagagaaaaatgagaatggagaagaaaccctcgtgcctcccaatcccaatcttgacgatggcttctatgaaatcgaaacaatacgccgtaagaggctacgcaagggtcagctccagtacctaatcaaatggcgtggatggcctgagactgccaacacttgggaacctcttgaaaatctacagtccgttcctgatctcgttgatgcttttgaggacagcctcaagtctggaaaacatcagaagcgcaagcgcaagcatgtggatgtgcttcaactcaccctactcaagaagcgctc

SEQ ID NO: 7766 - DNA, 1074 bp, Glycine max
ctaaaatactagtaggagtggattgaggagagaacgagaagaaagtgaagtcgaagaagtgaaggtgttgagtgttttcttcttgtttggatctgagagagaagagcgagcgatgacggtctttcatttcttcaactgcgccattctcaccttcggcccccacgccgtctactattctgccacgcccttatctgagtatgatacactcggaacctctatcaaagccgctgttgtttatcttgcaacggcattagtgaagcttatttgtctagctacttttctcaaggtttcggagagtgatagctttgatccgtatcaggagtttttgaaggcattaataggctttatagatgttgctgggctttattttgccttgacccagttgactcacaggaacatctctcagaatcataaatttcaagcagttggacttggctgggcatttgctgactctgtgctgcatcggttggctccactttgggttggtgccagaggattagaatttacttgggattacattcttcagggccttgaggctaatgcaaatttggtgttgagcatatcccttgctgcacttggatctttgatgtggcttcgaaaaaataaacccaagaccctcatccctattatatatttgagtgcagggattgtagcaaccatgccatctatcacaagctatctgaggcgtggattggggtggcactttcccaaagtggtcggttttgagctcttcacatccctggtgatggcttttataagctggcaactgttttctgtatgtcagagaccttcagtgtgagaaagctcattacatactgatcgaatcctgcttaactattttctggctagagttttgatccagggtcatctgcttttttggcagctgcaatgctgtttctttaaattccataaatgtttttatcaattttagtttctttttcttaccagtttgatttaattaatttaacacgctttcctgcgggagaatggtggccgccaatccattagaaatttggtttattcagaaaattagagacatcgttaaccccatacatctgggattgataggttccc

SEQ ID NO: 7767 - DNA, 559 bp, Glycine max
ggttcttagcccgggcatttctccaacttgggagagaacatcctttctcttaggaagtaaaagttattaataaaaagaaaaaataattaatatgaaaattaaaagttaaaacaatcaaaagcagcaatatacttactaacaggagtggattgaggagaagtgagcctgtggagtgttttcttctgatttcatctggatctgcgagagatgacggtctttcatttcttcaattgcgcgattctcaccttcggcccccacgccgtctactattctgccacgcccttatctgagtatgatacactcggcacctctatcaaagccgctgttgtttatcttgcaacggcattagtgaagcttatttgtctagctacttttctcaaggtatcagagagcgatagctttgatccgtatcaggagtttttgaaggcgttaataggttttatagatgttgctgggctttattttgccttgacccagttgactcacaggaacatctctcagaatcataaatttcaagcagttggacttggctgggcatttgctgactctgtgctgcatc

SEQ ID NO: 7768 - DNA, 620 bp, Glycine max
gaaaataaaactcattcacagttgacaacaaaagtctctctctctctctctctctctctcggtgtgtctctatctcattcccgttgtagcaacggcttggcgacacgatgcatagacaatccttgggttctccttctcccaaagtccccaagctcgtaacgccgacgaagacgacgatgctcccaaacctcaccgtctcagtctcagcctctcctcgccgccgcctacgccgccgcacaagttcgtccacctcattcctctcctcactctcctctgcttcttcgtcctctacctcttctcccactctccctctccatcagacttgaatcacttcaccggattcaaccgctcgccctcgcaccgtctagatttggcggagaagatcggcggcgacattggacaatacatggatgtaaaaggaagcgatgttttggcgatccgaagtttgcaacagcttccgaaacctcgccctcaccggaaactcgccgatttttaagctcgcacgtgctcttcgcttattttccttaatattcttgttcctgttgtacatcatatttgcttttatttatcgctcgagaaaaaaataaaatcattttccccttcttacaaaaaaaaaaaaa

SEQ ID NO: 7769 - DNA, 655 bp, Glycine max
gacaagttacaactcatcaattcggcagataaaggtagtagtagtgttactttccaatttgaattgttccattttcatttctttcgcaaaagttgcaactacttcctcagaaaaaaagtttctaagttaaggaaatccagagagacaaaaatggccggtgacggtgcagctacatgcatagacatcctccttgccatcattctccctcctcttggagtctttctcaaatatggctgccaggtggagttctggatttgtttggtgctgaccctttttggttatatacctggaattatctatgctgtctatgctatcaccaagtgatcaccctttaactttgtgtggacaataaacaaatgtcatgggcgtttctgtctttcaactcagatattagtgtttctttaatatatcgccaatgttgtcatattcttatgttctgtttttaaaaccccttttgttcttagcttaagcgagagtggagtgtgtagcttactagcttgtgtatgtagtctctagatttggtaattgatttgaaatacacaatttcatttgtatcaacgatcttgttcatgtatcttatgtaaactgtgctattcattactttcataataataaatccgatttattaatttgaaagtaatgaatcggatttatt

SEQ ID NO: 7770 - DNA, 763 bp, Glycine max
  unsure (1)..(763): unsure at all n locations
cgcatattgcatgttacatcatagcccttagaacagccagaggaacccagaagataaatctttcaaagaaaaaaggagagtgcttagagagagagcaaaacatattattttcattttcatctttttttgagtatcaacaaatggcaaccactgtgatgaccactctcccccaattcagtggtcttagaccccaattctcagctgcccctgtgaagaacttggttgctgtgcaacccatgagtcgcaaggggaagggtgcattgggagctcgatgtgactacattggttcatccactaatctgattatggtggcttctacaaccctgatgctgtttgctggaaggtttggattggctccatcagcaaacaggaaagccactgcagggctaaagctggaggtgagggactcaggcttgcagactggtgaccctgctggcttcacccttgctgacaccttggcctgtggatctgttggccacatcattggggttggggttgttcttggtctcaagaacattggtgccctgtaaaaagcaactatataagtttagtgcttgatgcatctgtaatcaatgttattatgtacttcattttcacatcactctgcagtctttctcaaacttaacataatattcagcttctccctttccctcctatatatctatatatatatatatatatatatatatagttaaaaaatagtttaatgtttatgtattgacaaaataattntacagtattatttaattagtattatccaatt

SEQ ID NO: 7771 - DNA, 651 bp, Glycine max
  unsure (1)..(651): unsure at all n locations
ggaaaattaatccttcaaagaaaaaaggagaatgcttagagagagaaccaaacaaaataatttcaatttcaaccttttttggagtaacacaaatggaaacacggtgagaacaatccccccaaatcaatgggcctaaaacccaaattccaacctgccctgtaaaaactggttgccgtcaccataatccaagggaagggtcattgggagctcgatgtgactacattggttcatccactaatctgattatggtggcttctacaaccctgatgctgtntgctggaaggtttggattggctccatcagcaaacaggaaagccactgcagggctaaagctggaggtgagggactcaggcttgctgacaccttggcctgtggatctgttggccacatcattggggttggggttgttcttggtctcaagaacattggtgccctgtaaaaagcaactatataagtttagtgcttgatgcatctgtaatcaatgttattatgtacttcattttcacatcactctgcagtctttctcaaacttaacataatattcagtttctcccttttccctcctaatcccacacccaccccctcatacaaaaacaaaaaaagatctgttatggcaaatgatcaaatgctttgctataaaaaaagaaaaaa

SEQ ID NO: 7772 - DNA, 1138 bp, Glycine max
gatcccattcccatttttccttccctccaaaatggaagagaaactaaagtacccctgtctctcttccttgttaaccctcttcctctgcatctccgccacttccactaacccacacaactcccaaacccaaacccttctcctccataccctccctgacccacccacactctcatggcccgaatccgccaccgtagaacccgacccggaacccaccacatccctctcccttcaccacatagacgcactctccttcaacaaaaccccttcccaactcttccacctgagactcgaacgcgatgccgcaagggtcaaaaccctcacccacttagccgcagccacaaacaaaacccgacccgccaaccccgggtcgggtttcagcagctccgtggtatcgggtctctcccaaggcagcggcgagtactttacgcgcctgggcgtgggaactcctccgaagtacctctacatggtcctcgacaccggaagcgacgtcgtttggctccaatgcaagccctgcaccaaatgctactcccaaaccgaccaaatcttcgacccatcaaaatccaaatccttcgccggaatcccctgctactcccctctctgccgccgcctcgactcccccggctgcagcctaaaaaacaacctttgccagtaccaggtttcttacggtgacggctccttcacattcggagatttctcaacggaaactctcacgttccgacgcgctgcagtctcgcgcgtggccatcggctgcggcacgacaacgagggactcttcgtgggcgccgcaggtttattgggcctcggtcgcggcggcttgtcttttcctacccagaccggaacccggttcaataacaaattctcttattgtttaacagaccgaaccgcttccgctaaaccgtcttccgttgtgttcggcgactcggctgtctctcgaaccgcccggttcactcctttggttaaaaaccctaagcttgatacgttttattatgttgagcttctcgggtttagtgttggcggcgcgccggttcgggggatttcggcttcactttttcggctcgactccaccgggaacgggggtgttataattgactcagggacttccgtcacgcgcctcacgcgccctggttatgtggcgttaa

SEQ ID NO: 7773 - DNA, 481 bp, Glycine max
  unsure (1)..(481): unsure at all n locations
tccttcatccgcttcctgtcttgttcgcatcggcaccatcggagcagccgcggacaaggacttgaagcggatgaaggcgaatttcgaggagctttgcgatgaggataagattctggtgttctttaagaagctgttgaatgagtggaagcaggagttgcgcgagatgcctgaggcggagaagcgcacggccaaggggaagtccatggttgccactttcaagcagtgtgcgcgttacttgaacccgctgtttaagttttgcangaagaaggttcttccggatgacattcgacaggcgttattgttgatggttgaatgctgtatgangcgagattatctggctgcaatggaccattatatcaagctggctatcgggaatgcaccctggcctattggtgtcactatggttggtattcacgaaagattctgcccgtaaaagatctacaccaacagtgttgctcacatcatgaatgatgagaccact

SEQ ID NO: 7774 - DNA, 532 bp, Glycine max
cggacgcgacacaaaaggagcatcgagtaggtttcctactcccttctcatcgttggcaagatgagtgccatgaaattttgccgtgaatgcaataacattctgtaccctaaggaagacagagaccagaaagttcttctcttcgcttgccgcaactgcgaccatcaggaggttgctgataacttctgtgtgtataggaatgagatacatcactctgttggagagcgcactcaggtgttgcaggatgtcgctgcagatccaacgcttcctcgaaccaagtctgttcgctgcagtcaatgcaatcatggtgaagctgtctttttccaggcaactgccagaggggaagaaggaatgacactttttttcgtttgctgcaacccaaactgtggacacagatggagagactgaaatttgtgcttcctcagatcaaaggttcaatattggggagatctaactatttgtggttatctgaaaaaacttggctgatgcggggacagtaatactgaagtatttgtgttacctgtttaactgcagt

SEQ ID NO: 7775 - DNA, 784 bp, Glycine max
tcgtaatttaagtggagagagagagagagagaaaatcttgtgcagcaacgcagtgttgtgagtgagttgggttttttctttggttttcctgagctgtgttttattctctttatctctctctctgccctctcatcttcgagctccgatggcgagcctgtggcgcgcggcaaccggcatgacggacaacgccaccgattacgacggcgtcgagttctggtcgaaccccgagcggaccggctggctcaccaagcagggcgagtacatcaagacctggcgccgccgctggttcgtcctcaagcaaggcaagctcttctggttcaaggactccgccgtcacgcgtgcgtctcgtccacgcggcgtggtccccgtcgccacgtgcctcaccgtcaaaggcgccgaagacatcctcaacaagcccaacgccttcgagctctccacgcgctccgacaccatgtacttcatcgccgactccgagaaggagaaggaggattggatcaactctatcggccgctccatcgtccagcactccagatccgtcaccgattccgagatcatcgattacgataacaactcctccaagcgctgacaaccacgcgctctcaatccacgcgcctctttcggtgagttctcctttttcttctttttccttttgttttactatgattgtgtatattactattactattatatatcgatcccgatcgtgctcgttcctgtgaggaaactctgtttatgtacctgaactgctatcaaattgtaatgatttttagggctttgtggattt

SEQ ID NO: 7776 - DNA, 503 bp, Glycine max
acagattataaatagctgcaaccactttggttgactcatacaggtcccttggagccacttgtcctgtattgaaaatccattttgcttcatttcattccctcacatagtgttttttttctttccatggagaacttgttgggtctgctgagaattcatgttgaaaaaggtgtcaatcttgccatcagggatgtggtgagcagtgacccttatgttgtcatcaaaatgggcaagcagaagctgaagactcgggtagtcaataagaatctaaatcctgaatggaatgatgacttgaccttgtctatctctgaccctcatgctccaattcatctacatgtgtatgacaaggacacatttagcatggatgacaaaatgggggatgcagagtttttcataggtccatttattgaagcagtgaagatgcgcttgtcaggtctccccaacaatactatagttacaaagtgctacctagcagacaaaacagtttagctgaagagagtcacatt

SEQ ID NO: 7777 - DNA, 327 bp, Glycine max
  unsure (1)..(327): unsure at all n locations
gagggtaagggatgtcgtcgattgtgaagaacagatactgggttctgaggcatggcaagagcattcccaacgagcgaggcatcatcgtttcctccatggagaacgggactcgccccgaattccaattggcctccgacggtgttcatcaagcacaactcgctgcacaatcattccaaaaggaactagaggctaataatatcccgcttgctaatgtacgcatttgctactcccccttttcaagaacaacccataccgctaacgttgtttcaactctcttgaatctcgcttttgatggacnccactgtaaggtcatccaagatcttcgag

SEQ ID NO: 7778 - DNA, 618 bp, Glycine max
gacaggaaggatatttgataggcggaagcggagaaagggatggtgcagaagcagaaaacgacatatatgcagcgtcggtgtttttgtttcatgttttgactagcttgaaggctgactttcccaaggcgaagaagaagtaaggagagaaagagatggcagacgatctgtttgaaggattgccccctccttcctcaaacactcttcttcctcatcaacaacaacaactccaaccacaaccaattgttgttgctaccaacatcaacgacactgaatcctctgcagttccggctccaaagccaatcctcaaaagtgccctcaagcgccccaaccctactcaacctgacacccaagctgcagcacctaagaaaagcttgaagttcaaaaccacgacggatgcttctgaagcacaagttattgaggccatgcagaagatatcttcacacatcaagaaccctgcaaagttcagcaaggctgcaaagcttgctatacagctgattcaggcaggaagtgtaaagtcagaaattagtgattatttctttgccatattagaagctgcaatgtcatcatccattacttgtacagatccttcagttcgagcagattatcattctctgttct

SEQ ID NO: 7779 - DNA, 537 bp, Glycine max
atgctgagtttcccaaggcgaagagagaacgcatttgtgatggcagacgatctgcttgatggattgccccctccttcctcaagcactctcattcttcctcaacaacaacaacaacataatcatgagccaattcttgttgctaccaacaacaacaaccctgaatcctctgcagttccggctccaaagccaatcctcaaaagtgccctcaagcgccccaaccctactcaacccgacacccaagctgcagcacctaagaaaagcttgaagttcaaaaccacaacggatgcttctgaagcacaagttattgaggccatgcagaagataacttcacacatcaagaaccctgcaaagttcagcaaggctgcaaagcttgctatacagctgattcagatccttcagttcgggcagattatcattctctgttctccgtagctcaaaacaccaaagagcacctcaataagaaacaaaagaatcaactggaaacttggacaattaatgctgtggtggcgaatgatttatatacagatgaccagcttt

SEQ ID NO: 7780 - DNA, 2437 bp, Glycine max
caatataaaggataaaaaatgatgtgaatccgactgtccaaagtcatgatcttctgttggccttcccgttactgctagtcactttccaactttgttccactgaaaaacacacttacaaatatattgctaactttatctctctcactcactcacctttctgccacacacactctccccgaggtttgagagggtactggcatccaaaaaatgggttctaaaactaatgcttcgggccatagagcacgaaggccgctgtcaatatttgctgtgcttggtctttgctgtttcttttatcttttgggagcatggcaaagaagtggatctgggaagggagataaccttgcattgaaagttaataacctgatgactgactgcactgttttacccaatttgagttttgaatctcatcacaatgatgtagaaattgtcgaacctgctgagccaaaagctaaagagttcaagccgtgtgatgtgaaatatactgattatacaccttgccaagagcaagaccgagcaatgacatttcccagagagaatatgatctatagagaaaggcattgtcccgctgaaaaggagaaattgcgctgcctcattccagcccccgaagggtacacaactccttttccgtggcctaaaagccgtgattatgcctactatgctaatgttccttacaagagcctgaggatggagaaggctgttcaaaactgggtgcaattccagggaaatgtgtttaaatttccaggtggagggaccatgttccctcacggagcagatgcatatattgatgaacttgcgtcagttattccaattgctgatggttctgtcagaacagcactggacactggttgtggggttgcaagctggggagcctacttgctaaagagaaatgtgctggctatgtccttcgctccaaaggacaaccatgaagcacaagttcagtttgctctagaacgaggggtgcctgctgttattggtgtccttggcaccatccaccttccatacccatcaagagccttcgatatggcccagtgttctcgatgtctaataccatggacctcaaatgagggcatgtatctaatggaagttgaccgagtcttaaggcctggtggatactggattttgtctggccccccaattaattggaaaacatactaccaaacatggaagcgatccaaggaagatctgaaggcagaacaaacaaaacttgaggagttagctgaaagtctttgttgggaaaagaagtatgaaaagggtgatattgctatttggagaaagaaaataaatgctaaatcctgcaaaagaaagtctcccaatgtttgtggtttagataatgctgatgatgtgtggtaccaaaaaatggaggtctgtaaaacccctttacctgaggtaaccagcaaaaatgaagttgccggaggagagttacagaagtttcctgctagactttttgcagtccctcctcgaatagcccagggagctattccaggggttacagctgaatcttatcaagaggacaacaaattatggaaaaagcatgttaacgcttacaaaagaatgaataaattgattggcactactagatatcggaatgtgatggacatgaatgcaggccttggaggatttgcagctgcacttgaatcacaaaagtcttgggtgatgaatgttgtgccgtcaattgctgagaacactttgggtgttgtctatgagagaggtctgatcggcatttatcatgactggtgtgaaggcttttccacatacccaaggacatatgatcttattcatgctaatggtttattcagcatataccaggacaagtgcaacctagaagacatccttctagagatggatcgcatcctaaggcctgaaggagcaatcatcatccgggatgaagttgatgttcttaaccaggttaagaaaattgttgggggcatgagatgggatgccaaactggtggatcatgaggatggccctcttgtgcctgagaagatattggttgctctcaaagtgtattgggttggcaccagcaaaaacaaaacatccaatgaggaataaaaccactattgttcgggtgtgaatcttgtacttcagcctggagttacattccaaggtttttaaatccaccccaaagaaggaatggggaaaaatatgaataatgagaagagaaaaaagattgtagagcaaagcaaaagcaaagattggtatggttattcgagtttattctacgtctgccttacaccaagtgtagaactgtagataaaataggttctaagtagtcttaaattaattttggaggatatggaccagcaagtttagctgtctgaataatttaagcccaagttgttgtgttgatgcccagatatgaatatttgatgttagaatattgaaatattgcaattttatttattctcatcattattcagaaaaaatttgtttgggttcc

SEQ ID NO: 7781 - DNA, 553 bp, Glycine max
ctttagttaactttagtacattggatattctcacaacaggagacatcaataaacagtaccaaaaaatggaggtctgtaaaacccctttacctgaggtaaccagcaaaaatgaagttgccggaggagagttacagaagtttcctgctagactttttgcagtccctcctcgaatagcccagggagctattccaggggttacagctgaatcttatcaagaggacaacaaattatggaaaaagcatgttaacgcttacaaaagaatgaataaattgattggcactactagatatcggaatgtgatggacatgaatgcaggccttggaggatttgcagctgcacttgaatcacaaaagtcttgggtgatgaatgttgtgccgtcaattgctgagaacactttgggtgttgtctatgagagaggtctgatcggcatttatcatgactggtaagtttctaaaactctgttgaactttgtaggagtcttctaatttcatgaaaattttccttgcaaatgagcttcatatactcaaaagaatgattcattaagttgagatgc

SEQ ID NO: 7782 - DNA, 443 bp, Glycine max
cggcaatataaaggataaaaaatgatgtgaatccgactgtccaaagtcatcatcttctgttgcccttcccgttactgctagtcactttccaactttgttccactgaaaaacacacttacaaatatagtgctaactttctctctctcactcactcaccttgctgctgtgatttggatcttgaaggtttgagagggtactgccatccaattaatgggttctaaaactaatgcatcgggctatagagcacgaaggccactgtcaatatttgctgtgcttggtctgtgctgtttcttttatcttttgggagcatggcaaagaagtggatctgggaaggcagataaacttgcattgaaagttaataacctgatgacaggctgcactgttttacccaatttgagttttgaatcccatcacagtgatgtagaaattgtcagacctgatgt

SEQ ID NO: 7783 - DNA, 278 bp, Glycine max
cacacacacacactctcccctaggtaactcatcttgctgctagtgctgtctcttttttgtgtgatttggatctacaaggtttgacagggtactggcatccaaaaaatgggttctaaaactaatgcttcgggccatagagcacgaaggccgctgtcaatatttgctgtgcttggtctttgctgtttcttttatcttttgggagcatggcaaagaagtggatctgggaagggagataaccttgcattgaaagttaataacctgatgactgactgcactgt

SEQ ID NO: 7784 - DNA, 408 bp, Glycine max
  unsure (1)..(408): unsure at all n locations
gattatcattttcgaggaatacgaaagatcaatttaagggtaattgcactcanattaggaacaagggggaaaataatgtatgccagaaaggaagaaggggtgtcaattaatccaacattcaacgtttctgttatatttggcaaacgggatgagccaatgttagtagcatgtgcacgccagctgattgagcacatgagtttatctggctcctccaggccattggtgctctcacttggtcttaaagaccattctgtggaaacattgaaaggcattgtttctgctgtgatggacaatagcatgtggtgagaaattgctgatgaaatatcaaagtttgcagaactgccgtatagctcaaccttgtggagttgcattgatttttaattagtgtatgctgacaatttttcaacc

SEQ ID NO: 7785 - DNA, 472 bp, Glycine max
ggacacaagctggggagttcttccacggagatcatcatcttcacttcaattcagtttactcatcgtgtgatttcatccaaagttagcaacatgagcttcttgaggccttctgcgttgtacaactttctgatcagttatcctgcgctgcgatggctgccatgtcagagttggggcttccttcgatggcccggccttgatgggttcttcaggcttttcgtggttgtgcttctgtggtctacactatccgagcttcgcttcataccctcatcttctatgtaccccacccttcgtgttggcgaccgaattattgtcgaaaaggcttcatattacatcaggagtccagctatacatgatattgtgacatttaaggatccaacacagtcctctggggaaaacacagatgctgtttttatcaagagaattgttgcaaaagcaggagacactgttgaggttaatcatggggcactctaca

SEQ ID NO: 7786 - DNA, 562 bp, Glycine max
cccacgcgttcgaccacgcgtccgcccacgcgtctgtgtgctactttccattcgttcaccgccccaatctctgcagcgccttcgatccagaaaacatgactaagagaacaaagaaggctggcattgttggaaaatacggtacccgttatggtgccagtctgcgtaagcagattaagaagatggaagttagtcaacacagcaagttttttctgtgaattttgtggaaagtatgctgtgaagaggaaagctgtgggaatatggggatgcaaggactgtggtaaagtgaaagctggcggtgcttacactttgaataccgcaagtgccgtgactgtacggagcaccatcaggaggttgagggagcaaactgagagttaagcttttttgtttatgctatcaattactattagactttgcatgaagtgcctagtttgtattcactgaactgcactggttgtattcaaagtaaactccttaagtttaattttgagatgactcttttaattttaattgtttggaactttgtcggggtgattttgcttcatagtttcattttattggttgc

SEQ ID NO: 7787 - DNA, 441 bp, Glycine max
ggtgtgaaattgttgagtctcttgtcttagtctaataaacaacacggacgcagagccttcgatccagaaaccatgactaagagaacgaagaaggcaggcattgtcggaaaatatggtacccgatatggtgctagtttgcggaagcagattaagaagatggaagttagtcagcatagcaaattcttttgtgaattttgtgggaagtatgctgtgaagaggaaggctgtgggaatatggggatgcaaggattgtggtaaagtgaaagctggcggtgcctacactttgaatactgcaagtgctgtcactgtgcgcagcaccatccggaggttgagggaacaaaccgagggttgagctttttggttgatgttagattttgagcaaattaactggagaaatgattcgtttttgtttaagaagctgtattgggtcaacttacaatgc

SEQ ID NO: 7788 - DNA, 354 bp, Glycine max
tcgagcacgcgttcgccagcgttcgccacgcgtccgctgctaccaccttctcaagcttccacttcacaagtaattcggtggtgtaaattatattttcatctgatcctactaagataaacctccattctgtatcagtttttattttttttttatgctatcacgtagataaacgtaccttttacttttctctgtttttattcaccttcgctacccttcattcggtgcagactaagagaacgaagaaagcatgcattgtcggaaaatatggtacccgatatggtgctagtctgcggaagcagattaagaagatggaagttagtcagcatagcaaattcttttgtgaattctgtggaa

SEQ ID NO: 7789 - DNA, 953 bp, Glycine max
accagcaatccggtagaaaagggttttatttctttttcctttcaattattttctctgtcttgtctttgttattcagttcggttgttgtgttgtgttgtgtgctgcaacacatccagaaacacaatcggtgtcgtgttgggttgggtttttttgttattaaaagaaaagaaaaggggggatggctcggagagcagaggaagagtacgattatctgttcaaggttgtactgatcggtgattctggtgttggaaaatccaatctcctgtcccgattcactcgcaacgagttttgcctcgaatccaagtccaccattggagtcgaattcgctactcgcactcttcaggtggagggaagaactgtgaaagctcaaatatgggatactgccggacaggaacgatacagagcaattacgagtgcctactaccggggtgcccttggagctcttcttgtctacgatgtcactaaaccaaccacattcgaaaacgttagccgatggctcaaggagctaagggatcacgccgatgctaacattgtcatcatgttgatcggggaactagactgatctcaagcatctcagagctgttgccaccgaggatgcccagggttattccgagaaggaaggcctttctttcatcgagacttctgctctcgaagcaactaatgttgagaaggctttccagactattcttgcagagatataccgcattatcagtaagaaatcactctcttccaatgagcctgcatctgccaatattaaagaaggcatgactatcactgttgggggaccccaatccaacacaagcaagccttcttgctgtacatcatcttgaaaccccgccttatacttcctacttgctcagtatcattcttttttcttaactttatctggattccctcttatgattggttgtgcctgctcattgcaaaccttatattattcatattgttgtctt

SEQ ID NO: 7790 - DNA, 484 bp, Glycine max
gtgaaggtaaaggtaaaggaaagtgagtggaagccaggggcaatccgatagaaaagggttttatttctttttcccttcaattattttcttttcctgtctttgttgttcagttccgttgttgtgttgtgtgctgcaacacaatcggtggtctgagaaatcttgtttgtgttgggtttgttatggctcggagagcagaggaagagtacgattacctgttcaaggttgtactgatcggtgattccggtgttggaaaatccaatcttctgtcccgattcactcgcaacgagttttgcctcgaatccaagtccaccattggagtcgaattcgccactcgcactcttcaggtggagggaagaactgtgaaagctcaaatatgggataccgccggacaggaacgatacagagcaattaccagtgcatactacaggggtgcccttggagctcttctagtctacgatgtaactaaaccaaccacattcgaaaa

SEQ ID NO: 7791 - DNA, 1970 bp, Glycine max
ctcacgcgtccgttggaagccctcactcttccctcttttctttctttcatccccaaatcaaaacctaaattcccaccttcaactttctcccccaaatcgaccaccaccactgtcaagcccattcatttatattttattcgtatatatacatacagagagtgagtgagagagagagtgggaagaatggattcggatcaaggcaagcttttcatcggtgggatttcatgggatacgacggaggacaagctcaaggagcatttcggtaactacggcgacgttttgagcacttccgtcatgcgggagaagaacactgggaagccaaggggctttggtttcgtcgtttttgcggatcctaacattctagatagggttttggaagacaaacatgtcatagatggcagaacggttgatgccaaaaaggccttctcaagagaggatcaacaaatttctgtcacttcaagaggtggaaattccaattctggcatgaattctggaaatggaggaaacatcaggactaaaaagatatttgttggagggttgcctcccaccctgactgaagaaaaatttcgccagtactttgagtcttatgggaatgtaactgatgtagtagtcatgtatgaccagaatactgggcggccacggggatttgggtttatttcatttgatactgaggaggcggttgatagggttttgcacaaatcatttcatgatttaaatggtaaacaagttgaggtaaagcgtgcacttcccaaggatgccaatcctggggcaagtggccgtatgatgggtggtgctggaggtggtggggctcgagggtgtggggcatctggtggcaaccaaaatgcatatgatggtcgtatggattctagtaggtatatgcagcctcaaagcgctgcaggtggattccctccttatggttcttctgcctacagtgctcctgggtatgggtatggtccagctagtaatggcattggttatggtgcatatggaagttatggtggtgccactgctgggtatggtggacctgctgctgcaacatatgggaatcctaatgtccctaatgctgcttatgctggtggtccaccaggtggcccaaggagtacatggcctgctcaggctccttctggttatggatctatgggctatgggaacactgctgcttggggtgctccaagtggtggtgctggctctggtggcggtggtcctggttcagcaactgcaggtcaatctcctggtggagctgctggatatgggaatcaaggttatggatatggtgggtatggtggatatggtggaagtgatagttcttatgggaattctggtgcatatggtactgttggcggacgtactggaagtgctccaaacaataatgctagtgcttctggtggtagtgaactaacaagtagtggtggcagtggcaactatatgggtgggggctatggggatgcaaatggaaattcaggttatggaaatgcagcttggagatctgaacaaactcatgcatctggaaattatgggactcctcaaggtaatggtgggcaagttggttatggtgttggctatgggggtgctcagtctcgacaagcccaacagcagtaattttggtagatgaatctcttgctggatcttaaacttcaacttgaggatccctggcttttaaaagtcttaaatcatgaggtcacaatgaattcttccagcagcaatggagtggctcaaagatcaatgtcaatacacaatgggactggttgggttgcttgaatcccagtagtttgcagtacccgctttcctagtttataataagtagtatggttgaagagatactagatgctactttctatttagtatttgtttctgcgtgtagctttaatttgcttgcttatgatcttagttgatctggatttgtttgttcttgcagcatttaagctatagtatcatatttcgccttatatgctactatagcttaaatgctg

SEQ ID NO: 7792 - DNA, 325 bp, Glycine max
tctagaactagtccactcttccaaaccttctcttccctcttttctttctttcatccccaaatcaaaacctaaaattcccaccttcaactttctcccccaaatcgaccacccccaccactgccaagtcccattattttatatatttattcgtatatatacatacaaagagaggggggagaatggattcggatcagggaaagcttttcatcggtgggatttcatgggatacgacggaggacaagctcaaggagcatttcggaaactatggcgacgttttgagcacctccgtcatgcgggagaagaacactgggaagcctaggggctt

SEQ ID NO: 7793 - DNA, 967 bp, Glycine max
tcgggccctcgacgccaaaaatacaagcctgaaggtgcttctgcacttccctccttcgacaacagccgtctggagaccgaggacgaaatcgccgccgcctacgaggagctctacggccccggctacagcggcgtctcggtcctcggcaacgacgtgtacgtgatggacgcgaaggtgaagaaagagaccgggttcgggtccggcgccaagaaggagaaggtgagggacgggttcgaggagagggtggtgcaggtcaagagggtcaccaaggtcgtcaagggagggaaacagctcaggttctcgcgccgtccggtcgtcgtcgcgcgactaagaagggccttagtggggccgtcggagttggcaaggccaaggaagtcattgccgcggttcagaagtccgccgtcaatgccaggaggaacatcatcaaggttcctatgactaagtactccacttttccccatagagctgacggagattatggagcggcaaaggtgatgcttagacctgcttctcccggtactggggttattgcaggtgggtctgtgagaattgttctggaaatggcaggagttgataatgctttgggaaagcaactagggagtaataatgcactcaacaatgccagagcgactgttgctgctgtgcagaaaatgaagcagtttcgtgaggttgctgaggagcgtgggattccaatggaagaattgtggaagtaatgaaatttgtgaagggaatgtaatttttagatgtcgatgtttgtgatatacagctggtcatagttctgttaaggaagtgaaaaacattgttcaatttttgttgaaagttttatgaaagtgaacagtttcttcaaaaagctactttgttcaggttgaattcaatatattctttatctatctgtttaatgtgcatttatgctcgtccaatttccgcttggctaaatcaatgtcaatgactcaattattcagttgcc

SEQ ID NO: 7794 - DNA, 516 bp, Glycine max
tcgaggttcaggatgaggataagccttttcctgagtttccctccttcatccccttccatggcagcaccttcactctcctccgctctcaactctctctcctccccctccctctctctctccttctccacctcctcccgccgcttctctctcctccctccaccctcacaccaaccctccaaacccctcttcctcaccctcaaatccaaaccctccgacgacattgacacatcgttcttcgacaacatcaacccgcaagacgacatcacattcaatcccccggagcccccggaagggttcgtggcgcctccctccttcgacgacggccctctggagaccgaggacgaaatcgccgccgcctacgaggagctctacggccccggctacagcggtgtctcggtcctcggcaacgacgtgtacgtgatggacgcgaaggtgaagaaagagaccgggttcgggtccggcgccaagaaggagaaggtgagggacgggttcgaggacatggtggtgcatgtcagg

SEQ ID NO: 7795 - DNA, 359 bp, Glycine max
cttccctctcctccgctctcaactccctctcctctctatccctctccacctcctcccgcttcactctcctccctccaccctccctcctctccaaacctctccccctcctcttcgcagccaccaccctcaaatccaaaccctccgacgacattgacacatcgttcttcgacaacatcaacccgcatgacgacatcacattcaaccctccggagcccccggagggcttcgtggcgcctccgtccttcgacgacggccccctggagactgaggacgaaatcgccgcagcctacgaggagctctacggccccggctacagcggcgtctcggtcctcggtaacgacgtgtacgtgatggacgcc

SEQ ID NO: 7796 - DNA, 1042 bp, Glycine max
  unsure (1)..(1042): unsure at all n locations
cctaccccttgctagctctataaaaggaaaagaccttaggtatccatcacagacaaataaacaataccagctatacttgttccttttgaaggttagaagtgctacaatacaaataagtctttgggaatagtgctgcaatggcttcaagtcaggaagaggtgactcttttgggagttattggaagcccatttgtgtgcagggtgcagattgcccttaagttgaagggagttgaatacaaatatgtggaagaaaatttggccaacaagagtgatttgcttctcaaatccaacccagttcacaagaaagttccagtgtttattcacaatgagaagcccatagcagagtctcttgtgattgttgaatacattgatgagacatggaagaacaaccccatcttgccttctgatccttaccaaagagccttggctcgtttctggtccaaattcattgatgataagatttttggtgctgcatggaaatctgttttcacagctgatgagaaagagcgtgagaagaatgttgaggaagcatttgaggctctgcagtttcttgagaatgagatgaaggacaagaagttctttggaggagaggaatttgggttggtagatattgctgctgtcttcatagcattttggatcccaatttttcaggaaatagcagggttgcagttattcaccagtgagaaatttcctatactctacaaatggagccaagaattccttaaccacccttttgtgcacgaagtccttcctcctagagacccactttttgcctacttcaaagcccgctatgaaagtctttctgcttcaaaatagacttatttaaggatatttgttgaacaacttgtgtcttgttgagttattgctgtttgaatttcatgtaaaatgatactagctatatgtaaatcccagaaaaaaaaaaaaaagaatcctaggatcttgttttcgttttggccatttcagttaataaagaaattatatttttcgaaaaaaaaaaaaaaaacacacataaaaaaagataatgaaaatatacatataannnn

SEQ ID NO: 7797 - DNA, 1015 bp, Glycine max
aatcaaactagaattattctgacagtaaactttagttctgcaatggcttcaagtcaggagtaggtgtcccttttgggagctactggaagcccatttgtgtgcagggttcatattgccctcaagttgaagggagttcaatacaaatatgtcgaagaaaatttgaggaacaagagtgaactgcttctcaaatccaacccagttcacaagaaggttccagtgtttattcacaatgagaagcccatagcagagtctcttgtgattgttgaatacattgatgagacatggaagaacaaccccatcttgccttctgatccttaccaaagagccttggctcgtttctggtccaaattcattgatgataaggtttttggtgctgcatggaaatccgttttcacagctgatgagaaagagcgtgagaagaatgttgaggaagcaattgaggctctgcagtttcttgagaatgagataaaggacaagaagttctttggaggagaggagattgggttggtagatattgctgctgtctacatagcattttgggtccctatggttcaagaaattgcagggttggagttattcacaagtgagaaatttcctaagctccacaattggagccaagaatttttgaaccatccaattgtcaaagaaagtctgccccctagagatcctgttttctcctttttcaagggtctctatgaaagcctttttggttcaaaatagatttgatgatgtggtgtgagacttagtatttctaagaattatgtgtttgttaaaggcttctatgaaagcctcactgcttcaaaatagattcatgtatgtgagactcagaatctctggggaaaattgtgtgtggtgtggactacttgttttgtttgtcattgagctatatcgctgttaattaggattttgtttcaaaatgatgcttataagttgtaatctaggatttctccctttgaaatcctaggttgttcttgacatttgctatttcaaagaataaatatatagcatctttcta

SEQ ID NO: 7798 - DNA, 1284 bp, Glycine max
aagggacgacagaaggggataaatcttttgaattgattgttgtaagactttgtaattgaggtgctgcaatggcttcaagtcaggaagaggtgactcttttgggagtaattggaagcccatttgcttgcagggtgaagattgcccttaagttgaagggagttgaatacaaatatgtggaagaaaatttggccaacaagagtgatttgcttctcaaatccaacccagttcacaagaaagttccagtttttattcacaatgagaagcccatagcagagtctcttgtgattgttgagtacattgatgagacatggaagaacaaccccattttaccttctgatccttaccaaagagccttggctcgtttctggtccaaattcattgatgataaggtaactcaacatttcaaaaatcttcttagttttcatgatttgtgctgatttgtcagcaaaacatcacgatgaaatctatatatgtgaaatctttctggtgtggaatatatatgtgaaatctttgaatatgtcagagaactcaaaagtcaacagccaaccatgatttttttttaatgtgtcaactttttgtaaaacaatattagtgatttgaaactttatggaatcatatactatgattttgggagaaattttattttattttactatttttatctggggtggggggattctgtcacgtatttgtttctatataactcgatctagattctgtttgtcctaatcactttatgaaataattactaatcaatattgtgatcttgcgtgaccagattgtgggtgctgcatcgaaatctgttttcacggttgatgagaaagagcgtgagaagaatgttgaagaaacgtatgaggctctgcagtttcttgagaatgagctcaaggacaagaagttctttggaggagaggagtttgggttggtagatattgctgctgtcttcatagcattttgggtccctatggttcaagaaattgcagggttggagttattcacaagtgagaaatttcctaagctctacaattggagccaagagttcatgagccaccctgttgtgaaagaagttcttcctcctagagacccactttttgccttcttcaaagcccgctacgaaagcctgctcgctgattcaaaatagatttatttaaggatacttgtgtgaacaacttgtctctcgttgagttattgatgtttgaatttcatgtcaatttgatgctatatgtaatgtaacttaggctcttattcccattttggccatttcatttaataaagaaattctttata

SEQ ID NO: 7799 - DNA, 536 bp, Glycine max
  unsure (1)..(536): unsure at all n locations
attcctggctctagaaaataaaaccttaggacccatcacagacaaagaagcaattaattcaccagctacatagtttttctgtttgaagtgctacaaacaatggcagctactcaggaagatgtgacgcttttgggagttgttggaagcccgtttgtgtgcagggtccagattgccctcaaattgaagggaattgaatgcaaatttttggaagaaaatttggcaaacaagagtgatctacttctcaaatccaaccccgtttacaagaaggttccagtgtttattcataatgagaagcccatagcagagtctcttgtgattgttgagtacattgatgagacatggaagaacaaccccatcttgccttctgatccttaccaaagatcctttgctcggttttggtccaagttcatagatgacaaggtaactcanatttcaaaataaaataaaattcatgctttgggcttatttatccccaaataatcacctttcgtgacatctaactgtgaaatgttagaatatgttagagaactcaatac

SEQ ID NO: 7800 - DNA, 585 bp, Glycine max
  unsure (1)..(585): unsure at all n locations
ctcgagccgaatcggctcnagggctcgagcggctcgaggcgtacgaagaatgttgaggaagcaattgaggctctgcagtactcttgagaatgagataaaggacaagaagttctttggaggagaggagattgggttggtagatattgctgctgtcttcatagcattttgggtccctatggttcaggaaattgcagggttgcagttattcacaagtgagaaattccctaagctccacaattggagccaagagttcatgagccaccctgttgtgaaagaagtccttcctcctagagacccactttttgccttcttcaaggcccgctatgaaagtctttctgcttcaaaatagacttatttaagatatttgttgagttatggctgtttgaatttcatgtcaaattgatactagctatatgtaaatccctggaagaaaaaaaatcttaggatcttgtttccattttagccattttagttgataaagaaattcattttttccaaataagttttgtagtgagaagcctttgtcttcctttataaaatccttcaacatgcataatgttattcgtagagaaaaaaaaaaaaaaa

SEQ ID NO: 7801 - DNA, 464 bp, Glycine max
  unsure (1)..(464): unsure at all n locations
gaaaaccggnccgaccgacgcgtccgcggacgcctgggttatcctattagtctttgggtttagtgctgcaatggcttcaggtcagcgcggggggacccttttgggagctactggaagcccatttgtgtgcagggttcatattgccctcaagttgaagggagttcaatacaaatatgtcgaagaaaatttgaggaacaagagtgaactgcttctcaaatccaacccagttcacaagaaggttccagtgtttattcacaatgagaagcccatagcagagtctcttgtgattgttgaatacattgatgagacatggaagaacaaccccatcttgccttctgatccttaccaaagagccttggctcgtttctggtccaaattcattgatgataaggtttttggtgctgcatggaaatccgttttcacagctgatgagaaagagcgtgagaagaatgtttaagaaacaa

SEQ ID NO: 7802 - DNA, 867 bp, Glycine max
gataataagctttttttctctctttctctttgttcttctaccttattttctttccctagtcaaggagattcatctctgcagcaggttgttttagaaaagaaaaaatgctgaagatttgctgcattggggctggatatgtggggggtccaacaatggcagtcattgcactgaaatgcccctcaattgaagtggctgttgttgacatctctaaatccaggattgcagcatggaacagtgaccagctccctatctatgagccaggccttgatgatgtggtgaagcaatgtcgtggcaagaaccttttcttcagcactgatgttgagaaacatgtctatgaggccgacatagtgttcgtctccgtcaacaccccgacaaaaactcgtggtcttggagccggaaaggctgcagatttgacttactgggagagtgcagcacgcatgattgctgatgtctccaagagtgacaagattgtggtggagaaatccactgtccctgtgaaaactgctgaggccatagagaaaattttgactcacaatggaaagggaatcaagttccaaatcctttcaaaccctgaattccttgctgagggaactgcaatccaagatcttttcaacccggatcgagtcctaattggaggcagggagaccccagaaggccaaaaagcaattcaaacattgaaaaatgtgtatgctcattgggttcctgagaagaaaattctaaccacaaacctctggtctgctgagctatccaagcttgctgctaatgcctttttggcacagagaatttcatctgtgaatgctatgtcagcactttgtgaggccactggggcaaatgtcacacaagtttcctatgctgttggcacagaca

SEQ ID NO: 7803 - DNA, 464 bp, Glycine max
gaaacccccttccttcttctttgtatttgacgggaagaaacgcatcgagcgtggagaaagagaaggatgatgaggttaaggtggagtgtactcgtaatggtcacgttcgctgtttctctgttttggcttggacccctgcaagtcaaagcctctaattctgtttccgccttcgttcaaaacgccatctactccaacagaatcgccgttttctccaaatcctattgcccctactgtttgcgcgccaaacgcttgcttgctgaactcaatgaaaaaccttttgtggtggagctcgatttgcgagatgatgggtttcaaattcagagtgttcttctggatttgataggtagaaggacagtcccgcaagtgtttgtgaatggcaagcatattggtggatcggatgatcctagttagttcttagctttcctgcttttatctatgtggctgtttaaattcactttggatca

SEQ ID NO: 7804 - DNA, 732 bp, Glycine max
  unsure (1)..(732): unsure at all n locations
atttagtattcttataatcccccctccctgtgcgtggggagcatcttctttgtattgagcgtggagaaagagaaagatgatgaggttaaggtggagtttagtcgtaacggtcacgttcgctgtttttgctgttttggagtggatcgctgcaagttcaagcctctaattctgtttccgccttcgttccaaacgccatctactccaacagaatcgccgttttctccaaatcctattgcccctactgtttgcgcgccaaacgcttgcttgctgagctcaatgagaaaccgtttgtggtggagctcgatttgcgagatgatgggtatcaaattcagagtgttcttctggatttgataggtagaaggacagtcccgcaagtatttgtgaatggcaaacatattggtggatcagatgatctcagtgctgccgtccaaagtggtgaattgcagaaacttctcagtgcaagttgatggtgtactagagatttacgagcactgacatccttcatggataatgaagttgtcaagcttttagaagcataatatgttttgatgcctttttagttttctgggtatttaggtgacagcgcgtattctttagaggaataggatgtcattctgcttaaaatcagcttgaattcttcacatggaaatgtangactcttgaaaagttgagctctaaaacatagaatccgagctctaattggtatattctacttgnttttatatttttttc

SEQ ID NO: 7805 - DNA, 722 bp, Glycine max
agacgacagaagggggacacaaactttattacagttgttgtattgtaattaagcaagaatattaggcaatggagtcttctagaacttcaactactcttgctctttttttaaccatcaatttgcttttctttgtcatggcaagtggctgctacacttgcacacagcctaagccaaaccctatcccattcccttaccctaaccctagtcctgccgcgaagagctgccccagggacgcacttaagctcggagtgtgcgcaaacgtgcttaatggaccaattggtgctattgtagggtcaccaccggaccacccatgttgctcagtgctagaagggcttcttgatcttgaagttgcggtttgcctctgcactgccatcaaagccaacattcttggcattaaccttaacatccccatttcgcttagcttgatacttaacgcctgcgagaagtcgccaccctctgacttcctgtgcaactaggcatagttaattaagcacgtcattctcaattattcatgcactacttaatttaatttcatcgacgtgttttgtttatgtgatttttgtgccctttgtgttgtgatgattcttatgctgttcggacagtgttaactcatttagtgagaattcggttgtacccgtagctgtagccgtaatttaacttctggtgttagtgatgagtgatgactttcccattttttaaatttgaagaattaattgctcccc

SEQ ID NO: 7806 - DNA, 858 bp, Glycine max
tgatgcatggtttgatgtagtcgaacgccactcgaatgataacaacaagacactgaaacggactgataaaataagtagatgccttaatttgggatcatacaactatcttggttttgcggcagcagatgaatactgcacgcctcgagtagttgatacgttgaagaagtattctccaagcacttgcagtacacgtgtggatgggggaacaactgtgcttcaccttgaattggaggagtgtgttgcaaactttgttgggaagccagctgctatagtttttggtatgggctatgtgacaaactctgctattcttccagtcttgatggggaagggaagtttgattattagtgattcattgaaccacaactccattgttaatggtgcacgaggatcaggagcaacaattcgcgtttttcaacataacgagccatctcatctagaagaagtgttgagagaacaaattgctgagggacaacctaggacacataggccttggaagaagataatggttgttgtggaggggatatacagcatggaaggagagctttgcaaacttccagaggtcatagctgtatgtaaaaaatacaaggcttatacatatttggacgaagcacacagcattggagctgtgggcaagtcaggaagaggtgtttgtgagctcttgggtgtggatactgctgatgttgacattatgatgggaacattcaccaaatcttttggatcctgtggaggttacattgcaggatcgaaggaccttatccaacacttgaagtacgcttgccctgctcatctttatgcaacttcaatttcaccaccagctgcacaacaaatgaatatcatccataagagttattcttggag

SEQ ID NO: 7807 - DNA, 1315 bp, Glycine max
cggctcgagagatgatgacagatgtggtatggggggagtgttctttggttttgctagttttgttggttttgttaatttgttagttgtgttaatttgttaatgttgttagtttcgtcggattttcagtttaatattttgggtcaattttgtgtgcacgtacgactttgcatgtttttctttgaattataggatatgttcaagaaatgggtaattgttttgaaaataaaagttcttgacattttgtgacttgaaatccttgattcttctctacatgtcatgatagttttgaaagctcaatttgaaagtgatgattttacctttgtgagaatttgagccatccatcattataatcatttggtgtgttttgccccattgattgcttgcacagtagccttggcttgattcttgttgatgcgtcctaattcacatgcatatttggaaatgattaaggcaattttgttcttataagcttctagccaaatggacttaccttgaattaattcctttgatagcccttttgagccttgtttccctttccttgttttgaagctcactacaagccttaagtgaaaacccatgatattaccatatccttaaggaattttggagctttggaattgttttgggaataagttgtggggggtttttggttcattggacaacttggtttggtggctatgcttcatgatgtattttgggccaaacttgatgtacattgtatattggttaaatgttggacatgctgaatgaaatgttgtttctcaaaggctaaagagtaaaaaaaaaaaaaaatcgaaaaaaaaaattcgaaaaaaaagaaaaagaaaagcaataaagttgagtgaataagatcttaaatggcacaagaatgatgaaactcttggttctactcttcatgtttaatttttatctttacttctttttatttttttaatatgcacttattcccctttgctcctctattcctttgggatttagccacttattccatatttctccataccttgtccttggccccattacaaccttaaaagaccttttgatcctcatgtgcttgtgtttatgggttgattgtcaattttagaatcttgccaagtttatgtggtgtttgctttcatgggtgctttgagggtaaatagtagcctagacacttgagagatagagtgtatatcttgtgaggctttatcacttttcattcttgagctgattaactattttgccatgattgggttgcttggatgattttcatgaatgtcttgactttttggatctccttatgttagatgttacccattcctttcattccttgatgttc

SEQ ID NO: 7808 - DNA, 1034 bp, Glycine max
gactcagcctaattaataaaaggggaagtttttgcatagtgttgagttttgtcgcagcattccatacgaggccgaagggaagagtttttgttgggtttgggaggctaagtagggtttgcgttgagaaagagagagatgggaagagaaaaggagacaacaaaggtagcttacacagtggagcagcttgtagccttcaatccatacaatcccgatattcttccagatctcgaaaactatgtcaacgaccaggtttcgtcgcaaacttacagcctggacgcgaatctctgccttcttcgcctctaccagtttgaaccagagaaaatgagttcccagattgtggcccgcatattggtcaaggctctcatggcaatgccggcgccagatttcagcctttgtctctttttgattccagaacgcgtgcaaatggaggagcagttcaagactttgattgtcctgtctcactatttggagacaggaagatttcggcagttctgggatgaagcagcaaaaagtcgtcatatagttgaagctgtgccaggatttgagcaggcaatccaaggatatgcaatccatgtcctttccttgacttaccaaaggattcctagaactgtgcttgctgaggctattaacatagaaggtttatccttggacaaattcattgaacatcaagtagccaacagtggttgggttgttgagaaaagccaaggcaggggtcaactcgttgtcctccctagaactgaatttaatgacccagctttgaagaaaaatgctgcagacagtgtaccattggagcacattactcgcatcttccctattcttagttgatttttctatggtagactgccaattttctatcctgaaggagattatgcggatattatatcagttggagcaacaccttcccttccccttggatgcttcaatttgagaattagtggacagctattgtagtttactcatgttttgcatacctgtctgaaaattaatttgctttgctatgctttattattcgttgaacagatggcctgttctct

SEQ ID NO: 7809 - DNA, 346 bp, Glycine max
cggtcattcggttcgagctagctgtcgaagagcagactgtcgcgtttgtcgcattccatacgaggccgaagcgaagagtgtttgtagggtttgcgttgcgcatcgtttgagagagagagatgggaagagaaaaagagacaacaaaggtagcttacgcagtggagcagcttgtagccttcaatcgatacaatcccgatattcttccagatctcgaaaactatgtcaacgaccaggtttcgtcgcaaacttatagcctggacgcgaatctctgccttcttcgcctctaccagtttgaacctgagaaaatgagttccagattgtggccgcatattggtcaaggtctcat

SEQ ID NO: 7810 - DNA, 618 bp, Glycine max
atttgacggtgtcggtgattcaccaaattctctctctctctctctctcaaatctcaattcactcattcatttcccctttcttctctttctcaatttcgctttgtattgtcttcaattcagtaaaccgcaccaattccgatggcggcgtcgcggcggctccgggacctccaatcccaaccggcgaacaagatctgcgtcgactgttcccagaagaacccgcaatgggcctcggtttcctacggcgtcttcatgtgcctggagtgctccggcaagcaccgcggcctcggcgtgcacatctccttcgtgcgatccgtgacgatggattcgtggtctgaaatccagatcaagaagatggaagccggaggcaacgacaaactcaacgcgtttctcttgcagtacggcatccccaaggaaaccgatatcgtcgccaagtataactccaacgctgcctccgtctaccgcgaccgcatccaggccctcgccgacggccgcccctggcgggatccccccgtcgtcaagggaagccgtccgttcctcctccgctgcattcaagggcaagccgccgctctcggctagcagcaacaacaacggcggatgggataattgggacgccgacga

SEQ ID NO: 7811 - DNA, 857 bp, Glycine max
aaacacagtgttgattcccaaatccccattagttttcaaaataaagactttgcgtggcacccacaagaaggccacacagtcaccaccaccaccacccatttctcccggtgcgcgactcactttatttttattcatccttccttcctaacagatccgatccccgatggcggcggcgtcgcggcggctccgggacctgcagtcctcggcggggaacaagatctgcgtggactgctcccagaagaaccctcagtgggcctccgtctcctacggcgtcttcatgtgccttgagtgctccggcaagcaccgcggcctcggcgtccacatctccttcgtccgatccgtcaccatggactcctggtcagacatccagatcaagaaaatggaagccggcggcaacgacaagctcaacgccttcctcgcccagtactccatccccaaagaaaccgacatcgtcacgaagtataacaccaacgccgcttctgtgtaccgcaaccggatccaggccatcgctgagggacgtccctggcgcgatccgccggtggtgaaggaaaacctctccgccgccggaaaggggaagccgccgctgacgcaaacgcggaggaataataatgaaggtggatgggatgattggggtaacgaggcgaagtccccggagcaagagcaagtcgaccggggattttaggaatttgaacggcggcggcggagcgccggcgaggtcgaggtcgacggaggatatctacacgcggacgcagctggaggcgtcggctgcgaaaaaggaggacttcttcgcgaggaagattgcggagaacgagtcgcggccggaggggctgccgccctctcagggagggaagtatgtc

SEQ ID NO: 7812 - DNA, 437 bp, Glycine max
tcggtgattcaccaaattccttgtttccttctaaaatctaaattccccttcccccttgtcctcctctttcctcaatttcgctctctattgtcatcaattcacacatccaccgttcagttaaaaaccacccaaatccgatggcggcgtcgcggcgtctccgggacctccaatcccaaccggcgaacaagatctgcgtggactgttcccagaagaacccgcaatgggcctccgtatcgtacggcgtcttcatgtgcctagagtgctcaggcaagcaccgcggcctgggcgtgcacatcttcttcgtgcgatccgtgacgatggattcgtggtccgaaatccatatcaagaaaatggaagccggaggcaacgacaaactcaacgccttcctcacgcaatacggcatccccaaggaaaccgacatcgtcgccaagtacaac

SEQ ID NO: 7813 - DNA, 554 bp, Glycine max
agcaaatatggaatctgaagcactgatatggggtgacaaactcatactgaagggattgtcattccgtggttttcatggagcactaccggaagaaaggaagctaggccagaagttcgtggtagatgttgatgcatggatggatctgaaagcagctggcaaatctgatcacttatcagatacaattagttacacagatatatatgatatagctaaggaaattcttgaagggtcacctcaaaaccttctggagtcagtggcacaaaaaattgcagtgactactctgacaaatcataagcaaatatctgctgttcgagtgaaggttgaaaagcctcatgtggcagttcaaggtccacttgattacttaggcgttgagatacttagacgcagaagcgatttgtcagaatagaaatttcatagttttgttctctctggtttttgttgctctcattctgatttgtattgtttgttttcattgaatgtttcttcttgccattcagtttgatacatcgtcaagttccatttgatataaaggtaactctttccctgagtaccct

SEQ ID NO: 7814 - DNA, 553 bp, Glycine max
taccggtctagaattcccgggccgacccacgcgtcagactgcgggtgacgagcactgcttcagggtgaagcacctaagccacttctccaccctagacgtcctcttgaaaccctactacagcaccacacttccccctctcaattcatctctctctcgatttacattccagagatagaagaagaaagagagcaatgacagcaacaacagagagcgagaagaagaagcgagaagaagaagaggaaccagaacaagttgtgaacccatgggaagtttcagccaaaggtaaaatcgattacgacaaactcatagatcgtttcggttgccagaagctcgacgaagccctaatttcgcgtctcgagcgcatcacctctcgcactccccacgtctttctacgacgcggcgttttcttcgcccaccgcgatttcgcggagattctggacgcgtatgagaggggagataagttctacttgtacaccggacgcggaccttcctctgaagccttgcatttgggacacttgattcccttcatgttcactaagtatttgcaagatgt

SEQ ID NO: 7815 - DNA, 419 bp, Glycine max
acattcaagagagagaagaagaagaggagcaatggcagcaacaacagagagcgagaagaacaaccgagagcgagaagaggtaccaagaacaagatgaggtacaagaacaagtggtgaacccatgggaagtttccgccaatggcataatcgattacgacaaactcattgaccgtttcggttgccagaagctcgacgatgccctaatttcgcgtctcgagcgcatcacctctcgcactccccacgtctttctacgacgcggcgttttcttcgcccaccgcgatttcgcggagattctggacgcgtatgagaggggagataagttctacttgtgcaccggacgcggaccttcctctgaagccttgcatttgggacacttgattcccttcatgttcactaagtatttgcaagatgtgtttaag

SEQ ID NO: 7816 - DNA, 1844 bp, Glycine max
caaaaaatttggtggatgaagtttggataaatcgcccaccggcagagataaatgctgttattgtacatcctgtgaaatttgcaggtcgctctgttgcagataagttgaaagatttgagaaaaaagcttgtacatgagcaaacccgtgggattagtttcacagcacttgatgaagttgcatggttgtataatattcgtggaagtgatgtggcctactgtcctgttgttcatgcatttgctattgtgacatccaattctgctttcatttatgtggacaaacaaaaggtttctgttgaggtacaaactcatttagtggagaatggaattgaaattcaagagtatacagccgtaagctctgatgcgacattgcttgcaactgatgagctagatgctgtatctactgccaaggctgctttagccgaaacagaggccagaaaaattcccaatgaaattgataagagtgtaaatggtgaacatcaagcagaagaaaatagtaatgacctcatatgggctgatccagtttcatgctgttatgcactgtatgcaaagttgaaccccgatacagttctcttgcagcaatcacctttagcccttgcaaaagctttaaagaactcggtggagttggatgggttaaaaaaggcacatattcgggatggtgcagcagttgtgcaatatcttgtctggctggataagaagatgcaggatatttatggagcttctggttactttttggagaaggattctgtgaaaaaggagaaacatttgcaatctttgaaattgactgaggtgactgtaagtgaccagcttgaaggttttcgagcatcaaaagagcatttcaaaggattgagtttccccactatttcttcagttggctcaaatgcagctataattcactattttccaaaggcagaaacatgtgctgaacttgatccagacaaaatttatctttttgattctggagcccagtatctagatggaacaacagatattacacgaacagttcattttggtaaaccttcgactcacgaaaaagcgtgttatacagcagtcctaaagggtcacattgctcttggaaatgctagatttcccaatgggacaaatgggcattctcttgatattcttgcccgaattcctttgtggaaggatggtcttgattatcgacatggtactggtcatggaattgggtcctatctgaatgttcatgaaggacctcacttaatcagtttcagacctcaggctcgaaatgtaccattgcaatcttcaatgactgttacagatgaacctggttactatgaggatggagagtttgggataagattggagaatgtgcttattgtcaaggaggctgatacaactttcaattttggtgatagaggttacttatcttttgaacacattacctgggcaccatatcagacgaagttgattgacctgaaccttctaagtcccgaggagataaattggctgaactcctatcacgccacatgtaggaatattctggcgccatatttggatgaagttgaaaatgcatggctgaagaaagccactgaacctgtaggtgcatgagctgtgtttggagttgaaaagttaaataacttaaagatggttcagcgtaattttagtgtcttccgtatccataatactgtaatctagattttagatatcattgggaatggttattccttcaaattactatgcacagcatatataatatatcaatattctgctgcatcatatttgagggcgtgtacaacgttaaattgtctatccgcacggcatcactgcatgcatcagctcttttacttttccctaatattgtttataaataagatggatcttgtacct

SEQ ID NO: 7817 - DNA, 758 bp, Glycine max
gcgtccgccctttcgtccgcaatatattccattctctctgtgtatttccctacctctcccttcaaggttagtcgatttcttctgtttttcttcttcgttctttccatgaattgtgtatgttctttgatcaatacgatgttgatttgattgtgttttgtttggtttcatcgatcttcaattttcataatcagattcagcttttattatctttacaacaacgtccttaatttgatgattctttaatcgtagatttgctctaattagagctttttcatgtcagatccctttacaacaagccttaattgttgattcattaatcgtagattagggcttttttcattgattacttcagatccgttaaacgtaaccatagatcagggctttttcatgaattacttcagatccgttaaacaacagccttattttttatacttctgtggtttttcaagaaattgttcagatccgttgacaaaaagccttattcgttgattctatatcgtttttcgagagatattgctcagatctgttagcaactgccttgtttgttgattctattgccgtggattagggttttttttcacgagattgcttcagatccgtacttaagattacgtaatggattttgattctgatttatctgtgattgttgactcgacagatgcagatcttcgtcaagaccctcaccggcaagaccatcacccttgaggtggaaagctctgacaccatcgacaacgtcaaggccaagatccaggacaagg

SEQ ID NO: 7818 - DNA, 595 bp, Glycine max
ggcacttcaattgcaatcaaattagttcattctctttgcgcagttccctacctctcctttcaaggttcgtagatttcttctgtttttttttcttcttctttattgtttgttctacatcagcatgatgttgatttgattgtgttttctatcgtttcatcgattataaattttcataatcagaagattcagcttttattaatgcaagaacgtccttaattgatgattttataaccgtaaattaggtctaattagagtttttttcataaagattttcagatccgtttacaacaagccttaattgttgattctgtagtcgtagattaaggttttttttcatgaactacttcagatccgttaaacaacagccttatttgttgatacttcagtcgtttttcaagaaattgttcagatccgttgataaaagccttattcgttgattctgtatggtatttcaagagatattgctcaggtcctgttcctcctcaagaccctcaccggaaagaccatcacccttgaggtggaaagctctgacaccatcgacaacgtcaaggccaagatccaggacaaggaaggaattcccccggatcagcaacgt

SEQ ID NO: 7819 - DNA, 419 bp, Glycine max
gtaacggtcaggaattcccgggccgacccacgcgtccgaagacgaccaaagggcacaacacaacagagaaagaaaagagtaagagtatgggaggctcatggtcatggcagctcacatgtgccctcttgctactcttctccgccgtagtcaccgccactgaccacattgtgggtgcgaatcgtggctggaaccctggctttaactacactctttgggccaacaaccacactttctatgttggcgatcttatctcattcaggtaccaaaagaaccaatacaatgtgtttgaggtgaaccaaactgggtatgacaactgcactacagaaggggcagtggggaattggagcagtgggaaggatttcataccccttaacaaggccaagagatattacttcatttgtggcaatggccaatgcttc

SEQ ID NO: 7820 - DNA, 419 bp, Glycine max
gggcgaggatggcgtcaagcagcaggcatacagcaaggcaggactgtgtttgaaaatgtgcatcttttcttgggcccaaatgcaataattgttgtcctgttttctaccgttgaggcttctttctatcagctaagctaagcagtccaaagggcacaacacaacagagaaagaaaagagtaagagtatgggaggctcatggtcatggcagctcacatgtgccctcttgctactcttctccgccgtagtcaccgccactgaccacattgtgggtgcgaatcgtggctggaaccctggctttaactacactctttgggccaacaaccacactttctatgttggcgatctgatctcattcaggtaccctaagaaccaatacaatgtgcttgacgtgaccaaactgggtatgcaactgactacag

SEQ ID NO: 7821 - DNA, 733 bp, Glycine max
agggggatccagaaacgttgaaaacgcaagaagggaaagcacagtttgttttcattgggtgctgatcggaacaaacagggaatagaagagaggagaagatgggtttcataatggaatttgcggagaacttggtattaaagttgatggaagatccgaaggaaagggatcggaggttcagggagcacgtttatagagtgaaggacaggtgcgagaagacgaaggagatgtggagctaccctatgcgaccctatgggttttggacattcgaacgccacaattctcagcttgcttgggatgcacagattagccaagtggccgggaggagggacccttatgatgatctcctccaacatttctctaccccacctaagtgagtgttgctgaacttgccacaagcattatcggtgaaaaggatgaatttgtcgtaatttccccttgtaatatcctgtcttgttgcatgttgcagagattacaactggattgtgctgttatttcaaaaataaaggttccatataactatgctgttacagaagaattttttcctctccagaatttacattcttgcacaactgcacttcctggcaattattctgctttatcaatgtttcatgtcattatttagtatttacattgcttgtggatgattcatttcttgcgtgttgtatcctgtagaatgccatatttagaacctttaaatgtgttgatagttcacttgtagcttttcatagaatgc

SEQ ID NO: 7822 - DNA, 412 bp, Glycine max
gaagacgacagaagggggacagcacagcacaacgttgcacctcaaaatagccatggcagcgaaaacttcctctgaaactgaaaaagagtgttcctcctcacagtcactgaaaatttcaaaggatttaaactttcgacgtgtttctgagaccttagatctgttcagagcgatggggaccaatattatcgcaccggaaaatagcaacacgcatggcttcttcgacggcttccttcggagtttcataaagctcgatcacatccaacgcggtcgaatcgcctgcacccttctcgtcaaaggccccatctgtaatggttttggaacacttcatggaggggctattgggtcctttgttgtgattttgtctactgcttgtgctagaaccgtaactgctgagaacaaggaactttttctc

SEQ ID NO: 7823 - DNA, 924 bp, Glycine max
cggctcgaggtaggttgaaaaggcgtgcgtgctcatccctttcgcgtgcgggaagatggtgctttcggaggaggaaatgggtcgtctataccgaataaggaagacggtgatgcagatgctgcgggacagaaattttctggttggtgacttcgagatcaacatgtccaagcacgagttcaagtccaagtacggcgaacacatgaagcgcgaggacctcgtcatcaacaaatccaagaaggacaactccggcgaccagatctacgttttcttccccgacgaacccaaggtcggcgtcaagaccatgaagacctacaccaaccgcatgaactccgaaaacgtctatagagccatcctcgtcacccagaccaacctcacccccttcgcccgcacctgcatcagcgaaatctcctccaaattccacctcgaggtctttcaggaggccgaacttctcgttaacattaaagagcatgagcttgtccccgaacatcaggttctcactgacgccgagaagaaaaccttgcttgagagatacactgtcaaggaaactcagctacctaggattcaggtcacagttccggttgcaagatattatggactgaagcgtggacaagttgtcaagattatccggccaagtgaatctgctggcagatatgttacgtaccgatttgttgtataggaatttgctttaacatatttggctatactgccatagtgatggatagggatataaagccttctttttttgcaggggggaactcttgatttacaagaagtgaaatgtctgattgttgaaacttttggaatcgaacctatatatttagatgattatatcataaattggttgacatatgttgttatgattagtgtcaatctgttatatggaactttgtttctgtttattaatagctaataagttcttttggt

SEQ ID NO: 7824 - DNA, 366 bp, Glycine max
gagatattatggattgaagcgtggacaagttgtcaagattatccggccaagtgaaactgctggcagatatgttacataccgatttgttgtataagaatttgctttaacatatttggttatactgtcatagtgatggatagggatataaagccttctttttgcaaggggggaactcttgatttacaaggaaatgaaatgtgtgtttgtttctgtttattatagactattaagttcttttggtaatttagtgacaaggagagcagagggaggttcatttcttttgtcatttctgtgcatgatgttgtcccgagtcttttataagttggtggcttcttcctgctccataattatctatttaaatttagg

SEQ ID NO: 7825 - DNA, 516 bp, Glycine max
aagatgttagaaagatagaagaaagagagagagagcgtagggtaactgaaagagacgaaggaaatgaagaagtcttcgggaagcgcagctgacaagaagagggtgcgacggtcctccgccctagatcccacctccgacgcccctccaaggaaacaagctgtcaagaaagatgtgttccgggtgtttgctgagaaggttagagaccataaagaattggtttcaagatgggctgttctacaggagacgcgtgttgagtattttagagggaaggatttcgtgagcttcttaaaaagccatccggagctcaaagatgttctagaattagataggattttggaaacagaggagattgccaacattctacttgcaaaaaatcttttagtgcgctgtgatcgtgttgtaaaaactgttcgtcctgggaagaaaaaactgtctagcctggcctgcacatttagaaattttccctgaacaagtatctactgaaaatgatgctctttttgcatggacgtttgtaaa

SEQ ID NO: 7826 - DNA, 1016 bp, Glycine max
ccctcgtggccgctttttcgcgcgctcgttagtcgtttgtaacgcctttcgtttgcgtttttatcacagaggaattaacatatatatagcaagcatggcagtcacactctacgaccttagctcttcctctgggttgaagaaacttgatgagtaccttctcccacgcagttacatcaccgggtaccaagctacaaaggatgatcttactgtttatgcagctttgccaactgctccatcagatgaatatggaaatgtttccaggtggtacaagcacattgatgctttgttgagaatctctggtgttactggcgagggatctggtgttattgttgagggatctctagttgcagagcctgttgcaactccccctgctgcagacacaaaggctgctgttgctgaggatgacgatgatgatgatgtggatttgttcggtgaagagacagaagaagagaagaaggcagcagaggaacgggcagctgcagtgaaggcatctacaaaaaaaaaagagtctgggaaatcatctgttctgttggatgtgaaaccatgggacgatgaaactgacatgaagaagctcgaagaagcagtgagatctgttcagatggaagggttgctttggggtgcatccaaacttgtacctgttgggtacggtatcaagaaactgcaaattatgcttactattgtggatgacctagtttctgttgatactcttattgaggaacatctcacagttgagcccatcaatgaatatgtccagagttgtgacattgtggccttcaataaaatataaactacaatcggtgggatttggagatcatggcaactgggagaattgcaagttttaaaaactatgttctagggggaactaccctgaattgagaatttttgtctttagaaacccgcttatattatttgtttctatatatcagtctttgtgatgtcatcggattatttggatagtaataatttcacctttaatgtgtcaacggattatttggatagtactcattttacctttg

SEQ ID NO: 7827 - DNA, 856 bp, Glycine max
ccgggtcgacccaagcgtccgaagacgacagaaggggacaactatatgtgtgacattgaatagctaattgctaggcatctctgaaatcaggcaagtgaaaaccaaaaataaaatggtctcacagacagttgaactcttaaagaatgagattcctctggagcaggaatcagtggttttagctgaagatgctgtaaatggtctcgttcttgtggacatcataaatggcttttgcacagttggtgctggaaatctggctccaagagaatccaatacgcagatttcgggaatgatcagtgaatcagcaaggctggctagagtgttctgtgagaagaatttgccggttatggctttcctggattctcaccatcctaacaagccagaggacccttatccccctcactgtattgttggctctgatgaatcaaatctggttccagcattaagatggctagagaatgaacctaatgtaacaatcaggcgaaaggattgttttgatggatatttgggctcaatacaagaagatggttcaaatgtttttgtagattgggtgaagaagaataagataacaactctgctggtagtaggtgtgtgcacagatatctgcgttctagattttgtatgctccacaatgtcagctaaaaaccgtggttttctggagcctctagaaaatgtggtggtgtattcccgtgcctgtgctacctttaatgtccctctggaggtagccagaaataccaaaggagctttggcacatcctcaggagtttatgcatcatgtaggcctatatatggccaaagaacgtggagccaagatagcaaatgaagtattgtatggtgcagcagggaaggtttaataaacc

SEQ ID NO: 7828 - DNA, 872 bp, Glycine max
tcccgggccaaccaagccttcattacggttgcaaaagaacacaaaaagggttggaatttggattgctcgttaacattgtgggagtttcgtatccttacgcgaggttcttccacgaagtggacgaagggcttctcaacaaccttattaaggttaacgttgttggaaccactaaggtcacgcaagctgttctgccagggatgctcaggagaaagaagggggcgattgttaacatgggttctggagctgctattgttattccttcggatcctctttatgctgtttatgctgccaccaaagcgtacatcgatcagttttcgagatgtctctatgttgaatacaagaggagtggaattgacgttcagtgtcaggttccattatatgtggcaaccaagatggcatcaatcaggaaatcttcattctttgttccatcaacagatggctatgccaaagcaggtgtgaaatggataggctatgagcctcgttgcacaccatactggccgcatactcttctttgggctgtggcattctcattgcccgagtttgttgttgatgcttggcgcctgtggttttgcttgggtattcgaaagaggggacagcgcaaagagtccatgaagaaggaataaaaggatgcttggttctgatgtgtaggccaatagacgctactcatctgataatatatatgcagattgttagctgattaaggattccaagtacctgctgtgctcctgattttcatcttgctgttattactcttttgttagtatcagttgtgtggcatattcttttcactcacctgttttgggtgtttctgttcactgttttagtagtgtgttgagctgatatcatatattggcatatcgcttagcccggtt

SEQ ID NO: 7829 - DNA, 1052 bp, Glycine max
attcccgggccgacccacacgtccaactgtgttgtgccagcaaatggagtgtctgtgttaccagactcattgccatatacagagtctgcaattctaggatgtgctgtttttactgcttacggcgctatggctcatgcagctcaagtgcgtcctggtgattctgttgctgttattggaactggaggtgttggttctagttgtttacagatagctagagcctttggtgcctcagatataattgctgtggatgtacgggatgaaaagctacagaaagcaaagacatttggtgctactcacactgtaaattcagcaaaggaagatcccattgaaaagatacttgaaattactggtggaaagggtgttgatgttgctgtggaagccttggggaaaccacagacatttgctcagtgcacacaaagtgtgaaggatggggggaaagctgtgatgattggactggcacaagctggttctttaggagaggtggatataaatcggcttgttcgcagaaagatacaagttattggctcctatgggggcagggcaaggcaagatcttccaaagttaattagactggcagaaacaggtatcttcaatcttggccatgctgtttcaagaacatacacttttgaggaggcgggaaaagcattccaagatctcaatgaaggaaaaattgtcggtcgagctgtgattgagataatatagctctatattcccagaaatgcttttctgcagcagcaatagctatgcttttcacaccccacaagatatacatgctttggagttgcaaggtgttggtaccctgagaacataaataaatagatgtcttctgatgtttcattgcaggggcatgttcaaatgaaaactgtttttctttttgtgcatttctttgcttctaactcatgtaatcaggtaggtacaccaaggtgaagaataatagtctctgaatgctcatcattggcgtgtcgtaaaactgacgatgaaaatgcaggaaaataacagaaaagctagagatgctccaagaaagtaaattaaaaaaaaatgtttccgtctta

SEQ ID NO: 7830 - DNA, 1083 bp, Glycine max
acgcgtccaatcgatgctacaagaccacagaaagggacacttctcataatttatgttgtgaagtttgtttattctgagaaggaagagagaatagaacgccatggatgagatattgaacaaggtggggtcttactggttctccaagaaggccagcaaggaatttaactctgtcggcgatgatatcaactcactgtcaaccagtattgaagggggaaccaaatggttggtcaacaagttaaaaggaaagatgcaaaaggcattaacagagttgctaaaggagtatgatctacccataggaatctttcctcgcgatgcgacaaactacgaatttaacgaagagacaggaaagcttgttgtttacattcctcaagtgtgtgaggttggctacagggattcgtcagttctgcgtttctccaccagcgtgagtggctatttggagaaagggaagctagcagaaatagaaggaatcaagaccaaagtgctgatatgggtaaaagtgactgccatttcatccgagggaccaaagctccatttcacggccggcatgaagaaaacaaggaaaagggaagcatatgaggttactagagatggtgtaacggtagataagttctaatatattaacaaggagctccttttgttaagtagttttacaatttagtaaaataaattgtcccttcttgtggaccattttattctattagatttgaatgtagtgaaacctgagacttggtggaactcctcctgagtccttgttgatgatgtagtttcagtttttttctgcttgggtttattaagttctattcctaatgtcacatggcttgtattaaatactgaaacttatgggcaagtgatattgtcatagtattattttagctcattaattgactctaggatattgattcctcccctattattagaggctgccattaattgtgtagcgaatggttacaatgccaatggcacaattgaaacatagacactgtcggtgtgacattaacatcatactattatacggaataaatggtcgcctttaggaattgtcaaagtttgtgtcttaaattttaagttaatgcttttcttttt

SEQ ID NO: 7831 - DNA, 507 bp, Glycine max
tgaagtttgtttattctgagaaggaagagagaatagaacgccatggatgagatattgaacaaggtggggtcttactggttctccaagaaggccagcaaggactttaactctgtcggcgatgatatcaacgtaaacaacacaatccttaacaccctttttttatctatttcttttttttttggtcgattcatttttatttttattttacttttatttggtaaagttcccttttttttttttgtcttttccgttttgctttttcatacgagtgactgaattttatagttcctggcttcctgctgtcatgtttgtccctgttgaaaaaaaatatctatggaactaagttcttgcttaaccatggagtcgtggttttggttgagggttagggttgaaattgaaacgtgattgtttattattcatgtgaatgaacacacacgaacatgcccttttgggattctatgaaaagggaaaatttttaatgggtattttctatttttaggttttttt

SEQ ID NO: 7832 - DNA, 779 bp, Glycine max
  unsure (1)..(779): unsure at all n locations
aaaagaggtccatgccctccccgctctaacaatatataatgtaaccaaaccccttctcaaggctacttcagagttaagttgagaacataccaatctacaataaacgatgattctcattatctccctcattttttctcttctctctttctcccatgcttctgtcctagatttctgtgttgcagattatgcaggtcctattggacctgcaggatattcctgcaagaagccttcaaaggtcacagcagatgattttgcttacagtggccttggcattgctggtaacacctcaaacattatcaaagctgcagtgacccctgcatttgatgctcagtttgctggtctcaacggtcttggcatttccgcagcacgtttggacttagcagcaggtggagttataccacttcacactcatcctggagcttcagaattacttgttgtaattgaagggagcatcctagctggattcatttcttctgccaacattgtctacctcaaaactcttaagaagggggatgttatggcattccctcaaggcttgcttcatttccaaatcaatgcaggcaaatcttcagccctggcaattgtaagcttcagtagctccaatcctggtctacaaattctggacttcgctttgttcaaaagtagcttccccacaccattgatagtacaaaccactttccttgatgctgctctggtgaagaagcttaagggtgtacttggaggctcangctaaaccatgggaagttatccatgaaagagactgaagtcaagcaagcata

SEQ ID NO: 7833 - DNA, 362 bp, Glycine max
ctcgagccggttcttcctttctttctctctctagaatcttctccgatcaagtgacacacgatacgaacaaaagctgatccatccagtcaacaatggaggaagttcaagagtctcaaacccaatcatcgctcggtcaagaagaggaaaatgaagtgattactgaaagttcagcatttgttaagggggaaccggcaccagaattcagtagtaaccccccaaaagttgattctgaagttgaggtccttcatgagaaggtcagcaaacaaatcattaaggaaggtcatggccagaaaccttccaaatattcaacttgcttcttccattacagggcgtgggctgagaaatcacaacacaagtttgaa

SEQ ID NO: 7834 - DNA, 331 bp, Glycine max
gatcaagtgacacacgatacgaacaaaagctgatccatccagtcaacgtaagagattttcaccgttttccacttccacaattttcttctctgatgctgtttggttcttcttaaaatctatactaatctaattagttttttctcactctcctcaaattgtgtacgcaacaaaaattttgcagaatggaggaagttcaagagtctcaaacccaatcatcgctcggtcaagaagaggaaaatgaagtgattactgaaagttcagcatttgttaagggggaaccggcaccagaattcagtagtaaccccccaaaagttgattctgaagttgaggt

SEQ ID NO: 7835 - DNA, 780 bp, Glycine max
acatagtactctgagttgaaaatagagagagatagatattggcacggggcagatagggttagatgtgagttgtaattaagcacactatttccacccacaccacaagctccttatcgtgtttgcattgcagagagagagagaatggcgaccacacccggtttgtgtggcagtgtgttgttgagcacctcgttcctgaggaagcaggcaatggcatcagtgaacatgagaatgctgaaggctaatgctggtgtttttggcttaaagggagggcgtggagggcgtgtgagtgcgatggcaagttacaatgtgaagctgataaccccagaaggagaacaagaatttgaatgcccagatgatgttttcattcttgaaaaggctgaggaatttggcattgaccttccctactcatgcaaggctggtgcttgctcttcctgtgccggcaaagttgtttctggcaaagtcgaccaatctgatggtagttaccttgatgatacccaaatcggtaacggatttgttctcacctgtgttgcttatcccacctcagatgttggtattcagacccaccaggaggatgagctattctaggtctatatctcatgtctctttctatcttgcattttcatttatatgcttggttatcatatcaccaactccaactgtagtacctacgtaccatgtgatcttcattcttgaatatcactattcttaaattataaaaaaaaaaatttatatatataattctttaatttatattttatttttattttttttatattaaaa

SEQ ID NO: 7836 - DNA, 897 bp, Glycine max
ccacgcgtcagcacacgcgtccgcgcacagcgtcagcccacgcgtccgcccacgccaccgcgggacacaacaattccatggctaaccctaacaccttattctccttgagtccctaactctcactgtcgtcgcaagcttgaagtcgtgaggtctcagggttgccccttgcagtcgcgggctatctgtttatctctctccctgtctaagttccctttaactgtcgccacaagagtgaatcgtgaaatgggttggaaagcagctgagaaactcattaggcactggaaagttctcagaggggataatgttatgataataaggggcaaagataagggcgagactgggactattaagcgtgtcattcgctctcagaatcgtgtcattgttgagggtaaaaatctggtgaaaaagcatatcaagcaagggcaaggtcatgaagggggcatctttacagttgaagctccaatccatgcctccaatgtgcaagttcttgacccagtgacagggaagccttgcaaggttggaactaaatatcttgaagatggttctaaagtcagagtatccagaggaataggagcatctggatccataatccctcgacctgagatcttaaagataagaactaccccacgacctactgtccttggtcctaaagatactcctatggatcttgtgctagagaagacttatgatgctaaaacaggaaggggcatgcctgagctttaaggagattaggtcccttacaatttaggtagttgctatcacgatgaacaagatagggaatgaggttgtcacatgctttgtctatcgtgattctgttgaattgctttcaaattttcgtgtttaatgtgatcgtatgagttacccatagctaaaaaaagtaataattcttctcctgcc

SEQ ID NO: 7837 - DNA, 512 bp, Glycine max
gataactaatgggtagagacaacgccgtttgagtcgcgtctgataataaaaatacacagtgagctctcgcttctagccctagggcgctgctcccgattttctctcttcggattgagtgaattgtgaaatgggttggaaagctgctgagaaactcattaggcactggaaagttgtcagaggggataatgttatgataataaggggcaaagataagggcgagactgggactattaagcgtgtcattcgctctcagaatcgtgtcattgttgagggtaaaaatctggtgaaaaagcacatcaagcaagggcaaggtcatgaagggggcatctttacagttgaagctccaatccatgcctccaatgtgcaagttcttgacccagtgacagggaagccttgcaagattggacacaaatatcttgaagatggtactaaagtcagagtatcaagaggaataggatcatctgggtccataatccctcggcctgagatcttaatgataagaactaccccac

SEQ ID NO: 7838 - DNA, 373 bp, Glycine max
gacacctggattgaaggttccttggcttcttcacactcacagcgtgccaccatcacgctacactaagagtgcaggaacatcctgtatgggttggaaagcagctgagaaactcattaggcactggaaaattctcagaggagataatgttatgataacaaggggcaaagataagggtgagaccgggattctaaagcgtgtcattcgctctcaaaatcgtgtcattgtagagagtaaaaacccggtaaagaagcatataaagcaagggcaaggtcatgaagggggcatctttacagtggaagccccactgcatgcctccaatgtgcaagttcttgacccagtgacagggtatgtcattgttcagatattgaactgg

SEQ ID NO: 7839 - DNA, 480 bp, Glycine max
gaaaattttatcctcgtttcaaccttgaagataccataagtttccaggatttggatgatcatagcaagaatgttctcaaacgattataccatgactactatttctgtcgtcaagagaatctttggaggcaaaatgcattgaagaccctgcctgtacttctaaattcatcagacatgctggcctgtggggaagatttgggtctcattccatcttgtgtccatcctgttatgcaagaactgggattagttgggttgcgcattcagcgcatgcccaatgaacctgatctggaatttggtattccttctaagtacagctacatgacggtatgtgccccttcatgtcatgactgttccaccttgcgtgcttggtgggaagaagaataagaaagaagacttcggtttttcaagaatgggaaggagtcccaatggttggcggccgatcaatggggtccaaaagttggacattttggtataagggggg

SEQ ID NO: 7840 - DNA, 490 bp, Glycine max
gacccacgcatcagacggctgacgacagaaggggagggttacacgccgcattgctctcagcttcacaacaccatggaccacgttagggaaacctctgcttgggtagctagccgctcctcccacgttctcgttgactctgcaggaattgagaaagtggtgagcaccattgattccattcccaaggttgagtgggatttcgaagggattcactactttgataatggaccactcaccgttcagtacctgtttgtgttggacgctttaaatttttgcttctggcctgataaggatttgaattatgatgatttggcatctgggccaaaggcagctcttcaaaatgataaatctgcatttgatgctgatcgtctgcaaaagtacactggtccacaactgcgtgagcttttgaggtggcctagaccccttcctctggaagatgaacgagttaggttactacatgaggttgggattgaattagaaagaaactttgagg

SEQ ID NO: 7841 - DNA, 212 bp, Glycine max
ataagaattaattttactccacaaaatcacggtgttatcatgaaaaagtagaagtaattatttgttattttgtttttatcatgaaagttttattgattgtttatcaccaaattttaaccaagcacactatgaatctcgtaaagtccaaaatgactatggctaaggaccatcttaacgaattaaaagacttccaagtataaaaaaatccaaca

SEQ ID NO: 7842 - DNA, 994 bp, Glycine max
ccaacccttcaatagggtggcaaaaaaacaaaaaaggggatacctaaaaattgtaccgatatggcttcacttgtgtgtctccttttttccttgcatttcatggttatcatgtcaggttccttaccagcaaatagtgaagtgtttacaaaagagtctcctatgtctctatccacaaaacccgtggaaagactcacccaactccacttttatttccataacaacaaaatgggggaacacccgactgctatgaaaattgttgagcctcctaaggcgtccatttctggttttgggactatttacatgatggatgaccctctaaccgaaggaccaagtccaacttcaaagcttgttggaagatgtcagggaatatatgctgaggcttcgcaacatgaacctgcgatactcatggtaacgaatttgttcttcactgagggcatttacaatggcagcaccctcagcattcttgggaggaaccctatgttgcagagtgttaaagaaatgccaattgttgggggtagtgggatcttcaaatatgcaaggggttcttctgtgcttaagacacatgtgcatgatgctaaggctggtgttgcaattgtcgaatacaacgtgtctgtcctgcatgtttgagtgaaataggttgaagttgctctttataatataggtttgttttggaggttgagtttgaagtctttctcttctaatctctttaattttaagtccattcgtcttaaaaaatagtaggtttcaagttaaaataatagctgtcctgttgttttattaatggaaagtaatgttactacattcagtgatagatgtggcaattaagattgattaagagcaacagatgtaattgtttattcctagatatgcatgtgatgcgctggtatgaatatgattgaagagttagtattataatacattacttatttcgtggctgtgggtgggttgcgcaagtgtgaacgcatgaatgcaatatatgactggatttgttccc

SEQ ID NO: 7843 - DNA, 523 bp, Glycine max
ggttgttgttgtattgcagtaagtaacagcgaacgaagaagaagaagaagaagaagaagaagaacgcagaagccacgatgagtggcagagccatgatctcctgtttctctcctccttcaacaactccatgctctgcccccattccactctggcgccgaaaccacctcctccatgcaactcctccaccttcgctacacctcctctcgcggcggagccacctcgttgccggcggaaggagggtgtgggtgaatgtgaagtccgagaagaacttatccgaatcccccaagtacgaggatgatgtcgtggttcagaagaagaagaagcgtggtttggataacgtggaagaggaagcgaggtggtggccagtgtttcccaaaagatgggtcattgtggttctctgcttctcagcttttcttctatgtaacatgaataatattctgtcaaaatgggttcctgtgtcagagagaagtagatcactagcgctggtctacagtggcatgtatctgggatcagtcactggact

SEQ ID NO: 7844 - DNA, 2029 bp, Glycine max
ataatttcctcttcttctctcgtttctctctctttctttctctcaaagtgttgaacttgaagttgcagagagaaaatggattgagaattctctctcttttctctttctcttcccaactttccttccttgggatcattctgcttctttgctatggaagactcagattcagttgctacgctgatagattccacaacttctaagatacagcagctgcaaaaggcatttgctgaacttgaaagttaccgagctgttactctgaacttgaaatggaaagaactcgaggaacattttcatggtctggagaaatccttgaagaggcgctttcatgaattggaagaccaggaaaaagagtttgagaacaaaacaaggaaggctcaggagatactggagaagcggcaagcagctgtttatgccaaggagcaagccacgttgcagaggcttcaggagaaaagggatgctgctgtatttgacattgtgaatgctcgagaaaagcagaggaaggtcacgataagtgatttggctattgtctccaatgggggtaaggggacatttcatgtggaggacaaaccagtggatgctgtgtcctttgcagctaatggtaatgtggaagaggtggtactttctcctgaaaatggaaatgtggagttgtcttatccagacttggtaaaactttgtaaagagatggatgctgctgggcttcacaaattcatatctgacaaccgtaagaaccttgctgctgtaagggaggaaataccacatgcattaagagcagctcctaacgccgcctgtttagttttagattctctgaaggggttttactgtacagaagtgtcaaatcaggacgtaaagaaggatgctaacttactgggtgttcgccgaacatgtatcatgctgatggaatgtctatgtgatttcctgagcaactcaggttgtgtttctaatgtaatttcagaagatatcaaggaccgggctaaggcagttgctgaagaatggaaacccagattggatgctcttgacatggatgctagcaatgtgaattccttggaggctcatgcatttttgcaacttctagccagttttggtattgcctctggttttgatgaggaggagttatctagattgattccaatggtgtctcggcgccgccaaactgctgatttatgtcgttttcttgggctgtcagaaaagatgcctggtgtcattgaggttttggtgaacagtgggcgacaaattgatgctgttaacttggcttttgcatttgatcttactgaacaattttcacctattcctttactgaagtcttacttgaaggatgctagaaaaatttcttctcctgtcagaagtgttaactcatctcccactgcacagattgaggtgaatgatcgagaactgattgcacttaaagctgtaattaagtgtattgaagatcacaaacttgatgaccagtaccctctggatcctctccagaagcgagcgacccaactcgagaaggccaaggctgacaagaaaagggtaactgaagcaacaaagcctcaacccaagagaccccgtgctaatggtgtgggatatggcccgcgtgtcactaacattctatctgacaaaacttcttatgctagagttgctgacaggtatcctcaatacgtgtatgaccgaccttacatgtaccctgcaccaactgacaatcactgccctcctctcatgggttctgcaacttataacatctctcctaatcctggcaactactttggaaatggctatcagtaccaagctacatatctccactagttagcacagatgatggtgaactgatgactaagaagctacatatccctttgtttaatatttagtcttaagtcttaacccttaagctgttgtatgttgcactttatctatgtagtctttaagaattgctgaaacaggtaaaatgtcatgttaaattttaacttctgtgctagaagatattctgatcctctaatgtatgtactctgttctcgttttgtaaaatatctttctttgtttcttagatctg

SEQ ID NO: 7845 - DNA, 876 bp, Glycine max
ttttgcgacactttttattaaacaaatactaccaccacacatgccttttttcttcttcatcatcttctctcacctctctctctctctctccctccctcctagggtttcacgtttccatgtgaaaacggattgagaatctctctctcattctctctctattttatattttctttcacgtcaattagggtttttttgctggcgtgattctgaaggcttggatctggatatcttctttgcttctttgctatggaagactcggattcagttgctacactgatagattctactacttctaagatacaacagctgcagaaggcatttgctgaacttgaaagttatcgggctgttactcttaacttgaaatggaaagaactagaggaacatttccatggtcttgagaaatccttgaagaggcgctttgatgaattggaagaccaagaaaaagagtttgaaagcaaaacgaggaaggctcgtgagatactggagaagcgggaagcagctgtttttgctaaggagcaagattcgttgcagaggcttcaagagaaaagagatgctgcttcatttgccattgtaaatgctcgagaaaagcagaggaagatttcatcacgtgaattggctactttctctaatggtggtaaaggagggatgccaggagtggaggagaaaccagtggatactttgtccactgcagctgaaggtaatgtggaagatgtaaaacttcctgataatggaaatgtggagttggtatcttatccagagttggtaaaactatgcaaagagatggatgctgctggacttcacaaattcatatctgataaccgtaagaaccttgctgctgtaagggatgaaataccaaatgctttaagagctgctcct

SEQ ID NO: 7846 - DNA, 258 bp, Glycine max
ttgcactttatctatgtagtctttaagaattgctacatacaacatcttaagggttaagacttaagactaaatattaaacaaagggatatgtaggcttaaggcttaacccttaagctgttgtatgttgcactttatctatgtagtctttaagaattgctgaaacaggtaaaatgtcatgttaaattttaacttcctgtgctagaagatattctgatcctctaatagtatgtactctgtactcgttttgtaaaatatctt

SEQ ID NO: 7847 - DNA, 509 bp, Glycine max
ctgagactaatttaggacaaaatttgaaaaagaaaacagaaggagaaagaatagtgaagaagaagtgagagagacacagacacagtgcggtttgcgactctagtactattaattaaacaaatacttctaccacacattcttttcttcttctctctctcccagggtttcacgttttcatgtgaaaatggattgagaatctctttctatttttatattttctttcgggtcaattagggttttttctggcgtgattctgaaagcttggatctggatatcttctttgcttctttgctatggaagactcggattcagttgctacgctgatagattccactacttctaagatacagcagctgcagaaggcatttgctgaacttgaaagttaccgagctgttactctgaacttgaaatggaaagaactcgaggaacattttcatggtctggagaaatccttgaagaggcgctttcatgaattggaagaccaggaaaaagagtttgagaacaaaaca

SEQ ID NO: 7848 - DNA, 539 bp, Glycine max
aacttggtatatccactatatgaccgttaactaaaacatgtctatggttaattaattggcgtgcttgaggaatagtcgcagccatacccaaccgaaaaagtatgttatccaagcgcatttcaagtagttgtaataaaacctgaccagttgatcctttagcttttccggcgatacgaacgtatttaagcaattgtcgttctgtaagaccataatgaaaacgcaatttttgtttttcttctaaacgaatacgatattgagattttttactggagcgcgattgatttctaagttcgcttttgactgttggccttttactagttagtcctggtaaagaccccagacgacgtatttttttgaaacgaggtcctctgtaacgtgacataaagactccttttttaatggaaaatcttataaatcaaaattaaaactaaactaaatgaaaaatattctattataaatcaagcaaaatctactaaagtcttcccctacaaagaagaattagacgaattctatcaatatccgaacttttccttctcgcc

SEQ ID NO: 7849 - DNA, 914 bp, Glycine max
taaaatttgacggtgatcacaactcgtctcggacacatttcttttatgatcaagtttctattttcttctacaatgtccttcacctccctaatgttcctagagctcataagcttgagaatattaatacttggggatctaagagcttggttctggtgtggacgagagcctatatatgagatttctctctagtctgaggtctgcatcacccgacgctgcaagttcatcttctgtgcttccagcaatttccagcacataatcagttagcgaactcttgcagaagttgcaccagtgactgacacagagtccttttttagagaagatactaatggcaatgatgaggctacagatgtgcaggataagaagctaaatggcgagggtgaagattgttgctcgtacacgagctcaaacagagaaagttggggaagatgttcttcgttaggaggcagtgatgaagaatcttgtgcagatgataccctctctcaggtgtttgcaacacctatgcgaagcacgaatgaaaaagaaaaagatgatgacaaaaagcatgaggagaagaagaagaagaagaaggggaagaagcccaaagagtgagaggtttgagaagctggaggctctaagcaggcgcctgaggctttgccttctaaagggatcaacccatggaaggcacaagtcaacttagacacacctcttccttctttgtatcatatcacccatccatcgtctaattctaatgttttattttacaacactgtttctaggtagttcttcacattcaactttctttttaggttttgcctaacattggccctcatttccctgctctcattattatttcatacttatgaaggtgactcatcacattgatgtgcaggtatcagataccatacgtgtatccaatatatagataagattattcg

SEQ ID NO: 7850 - DNA, 365 bp, Glycine max
gaagttcttcagcgaccaagaccagatcgacttcatcgattccttccagaagtgtctcttcgagaacacgcacggcgtcgaggccacggaggccaacaaactcaaaatctacggcaaggatttcgcggcgtgggcaaaacccgaaaccgccgatgattccatgtgggaggacgcacaggaagccttcaccaaaagccccacactggttaggtcaaaccaagacctaaaagaagagttcgaagaagcttccaacggtggaattcagagccttgctttgggtgctttggacaacagtttcctggtgagtgataatgggattcacggttgtgaagaatttcgcacatgggattcatgggaagggtgct

SEQ ID NO: 7851 - DNA, 378 bp, Glycine max
aaatttgttttctgaaacctagccaggcagcctcccttcctccctcgatatcgggtgccgctatttgcttctcctctgaaccatccaaccattcaacggccctgtgtttgttaattgagatttgagattcaacgctctaacattggtacaatggcttccaacatctcgccttctgcccttgataaagaacagatatttggaatggctgaaaaggagatggagtatcgagttgaattattcaacaagatgacccagacctgttttaaaaagtgtgttgacaataggtacaaggagtccgagctaaatatgggtgaaaatagttgcattgaccgctgtgtttcaaaatactggcatgtgactaatctaattggtcagctg

SEQ ID NO: 7852 - DNA, 355 bp, Glycine max
cttactttttcgcgctcgctctgttgtgaatagagattcatcacttccactcggcccattctccgctttcttcaaatcgtaaacttttttgggattgaagaccgaatcgttagaaattttcagggtacaatggcttccaacatctcgcccgctgcctttgataaagaacagatatttggaatggctgaaaaggagatggaatatagggttgaattattcaacaagatgacccagacctgtttcaagaagtgtgttgacaataggtacaaggagtctgagctaaatatgggtgaaaatagttgcattgaccgctgtgtttcaaaatactggcatgtgactaatctagttggtcagc

SEQ ID NO: 7853 - DNA, 540 bp, Glycine max
tcattcattcatcttcgttctagagccatgtctagcaccgttggccagaccatcaagtgcaaagctgcgattgcatgggaggctgggaagccgctggtgattgaagaagtggaggttgcgccaccgcaagcccgtgaagtccgtttgaagatcctctacacctctctttgccacactgatgtttacttctgggatgcgaagggccagactcttataacactatctttattagattagattagtgcatacatgtgttacattatcttagttaaattaaaatcaatatgtaattgatgtgatatgattttgttgaaatagtgattagcagatatatatatgtaatgtctatgtcaaaggttggtttttgttgttttctctttaggatgtgactcctctaaagtgaaaaggagttaactaagtaatctcagaacttgataagaaaattaattgttcatctttcaatacattcaagatttatcatatatgtacatgtaatattgatcattaattttcttaaccattgagattgcttattttaca

SEQ ID NO: 7854 - DNA, 603 bp, Glycine max
ctctctttctctctctcaccttctttgctttctcactaatcactataaataaaatcttcactctgtccttcccccgcacaattcaataccatttaccaaactcactcatcaattctcttgtttgttctcactaactattacttcatcatgtcgtcgagcacagttggtcaagtcatcaaatgcaaagctgcggtttcatgggaggcagggaagccacttgtgattgaagaagtagaggtggcaccaccacaagctggtgaagtgcgtttgaagatcctctacacctctctttgccacactgatgtttacttctgggaagccaagggccaaactccattgtttcctcgtatatttggtcatgaagctggagggattgtggagagcgtaggtgagggtgtgactcatctcaaaccaggggaccatgccctcccagtgtttaccggggagtgtggagaatgccctcattgcaagtcagaggagagcaacatgtgtgatcttctcaggatcaacactgataggggtgtcatgatccatgacagccaaacaaggttttctataaagggacaacctatttaccattttgttggtacctccacattcagt

SEQ ID NO: 7855 - DNA, 498 bp, Glycine max
aattaccggtcgagcacgcgtccgcttctgatcattcattcatcttcgttctaagagccatgtctagcaccgttggccagaccatcaagtgcaaagctgcgattgcatgggaggctgggaagccgctggtgattgaagaagtggaggttgcgccaccgcaagccggtgaagtccgtttgaagatcctctacacctctctttgccacactgatgtttacttctgggatgcgaagggccagactccattgtttcctcgcatttttggccatgaagcttcggggattgtggagagcgtatgcgagggtgtgactcatctgaaaccaggtgaccatgccctccctgtgttcacaggagagtgtggagattgcgcccattgcaagtcagaggagagcaacatgtgtgagctactcaggatcaacaccgataggggtgtcatgatccatgatggccaatcaaggttctctaagattggacaacccatacaccatttcttgggaa

SEQ ID NO: 7856 - DNA, 493 bp, Glycine max
attcaataccatttaccaaactcactcatcaattctcatctttcttctcactaactattaattcatcatgtcgagcacagctggccaagtcatcaaatgcaaaggtgacttcttctcagtgtcatcttattttgatctcttttcatttttgatgctatacatagcatatcatattagcattccctgctgaagaggttttttttttaaaagtttgttaatctgttatttatgcatcgatgtctaaccttgttatgatcacttcgaattttacgaataaaccaatcttagtcttaacacttttttttgtggggtgcataaagctggttctattttgctatttttatttctgtaatttagaaaattataatgatccttttcctgggtcgttatttttcttcgtattaaaaaatgttaattgccctccattctagtcatatttttgaaagtgcttacttcttaatgatattcaagtttgtttaccagacggattatc

SEQ ID NO: 7857 - DNA, 530 bp, Glycine max
cgggcccaaccaagcctccaacgggtggcaaaagacgacagaaggggataggtgtgagaaaacgacagaaggggtgggtcacattatcacgaaagtgtaatttgtgataatcacaagaatccacgatgacgttttctgcgaatcagtcagaatgcctgcactctcgtcagattattagaggatgttctgagcagaatcaaagattccttcgtgagactttccccacgatcgttagattacactccacttatttggtcagttttaagttaggggtgaggtagagtatattaaagtttgatgcgttgttaaaccattagttatttcaggggacgccgtttgtcgcgtaagttttggaaattatgtatcttgtggtgggattatccgtatctaaaacaattaatgtgtaggaataatttggggtgtactagtaaacattgatatggtttgctggatggatatatattattcaggtggatatgccagtcttgtccatcctgctggacgtttttcaaaaaaaaaaaataaatcct

SEQ ID NO: 7858 - DNA, 414 bp, Glycine max
atcaagaaagtataatttgttataatccgaagaatccaagatcacgttttctgcaaatcgatcagaatgccggcactctcattagattaatagaggatattctgagcagaatcaaagatcccttcgtgagactttcaccaggatctttagattacactccaattatttgtcttttttaagttgggggtgaggtagagtatattaaagtttgatgcgttgttaaaccattagttatttcaggggacgccgtttgtcgcggaagttttgaaaatgatgtatcttgtggtgggattatacaattaatgggtagaataatttggtgtctacttagtaaacattgataggctttgctggaaagatatatattattcaggtggatatgtcagactgtccatcctgctggacatttttcac

SEQ ID NO: 7859 - DNA, 403 bp, Glycine max
aatcatcaaaaacagccacagcacagcacaggcctcatcagttttgtgttgctgttcctgaaacatacacagatcaggtagcaggaggaggaggagttgcactttgctcaactctcctcactcttttcttctaacagatagatagatagatacaatagtgagaaagaaagagggttcctgaaacctcacccccttcttctaaaccctctccagctacccctaagttctgcaactcattcactactaggatatttgctgatgttgctggtgacattacaattgtcgttgatggcgagtcttttcttctgcataagtttcccttggtgactctaagtgggaagatccggaagatggtggctgaagccaagggttccaatgtttcaagcttggagctcatcaactt

SEQ ID NO: 7860 - DNA, 1899 bp, Glycine max
agggggtccgttattttcttttcttcttcctctctcttcgttctctctctctctctcttattcctttctctccgaatccacgtcctagatccgttgttctcttcccacagttctcactgaatcaggatccattttgataccaagttgctgttgaatatcgagtttgctctttagagatctgtttccctctagacaacggtctgtgtgacctgttattttagttgaatcgaagccgcgaccaaatcttcctgatctttgcctgaggtgatggcatcggcgggtgtagcacctgcttctggagtaagagatgtgaatgcaaattcggttgctgttgaaaggttgcctgatgagatgaatggcatgaaaattagggatgaaagggaaatggaagcaactgtggtagatggaaatgggactgaaacaggacatataattgttactaccattggtggtaaaaatggccagccaaagcagacaataagctacatggctgagcgagttgttggaaatggatcatttggtgtagttttccaggcaaagtgcttggagacaggggaaactgtggctataaagaaggttcttcaagacaagaggtacaagaaccgggaattgcaaaccatgcgtcttctggatcaccccaatgttgtaactttgaagcattgcttcttttcaacaactgaaaaagacgagctttatcttaatttggtacttgagtatgttcctgagactgtccaccgagttatcaggcattacaacaaaatgaatcaaagaatgcctttgatatacgtgaaactctatttttaccagatatgtagagcactagcttatattcacaactgcattggagtgtctcacagggacataaaacctcaaaatttactggtcaatcctcacactcaccagctaaagatttgtgactttgggagtgcaaaagtcttggtcaaaggggaaccaaacatatcttacatctgctctaggtactatagagcacctgaacttatatttggtgcaactgagtacaccacggccattgatatctggtcagctggttgtgtacttggtgaactaatgcttggccagcctctattccctggtgagagtggagtagatcagcttgttgaaattatcaaggttttaggtaccccaacaagggaagaaatcaagtgcatgaatcctaattataccgagtccaaatttccacaaattaaagctcacccatggcacaagatctttcacaagcgcttacctcctgaggctgtggatctcgtctcaaggctactgcaatactctccaaatcttcgatgcacagctctggaggccttggttcatccattctttgatgaactgcgtgatccaaatacccgcctaccaaatgggcgttaccttcccccactctttaacttcagagccaatgagcttaaaggagtgcctccaggcatgctggtgaaactgattccatctcatgcaagaaagcagtgtgccttgtttgcgtcatagtgtagcctcgtgtaaatattatctactctgcctgtagaagtgtatgtagtctgtttcaggttgttaatagttggttccttccacctagttctgttaatttgtccccctcacccaaagaaagaaaaatcctccttccaatttcttatatttcttgctgcctgaagaaagccgtttgagaagaagcttcaagttgatataattggtttcctcatcttcaaagttttaacagattgtattaagtattaatactattaattagaagaaccattgtatactcatgtagtatactagaacactagtacgatgtgatccgggaggggatgttttaaagcttgtttgtatatccctgcctccccttaattatgaggaattttgctttggatgattatcttgctttcaagg

SEQ ID NO: 7861 - DNA, 280 bp, Glycine max
ttcttcttcctctctcttcgttctcgctctcttattcctttctctcttgtcttctctccgaatccacgtcctagatctgttgttctcttcccacagttctcactgaatcaggatccattttgataccaagttgctgtttagagatctgtttccttctagacaacggtctgtgctatctgttattttagttgaatcgaagctgcaacaaaatcttcctgatctttgctttgaggttatggcatcggcgggtgtagcacctgcttctggggtaagagatgtg

SEQ ID NO: 7862 - DNA, 249 bp, Glycine max
gtagttttttaatctggcttcatggtaatgaactaacaatattcatctttggggatgaatccttaattctacatgcagattttgataccaagttgctgtttagagatctgtttccttctagacaacggtctgtggtatctgttattttagttgaatcgaagctgcaacaaaatcttcctgatctttgctttgaggttatggcatcggcgggtgtagcacctgcttctggggtaagagatgtgaatgcaa

SEQ ID NO: 7863 - DNA, 440 bp, Glycine max
agaaacgacagaagggggaagtaaagaacataactaaacactagcaggaccaaaagggtattcttccgacgaagaaacacgatcgtatcgtatcaccggaaattctgactctcacagatttctgggagcgacaattgcaactccgattcgacttgaagagagggaggaaggtgaagaagattggcaaattataagaatacgttgagatgtcagcgcttttcaatttccattcatttctaaccgtgatacttctgggaatatgtgcctgcacttatttcaagatgcagtttccggctatccttgaccagaaaactgggtctcgtggtctcttctggagggcagcaagaataggtggaacgcttaagcccatgggtagcagcaggttgctttatgatgggtgtttcaataatcttcttctaagctttgttttacactcaata

SEQ ID NO: 7864 - DNA, 356 bp, Glycine max
ggatgaagtaaagaacagaactaaacactaactggatcaaaactaaagggtattcttccggcgattgtattgtatattgacgctcacagatttctgggagcgacagttgcaacttcgattcgacttgaagagagggaggaaggtggaaattggcaaattataagaatacgctgaaatgtcagcgcttttcaatttccattcatttctaactgtgatacttctgggaatatgtgcctgcacttatttcaagatgcagtttccggcgatccttgaccagaaaactgggtttcgtggtttcttctggaaggcggcaagaatacgggcgtccgttctatgcttgaccgcagtttgatatg

SEQ ID NO: 7865 - DNA, 215 bp, Glycine max
attggaatgtgcacacactgcacaatatgggaaataaaaaaaacaaaaataaaaactgaagccattcaactcatgtaatagcacagttgcttccgattagatgcagttatcctggttagtggttagcattccgtaaagtaaccaaaacatgtttgggatgtgccttactaatctatatgggtgatttcagctgtctgatgtggatacttgtttac

SEQ ID NO: 7866 - DNA, 564 bp, Glycine max
gaattttgttgccaaagttaaaatggaaatagtagtgagaaaggaccaggttgaggcagtaattgacaaaattatcgaggaggcaaggactggggagattggtgatggcaaaattttcttgatccccgtctcagatgttataagaattcgaacaggtgagcgtggggagcaggcagagaggatgactgggggccgaagtgatatgctatctgctgtatgactgattggaacgaaagatcagcatttgtaatctggttctcttaccctttctcctttttcccttgtggaatattgaatgcattacgatgctgtatgcttcatatgttttgcacttatatgtcggaagatgtatgacagacagtattgaaagggcactgtagttatgtggtgaagaaaaattgtgaaaaaataataaacaaatgctgagttgattcatatgttatcgtgaaaaagccaatttggtgtgtatttatataatcattttttcgccatgtcatgacaccaagatggcaagatgtatgacttgcaatcaaattaaggataagctgtaattttcgtctgtca

SEQ ID NO: 7867 - DNA, 783 bp, Glycine max
ctcttttttcgaaaaacgaaaataatttctacaaaattgacgaggagaaatataaattagggtttgttaaaaaacctctcgtaaacattcttttcaattataaacgatggaatcgtccatttcgatatataaaaaataatcgatttgaaaatgtcgtaaaaaatgaaatttcagaatttttttttcatacatgtcaaagtgatggaaaagaaagaatatcttttatgtatccaccaaatttatcaacttttcataaaatgatggaaaccaaattttatctcttcacaaaagataaaatttcctatgatgaattgtctaattattggagctatactaatgaagaaaaaagaaacaaattgagcaatgaatttgtaaatagggcaaaagtaatggataaggaattaatttctctggatatattagaaaaccgaattcgattgtctaatgatgaaactaaaacaaaatatttaactaaaatatatgatcctttcctgaacggacgctttcgtggacaaatcgaaaatgttttttcaacctcaatccaatatgaaaaaaatgaaaaaaaaaataccattttgataaataaaattcatggtatccttatttctaataatacttataaaaaaaataatagtaattatccagaattagagaaaaaaataaatatatttgatagaaaatctttagtaactacgttttttttttttcaatctaatcagtaaattttcaaaaaaattaatatcaagcttgagttttgaagcactttctttatttccagaacat

SEQ ID NO: 7868 - DNA, 1109 bp, Glycine max
cccacgcgtccgattccacataataatattacgcctcccctcatgtgtatatataatatatatagttcagttgagtgggtgtgtgagtgaaagaccacaaacaacaaggttggttcaacttgtgtgaagggattggaacatggaaaatcttggtggttctagtcgtaggaaagcaattgaggagcttcttagagggcgtgattctgcccaacaacttaagagtgtcatcaatgggacttatgatgatggatcagccaccccatttgctcaacaacttgtgaaagaggtgctcatgtccttcacaaactccctcttgttcttgcacaacaaccccacttctgaatcacatcatgtcttcaatgttcaagtatgggactctcccaagtctgaggactctcaagagagcaattgcaaaagctccaccattaaggaaccaagagggtgctacaagagaagaagaactgaacaaacatgggagaaggaatctgaagctccaattgatgatggccatcactggagaaagtatggccaaaaggagatcctgagtgccaaattccctaggaactactataggtgcactcacaaatttgaccaaggttgccaagcaacaaaacaggtgcaaagagttcaagaggaaccaatcctattcaaaaccacctactatgggcaccatacttgcaagaactcggcaaaccctgatatcatacttgaccccatgtccccttcatcctcttccaagttccttagctttgacaactccttttcaaccccatccaagcaagagtgcccctttctctcatcttccaataatttcccatcatcatcatcagtgaaaagggagtgcaaggaggaggtccctccctcaatttcctccaatgattacctcatctcttctgacctcacttttgatagctcaccaaggcatcatgtcactctatcatcaacacttgactctgagtacaagagtgtggacatttcggatgtcttgtatgattctgcccagcttgattttgtctttgaacccttccttgaaattagatgagcatgtcctcgttctcgtttgtgatttttttttttaaatttaacctttacttcagcgaaggcagtgc

SEQ ID NO: 7869 - DNA, 2012 bp, Glycine max
  unsure (1)..(2012): unsure at all n locations
aactcctatgtggtcctttcattttacaggagtttggtggaacaagttcctcggatggacgaagcctatanggtnntttcttatttgatgatagtgaccgatattnnngatgatagttaccgaaatagtgagcgatatcgaccccgtcgaccttgatatggagcgtnnngagcttctatactatgtatgaataccgctatactanntggatatgatgcgcacgaaatagaaccgacttttatatcacctttcaattcgaattagcaaaagcaatgtctccttgcataatatggattccaaacatccatgatctggatgtgaatgagtcgaattacttatccctcggtcttttagtgaactatctctccagggattgtgaaagatgttctactagaaatattcttgttattgcttcgactcatattccccaaaaagtagatccggctctaatagctccgaataaattaaatacatgcattaagatacgaaggcttcttatttcacaacaacgaaaacactttttcactctttcatatactaggggatttcacttggaaaagaaaatgtcccatactaatggattcgggtccacaacgatgggttcaaatgtacgagatcttgtagcacttaccaacgaggccctatcgattagtattatacaaaaaaaatccatcatagacactaatataattagatctgttcttcatagacaaacttgggatttccgatctcaggtaagatcggttcaggatcatgggatccttttctatcagataggaagggctgtttcacaaaatgtacttctaagtaattgctccatagatcctatatctatctatatgaagaagaaatcatgtgacgggggggattcttatttgtacaaatggtacttcgaacttggaacgagtatgaagaaattaacgatacttctttaccttttgagttgttctgccggatcggtcgctcaagacctttggtctctacccggacctgatgaaaaaaatgggatcacatcttatggactcgttgagaataattctgatctagttcatggcctattagaagtagaaggcgctctggtgggatcctcacgtacagaaaaagattgcagtcagtttgataaggatcgagtgacattgcttcttcggtccgaaccaaggaatcccttaaatatgattcaaaatggatcttattctatcgttgatcagagatttctctatgaaaaatatgaatcggagtttgaagaaggggggggagtcctcgacccacaacagatagaggaggatttttttcaatcacatcgtttgggctcctagaatatggagcccttggggctttctattttattgtattgaaaggcccaatgaattgggatttccctattgggccaggtcatttcgggacaagcggatcatttatgatgaagaggatgagcttcaagagaatgattcagagttcttgcagggtggaaccatgcagtaccagacacgagatagatcttccaaagaacagggcttttttcgaataagccaattcatttgggaccccgcggatccactctttttcctattcaaagatcagccttttgtctctgtgttttcacatcgacaattctttacagatgaagagatgtcaagggaacttcttacttcccaaacagatcttcctacatctatatataaacactggtttatcaagaatacgcaagaaaagcattttgaattgttgattcattgccagagatggcttagaatcaatagttcattatctaatggatttttccgttctaatactctatctgagagttatcaatatttatcaaatctgttcctatctaacgaagcgctattggatcaaatgacaaagacattgttgagaaaaagatggcttttcccagatgagatggttgttgctatctgctccaataacgaatcattggtttaactgaataaaaaaaaaaaaaaaaaaaaaaaaaaagcggccgcactagaggatccaagcatacgtacgcg

SEQ ID NO: 7870 - DNA, 680 bp, Glycine max
  unsure (1)..(680): unsure at all n locations
cccgtccgcccacgtccgtccgtaccggggctgcgaggaagactgtacagaagggggtggannaccatgcccagtaccaggagcgagcgagtatatanntcttctcaaaggaacccagggcgtcttttnnntcgaatanagcnnctaattcaatttggggacgcctcgcnnggatccagctcattttgtcctatatcaaagggatcagcctatctgtactctgtgtttgtcacaactcgacaattcgtttaccagatgaagtagatgtcaaggggaaccttcttcacttcccaaacccagatcttcctacatgctatanntataaacactggtttatcgaagaataccgcaagaaaaagcattttgaattgtntgattcattgccaagagatgggcttagaatcaatagttcattatctaatggatttttccgttctaatactctatctgagagttatcaatatttatcaaatctgttcctatctaacgaagcgctattggatcaaatgacaaagacattgttgagaaaaagatggcttttcccagatgagatggttgttgctatctgctccaataacgaatcattggtttaactgaataactaaataataaatataaggggggccgccaataagtgacctcttcaccccgggatttattccgggccgggaccttgaggg

SEQ ID NO: 7871 - DNA, 409 bp, Glycine max
tccatgcgtccgcccacgcgtccgcgcagcttccgtgcgactccgatggcgtctgcatgctctgcaaactcaaacccagtccctcccaaaccctctcctgtggaacgtgtgccactccctggcaccttccgtgtctcccttcgccccctctctccctctctgactcccattgggactgccccgactgttctgacaccttctgccatcaccccgtcgctcccaccgctcaccttgtctccgccattcacgccattcaggccgacacctctctcactgaccaacagaaggccataaaacgccaacaactcctcgctggctctgcccacccctcaaaggacaaaaccaaagccaaagacatttttgatggaagcttaaactgctccatatgcatgcaactacccgatagacc

SEQ ID NO: 7872 - DNA, 1009 bp, Glycine max
gggtcgaccgacgcgtcgggaatagacgacagaaggggacttcacaactcaaactgcttcattgcataattgcagataagatcaacccttctaccttcagattcgcgggaagatggcatcacttcatgctaatgtgacatcagttgtttacaacagtggcaaccgtgtttctcaatcgaaatttgcaagctcttccttcttgtctgggttcgatgttgttggtcgtgcttcaagtgcttggaagaaggaacttgtcccatcttccatttccttggtgcctagagccaccctaacatttgatcccccaactaccaattcagacataaccaagcaaaagaagcacactcttgaccctgcttctccagattttcttcctcttccttcatttgaacagtgctttccaaagagcaccaaagaacacagggaagtcactcatgaagaaactggtcatgtgctcaaagttccctttcgtcgagttcacctgtctggggaagcaggacactttgatacctatgacactagcggtccccaaaatgtaaacccaaggacaggactcccaaaattgcgcggagggtgggttgataggagggagaaactgggttatccaagattcactcagatgtactacgctaagcaaggaatcatcacggaagagatgctttactgtgccactcgtgagaaccttgacccagagtttgtgaggtcagaagttgctcgtggacgtgctatcatcccttccaacaagaaacacttggagttagagcccatgatagttggaagaaactttttggtaaaagtaaatgccaacattgggaattctgccagttgctagctctatagaagaggaagtttacaaggttcaatgggcaactatgtggggagcagatactgccgtgggcctctcgactggtcgccacatccatgaaactcgagagtggatcctacgcaactctgctgtaccagttgggactgtgcctatttatcaagcacttgaaaaagttaatgggat

SEQ ID NO: 7873 - DNA, 402 bp, Glycine max
gacttcacaactcaaactgcttcattgcataattgcagataagatcaacccttctaccttcagaatcatgggtgtgaaactgcattatatacatccttgccccacagatacatgacctatatgataaagaagtagaaggaagacttgaattttctacgaaagtgatctcagattcgcgggaagatggcatcacgtcatgctaatgtgacatcagttgtttacaacagtggcaaccgtgtttctcaatcgaaatttgcaagctcttccttcgtgtctgggttcgatgttgttggtcgtgcttcaagtgcttggaagaaagaacttgtcccatcttccatttccttggtgcctagagccaccctaacatttgatcccccaactaccaattcagacattaccaag

SEQ ID NO: 7874 - DNA, 395 bp, Glycine max
cccacgcgtccgagaattggagagcgagacctcacaactcgtcctgcgtcatcgcataattgcacaatatgatcaacccttctaccttcagatcggatgataaaacctttacaatctgatagcggcggatgtttgttggtgttagaatcatgggtgtgaaactgcattatatacatccttgccccacaactacatgacctatatgatagacaagtagagggaacacgtgagttttctacgagagtgatctcagattcgcgggaagatggcatcacttcatgctaatgtgacatcagttgtttacaacagtggcaaccgtgtttctcaatcgaaatttgcaggctcttccttcgtgtcggggttcgatgttgttggtcgtgcttcaagtgcttgga

SEQ ID NO: 7875 - DNA, 667 bp, Glycine max
atggtatcaaaagcacaagggctatagctcagttaggtagagcacctcgtttacacgagcgccaatgtttttttcagaggagtttcatcttgtaatcaaaagagtttatcttatagtaagaaatcgatgtcttactccattttaaggaacaaaacaagagaacaatagcctgacaaagggtttagccataaaatcgaatccatcattgatttgagatattgataaggtgaatactcatttctcgtcaatgctaggcataatgcgggtatagggacctaaaaaagattatcttttcttcctatcttatgaactttaaggtgtatgaagtgtcatttcctatcttagattttaattttagtaggtagataaagagtccatttaacttaagttgatctaggccagaagcagacctacgtcaagataatccttctttgaaacactttggtagtgctcttagattgtaatccaaataaaaaaatcagagcatagggaatcatctctttattcttgctgtcaatgaaaaaagatggcggactaactaatatttctatcagttaatgaaaaagctcaatgcaaaaaaaatgcacgttgggtttttaaaacaattcaaatcatttagataataatcagtttgatttgttttaccgagaaagtctacggttcgagt

SEQ ID NO: 7876 - DNA, 526 bp, Glycine max
gcagcagcatttgaactcctctatctctctttctgttcttctcaaagacgcactcaacgttctaaaaccaaatcggtttgagtcctcattacccgcctctctctggaaaccagcaaaaccacctttctctactatctatctgttccttttgtactctgagtgggtagaagacatggtgaggctcactgctgacttgatctggaaaagccctcatttcttcaacacgattaaagagcgtgagttagatctcagaggcaacaagatagctgtaattgaaaacttgggtgctactgaggaccaatttgacacaatagacttatctgacaatgagattgttaaacttgaaaatgtaccatatcttaaccggttgggcacaatgctcattaacaacaacaggattactagaattaatcccaacatcggagagttcttgccaaatttacacactctagttctcacaaacacagaattgtaaacttggttgaaattgatcctttagcatctcttccaaagctgcacttcctta

SEQ ID NO: 7877 - DNA, 534 bp, Glycine max
tgggacacagaccaatattcattcatttagattcatcaaaagcttataacaacaattaaacatgagtgcagccagcagagcttggattgtggcatcaagcattggagcagtggaggcattgaaggatcaattgggggtgtgcaggtggaaccatgcattgaggtcactgcagcagcatgccaagagcaacattagatcctacactcaggccaaaaccttgtcttctgctacttctgctgctgtctccaataaggtcaagaggaccaaggaggagtccatgaggaaagtcatggacttgagctgttggggtcccaatacttcaaggttttagtgtgtggactattctaattgcattcatcattgtgctgcaaggtttatgaagattcaatactacctttgtagcctttttgtcatggcatgcatccctttggcctttaccttatgtatctatttgattcataatacaaagttttgtctatgaaaatggtaaatatttgatccaatgaaaagaaaactgaggtctgtttttctcct

SEQ ID NO: 7878 - DNA, 560 bp, Glycine max
ggaagagaagagagtatccaacatagatggaaacactacaacaaaaaacgttaacacttaaaacacaaacttgtttaggggccacccctctctggggcgccattctcttttttcctttcaaaaagcaaagctaccatctttcttaccatattctctctctctctctctctctctttctcattgctaccctgttggtggataacaaaacttcagcaacccctttgcatctgatctaagaatcccaacttcaagtacccattttttgtcatttcatgatctaggtgatagatcgtgaaaatgacaaggatgacccgtgattttggggatactatgcagaaagatgcagtgccggcggtgtcggccgatgtaatatttgcttctcttcggtttcctaattacaaaatcggagttaacaatcagatcatggagacaaaggatagtccaaaagtgctatctatgaaggaggttgttgcgcgagagactgcacagctgttggaccagcagaaacgtctgtcggttcgcgatcttgccagtaaatttgagaagggtttggcagctgc

SEQ ID NO: 7879 - DNA, 292 bp, Glycine max
aggggccacaccctctctctctctcgggcgccattctcttttttcctttcaaaaagcaaagctaccatctttctttccatattctctctctcactgttaccccgttggtggatagcaaaacttcagcaacccttttgcatctgatctaagaatcccaacctcaaatacccattttttgtcatttcatgatctaggttatagttcgtgaaaatgacgaggatgacccgtgatttttgggatactatgcaaaatgatgcagtgccggcggtgtcggctgatataatatttgctt

SEQ ID NO: 7880 - DNA, 502 bp, Glycine max
gatgcatcccaacggctagcccatgcaatttgaatcggggagacagaaagaatagggcaaattttcgattttgattttccaaccaaaaaatccagggtttaccctcacaccccactccctccaaagcgtttgcaattcatcgttctcttaaaaaagttttcaattgaaacactgattttgaattcgaggtttgagttagttctcagaaagaattgcagcaatggatctccctcgagacgttgacgactacatcaaacaaaccctcgacgatacattaggtattcccgtatcgtcgaaaaccctagaatccaaacttcgagcttcccaagactcgcaatggcgcctccgcgaacgcctcctttcccttctcccccaattgaagcggaaagaccaactcatcgaccgcctcaagtctgaagcgggaatgaaccgcgcgagctctgaagaagttcgttgaggagaatcagagactggcgacggagtgtgagagattgttggctcg

SEQ ID NO: 7881 - DNA, 1898 bp, Glycine max
cgagaagaaaaaaagtagtttctgagttgacattaaagatatcgttgaggtaaaggaccaacaccaaccaaaaccaaattataatagaacgcggaagaagaagaagaagtaaccgacgcttgaataaaccgaaccgttcttcgattcgggttcaagttcgaagaagaaaagcgatgagttcgggtagtagcagcagccacagcagtgagaaggagaaggagaagcagagagtgagtcgcacgtcgctgatactctggcacgcgcaccaaaacgacgccgcagctgtgcggaagctcctccaggaggatccctcgctcgtcaaggccagggactacgacaaccgaacgccgctccatgtggcgtccctccacggctggatcgacgtcgccacgtgcctcatcgagttcggcgccgacgtcaacgcgcaagatcgctggaaaaacacccctctggcggatgcggaaggagctaagaagagtaatgtgatcgagctcttgcaatcgcatggaggattgtcttttgggcaaaatggaagccatttcgagccgaagccggtagcgccgccgttgccgaacaagtgtgattgggaagtcgagcctaccgagctcgacttctccaactcggtgcgaatcggaaagggttcttttggtgagattttaaaagcccattggcgtggaacaccagttgctgttaaacgtattcttccatctctttcagaagatagattggtgattcaggacttcaggcatgaggtcaatttgttagtgaagcttcgacaccccaatatagttcagtttcttggagctgttactgccaggaagccccttatgctaattactgagtatctaagagggggtgatcttcatcagtacctcaaagaaaaaggtgcacttagtcctgcaacagctatcaacttttccatggatattgtcagaggaatggcctatcttcacaatgaaccaaatgttataattcatcgagacctaaagccaaggaatgttcttttagtcaattctagtgccgaccatttaaaagttggagattttggattgagtaagcttatcacggtccagagttctcatgatgtatacaaaatgactggtgaaactgggagctaccgctacatggctcctgaagttttcaaacatcggagatatgataagaaggttgatgtgtactcctttgcaatgattttgtacgagatgcttgaaggtgaaccaccttttgcaagtcgtgaaccttatgaaggagcaaaatacgctgctgagggacacaggcctcattttaggggaaagggttatatccctgaactgcgagagttaactgagcagtgttgggatgctgacatgaagcaaagaccttcattcatagagatcattaaacaccttgaaaagatcaaggaaaatttgccttcagatcatcactggcacttgttcacttcatgatttttaggagcattggtgccgtgaaattcagatgattatctgctattaccattccagcgggttgccttatctactgtcgcgggtttttgaacagagccgacttggaaaacctagctaaggtcatgagcattgctttgaactgttagattcaaatgagcataacaggtttatgctgattgcctttatctggtgtttacattcaattactgttttttgtctcattaaaattcttggcgaattctattcagctatttaagtgagcagatactagttgttgcttgagtgtaatatgtagggtacaaaacccattgaggaaaaatataacacatcatgcaatctagtgtttaatattttatcttatgattaaaaattaatagcggttttcatttcttggatattgtttgaccaattcttctgttcaatgctaccaactactatgagattctctttctc

SEQ ID NO: 7882 - DNA, 623 bp, Glycine max
cttttagtcattctgtgccgccattaaaagttggagattttggattgagtaagcttatcacggtccagagttctcatgatgtatacaaaatgactggtgaaactgggagctaccgctacatggctcctgaagttttcaaacatcggagatatgataagaaggttgatgtgtactcctttgcaatgattttgtacgagatgcttgaaggtgaaccaccttttgcaagtcgtgaaccttatgaaggagcaaaatacgctgctgagggacacaggcctcattttcgggcaaagggttatactcctgaattgcaagagttaacggagcagtgttgggctcatgacatgagtcagagaccatccttcatagagatcctaaaacggcttgaaaagatcaaggagaatttacctacagagaatcactggcacttgtttacctcataaatgtctaatagcattaatttgttcagaaattcagatgatttatttaacattaccattctctggtttggtgccggatttatggataggttgagcatactggaaaacctgcaaagtcaatacttgttttcaactgtttggattaatgagcagaaaaaggtgatgttgattgccctgcctttggtt

SEQ ID NO: 7883 - DNA, 501 bp, Glycine max
cgggatattgaaaaggcgcccaagcaagctcgttctttcgtcgtcgtcacaagtcacaactcgcaaaccacaatgcctaagcagatccacgagattaaggattttcttctgacggcgcggaggaaggatgcgaggtcggtgaaaatcaagaggagcagggatgtcgttaagtttaaggttcgatgctccaagtacttgtacacgctttgtgtctttgaccctgagaaagccgataagttgaagcaatctcttcctcccggtttgagtgttcaagacctgtagagctgttgagtgtggcagcatgcgtttgtttctctttttgttacctgatgctctagattttgtggcttggttttatatgttggtgatttttacgaggacatttttgttttaaattggtacgaaatgtgaaagtttgatattgagcacaatttgaaatgaaattgcccaaaagtggtttattttaatttataaaatataatttttttttttattataaaa

SEQ ID NO: 7884 - DNA, 411 bp, Glycine max
  unsure (1)..(411): unsure at all n locations
ggttctttcgccgccgtcgctcacaactcgcaaaccacaatgcctaagcagatccacgagattaaggatttccttctgacggcacggaggaaggatgcgaggtcggtgaaaatcaagaggagcagggatgtcgttaagtttaaggttcgatgctccaagtatttgtacacgctttgtgtctttgatcctgagaaagccgataaattgaagcaatctcttccccccggtttgagtgttcaagacctgtagaggtgctgagtgcgggcagcgtgcgtttgtttatctttttgttgcctcatgcctctagattttggggcttgcttttataattttgggaattggtatgaggatatggcttgttttttatttgctatgaaaagggcgacagtttatttgagcacccacntttaa

SEQ ID NO: 7885 - DNA, 406 bp, Glycine max
caaagtgaaactaaggctaaaatcaattcataaatcaaacttttgtcatcacctaaaaagccatttttaaggtccaacaccttgaaatggtcttttccgcttttattggttaagtgtatatttctaaaaagcctaaaatcaatatgtaactttgttacctctttcaaaaataaagaaatcattaatggtccaatgccttaatgttttctcacttttcaaaagaatcgaaagattgtctaatggtccaacgccttaaatgacctttcattcaataaaaatatatcttgcaaaaaaaggataaaaataatttaaccaacgttcagttctcaaagaactacgtaggtctgatttccttatcacaattgaggaatgcataggagcaagggaaacacccttgtcgaccccc

SEQ ID NO: 7886 - DNA, 208 bp, Glycine max
gatgtttttttattaagaggttcttattttggtcaatctgtataggtaagtggaggcagcagagaagtattaatggtagggtaagtaatagtgttacttaatgtgacagttacaactaagtgaacagagtttaatttaagctgaagcgatcttgcttgccaaattgaacttctagtataattttaagaatttagtatgttacttaaaa

SEQ ID NO: 7887 - DNA, 491 bp, Glycine max
aataaagaagatttgtgttggttcaatatggcagcagactcaacccctttccacaacctttcatatgctaacaaagcaggaatcagatttgctccaggttgccaaattaaatgataagcagcctttgaatgaagtagggaacacttggagaaaaggactaggagcagagaatgaagacataggaggttgtgaattgtcattgtcaatcacattgccacaaccccatccttcctcacagaaaagtaatacttcttcagtcagtgagaccagtgaggcattttcattgtgccctgagtttagcaacaacgttatcatgggctgttctagttcttccaatgtcccaaaaacaattaatttggacctttctttggccatttgaatgttagtattaaggactaatttactcgatctaattactctattcattttagaggaatcaaatcagatattaacatgtcaagaaatgtgctatctattggaagggcagtgtc

SEQ ID NO: 7888 - DNA, 1678 bp, Glycine max
cttcagtcaatgtctctgtatccatatttcaggttggtaaaaacgctgcaataatattctattttcaaagggaaacccaaaaactgaagcgcgaggaagctaaaagtagcaacgagggatgagagaacaagaggattggaggattacgacagcgctgttaacgttgttgttggtgtttgtttcttcttttccggcgttgagctacggagttgttcctcctcgtactctgctcaataagctgtctcagggcagttatctcaccactcaggagcaatggttcaatcaaaccctcgatcacttctctccctatgatcaccatcaattccgtcaacgttacttcgagtttctagactatttccggattcctgatggaccaattttcttggtaatcggtggtgaaggtccatgtaatgggataacaaatgactatattggtgtactggcaaagaagtttggagcagctatggttactcttgaacatcgctactatggaaagagttccccatttaattctttggagacagaaaatttgaaatatctttcatccaagcaggcactctttgatttggctgtttttcgtcagtattatcaggattccttaaatgcaaagcttaatagaacaaaaactgaaaacccctggttcgtttttggtggctcatatgctggagcactcagtgcatggttccgtctcaagtttccccatttaacatgtggaagtctggcaagttctgcagttgttcttgctgtttataacttcacagaatatgatcaacagattggtgagtcagcaggtgctgaatgtaaagcagtattacaagaaactactcaactcattgagcacaaacttgcaaccaatggaaaggaactaaaggcatcttttaatgcagatgatctcgaaaaagatggagactttatgtatttaattgctgatgctgctgctgtagcatttcaatatggtaatcctgataaagtatgcaagcctatggttgaagcaaagaatgctggagaggacttggtggatgcttatgccaaatacgtcaaagagtactacattggaacctttggtgttaatgtgcagacttatgaccaggagtacttgaagaaaactgctatcaatgaagacagttctactcgattatggtggtttcaagtttgcactgaagttgcattctttcaggtggctccatcaaatgatagtatacgctcctcagaaattgatgcaaaataccatatggacctttgcaaaaatatctttggagagggcatctttcctgatgttgatgcaactaatttatactacggaggcacaaaaattgctggttcgaaaatagtatttgcaaatggctcacaggatccttggcgtcatgcgtccaagcaaacttcatctcctgatctgccttccgacaccatcacatgtagcaattgtgcccattgtactgattttcgaggatgtcctcaatctcctttggtccttgaaggtaatgagaagatctgctcctcacctgatgcagttctcaaagtaaggcatcagattgcagaacatatggacttgtggctatctgagtgcccagaaggcagcagttatatatgatcactagtatgttaacccacgcactgaaatgaataaagtaataaattagtatacactcctttcatccttcatgatcattatatattt

SEQ ID NO: 7889 - DNA, 484 bp, Glycine max
aatatatttaaatattccaggttcgtccttgactctacaacattccattttcataggaaaagccaaaactgaagctcgaggaagataactacgatgaaacaagaggaatggatgattacgacagcgttgctatcgttgctgtttgtttcatcttttccgccgttgagttacggagttgttcctcctcgtactctgctcaataagctgtcggagggcaaatatctcaacactcaggagctctggttcgaccaaaccctcgatcacttctctccctatgatcaccgacaattccggcaacgttactatgagtttctagactatttccggattcccgatggaccaatttttttggtaataggtggtgaaggtatattgaatggggtagcaaatgactatcttgctgtactggcaaagaagtctcgagcagctatggttactcttgaacatcgctactacggaaagagtactccatttaattctttgg

SEQ ID NO: 7890 - DNA, 696 bp, Glycine max
cccacgcgtccgcccacgcgtccgcattggtaattttgtttgactctggcaccttccaattcttctaatcttctgcgtttctctctcctttattcttcaatccacagcaaagttagagacgagagagagagagagaaagggaaagaaacctaatacaataccctttttctcagaaatcacactctcacacccacttcccccaattcccattctctctgaattacgagggttttcgaaatcgaagagtctctgatcgatttcgattcggaaaaatggcgtcttcgagcgcaaccggtgctggatccaccgatcccacagctgccagaagaaacaccaagcgacccaagtattcaaagtttactcagcaagaacttccagcgtgtaagccaattctcacgccacgagcggttatttcggcattcttgcttgtcagcattgtattcgttcctattggagttgcttcactaattgcttcaaggaaggttgttgaaattgtttctaggtatgaatcaacatgcataccagatggtgttactgacaaggtagcatacattcagagtcctgcagataaaacatgccacatatcactacctgtgcacaagcatatgaagtcgcctatttatgtctactatcaacttgacaacttctaccaaaatcatcgccgatatgttaaaagccgaagtgatgagcaattgc

SEQ ID NO: 7891 - DNA, 338 bp, Glycine max
ggtgcgtaattgcatttggtagttttgtttgactctctttgttgttggcaccttccaattcttctaatcttctgcgtttatctctcttttcttcttcatttccgcagcatagagagagatagaaagcgaaagaaacctaacacaatggcgtcttcgatcgcagctggtgctggatccaccgatcccacagctgccagaagaaacactaagcgacccaagtattcaaagtttactcagcaagaacttccagcgtgtaagccaattctcacgccacgagcggttatttcggcattcttgcttgtcagcattgtattcgttcctattggagttgcttcact

SEQ ID NO: 7892 - DNA, 513 bp, Glycine max
  unsure (1)..(513): unsure at all n locations
gaacactgatataaagtgaaaatcattgtctcatcacagtagtactcacactatacggtggcggaaccagagaaaaccaaccagaccgattactcttgaggaaacaaaaatctaagatgagccgccatccttctgtcaaatgggctcagacgtctgatgtactctacttaacagttgagctgcctgatgctcaggatgttaagctcaaactggagccagaaggaaaattttacttctctgcaactgctggtgcagagaaaattccttatgaggttgacattgatctgtttgacaagattgatgtaaataatagcaaagctagtgttggttcaagaaacatctgctacttggtgaaaaaggctgagaacaagtggtgggacagattgttgaagcagggagggaaatctcctgtctttctgaaagttgattgggataaatgggtggatgaagatgaggagcaagataataaacctgcagcatctgatatggactttggtgacatnngattttcta

SEQ ID NO: 7893 - DNA, 903 bp, Glycine max
gcgaaaaaataacgaccacgcatacggaaacaaagggacagcacatgataaagcattacaagaaatgtgccacttgtatgacattgttcgcattgacaatgaagaaaaaaataaggaagtgcaacaggagtaagtatttccatcagaatgttaatggcagcaaacatcttggtctgtggaaactggcagaagcatggcagcaacaataaatagaaatgtcattggaggatcaacgacttttgtctagttacctccctttactgagagagtttattcctaatgcggctgcagaggttgaaactgatttgattgctcagttggttggtcattccaaagaagaaaattatgtgtacgacctctacaccgtgaaagatgagatggatataaacattgatgattcttcgtgttcatatccactagttcaagttgatgaggaggaggactattatgatgggacacagcattcagattatgaatctgatgactcaaatgatgaggtttctgaagaggatgaagaggatgaaaattctgagaatgaatcagaacgtgaggatggcaacacgagcagtgaatcatcagatgagaatatagaacatggtttttctgaagatgatgctgatccattatatgatgaggattttgatgaatatgaaggtgctcatagtgatgatgttgagcatatggatgatgaaaattgggggtggtcggaccgatgaagttggctttagttttacttttgcaaaatgtaaatctgatggggtaaaaatgttgtaggaacaaaatcaaacctaccatgccggagccatccaactagacaggcttttttggtattataagggatgctttaaggcatttcccatggacgtattagttttatgttgaaatttgagctaggatgctagc

SEQ ID NO: 7894 - DNA, 883 bp, Glycine max
gaaaagtttgaggagagagagagagagagagatggaggagaagacggagaaggtgaagtctgaggcagttcagataattgaagcgtttgaggttctgccaaagctcgtggttttcgatctcgattacactctctggcctttctactgtgagtgtcgatcgaagcgcgagattccttctctgtatccccacgccaaaggcatattgttagctctcaaagagaaaggcatcgacattgccatcgcttctcgctcgccaacggcagacatcgcaaccgctttcctcaacaaattgaacctcaccccaatgttcgtctcacaggaaatatattccagttggacacataaaaccgatcattttcagaggattcattcgaggaccggtgtccccttcaactccatgctctttttcgatgatgagaataggaacatccaagcggtgtctaaaatgggagtaactagcattttggttggagatggggtaaaccttgggtcgttaagggaaggccttacacaattctctcgaaactggaatgcctcgcagaagaacaagcacaaatggctttccaagtactccaacaagtcagatacttccaaccccactgcatgaaatttaacatcccattgaattttctctatctggattctattcagaaccacactattttgtatcagtcgtttcccttaatgaagcagactgggagaacttgaatagaaacctggtatttccaacagctatatacttgaatattcaattggaattttctatggatttgattcagaaactatttaatgaacttaaatagaagtcacagctttcgtcctgttccctatttgtgagtgttgttatccagcattaatgttattggatagtaaaattcaattt

SEQ ID NO: 7895 - DNA, 127 bp, Glycine max
ttctttcaattcaattgggtatatgagtttcagtttgtgtaaagcatttttaacaatgttcttaatgaattcggcctcgctcctagtatacaaatggtaagaacattaaaggaaagaatgtatctct

SEQ ID NO: 7896 - DNA, 532 bp, Glycine max
ccataacactttctctctctttgccggtgccacaatccctctctctctccgacgtacatttccatctttttagggtttcatttcatggactccgattcctggatttccacgcgcctctcttcctcttcacgccgccaccattatcgatctgatctgtacgcggaggagagtgaagggaacgatgatttcagggcggagtttctatgccctttctgcgccgaggattacgacgtcgtttccctctgttgccacattgacgaccaccaccctatccaagccaaaaacggggtgtgtcccatttgtgggaagaaggtgggagtggatctcgttggacattttactacacaacatgggaacttcttgagggtgcagcgcaaaaggagggtcaggaaaggaggctctgcttcaacaatttctatattgagaaaagagttacaagaaggagccttgcagtcccttcttggaggttcttcatacttagcttcctcaaattccgagcccgatcctctgttatcatcatttatgtttaacc

SEQ ID NO: 7897 - DNA, 1455 bp, Glycine max
  unsure (1)..(1455): unsure at all n locations
atattcatgaaactcgatagtggatcctactcagcgcttctntaccgtttgggactgtgcctaggtatcaagcacttgaaaaagttaatgggatcgctgaggatcttaactgggaggttttcagggacaccctgattgaacaagctgagcagggtgtatattacttcaccatccatgcaggagttcttctgagatatgttccattaacggcaaggcgcatgacaggaatagtatccaggggagggtctattcatgcaaagtggtgcttagcttaccacaaagagaattttgcttatgagcactgggatgagatacttgacatctgcaaccagtatgatgtggctctatccattggtgatgggctaagacctggatccatctatgatgcaaatgacacagcacaatttgctgagctcttgacacaaggagaactgacccgtagagcatgggaaaaggatgttcaggtgatgaatgaaggacctggacacatcccaatgcacaagattcctgaaaacatgcagaaacagttagaatggtgtagtgaagcgcctttttacactcttggtcctttaacaactgatattgcccccggctatgatcacatcacctctgcaattggtgctgccaatattggggcacttggtactgctcttctctgttatgtgactccaaaggaacatcttgggttgccaaaccgggatgacgtgaaggctggagttatagcctacaagatagcggctcatgctgctgatttagccaaaggtcatccatatgctcaagcctgggatgatgcattaagcaaggcaagatttgagttccgatggatggaccagtttgctttgtcattggatccgatgacagccatgtccttccatgacgaaaccctgccagcagatggtgcgaaagtggcccatttctgctcaatgtgtggccctaaattctgctctatgaagataacggaggatgtgaggaagtatgctgaggaacatggctatggaactgatgaagctttgcagcgtgggatggatgctatgagtgctgaatttcaagctgccaagaaaactatcagcggggagcaacatggtgaagctggtggagagatttacttgccagaagcttacgttagaaccaagaggactacttaatggagcaaatcagttggaagaacttgtagctagcttcccaactggcttatctgagtgtggagaagcattatcaagccttaggagtaggagaacgagtactgtttgtgatgaatgtctatggtttaagaaatctgtctttagtcaacttgtgtgttttgttattcagttctcagcaataaactgctctggcaatctagtttcatgtacaatactatctttatcttttgggctattttattaaccccataaatgggtttttttccccttccnnnnnnnnnnnnnnnnnnnnnnnnnnnnnnnnnnnnnnnnn

SEQ ID NO: 7898 - DNA, 440 bp, Glycine max
actgatgaagttttccagcgtgggatggacactatgagtgctatatttcaagcggccaaaaagcccatcagtgggtagcaacatggtgaagctggtggagagatttacttgccagaagcttacgttagaaccaagaggactacttaatggagcaaatcagttggaagaacttgtagctagcttcccaactggcttatctgagtgtggagaagcattatcaagccttaggagtaggagaacgagtactgtttgtgatgaatgtctatggtttaagaaatctgtctttagtcaacttgtgtgttttgttattcagttctcagcaataaactgctctggcaatctagtttcatgttcaaaaaaaaaaagaaaaaaaaaaaaaaaaaaagcggcggcccatatgaacgatgctaacttacgcgcgcatgcaagcgactaaatat

SEQ ID NO: 7899 - DNA, 358 bp, Glycine max
tttacagacgggagcatcatggtgaagcgtgtggagagatttacttgccagaagcttacgttagaaccaagaggactacttaatggagcaaatcagttggaagaacttgtagctagcttcccaactggcttatctgagtgtggagaagcattatcaagccttaggagtaggagaacgagtactgtttgtgatgaatgtctattggtttaagaaatctgtctttagtcaacttgtgtgttttgttattcagttctcagcaataaactgctctggcaatctagtttcatgttcaatgccatctttatcttttgggctaaaacaatatatatagcttaattatttcttattatttaatttt

SEQ ID NO: 7900 - DNA, 324 bp, Glycine max
cggcaaaccttacatttatcataccttgaacaatatacaaatcagaagattatttattattgcacttctttaaacttttattcttaattttctaaagaaacgcctttttataaataaaaaaatcaattattgaaatttctaaagtgttttaggtaatcttttttcaagggtaaaaaaataatcagatttatgctttttagtagcaaataggacctgctgttctggaaattcagtttttgtagaagaaagatatcaattttcttctttttactatccctcaattgttaaacaattttcatcaaataatcacttttattaggtcct

SEQ ID NO: 7901 - DNA, 338 bp, Glycine max
ggtaactcgcatcggattgccccattttgccacctctatctgtctgcaaccggtgacgttgttagagagagaaagaaaaaaaatggtgaaaggaagaagcgaaatggatggcgtagaagtacctgaagccatgatagatactctcaaccgtactttggagagccttcaacaactcgagacacagttaccccaatttctctctctctccgaccctgattttctcgctgaattaccactcgttgaacgcgctcactcactcttctccctcgccaaactcacctctaccctcttctcattgaagttgaggtgtagaggtgttaacccaaatggccaccctg

SEQ ID NO: 7902 - DNA, 584 bp, Glycine max
tgtgtgtttgtctattgattacattcatagttagaagtatcttttctacatacacatggcacctacacctcgcacacacattgagatattaggccctatgtccgggtctatgtgagccataaggagtggaggttgatctgtggtcatgctgggtcttcgactcgcttgatgatagtgaagcctcatctagagttttcttcttttggtgatgcattgtacttgatagtccctatccccacaatgtattacctaagaggatgatatctctagaagccagtaaagttacatgaaaccacccttgggaattattgcttgaagtggacttttggatcctttccattaggttcctgaattggggggcacatagcaaactcactctcgcatgttccttgattgcatcatacatctcttcatggcatcgtaatgggcatatcattcttgcatttatcacattcatgcattgcatttgcatgagtcattgcattatcatgcatcttcatttaacatgcttttgttatgcaaaatgcatacattttattttcattgttcgcatgttatgcatgatccttgaattttcctctccc

SEQ ID NO: 7903 - DNA, 1838 bp, Glycine max
tgtttttttttttttttttttttgattcaaactaataaagttcatttccagataaaccagtctcattggaaagcttacaaatcatagcacaacatattgactaacatcattgtgtaaggctgagtgttccacagccatattattgacatacaagggcaaaaaagacagctcctatgtactacgtataacgcatgataaaaggatatatcacgtaataatgacaataataacaactagcaagttgtgggataaatgctgttgatttctttgttagccaaagaagtgtctttggaacaatgtccatccggtaactgattcaatgctgcttcttcttccttcttctcttcattgtcacccttggaatccaaaaagctgggttgatttgttgaagataaaagcctagcccacattctatcagttatcactacgtggttttgtctctcggtgattctatagaagggtatataagtttgtcttccattgacaagtccacttgtatagccagtgtaacctgccattgctccatgaactgcactttgagcaagaagtgtgcagtacacgttgtcagaagcattgcttggaatagctcgaatcatataagttggatctatgtatttgagagttatgggcagggtcttctgtgcagcaaaatgatccctaatcttttgggatatccataggccaacatcttgaaaaagcttatttccagaagcatcctgtttgctcattgactgcacgctctcagaaacaagttcttgtcctgctccttcagctatgacgataaccatgtgcccattttctgtgagtcttttctctatatattcatagagtccaccaggaccttcaaggtaaaagggtgactctggaattaagcaacagtccacgtctcgacttgcaagtgtagcatacattgcaataaatccgctgtttctacccatcaacttgacaacacctatgccattttcaacactttcagcttcaacatgtgctgcatttatagctcgttgagcctcctcaacagcagtgtcaaagccaaaggacttatcaataaccgggatatcattatctatggttttggggatacctacaactgaaactttgagaccacgccttctgacttcctcaaaaattgcagatgcacccttctgagttccatctcctccaattatataaacctgattgattccccgatcttgaatactgtcaactatctttttggtgtcatgtccacctcgtgatgttccaaggacagttcccccacgcttatgtatatcattcacacttttaggggttaaagtaattgtattgcgagcatagaagcccctatatcctccattgattccaagaactctcttcaccccatacatatggtgtaagccacacactaattccctaatgacagtgttgagctggtgccgaattcggcacgagaaagatagaattgcttccaaagcaccatatcaaataaacaatcccaactctgcttcaaataagccggctgaatccatgacatggctaggattaggtgctcaatcaacacaattctgagtgcatttgcagttttgagtagttttagcctcttttttttttatatatatttgattttgtagttctttgtcgttttaacttctactctagactttgatagatattagtagtagttgaaggcttcaatttttatgattgcaaatatttcctgtaattagtatttcaaattcttgtattcattcttctcatttcttttgtttgttaccttccttcatttgttgctttcccaactctttttccgctaccaaagagaatcaatattaacctgaacaatcaaaacagtctccatc

SEQ ID NO: 7904 - DNA, 1054 bp, Glycine max
aatggtcaaccttattatatataccataaaccataaacccttcgccaccaccaaccattagcttcttccatcctcagagcttgccgtcaacaacgattcctttcggttttctgtttctctgtcttcattttagtttttacggctagaagaatgtccagctcatcggaatatttggtattttccggccaccacccggcgaactctccggcggaaaagtccactttctctcagacttgtagtctattgagccaatacatcaaggaaaagggtaccttcggagaccttaccctcgggatgacttgcactgccgaaacaaacggttcccctgagacatcgtgtcactctgcaacaaccatggagttgtttcccacgatcatcacgcaacggaacccaactactgtggatttcctatctccccagactgcttatcctcaccactcagaggttccaatcatggttaaatcaagtgcttttaagtctatggagaaggagcctaaagctgctcagttgacgatcttttatgctgggcaagttgttgtgtttgatgattttcctgctgaaaaattggaggagataacgtcattagccggcaagggaatatcccaaagccaaaacacctctgcttatgctcacactcataaccagcaagtgaatcatccttcctttgttcctaatatctcccctcaagcaccgtccagaccacttgtttgtgatctgccaattgctaggaaagcttcacttcatcggttcctttctaagagaaaagatagaattgctgccaaagcaccctatcaaataaacaatcccaactctgcttcaagtaagccggctgaatccatgtcatggcttggattaggtgctcaatcaacacaagtctgagtgcatttgcagttttgagtagttttagcctctcttttttctacatatatttgattttgtagctcttttgtcgttttaacttctactctactatgactttgatagatctaacattagtagtaggcgcaggcttcaattattatgattgaaaaaatttcctgtaattagtatttca

SEQ ID NO: 7905 - DNA, 822 bp, Glycine max
ttttaggggttaaagtgattgtattgcgagcatagaaacccctatatcctccattgattccaagaactgtcttcaccccatacatatggtgtaagccacacactaattccctaatgacagtgttgagcccaggacacagacccccacaagtaacaatagcagcctgaacttcatctgcttcaaagtacaccttttgacgaggcccggcacgcctaaaatgtacccctcttgcaccatctttgtgaacaacgaccttttgaggaacgctgtcatcaacatgcacaaaatactgcttaacaactgaataagcagggttgtcttgcaaaggattagggtatgttgggagattgggaatgtaatcagtgaaatgcggaacgtcttcgaggatgtaaccggctgtgccggtgacgaccttaggctcggaggtgtcggcaggtgaagccatggcaagacgtgatcgcgagctggtggcaggttgggaacccagcttgggatgaaagaaaccgttgattttggttgtggaagcgtggttgttgggacttggagaagaagaattagaatccattcaaaggtgagtattgaagttgaagaagaggaagaaaagagtggtcatatttatagtaaacggagttgaccgagggagaggacaccaaagaggaattttgatgaataagaaaagaggagaggggaaaggggtaaaaggaaatttcttgggttggggagttagaaacaggtggcagaagatggaaatggaatgaggtgtggttttagaacaaaaggtctacgctatgatccacagctttcttgagccgaatgccgaat

SEQ ID NO: 7906 - DNA, 519 bp, Glycine max
ttagcttcttgcatcctcagagcttgccgttttcatctattcctttcggacttctgattcggtggagtcattttcatttttacggctgccacaatgtccagctcatcggaatattcggcattttccggcccccgcccggccaactctccggccgacaagtccactttctctcagacttgtagtctattgagccaatacatcaaggaaaagggtgccttcggagaccttaccctcgggatgactcgcacccccgatacttacggttcccctgagacatcgtgtcactctgcaacaaccatggagttgtttcccaccatcatcacgcaacggaacccaactactgtggatttcctatctccccagactgcttatcctcaccactcagaggttccaatcatggttaaatcaaggtgtgttggtgtgcttaattagccgtgaagttagttaacatattttcatgtcattctttgtgtggaagaaaattaatgagttatgaggggaatggattctctgcatata

SEQ ID NO: 7907 - DNA, 457 bp, Glycine max
caaagccaatacttttgtattatgtttcatgttttttttctgatcataaatttaatttctgtacggaactgccaattgctaggaaagtttcacttcatcggttcctttctaagagaaaagataggtcagcctctcaaacaaggaaatattgcttggtgattctgtttgttatgaggctgcatctttgatttttttttcccttttcaaacataaacttttatccctctcttagattgatcatttgaaacaatctcagtatcaaccagtttgtgtagtgaatgtctggcctttttgcgtggtctgtttatgtctagtttttgtgtcatggaaaattgatgcatcatgctattttcttagtaaagaaggaatcaatctagtgcattgtgcaaatcagttttcctctttttgtcttgcaattacccgctgagtaatgttttttggcctaatggactaattc

SEQ ID NO: 7908 - DNA, 813 bp, Glycine max
tcgccacgcgtttcgccacggaaaaaaggaagaggaacgaagcaatcgcaagtcgtctgttctgtcccgcgggagcagacgacctgtcttcatcgccaaacaacctcaaaaacattcatcaacgttcactattaatccatccatcattaagtaagaaaataaggttcgatttttttatctttgttttgcttctgatccatcatggaggtgccgagttcctgggatgcccttcgcaaacaggcaagaaaacttgaagctcagttggatgagcagatgaattcttatcgtaaattggtttctaataatgtttctacaaaagctgacgctgcagagagtgatctagagtcttggattgagcgtttactaaaacaactccaacaagtaaacacacagatgcaagcttgggtatcatctggtggttcagaaatggtttctcatactttgactagacaccaagaaattcttcaagatctcacccaggagttttatcgtcttcgctcaagtcttaaagctaagcaagaacatgcttcactgctagaagattttaaagaatttgatcgaacaagattagatttggaacaagtagactctgaacagcatgcactcctaaaagaacgcacatctatcagccgaaatacaggacatatggacaatgtaatttcacaagcacaagcaacactaggagcacttgtcttccaacgttcgacatttggtggtatcaattcaaagctcggcaatgtgagcagtcgcctccaacggtaaatagcatactttcagcaataaagagaaaaaagtcaatggataccatcatac

SEQ ID NO: 7909 - DNA, 416 bp, Glycine max
ggaaaaaggaagaggaaggaaggaatcgcaagtcgtctgtcccgcaggtgcagacgacctgtcttcatagccaaacgacctcaaaaacattcaacaacgttcactattaattcatcataaaataaaaacaagtttcgattttttatctttgttttgtttctgatccattcatggaggtgccgagttcctgggatgctcttcgcaaacagggtttcttcattttgtcggtgatggggaattcatgggatcaaggatgggattctactacccttttgctatctgtgctttgaacatggtttgatttgttgagttgcaggttttcagtgttggaattcccccccgcggtgacgaggctttagtttgcttttggaattgttaatggattggattatgaatttttgcaatgctttagatga

SEQ ID NO: 7910 - DNA, 431 bp, Glycine max
gacgacagaagggggaaaaaaggaagaggaacgaagcaatcgcaagtcgtctgttctgtcccgcgggtgcagacgacctgtcttcatcgccaaacaacctcaaaaacattcatcaacgttcactattaatccatccatcattaagtaagaaaacaaggttcgatttttttatctttgtttatgcttctgatccattcatggaggtgccgagttcctgggatgcccttcgcaaacagggtccaattattctcctccttatcatgctttaatttgccagattctgcttctgattatgttgtaaatgattcaattaatctgggcatgcacaattcgagtgccaaattggtaaaacttcggttttttcttcttctagggtttcttcattttgtcggtgatggggaattcatgggatcaaggatgggattctacta

SEQ ID NO: 7911 - DNA, 617 bp, Glycine max
gatagtaatcattctacttcttctattcctccaataagcgaattctcagatttgtatgcatggagaaaacaacaacgcacattgtagtaattcccagtgcaggattcagccacttcgttcccattatccacttctcaaaacaactcgttgagcttcacccagaaattcacgtagcatgcatcattcccatactagggtctctcccaagtgccgcaaaacccattctccaaacccttccacaaaacataaacacgcttttccttccaccggtgaaccctaatgagctaccacaaggtgttcccgtagttctccaaattctgctcgcaatggctcactccatgccctccatccaccacaccctcaagtccataacttcaaagactccccacgtggccatggtggttgattcttttcgcctatgcatgccctagatttcgctcacgagttcaacatgttgtcctacgtttacttccctatatcagccaccacactctccatgcacttgaacttgcccttgttggacgaggaaacatcatgtgagtacagatatctgccggaggctatcaaattaccgggttgcgtgccgtttcacggccgcgatctctatgcccaagccc

SEQ ID NO: 7912 - DNA, 394 bp, Glycine max
ggctcttggctgatatttcctgataagtggacagacgcttaaacagagaaactaacacagatttgcatgcatggggaaaataacgcacattgtagtaattcccagtgcagggtacagccacttcgttcccgttatccacttctcaaagagacttgttgagcttcacccagaaattcacgtcacatgcatcattcccattctggggtctctcccaagtgctgcaaaacccattctccaaacccttccacaaaacatcaacacggttttccttccaccggtgaaccctaatgacctaccacaaggtgttcccgtagttgtccaaattcagctagcaatggctcactccatgccctccatccaccacaccctcaagtccataacttcaaagactccc

SEQ ID NO: 7913 - DNA, 582 bp, Glycine max
tcacggactcgatcccacgcagtaagtccgtatgcgatacaacgagacgacttgcaagggacatcacatttcgttgcgcctctgttctctgtcactgctgcgtctctcgtaatcatgcctaagcaaatccacgagattaaggatttccttctcactgcctagaaggaaggacgcgaggtcggtgaagatcaagaggagcagagatgtggttaagttcaaggtcagatgctcgaagtacctctacacactttgtgtgtttgacccagagaaagctgataaattgaagcaatctcttcctccaggtttgagtgttcaagacctgtaaaggtacagggcgagagaccaagaagaagcaattcattgattcttctgaacttcgtttctctgtagttgaaacttgagattcttttcagttggtcttttattatagatcattgctaggacatggttgttttcatctgttttggaaaatgatacttgaatttatgtctaatggattattctagtgctgtggaactatatacacgaatttattgtatgttttccttttaattggtgttttcagtcaggctacaagcctat

SEQ ID NO: 7914 - DNA, 507 bp, Glycine max
ttatgtccacatgtcttcgccccacgtttcatactagaaataaacaaatcaattatagtagtaatcaagttttaatgtctccatattttgccttcaagattttaaaaagattatgacagtagtacgttcttgttaacaaagtactactagtagtataaacatttaaagtatttttcaattaattaatcacatatgaaatggaataaaatgaatttagtgtaggattaagtcaaactatttattctagtcttaaaacagactactaataaccttatccagtcagtcataactcgtactaacaattaaagtacagtaaaagctagtcaaatttaaagagatcatttataatcctattctatgagctataacgattaatagccaaactatataagcagactattcctgtactccaaattttattttgtcataagcaattggagcgggttgacccacgcccaacatgtgggcaaaaatatatagtctagcccatttatgggtagtaagccc

SEQ ID NO: 7915 - DNA, 527 bp, Glycine max
gggtagagagggtctgtggaaaccgagaaacaaagcagggataggaagaaggaaaaatggaaaagtatttcggaaacgcttatcgtggcgacccgggagtgccccattcggacccggatcgcttcgtcaacatatgggtcggatccgctgccttcgctgttctcacatatttcaatccctacatgtggcagctctctaatcagttcaattggcatgacaaagcaatgctatatgagcaatatcactggaaacaggcaaggaagaagaatcagccatatgagttcatgtggaacaagacctgggacaagaaccaccgggaacattactactacaactggcctatttactttccttaggccacttctatttcatttcttgcatactttgtcctatctttattttggttgcaaacctggatcaattgatgccccctcccccctacccggatcacatgcttttctctgatcacttgaaaaacaaatacaaggattcaattgttgtgatgaaacgagtaactatgtgtttgt

SEQ ID NO: 7916 - DNA, 667 bp, Glycine max
tcgcccacgcgttcgttttccccttttgccttggcttttgacgccttataatagaggcaacgatgaagatagttttggttccgctgagagggccttcaatactgcgcatgacaatgcgatggggttgcttggggatgcgtttgcgaggcttcgtgccagctggcggcttctcgcggcttccaggaagtggaagcgggactgtgttgagcatttgccctttgtgcttgatgctggttgcttattgcataattttgttctcaagttcaatgaggcaatgccggatgaaggggtggaaaaggaagaggggcttccttcgtttgatggagtggaggatgagagtgctgttagggtgagagatgcacttgctttgcatttgagtaggttgagcttgagaaaatgaattaatgaatggttggaagaactagtggggggtttcattggtgaacttgtttgaaaaccatctatggccatcagttccattatgtagtagcattttgtcatatcctaggattttttttctgaaactgctagttaataagtaaggagcaagttatcaaaaaatttcctttgaatgacaaaggtgtatgcattagagttaggtagaaaaattcacatgattaaagtgtttgagtagaaagaaatctgcaatgaaactaaattccaatcg

SEQ ID NO: 7917 - DNA, 583 bp, Glycine max
gttcaaaatcaaaataacaataacagttcaaaatcaaaatcaaatctacgtctcatcgaataatttcagatctcgtcgatctgagctcaaaacaatggcgaaaccaaggtactctcgtcttccacctcgcaagtcatcgtcgtcttccacgctgattctgactctgttcctggtcttcaccttcctcgttctcattctcctggctctcggcatcctctccattcctagctcctcgcgtggaaatttgcccaaacctaacgatctcgcatccattgctcgcaacacaatcgagacttccgacagtgacgagtgaggggagagcagtgggttgaagtagtgtcgtgggagccgagagcctttgtctatcacaattttctgacgaaggaggaatgcgagtatctaattgacatagcaaagccaaatatgcataagtcatcagttgttgatagcgaaaccggaaagagtaaagacagcagagtacgtacaagctctggaacttttctggccagaggtcgggataagattgtcagggatattgagaaaagaattgctcactatagttttattcctgttgagcatggtg

SEQ ID NO: 7918 - DNA, 743 bp, Glycine max
  unsure (1)..(743): unsure at all n locations
tattttttacaactatctctttctttttgttttctctcatatgacatgattcatctccgaagggaggcacagtaatgatggtcacgtctcaccttccgagacccttttcttgaaggaaactctactccaccaaaaccttgccttttcttggtgaagaagaacaagaagaaaaataccaataataacaacaacaataataataaatatattattgttgttattgttattaaaaattatgacggaagtgcttcagttgccttcatcctcaagctgttcgcgtcggccatgtggtggtctcacacccaatgatgggtcgcacccaattccccttattaacgctcccactgtggaagaacaacaaagtgtggaaattgaagaagaagaagagaaagaaagggaaagggagagggatcagctttctattttgacccttttgattgctacgttcaggaaatctttgattgggtgcagcaccactacaacttcttcttcttcttcttcttcttcttccatggagattgggtggccttccaatgtgagacacgtggcacatgtcacctttgatcgcttccatggctttctcggtttgcctgttgagttcgaacccgaagttcccaggagacctcccagcgctagtgcaaatgtttttggagtttcaacagaatctatgcagctttcttttgatgccaganggaatagtgtacctacaaatactgctgtaatgcaaagacatttgtatgcac

SEQ ID NO: 7919 - DNA, 887 bp, Glycine max
gtaccggtcaggaattcccgggccgacacacgtccgatcaggtggcaaaaaaccacagaaagggatgccgaaaagtagtaccaagatggcttcagttgtgtatctcctctttggcttccatctcattgttatcatgtcaagttccttacccgcaactagtgaagtgtttgcaaaacagtatccatccacagaacccgtggaagaaaaactcacccaactccacttctatttccataacaacataacgggggaacacccaactgctatgaaaactgttttgcctcctaaggggtccattcatggttttggggctacttacatgatggatgaccctctaactgaaggaccaagtccaacttcaaagcttgtgggaagatctcagggaatatacgctttggcttcacaacatgagcctgggttgctcatggtgacaaattttctcttcactttgggcatttacaatggcagcaccctcagcattcttggcagaaaccctacatttataaaagttagagaaatgccaattgttgggggtactgggatcttcaaatatgcaaggggttctgctgtgcttacgacatatgtgtatgacatcaccggtggtgttgcaattgttgaatacaacgtgactgtcatgcatgtttgagaaataggttgaagctttatgtaggtttattttcggtgtttttaaggtccttaagaggatatccctcttgaaaagtgagtaggttttaaatttaagcagcagcagtcgtcgtgcatgttgtattaagtagaggctagaaggcagggagacgtacacagaactctcactgtgggaaaatattttatatccgttgggttaaacaaaaaataaataaaaatggatcaattaatttagtcccctg

SEQ ID NO: 7920 - DNA, 793 bp, Glycine max
gagggccattttgcaattaaaaagtcctctctacccagcgagaaccgcttgagagcagcagtgaggtagaaaggggatggtgagagtaagcaaagaggctctgcaaaaagcagccaaaaccctatccgacatcctcgtatgccctctctctaagcagcctttgaggtattgtcaggaatcaaattccctaatcagcgatgctattggcgttgccttccccataaaaaatgggataccatgcttggttccaagagatgggaagatacttgaggaagaagatgcctcaaaacctgataatgataccaatttatctgcagtaaatgaagagaatcgaggaagaagtgcgtaatatgtagtgtaagatgtttggacttcaatttttatgatcaactgtctgtgtaccttggtggtggtggaatgttgtgtgagtaagaagttaccctgtttacaactttggtgaagaaacctttctttttctttcttttccttcaatggaaaaattttccccttccctctcattgttttaatagttgatttgtatctatgagatttctctctctaactacatgatttagggtttattatcactcctgtgaaatttagtagtgatacacccaagagtcgcttgtcgaaagctttcttttcttccttcttagttccaactcttctggaggtaaagaaaaaaaaactataactcttgttcaataagaagtgttgaggatactaacctctattgaagagatataaggatttcctattggatatagagatgtataatattaattgctttccc

SEQ ID NO: 7921 - DNA, 1242 bp, Glycine max
ggtgttccaaaacggaacccccccggccctggtccaaacctggccgccgtcatcgacgagaaggaacaaatttgaatttgaagaaagatgggagagaggaaggtgttgaacaagtattacccaccggactttgatccgtcgaagcttcccagagcaagaaggccaaagaaccaccagatcaaggtccgcatgatgcttccgatgagcattcgatgcaacacttgcggcaattacatctacaaaggaaccaagttcaattccagaaaggaagatgttattggcgagacatatctgggaattcaaatattcaggttctactttaaatgcaccaagtgctcagccgaggttaccatgaagactgatccgcagaattcggattatattgttgaatctggtgcgaccagaaattttgaaccttggcgtgcagaagatgaagaagctgataaaatgaaggagaagagggaagctgaagagatgggagatgctatgaaatcgttggaaaatagaaccctggattctaagagggagatggacatccttgctgcattggatgagatgaagtcaatgaagtctaggcatgcaactgtcagtgttgatgaaatgctggaggctctgcagcgcacagcagctgacaaggagaaaaggctggaagaagaagacgaagctctgataaaatcagttgtctttcataattcagacggttttgtcagaagaattcgtgatgaagatattgagacagaggaggaattggttcagttttcaaatggacatggcgaaacatccagttctaatcctaagaggcaaaagatttcagaagattttccaagcaaaccaactgacactttgacaaaagccagtttggatgattatggcaaacaagaaaattcacgcagtggtggaaagcttaattctttagtgaggatttctgtcattaagaaaccagtggcctctgacgttaaaagtcctgccggccccggcccaaaggaaccagaggaaggttatgaaaccaatactgctagtggactattatctttgtgtcaaaattacggaagtgatgatgaggactagtagtcataaatattgaatgactttttgtttaactgttgctcattagattgtaattgtaagttgtacttgcaatggaatgtgtgtcatatgcatatttcttgtatgactagaatagaaatacacagttttcgagctcttacagaaatctgcagaaatgctggttatgttgtttcc

SEQ ID NO: 7922 - DNA, 350 bp, Glycine max
aaagttccgacttgacccaaactcaagttccgagttccctccgctatctgcgatcctagtcctacactctccgctcccgctcgaaccttggcgccgtcatcgacgcgaggacttctagaaggaagaaatttgaagaaagatgggagagaggaaggtgttgaacaagtattacccaccggactttgatccctccaagcttcccagagcaagaaggccaaagaaccagcagatcaaggtccgcatgatgcttccgatgagcattcgatgcaacacttgcggcaattacatctacaaaggaaccaagttcaattccagaaaggaagatgttattggcgagacatatctgggaa

SEQ ID NO: 7923 - DNA, 757 bp, Glycine max
ggctcttttccctttctttcattgtttgttttgtttgcactctcctctccccttaacagtaactcaacaatcaagaggatcagatccataggagaagttttatctgtccatcaccaaaaccgcgactactgatcagtcaatcccatcaatcaaatcaaatcatcagaaagaaaagaaaggaaagaaaagaagaaaaaaaaaagggaatcaacaaaaagaggaacaacagcaatatcaaacatgtcctcctcatccacttccttttcaccggaccaacaacacctctctccctccgaccagctctgctatgtccattgcaacttctgtgacactgtcctcgcggtgagtgttccttgcaccagcttgttcaagaatgtcactgtgagatgtggtcattgcaccaaccttctctcagtcaacatgcgtggactgcttcttccaagtgccaatcagcttcaccttggccacactttcttcactcctcaaaatcttatggaggagattcgtaatgcaccttcaacaaacataatgatgaatcagctgccgaaccctaatgatttggtcatgagcaccatgagagggggacctgaagaaacccctaagcctccatcagctaatagacctccagagaagagacagcgagttccatctgcttacaaccgcttcatcaaggatgagatccaacgtatcaaagctgggaatcctgatataagccacagagaggcctttagtgcagctgcaaagaattgggcccatt

SEQ ID NO: 7924 - DNA, 430 bp, Glycine max
gaaacttatttactttatctcttaattagtatcatgtttttacttcttcttcttcgtcttcttgttttaatttcgaacatttacgtgagtgttccttgcaccagcttgttcacgactgtcactgtgagatgtggtcattgcacctatcttctctcagtcaatatgcctggactgcttctccctagtgccaatcagcttcaccttggccacagcttcttcactcctcaaaatcttctggaggagattcgtaatgcaccttcaacaaacatgatgatgaatcaactgccgaaccctaatgatttggtcatgagcaccatgagagggggacctgaagaaacccctaagcctccatcagctaatagacctccagagaagagacagcgagttccatctgcttacaaccgcttcatcaaggatgagatccaacgta

SEQ ID NO: 7925 - DNA, 625 bp, Glycine max
cccacgcgtccggtggtgggtggctctgtcgttgaacctggttgttgttcccaaatccaaatccaaatcctggatcaaagctgaaacatttagcgtcctcaggaaatgctcgtgatctcggttttgcagtccctcacatcgctctgcagattctagatccgtcacagattgcaccaagcagaaagcaaatctgataagaagaagaagaagatgtatatggcatatgggtggcctcaggtcatccctctggagcaaggactgtgtccctctgcacagaagattgtgtacctcaaaatcatcaatcgcacgttgctcgttgtctcccccactcactttgaactctggagcacttcccaggtacatggatccgtgcaagatgttgatgttacccgttgtgtgattgagttctgtgtaaattttttgtctttgggagagaattgacatgggattttgtggaggtgagattttgcaatgtgggtgcttgaattaatgtgtgtacgtgtgtgtgttgtttttgggcatgaactgggttttcattgaggtatgcttgttgggaatttgtgagtgtattaaattgtgtgtaatgtttgcttttttggaaaaaaatgtgaactgggtttctgcc

SEQ ID NO: 7926 - DNA, 569 bp, Glycine max
aggtttaaaagttaaaaggttggggagaaggactcgacattgttgtagtgatgatctgtgaacatttccggtattcaccactctccttcttatctttttcttctcctccttcaactcgttaccatctctatataccttcttcttcttcttcttccttttctgtgtcttgctctctcatggagaatcaggagacccacaacaaccaaggccgcagcaaattcatggactttccgttcgtttcatctgcccagaagaatcttatggttgatctcgtctcaacgcttgagaatcgctttcacactcagcttcttccttgcacactcccctctgatgttcagtattatcaaagccaaactgccactgcccaagcttctcttcatattagagcagctcataatgactccccgatagattttgtgttgggaagctgggtgcattcagagctaccaacaggagggtccttagatataacaagtctttcagcctatcttaacagctcaactgatgcgccaaattttgcgtttgaaatgatccgcagtagtccaacaatgctacttctcattcttgat

SEQ ID NO: 7927 - DNA, 489 bp, Glycine max
gttccagagtgatgatggaagtgatgatctgtgagaatttccggtattcaccactctccatcttatcttcttctccttcacctcgttgccatctctctgttccatcttcttctttgaggattaaaccttcttcttcatcttcatcatcatcatctgtgtcttgttctctcatggagaatcaggagacccaacgcagcaaattcatggactttccgttcgtttcatctgcccagaagaacctcatggttgatctcgtttcaacacttgagaatcgctttcactctcagcttcttccttgcacactcccctctgatgttcagtattaccaaagccaaactgccactgcccaagcttcccttcatattagaccagctcataatgactcccagatagattttgtgttgggaagctgggtgcattcagagctaccaacaggagggtccttagatataacaagtctttcagcctatctcaacagctcaactgatg

SEQ ID NO: 7928 - DNA, 551 bp, Glycine max
  unsure (1)..(551): unsure at all n locations
aacagaactactatttagaagtgtttgtacatcttagtaggttgagtattcagcagtttatactcggaactttttcaaataaatgttttcatttacgttcttgaatgtagtatactttttacgttttgaagataacggagttttttttaagtgtttttgtgaagtaattttgttttgacattcattgtattaccacaatttgttgtttttgatttcaacagccgagccttttacttccacaagatcgggatttcatggccagaaccactattcatcatgattcgttccagacaacatactgaatgcttttttgtacataatttccgtcagatagctcgtaggaattggcacaatacaggaatctaatttacctcctacattccaagttgtacgatagagaatctcatgtcaagtctcattagtttggacaacaccatgtctggcagagatagcattccatgcagttgatacatgcctctgccatgaagttggaggtttataatnggatctcaccatacaatcacacacgtatttttaaagtgacatttata

SEQ ID NO: 7929 - DNA, 572 bp, Glycine max
cgaggagcaatggcttttgcgcttgctctgcaatcaattcatgatcttccagaaggacatgggcagactatctttactgcaactactgcaatagttgttttgacggtattgctgattggtggttcaacaggtagcatgctggaagctctagatgttgtaggtggagataatgatagccctttggcttcagttggtaccatcacaaatttcgatggaaacaatggttatattgctcctccttacaacgaagaatcatcttctgggaacaaaatcaagatgaagctaaaagaattccacaagactgctgcctcttttactgcattagataaaaactacctgaccccattctttacgagtcaaaatggagatgaagatgatgaagccgagccttttacttctacaagatcggaacttcatggtcagaaccactattcatcatgatacgttccagacaacaacatactgaatgcttttttgtacataatttccgtcagatagctcgtaggaattggcgcaatacaggaatcgaatttacctcctacattccaagttgtacgattgagaatatcatg

SEQ ID NO: 7930 - DNA, 537 bp, Glycine max
gccaaaaccttacacacatacatgagagggacacgaactcgcgaactcaaaccgtttaagcttctccgagttttgacctacaacactctcgaatcccctcttgtgtgttgtagccgccccgtgaccatcaatggcggaaactgctgtcgacaaatcccaatctctcgctgaggaatattatgtgaaggataagcaaacagctgtagttgaaaaagctgttgaggtcaaagaagttgaaaacccaaaggtagctgcttctgaggaaccagttgctgagaaaactgtggaagaaacaactcctgttgcccctgcagttgctcaggaaagcagtgaagtcacccctcctcctgctgaagaaagcactgaagagcaaagtagtggaaatgttgaggaaaactctggcaatgaagatgtagctgaagagacccctgaaattaagcttgaaactgctccagcagatttccgttttccaactacaaatcaaaccaggcattgctttacccgatacgttgaatatcatcgatgcgtagtgccaag

SEQ ID NO: 7931 - DNA, 403 bp, Glycine max
acacaatccaagttgaacctcttccggacctttgaccacgacaagaaactaaaacttccccctccgcctcacatcacaacacaagaaagttcccattattttccacgcactttcccccccctcatcccctcaaagcctccaaaagctgcaatctttcttcttcctctgtttttgttccctggctctccggtgaaccttccatgtttcccagccccttttgattgttttccactagaagcagtgttttctgctaatagttaggaggttctaatggctgtgctgatgatttttcacatgtgtgctgcaatagctctgcctgcttatggagatgctttcatcggtgtcaacattggtacagatgccaccaacatgccaagtccaacagaggttgttgcccttctta

SEQ ID NO: 7932 - DNA, 648 bp, Glycine max
ctcgagccgaatcggctcgagcggctcgaggatgaagcaagcaagcgatttgtgaaagcgttgaccagaaagtgtgaactacaaagtgtaggaatgagcatataccaccagatacctgcgttgattctggattcttgaagccattccttctattttctggtgacagcttcgtcttgtgctatactatataacaactcaccctctctccttacctcttcattcccaacacaaaacactctctcctccttcaacctagccctggtcactaccaaccaagtgtcccccctcctctcccttgttaacaggtagctgagttagtgagtgatggcgggaggacaactaggagtgcttaatgcactcgatgtggcaaagacacaatggtaccacttcacagctattgtgattgctggaatgggattcttcactgatgcctatgatcttttctgcatttcccttgtgaccaagttgttggggaggttatattacacagacataacgaacccgaagcctggtgttcttcctcctaatgtgcaagctgctgtgactggtgttgctctatgtggcactttagccggccaacttttctttggatggcttggtgacaagttgggaaggaaaagggtttatggcttaactcttatgcttatg

SEQ ID NO: 7933 - DNA, 1498 bp, Glycine max
cggacgcgtgggcttcacacccctcctctctctcttttgctcatttcctttgactcctcattatcaaagaaaatggctctcattgggttgctcttgatgggttttctcacaatgttctcctctgctcatgcctatggtggagggtggactaatgctcatgccaccttctatggagggagtgatgcatctgggacaatgggtggggcatgtgggtatgggaatctctacagccaagggtatggaacaaacactgctgctctaagcactgcactgttcaacaatggcttgagctgtggctcttgctatgagattaggtgtgccaatgaccacaggtggtgccttccaggttctattgtggtcactgccaccaatttctgtcctccaaacaatgccttgcccaacaacaatggtggctggtgtaaccctcctctccaacactttgacctagctcaacctgtcttcctacgcattgctcagtacagagctggaattgtgcctgtctcctacagaagggtggcttgtaggaggaagggagggatcaggttcacaatcaatggacactcctacttcaacctagtcctcatcacaaacgttggtggtgctggtgatgtgcattctgtttcaatcaagggttcaagaactggttggatgccaatgtcaagaaactggggtcagaactggcagagcaataactacctcgatggtcaaagcctctcctttaaggtcaccacaagtgatggcagaactattgtgtccaacaatgttgccccatctggctggtcctttggccaaacctacactggtgctcaattccgctagatcttgttgtccaaagttctaagtcacacattcaaatactactactatatagcataatagatatatggtattagtaggttctaagagtattattattatgagtttatgatgactggttagtatactagggtattagatagtatgctgctaggggaaggggtcagttttttggtaatttttgaaggccagggaattaagatttaagaaggggtatgttttaaattgctccttcattttaattttaatttcttttgtgtcaacaagtggggacctatttttttaggcccttcttgattacaggggtgtttttttatataactttttcagaagtgtttttttgaaccttcggtggctgaagagaagaagctagtgaaggtggagttcttttttatgggtgaggtactaaattggaagaggtggactttgttgttaccacccgccaattagtattgggatagtgtgtttttcattttggtgttgttattggcagttttattaagtgttgtttgctttttattactgatccttttgtcatcagcctgggctgtgtgtcttcggttgtgttggagactgaaaatgtaaattttcttgaaaggaaagttactgtagttactagtaatatttcctttttatttcttaattgctaattgttatatttaaaaaaaaaaaaaaaggcgct

SEQ ID NO: 7934 - DNA, 764 bp, Glycine max
caggccaatgtccagaaactggggtcaaaattggcaaagcaacaactatctcaatggccaaagcctctcattcaaggtcaccactagtgatggccgtacagtggtgtcctacaatgttgcccctgctggttggtccttcggccaaacctacactggtgctcaattccgctagagaggccttaataattgttcacaagttgaagttccaaatatatttagttacactacatatggtatatgctataattcctcaatttaagtgttagtgtatgactaaaaaaaaaaggaaaaatagtatactaaggtattaaaatagtatgctacttggtgcaggagggggtggggtcaattggatcacaaaatgtttaagggcttattttaaactggctcttgatcattttttattgggtcaaaaggggttcctaattctagggttcttattgattattggggaattttaatttttcatttctgaaagctttttcaacctttttgctgctgaaagctagcagagagggagattttatattttatatttgtggcctactaaattggaggaggtggactgttgcaccacccgccattagtattggagcagtttttttggttatttttggtccctattgggattatttagaagcattgcttgcttactcatcctttgtaagcagccatggctaagtatgtctttggttgtaccactggaagtgtaaattttcctatttctgcatttaatagaaagttgcagtatttttcttgttctt

SEQ ID NO: 7935 - DNA, 561 bp, Glycine max
aaagggaaactcatctactccacattgtcctctcaccacttctccaattgaaaaggcttcttcatcaaaagaaaaatggctcaaatttgtttgctcttggtggggcttctctcaatgttctcctctgcctatggctacggatatggtggtggctgggttaatgcacatgccaccttctatggaggaagtgatgcctcaggaacaatgggtggggcatgtggatatggaaacctctacagccaaggttatggaacaaatactgctgctttgagcactgctttgttcaacaatggtcttagttgtggctcatgctatgagataaggtgtgtgaatgaccataggtggtgcctccctggctccattatggtcactgccaccaatttctgtcctccaaacaatgctttaccaaacaatgcaagagggtggtgcaacccttcaatgcaccattttgacctctctcaacctgttttccttcgcattgcacaatacagagcaggaattgtgcctgttttctacagaagggtaccctgcaagagaaggggaggcataaggttcacaatc

SEQ ID NO: 7936 - DNA, 710 bp, Glycine max
ttcccgactcgacccacgcgtaaggaggatgcgacagaacgggactcaacatttgcatttcctcttcatatacagtacacacttcagctggtggtagcctggtagatagtgtgcttccaaaatgaagaacaaaaggaagactttactattgctgctgctcatggctgcaactctcttttgcatgccaattgtgtcgtatgctgtttctaatgtcaacattcaagaccatctcaccaatatttctgagctggtaaaaggtccaaatagaaggcttttgtcatttgtggattgtggagagaggtgcagggtgaggtgcagtttgcactcaaggccaaagatttgcacgagagcttgcgggacatgctgtatgaggtgcaggtgtgttcctccgggcacttacgggaacagagagatgtgtggcaagtgttacactcacatgatcactcatggcaacaaacctaagtgcccctaaacctctgcatgcatgcatgcatgcatgtccttctctgtctacacttttaattatcgtgtttatctctacttaatcaacactaattatatttaaattcccgttttttgttttgtctaccttaatttcttaattaatgctttgtgtttctcctaatttgtaatcatcagttgtgtattgctgtgacttaatttatctataatgcatcagttgtagaataaaagtcgagtaaattccacct

SEQ ID NO: 7937 - DNA, 1561 bp, Glycine max
  unsure (1)..(1561): unsure at all n locations
aattcctttaattaactccaatgacgccagatccctgttttcttccccttttccccttattttcaaacaccaccgcgtaacacaacacttgcccattcccttataatagacaaacgaaacacacctcactcacactttccgtgtaaacagaacagagcaacactgaacaatggcgcaaccttcctcctcctcgaagcctgttgtccctctcctgaaggacgagctggacatcgtgatcccgacaatccgaaacctcgacttcctcgagatgtggcggcccttcttcgaaccttaccacctcatcatcgtgcaggacggagaccccaacaggaccatcaatgtccccgaaggcttcgattatgaactctacaaccgcaacgacatcaatcgcatcctcggacccaaagcctcctgcatctcgtttaaggattctgcgtgtcgctgctttggttacatggtctccaagaagaagtacatctacaccatcgatgacgactgcttcgttgctaaggatccttctggaaaggatatcaatgcacttgagcagcacattaagaatctcctttgtccatccactccattttttttcaacaccctttatgacccttacagagaaggtgctgatttcgtccgtggatacccttttagtcttcgtgagggtgcccccactgctgtttctcatggcctctggctcaatatacctgattatgatgctccaacacagcttgtcaaacccctcgagaggaacaccaggtatgttgatgctgttcttaccattcccaaaggaacattgttccccatgtgtggtatgaatctggcattcgatcgtcagctgattggacctgcaatgtattttggactcatgggtgatggtcaacctataggacgatacgatgatatgtgggctggatggtgtgttaaggttatctgtgaccatttgggcttgggagtgaagactggccttccatacatctggcacagcaaagcaagcaatccttttgtgaatctcaaaaaggagtacaagggcattttctggcaagaagagatcattccattcttccaaagtgccaccattccaaaagaatgcacttctgtccaaaaatgctacattgaactctccaagcaagtcaaagagaagcttggggctgttgatccctacttcaccaagcttgcagatgccatggtgacttggattgaagcttgggatgagcttaacagcaccacatccgaagaagcttcttccaagtcagccaatggtgctgctgctgctaccaagtgaaccttttatggttgcggactttagttttcaaatcagagtaattttgttatcatattttttttataatgcaagattatagaccaatttattgattttgatatcatcattattactatttatattataaatatcattaatgtatttcaggataatttttttcgatattgtgaatttgtgattggaaccttagaaatttaattctgcttagtggatgagttttcctgtttatactaataatttatttttgtattttagtaatatnnnnnnnnnnnnnnnnnnnnn

SEQ ID NO: 7938 - DNA, 590 bp, Glycine max
  unsure (1)..(590): unsure at all n locations
ccgcgtaacacgacacttgccccattcccttatatataactcacaattagacaaaccaagcacacctcactcataccttccgcggccaaacagagcaaaaacccaacacaccacactcttgcaatcaatcaatggcggaaccttcctcctcgaagcccgccgtccctctcctgaaggacgagctggacatcgtgatcccgacgatccgcaacctcgacttcctcgagatgtggcggcccttcttcgagccctatcacctcatcatcgtgcaggacggagaccccaacaggaccatcaaagttcccgatgggttcgattacgaactctacaaccgcaacgacatcaacaggatcttgggtcccaaggcctcctgcatctcgtttaaggattctgcttgtcgctgctttgggtacatggtgtctaagaagaagtacatctacaccatcgacgacgactgcttcgttgctaaagatccttctggaaaggacatcaatgcacttgagcagcacattaagaatctcctatgtccatccacaccatttttcttcaacaccctttatgatccttacagaagctgtgctgattntgtc

SEQ ID NO: 7939 - DNA, 459 bp, Glycine max
gtcaatctcaaaaaggagtacaagggcatcttctggcaagaagaaatcattccattcttccaaagtgccactctttcaaaagagtgcacgtctgtccaaaaatgttacattgaactctccaagcaagtcaaggagaagcttggggctgttgatccctacttcatcaagctagcagatgccatggttacttggattgaagcttgggatgagcttaacaacaacacatctgaagaagttccttcaaagccaaccaatggtgctgctgctgccaagtgaaccttttatggttgcggattttagttttcaattggagtagtttcttccttgtcagttttaattgattatcatatttgttaccatattttttttataatgcaagattatagaccaatttattgatattgatgctatcattattactatttatattatattcttattataaatatgtatttcagg

SEQ ID NO: 7940 - DNA, 745 bp, Glycine max
tgctcacgacagacacgaacacgatggttgaaatttgaagcaaagcacgtgtttgtgtgtgaccttctctctctctaaactccgatggctttctctgcaatcactaccttgccctctcctcaatttctccgccttcctcaatcttcaccctctcttcgattttcaccgccaattctcaaacgccccaaacccctctccattcgatcagtttcaatccccgctgcaccagcatctggttctctggcccctgcagtttcacttacggataatgcgctgaagcacttgaataagatgaggtctgaacgaaatcaagatttatgtttaagaataggtgtcaaacagggagggtgctctggtatgtcatacacaatggattttgaagacagggctaataaaaggccagatgattcaattattgagtatgaaggttttgaaattgtttgtgatcctaagagcctactcttcatatttggcatgcaattagattacagtgatgctctgattgggggaggcttctctttcaagaatcctaacgcgacacagacttgtggatgtggtaaatcctttgccgctgaaatgtagaatcatgtttatagacaatagtttgtttctactttctagcaacactctggactaaatatagatatgcttttaatactaacataaatatattcatgtgcattgtaaaaaaaaatatgtactgaatgcttgttatttgtatttctgtttgtatttgtttaactgc

SEQ ID NO: 7941 - DNA, 342 bp, Glycine max
gacacacacgatggttgaaattgaagcaaagcacgtgtttgtgtgtgtagttctctctctctctctctctctctctctctctccaggctccaatggctttctctgcaatgactagcatgcactctcctcaatttctccgccttcccatctcccttccccgttcttcaccctctggtcgattttcaccgccaattctcaaacgccctaaaccactctccattcgatcagtttcaattcctgctgcaccagcatcagggtctctggcccctgcaatttctgttacggataatgtgctgaagcacttgaataagatgaggtctgaacgaaatcaagatttatgtt

SEQ ID NO: 7942 - DNA, 501 bp, Glycine max
gggtttgtttcaccgaggataggacagtgaggactgagaactactacaatactcaaacgctgttgaagcgaccgacgagtcttgtgtgtgacctcaaaaccctgccgtcagtcaccgtcttctctgccgccatgaagctcgtcaggtttctgatgaagctgaacaacgaaaccgtatcaatcgagctcaagaacggcacagttgttcatggcaccattacaggtgttgatatcagtatgaatacacatttgaaaacagttaaactaactctgaaagggaaaaacccagttactttggatcatctcagtgtgagaggcaacaacattcgatattatatccttcctgacagcttgaatcttgagactttactggttgaagaggctcctaagatcaagcctaagaagccaactgctgggaagcctttgggaagagggcgggggcgaggacgtgggcgcggcccgggtcgtgggcgttaagttgcacatcacacaatttgtggca

SEQ ID NO: 7943 - DNA, 527 bp, Glycine max
ggtctcactctcacttttgattttttgccctaaaaccctcgctgccgtcgtggtggccgcccaagaaaagagaatagagagcgcaaacgagtcttcatcttcgactcaccatgaagctcgtcaggtttttaatgaagttgaacaatgaaaccgtgtcaattgagctcaagaatggcactattgttcatggcaccattacaggtgttgatatcagtatgaacacacatttgaaaacagttaaactaactctgaaagggaaaaatccagtgactctggatcatctcagtgtgaggggtaacaacatccgttactacattcttcctgacagcttgaatctcgagacccttgcttgtggaagagacacctaagatcaaacccaagaagccaactgctgggaaacctttgggacgtggacgaggaatgggccgtgggcgtgggcatggacgtggtggtcgttgagttgcacctttcttcatttttgtggcatgtggttataagctatgcagcaagaatttctgggtggtttt

SEQ ID NO: 7944 - DNA, 540 bp, Glycine max
cccacgcgtccgcccacgcgtccgcccacgcgtccggcagagcaatggcatcgtcttcgctcacttcagttcctctctcatcttcttcactcaacattccacattcttcctccaaagcttccgctagctttgtatcttctccaattggcgcattctctcgcacccccaaaaccctgtttgccgaatcaaggttccactttcacccgaagagaaacgattatgggttttccatcagagcccagaccctagacttctcggattcattcttcgaagggggtttcggctctgaagacgacccttcttctcccggcggacccggcttcacggccgtggaggaaaaggaggaaccccaatgcccaccgggtctcagacagtacgagactatgatggttttgaggcccgacatgtccgaggatgaacgacttgcactcacccagaagtacgaggaggtgcttgttgctggaggtggcatgtatgtggaggtttttaacagaggagttattccactagcatatagcatcaagaaaaaaaacaaagcag

SEQ ID NO: 7945 - DNA, 704 bp, Glycine max
cgccctaactgaaactcaaaaggtagcataagcgttagcatctcctttccaacttgcacttttgcagcctttattaacttcaacttcattgtttctgtcgccttgctttgcttttaacgttaacctgcaattgcataaactttcaataactcagtgctcacacttcaattacaagctttggtttttcacttcacgcttgaaacccaatggcagcctcagctttctccaacacattggtttctcccatttctcttccatccaaacccaaacccaaagccatttccttgcaacccaaatttccacttgtcaaattccccaaccccagatcccatcccttgtcgaggaaaacgacgtcgctcaccacgttttgttcctccgatgctgccaatgctcctcaacatgacaccccaattgaattaaggtatcccgcattcccaaccgtcatggacatcaaccagattcgtgacattttgccccacaggtttccttttcttctggtggatagagtgattgagcacaatcctggagtttctgcagtggccataaagaatgtgacaataaatgacaacttctttcctgggcattttccagaaaggccaatcatgcctggtgttctcatggtcgaggcaatcgcacaagttggtggcttggtcatgttgcagcctgaagtgggaggttctcgtgaaaacttcttctttgctgga

SEQ ID NO: 7946 - DNA, 384 bp, Glycine max
tttccaccttagtagtaagagaaagaatagaggttgaaatgaaggtagctcccatcgtggtgttcttgttcagagatacagagggtttcgcctccaccatctcacaagcttttcgccccaagccttcctcctccttcacgcgccaagaggactcctttgagctctccttggaggcttatggaatcaaacacctcaaagcatctgggagcgtttctcacttcgttgatgatcacggcgcttacaaggtgacaattgtggctatggagcattatgagccaccggtactatcttgtgctcttaatgagttaccaaccttttttctaattggacaagctagtcaatatttggacaataaatccaccaagcaacaggagatacttcatg

SEQ ID NO: 7947 - DNA, 389 bp, Glycine max
gcatagaagagagggtggaatggaagtagctcccatcgtgggtttcctggtcagaggccccaaagggttcgccttcggcatcttacaagctcttcatggcaacccttgcttctactttacccggcaagaggacctcttcgagctctcattggaggcttatggaatcaaacatctcaaaacatctgggagcgtttctcacttcgttgatgatcacggtgcttacaaggttgacaattgtggctatggagcattatgagccaccagtactagctggtgctcttaatgaggttcttaataaaattactgaagataaatcctccttgatacctacacttttggtaccatttttggtggaatcgtccaaggttaaagggcacagtaaatcccta

SEQ ID NO: 7948 - DNA, 1369 bp, Glycine max
ccaaatggttgaacaagttaagaaaaccatgagtgagaaccaacatgttgaggttaagaaaattctacactttagttcgttgaacaatgtgatgatgacggtgtttggtaagtcttatgagttttacgagggtgagggtttggagcttgagggtttggtgagtgaagggtatgagttgttgggtgtttttaactggagtgaccattttccggttttggggtggttggatttgcagggtgtgaggaagaggtgtacgtgtttggttgaaaaggttaatgtttttgttggaggggttattaaggagcatagggtgaagagggagaggggtgactgtgtgaaggatgaaggagctgaggattttgttgatgttttgcttgatttggagaaggaaaacaggctcagtgaagctgacatgattgctgttctttgggaaatgatattcaggggaactgacacggtagcaattctgctagagtggattctggctcgcatggttctccaccctgaaatccaagcaaaggcacagcgcgaaatagacttcgtttgcggatcctccaggctcgtatccgaagcagacattccgaacctgcgctaccttcagtgcatagtaaaagaaaccctccgtgtgcacccaccaggcccgctactctcgtgggctcgccttgctgtgcacgacgttacggttggcggcaagcacgtgattcccaagggcaccaccgcgatggtgaacatgtgggccataacccacgacgagagggtgtgggccgagcccgagaagtttaggcccgagcggtttgtggaagaggatgtgagcataatggggtctgatttgaggttggcacctttcgggtctggaagaagagtgtgccctgggaaggcccttggtttggcctcggttcatctttggctcgctcagttgcttcaaaattttcattgggtttcatctgatggtgtttctgtggagttggatgagtttcttaagctttctatggagatgaagaagccactgtcttgcaaggctgtgcctagggtttctgtttaggtttatgtgtgttgttgggttgagttggtttggtttgtctgcttaggtttgtggatgttgttcccaaggctgtgcctagggtttctgtttaggtttatgtgtgttgtttggtttgtctgtttaggtttatggatgttgtttggttgagttggtttggtttgtgttatctgctaagtttagttcaagaaaagtagggtttagagcacctttttattaatcgctaggggttgttattccgtgtacggtttgtagtaagttgtaaaagactagaagagaatgtaagaggttttgttttgtgtgggtcgttaattaagtgtatttgcagcc

SEQ ID NO: 7949 - DNA, 529 bp, Glycine max
ggaagaggatgtgagcataatggggtctgatttgaggttggcacctttcgggtctggaagaagagtgtgtcctgggaaggcccttggtttggcctcggttcatctttggctcgctcagttgcttcaaaattttcattgggtttcatctgatggtgtttctgtggaattggatgagtttctcaagctttctatggagatgaagaagccactgtcttgcaaggctgtgcctagggtttctgtttaggtttatgtgtgttgttgggttaaggtggtttggtttgtctgtttaggtttatggatgttcttcggttgagttggtttggtttgtgttatttgctaagtttagttcaagaaaagtagggtttagaacacctttttattaatcgcatgtggttgtttttactttttgggtttaatggtaagtttaggggttgttattccgtgtacggtttgtagtactcgtaaaagactagaagagaatgtaagaggtttgttttgtgttagttgttaattaagtgtatttgcggcc

SEQ ID NO: 7950 - DNA, 258 bp, Glycine max
aactcaaccaaacaacatccacaaacctaagcagacaaaccaaaccaactcaacccttcaacacacataaacctaaacagaaaccctcggttcatctttggctcgctcagttgcttcaaaattttcattgggtttcatctgatggtgtttctgtggagttggatgagtttcttaagctttctatggagatgaagaagccactgtcttgcaaggctgtgcctagggtttctgtttaggtttatgtgtgttgttgggttg

SEQ ID NO: 7951 - DNA, 464 bp, Glycine max
acgaggttacatcctatgttagtgttactcttccgtcaaacaccacataatcctttcctgcatttcacggtttttcttcaacactctcagtctcgttttcttcatctttttcttctttgttccactggaaaaagaagtaccttacttgtgaagtgggatttagagcttaatctgaagttgggttttgcttcccttgtccaaattccatggctttaatcttctttacttgttttcccttactcgatttcacatgggtatttttttgacgatggctactgacgattcaattttttttctgattcatgagtcctctttcccgcaccgttaagatttgattaaatgttttcgttttagtacaccaactgttcgatgaaatgttgcaccgaattcaacttaaattgtatctctacttcaactatagcatgcgtgtcactgcttcttttaacttttctgtgattctttag

SEQ ID NO: 7952 - DNA, 545 bp, Glycine max
acgcttacaccaaacctttttttccaaaacaaaaaccaatgagtcatggccaaaccaagaagccacaagcagacggtgaacccaccgaatgcggcgacgttttcggtgtctccaccgccgcggagcctcacgctgcgccggtggtgtccgccggtatcggttcggctgccatagatggcgaccccataaccatcggagaagctctggaagcggcggcaatatcgatcggggataaaccagtggaccaaaatgacgccgatgcgattggcgtcgcggagattagggccaccggagagaataaggtgaggtccggtggggtgggtgaaaccgcacaagaagcagctactttcaacagtcacgtcatgcgagtccaagacatgacgaaactttccgatatcttaacggatgcggcggagaagctccccgtggacaaggcggtgacaaaagaagatgctgaggctgtgtatactgcagaggtgcagtttccatggcagagagatgcggcggaagtggttgctgaacctggcggagtggcggcatccatg

SEQ ID NO: 7953 - DNA, 399 bp, Glycine max
gattgttgtcgtttcgttcctcactgtcactgactcactcttgttttcgcttcgctactcatcatcctaagaagtaccaggaagaaacaaacaatgtttctcaaagtccagctgcactggaatgtcatcatcgctgctgaaaatctgcaaccggaaggtctgatgcttcatagggcaatcattgtccgccttctgagtgactttgctgtgaagaaggccaccaaagatctgggatactttcttgcagtgaccacactggagaaaataggggaaggaaaggtcagacaacatactggggatgtgctcttccctgtggtttttaatgccatcaccttcaagtttttcaagggtgagatattacagggtgttgtccacaaggttctgaagcatggagttttc

SEQ ID NO: 7954 - DNA, 1367 bp, Glycine max
gtgtgtgtgagagagagagaaatggttctctcaccgtgaaagagagagagaggttaggctatggctgatgagagcgttgttgagtccccagtgaagaggcagagagatgatggtgaagaaaatggtgtctctgtttccatggacgcggagggtggcaaagaccctcttagtaacggtttatcatctgtgattcctgggtggttctctgaaatcagtgcaatgtggcctggagaggctcactccttgaaggtggaaaagattttgtttcaaggaaagtctgaataccagaatgtcatggtcttccagtcatcaacatatggcaaggttcttgttttagatggagtaattcagctaacagaaagggatgaatgtgcctaccaagaaatgatcactcatcttcctctttgctctattccaaaccctaaaaaggttttggttatcggtggaggtgatggaggggtcatacgagaagtagcacgccattcttcagttgaaaagatagacatttgtgaaattgacaagatggttgttgatgtctccaaacaatacttccctgatgtagctgttgggtatgatgatcctcgtgtgacacttcctgttggtgatggagttgcatttttgaaggatgttccagaaggaacttacgatgcagttatagtggattcatccgaccctattggtcctgctcaagagctgtttgaaaagcccttctttgcgtcagttgcaaaggctcttcgtccaggaggagttgtgtgtactcaagcagaaagtatatggcttcatatgcacatcattgaggacattgtggctaattgtcgccaaatattcaaaggttctgtcaactatgcttggactactgttcctacatacccaagtgggatgattggttttatgctttgctcaactgagggtcctcttgttgatttcaagcatccagtgaatcctttaagtgagaatgatagtcaacagtcagtaagaccactgaaattttacaactctgagattcatacagcagctttctgcttgccgtcgtttgcgaagaggaagattggttctaaagcaaattaagaagattttctgaacctttgaaggagctcaagtggctgttgtagaagtccaacattcatccttgctgtattggtccatctatcaatgagccttggaataagtcagattaaatttggcattgaatagttaagtttatttctggaaatcaattagcaatcggattaagagtctaggcaatcctaaacggggtttaaaagtgatggcaattatcattatcaacccaagaattacctgttttataatctatctttatattcttattaataagttggagaggggaccaatcgattgacatgatt

SEQ ID NO: 7955 - DNA, 740 bp, Glycine max
aaaaaattgattctctcataatcattaatatcaaaataacgacctataaaagggatcagtagtagaagagggcaacgagtccctactcagttcacagagaaagatggctgcggaaaacgttgttgagttcacagacttacccgtcaagaggccaagagaagaagaagaaggaaccaatggcgtctccaacgacgccgtttcagcgctccccaatgaccctcaataccctggcatctctgcggttattcccggttggttctccgaaatcagcccaatgtggcccggggaggcacattccttgaagatggaaaagattttgtttcaagggaagtctgactatcagaatgtcatggtcttccagtcatcaacatatggcaaagttcttgttttggatggagtcattcagcttacagaaagggatgagtgtgcctaccaagagatgatcactcatcttcctctttgctctattccaaatcccaaaaaggttttggttattggtggaggagatggggagtgctgcgggaagtactcgtcatgcctcagtagagaagatagacatttgtgaaatagacaagatggttgtcgatgctctaaacattttccctgatatagcagaggtttgaggaccagtgtaaacttactgtgggatggagtgcattcttgaaaatgtccagaagacttacatcgttataggattcatcgacctttgccctgtcagactgttgaaaaccttttgctcg

SEQ ID NO: 7956 - DNA, 320 bp, Glycine max
cctcgagccgattcggctcgagaccgtgtgtgtgttgtgtgtgtacgtgagagagagagagacgagagagagagaaagagagagagagagaggttaggctatggctgatgagagcgtcgttgagtccccagtgaagaggcagagagatgatggtgaagaaaatggtggcccctgtttccatggacgcggagggtggcaaagaccctcttagtaacggtttatcatctgtgattcctgggtggctctctgaaatcagtgcaatgtggcctggtgagttctctttttaccttacccttttgtttgttgcttccaaagttgtg

SEQ ID NO: 7957 - DNA, 399 bp, Glycine max
cccatagatgaaaatgagagtcagaagtcagtaagaccgcttaaattttacaactctgagattcataccgcagctttctgcttgccgtcgtttgcgaagagtaagattggttctaaagcaaattaagaagattttctaaacctttgaaggagctcatgtggctgttgtagaagtccaacattcatcctttctgtattggtccatctatcaatgagctatggaataagtcagattaaatttggcattgaatatataacgtttatttctggaaatgagttttaggtgataaaggtataattgatggattcagttgtcagtggctttcctcataaacacatttaaaaatgtggaactatgaatatctgtttaggaaaattttgtttaatgcaaattgttgtt

SEQ ID NO: 7958 - DNA, 465 bp, Glycine max
acatgtggctaatgtcgccaaatatcaaaggttctatcaactatgcatggaccacagttcctacatacccaagtgggatgattggttttatgctttgctcaactgagggtcctcttgttgatttcaagcatccagtgaatcctataaatgagaatgatagtcagcaatcaagaccattgaaattttacaactctgagattcatacagcggctttctgtttgccatcttttgctaagaggaagattggttctaaaacaaattgaaaatatttttcatgggattgaaggagcaaatgtggctgtcggcattcatccttttactggattggtccatccatcaatgaaaagtgggataagagcttcaagatgacaatgtagagcaacttttatttcatgaaatgagttgtagatgatggattcagttgctagtgatttacattattgacattgtggaacttcgtttagc

SEQ ID NO: 7959 - DNA, 596 bp, Glycine max
  unsure (1)..(596): unsure at all n locations
gctggaattcggttcgaggggatggaagcgaagttgccagagacggttaaagctttctcatggctactacctttaccctcgcaacgctgtcactaccgtcgtcttctcgtgtttccattggcggagctccgattcgccaccaccgttctccgaaccggatcgggttgttgccgcctctcaaatgctcctctttggagccggaaaccgccccgcctcctcccttcgactggactcacaagttgatcgccggtgtcgccggcgtcggattcctcgaaacctcgtacctcacttaccttaaactcaccggcgcagacgccttttgccccgtcggcggcggcacctgctctaaaatactcgacagtgattacgccctcgttttcggtattcctcttcctctgattgggatggctgcgtatggcttggttgctgcacttggtgttcaattggcttcgaagaattttcgttttgggattgagaaaccaactgctgaagcagtgttgcttggagccacaacctccatggcagctgctagtgcgtatnttttgtacattctaaccaccagattctctgactcgtcttgctcctactgcttactt

SEQ ID NO: 7960 - DNA, 446 bp, Glycine max
gagggttttactttagacccgtcgtggagcaaaactttacattttgagaccgcaaaatgtctgaagtgaatgcgacccctgaaattcctcaaagcaacaccatctacatcaacaacctcaacgagaaaattaagattgatgagttgaagaagtctctgaacgctgttttcactcagttcgggaagatacttgaggtgttagctttcaaaaccctaaagcacaaaggtcaagcttgggtggtctttgaagatgcctcttctgcttccaacgccctaaggcaaatgcaaggtttccccttctatgataagcccatgagaatacagtatgcaaagaccaaatctgatataatagcaaaagcagatggtactttcgttcctagggaaaaacgaaagaggcatgatgacaaagccaaaaagcggaaggaccaacatgatgctaatttagct

SEQ ID NO: 7961 - DNA, 1153 bp, Glycine max
gcattattcactcacttcccccctcttcattttgtagtcctcctttacctgcaaaaaacagcagatggctcagcttaacctcatacttatctggttatttttattgagtctgtgcctttattcatgtcctacttcggcccagttaagtagacaccactatgcaaaaacatgccccaatgttgaaaacattgtcagagaagcagtcaaaaagaagtttcatcaaacatttgttacggttcctgctaccattcgtctcttcttccatgattgcttcgtgcagggctgtgatgcctcggttttggttgcatccacaaaaaacaacaaagcagagaaggatcacccagataatgtttcactagctggagatggatttgacacagtgattaaagcaaaagaagcagttgatgcagttccattgtgcaggaacaaagtttcatgtgctgatattttagccttggcaacccgtgatgttattgaactggccggtgggcctttctacgaggttgaattgggaagatttgatgggctaagatctaaagattcagatgtaaacgggaggctgcctcatccagagttcaacttgaaccagctcaattcactgtttgcggccaacggtctcacccaaacggaaatgatagctctatcaggtgctcacactgttggattctcccattgcaacaaattcacgaacagagtatacaatttcaagagcaaaagtcgagtggaccctacactgaacgagaaatacgcaacacagctaaagtcaatgtgcccaaggaatgtggatccaaggattgcaatcgatatggacccaagcactccacggtcattcgacaatgtttatttcaagaatcttcagcaagggaagggcctcttctcttcagaccaagttctcttcacggactcaagatccaaggccactgtaaatgcatttgctagtagcagcaaaatcttccatgccaacttcgccgctgctatgaccaaattgggccgagttggaatcaagaatgcacagaatggaaacattcgctccgattgttcagtcatttaatttaagaagggccaacagattattatcaagtcagggggattcgttatttatattagttaccctgtgttcccaataataagtactgaaagtatttaatttctc

SEQ ID NO: 7962 - DNA, 719 bp, Glycine max
gagaagacaagggaatgggaatcatctcttcttcgaaggtatctctctgtatattcaaatacacagtatactatcacattcgcttcggtacttctctcttcattgtcgcagacacaaagcagcactaaaggaagcccttcactacgccgattaagcatgtcaggcagaaaagaaacggttttggaccttgcaaagtttgtagacaaaggcgttcaagttaagcttactggtggaagacaagtgacagggactctgaaagggtatgatcaattgcttaaccttgtcctagatgaagctgtagagtttttaagagatcctgatgatcctctcaaaactactgaccagaccagaaatcttggcttaattgtttgtagaggaactgctgtgatgcttgtgtccccaactgatggtacagatgagatcgccaacccctttatgcagccagatgggtcctaagtgtgaagtatttgtatcttaaagtctgtatgctagctgatcaatacgtcatcgcttagctactgagacattaatgcggggatactgattaacgttttgtctattttgtaggcttggatatttattatatgctttggattaatagaatatcacccattttatgttattgttccgatgaagtttatttctctgtgatgtgtcgtcagctaatttgaggacttaatattcatcataatgaaagaagctaattcatacttgcccat

SEQ ID NO: 7963 - DNA, 414 bp, Glycine max
  unsure (1)..(414): unsure at all n locations
gactcctctccttccagttctctctctctgtgtattttcaaatccatactatcactttcgcatcggtacttctcttttcattgtcgcgcagacacaaatcagtaccatacgaagcccgacactacgtgaattaagcatgtcgggcagaaaggaaacggttttggaccttgcaaagtttgtagacaaaggcgttcaagttaagcttactggtggcagacaagtgacagggactctgaaagggtatgatcagttgcttaaccttgtcctagatgaagctgtagagtttttaagagatcctgatgatcccctcaaaactaccgatcagaccagaaatcttggcttaattgtttgtagaggaactgctgtcatgcttgtgtccncaactgatggtacagatgagatcggcaacccctt

SEQ ID NO: 7964 - DNA, 578 bp, Glycine max
cctttcttgcggctctcttctgaacctttcactcaccgcaatacaaccttagattctcggagcgagagcgagaaacagaaacctatttttattttctctcttcatatcacttagactgagactggatgcttctgtatccatcatattatatgatgattattgaattgattatgcgttcagatttcacttcaggatcactttgacagtttgacttgtccggcaccaacttctggtattactattgtctgagttctcaggagttctttcacagaaggtagatgggttctagaatcccatctcataagcttagcaatggcctctacgtatcaggacggccggagcagcccaaagaaagaactccaacaatgacatcaacagccgtgccatataccggtggagacataaaaaagtctggagaattggggaagatgtttgatattcctgttgatggctctaaatctaggaaatctggaccaataacaggtgctccgtcacggactggatcttttggaggagctggttcacattctggacctatccagcctaatgctgctgctcgagccgcctatactacttca

SEQ ID NO: 7965 - DNA, 146 bp, Glycine max
aatatgacacagaaattaaaattggtatcaagattttcgtcccttagttagtcactctcttttgacttccatttgaacttttgcataattgtatgtatgtgtcccaatccttttttaacgatatcctcaagttatcaacaatggcc

SEQ ID NO: 7966 - DNA, 428 bp, Glycine max
ggtgttcggagagagacagatttgtgtgttgagcgcatagaacgatgagtttggttggtagaggagcaagttttgcattgtagtagttgtagcaatagccacacaacaaaagaaaacaaaaaaccaagtcttcgtcatcttcgtatgcagagatttttcttcaacatgatgatgatgattagtttatttaccaaacaatgattgccttgccttccttcgtgagatactggtagcaatttcaaaccttttcgagtaaccaatacgataagaagagaactgacaaaagctagaagatgaagcgcatgaatgagagtaacaacaccgatgatggaaacaatcataactggttggggttctctgtatcggcccacatgaaaatggaagttactttcgcatgcacttgtttcgacaacaatgttccgacaacc

SEQ ID NO: 7967 - DNA, 132 bp, Glycine max
tccaccatgtggtgttcttctatgcacttgctaattcactaggaaaaaaacattataagcctaacccaccatctcactgcatacacacaacaataatgcaaaccccacaacaaagttcatcgaatcaacccc

SEQ ID NO: 7968 - DNA, 689 bp, Glycine max
ggcgatccaaatccaaaaaaagaagacttcaaaaaatcggaagggtacttttgtaattatatggagacccgtgagatcagaatatcagatcgaatttaaacgggtcatattcgcattttcaattcattttgaattgaaaccgcggagagtttgcagctgcatcatcgatcatcgtcacctcatggacggacacgattcacaagacccgaagcagagccctgctgacatgactgcctttgtgcaaaatcttctccagcagatgcaaaataggttccagacaatgtccgactccattgttacaaagattgatgatatgggaagtcgcataaatgagttggaacaaagcatcaatgacctaagagcagagatgggagtggagtcctctccatcacctgcgacccctgctaagccaacagaggaaatcaccaaagaagagggttcagcttaagtggcgtgttctgatttcagttgctcgttattcatgtattcatgtattgtattgcacaaggattgatgttatgcatctacttttgtctgctgtagtggttcagaaaacagatgtgctgtatagctatgagtgcatctgattatttgtagctaactcgtattttttttatgacttatgggtacacctatactttatgttgcgattactttgttgccaatgtcatcatgtccattttttgctc

SEQ ID NO: 7969 - DNA, 517 bp, Glycine max
gacaaagtcccctcccacaccactgtaacatctacttacagaagcacaccacaggaactagaaaatccatacaatcttcaccaccaaaaagaaaataatggcaatggccagtgcaacaactctagccacaatcactgttgtggcggctagccccagtgttggcagcagaaggagtgggaagaggaatgtgaacttcatcagagggttgaattcttttggagggttgaaggctcagaacaatgtgacattactaggccttcctgtgtgcactgagcagtgctttgcaaaggtggtgagctcattgaaatatccatcatcatcatcacgtaaggggagaggtggaggtgctgccttttcaacatgcaatgctgctggtgagattttccagattgcagccatcatgaatggccttgtgcttgttggggtggcaatagggtttgtccttcttcgagtcgaagcgtttgtggaagagtctgagtgagaattgcatcaacttttaatgcagttttcatatatg

SEQ ID NO: 7970 - DNA, 331 bp, Glycine max
  unsure (1)..(331): unsure at all n locations
cccacgcgtccgcccacgcctccgcaggatctagaaaagccattccatcttcaccaccaagaagaaaataatggcaatggccagtgcaacaactccagccacaatcactgttgtggccatctccagtgttgccagcacaaaaagaagggagaggaatgtgcacttcatcagaggtttgaattcctttggagggttgaaggctcagaacagtgtgacatcactaggtcttcctgtgtgcactgaacagtgttttgcaaaggtggtgagctcattgaaatatcaatcatcatctaagggcagaggtggaggtgctgnctcttcaacatgcaat

SEQ ID NO: 7971 - DNA, 1322 bp, Glycine max
cccacgcgtccgcccacgcgtccgctagaagagcaaagagagtgagaaaagaaggaagaagaagaagaagagatggcaaatgaactacccgtcaaagcttttggttgggctgcttcagacacttctggcacccttgccccttttcatttctccagaagggaaaatggcgtcgatgacgtcactctcaagattctcttctgcggggtttgccactctgatctccacactctcaaaaacgactggggtttcaccacctaccctgtcgttcctgggcatgaaattgttggtgttgtgacagaagttggaaacaatgtgaaaaacttcaaagtgggtgataaagttggagttggtgtgatagtggagtcttgcaaggaatgtgaaaattgccaacaggatctggagaattactgtccccgccctgtgtttacctataactctccttattatgatgggacacgaacccaaggtggttattctaacattgtggtcgtgcaccagcgttatgtgctccgatttcctgagaacttgcctcttgatgctggtgctcctctgctgtgtgctgggataactgtgtatagcccgatgaaatattatgggatgacagagccaggcaaacatttgggagtggcagggcttggtgggttaggtcatgttgcaatcaaacttgctaaggcgtttgggctgaaagttactgtcatcagtagctctcctaacaagcaagctgaggccattgaccgactcggggctgattctttccttgtttcatcagaccctgcaaaaatgaaggtggctttgggaaccatggactatatcatagacacaatttctgctgttcattccctgattccactgcttggtctgctgaagctgaatgggaagctagttactgtagggttgcctaacaagccccttgagcttcctatctttccattagttgcaggacggaaacttataggggggagcaactttggagggatcaaagaaactcaggaaatgcttgatttctgcgcaaagcacaacataactgcagatattgagctgattaagatggatcagatcaacacagccatggaaaggcttagcaaagctgatgtgaaatatcgctttgtgattgatgtggcgaactctttcgcaagtttgtagaagccaccatgattctccaactctttgcatgtgtggcctttagatgtctcagtattttgaaagtagattggtggtataagtagtctataagatgttgacctttaacgatgagaacatctgctaattaataaaactataggttttgaatttaaaaaaaaaaaaaaagggcggccgccgac

SEQ ID NO: 7972 - DNA, 479 bp, Glycine max
cttcagcagcaaagggaaaagcaaacagagtgtctaatcgaagatagaagaagagatggctaaatctccagaaactgaacttcccgtcgaagctttcggttgggctgcttcagacacttctggcacccttgcaccttttcatttctccagaagagaaaatggcgttgatgacgtcactctcaagattctcttctgcggggtttgccactcggatctccacactctcaaaaacgactggggtttcaccacttaccctgtcgttcctgggcatgaaattgttggtgttgtgacaaaagttggcaacaatgtgaaaaacttcaaagtgggtgataaagtcggagttggtgtgatagcggagtcttgcaaggaatgtgaaagttgccaacaagatctggagagttactgtccccgccctgtttttacctataactctccttattatgatgggacacgaaccaaaggtggttattctaacatca

SEQ ID NO: 7973 - DNA, 407 bp, Glycine max
gaaactacatttcaatctttaaagtttaaacaattctgcccggtggggcacttaaggtaggcgatcaaaccaagcgtgcacagcgaaaccctagcgttagggtttaaatgtcctctcaattccctccaccgagaaagcatctttctctaaattgattgatttcttgtgttttattctctcaagattggtgttggtgaaattttgttgttctctgttcaatcgggccttattgctcactgcgccttcaaatccatggtcgtcagtttaccatggatccctttcatcagattgaacaacaagaagacgagtgggacactgatggacttgtgattccaagtttgggaattgaagattcagatcaaaataaacctcatgtacatgatgtagaatcttctaattctgcagca

SEQ ID NO: 7974 - DNA, 563 bp, Glycine max
cgacagaaggggaaataaattaaaactaaaggaaaggccacatctaacgaggagcacacatcttagagaagaaatgaagcccatctttgccttgttcgtagtcttgtcgcttctcctggttgccaacatcaacttaagccatgcaagaaaagacctgggggattattggaagaaaatgatgaatgacgaacccatgcctgaagcaattaaagatcttattcaagatcaacaggtacaagatgcaacagcagatcattttataaggtacttcgatatgaagcctaatatcattttgtatcacacccatgttgtgtccaagaagcagcagcagcaaaaggcttttgaccacaagtttaaaccagtctcaaggaacggaaagtcatggttgaacaaaccataaaaaatggttgaaggctaaagctgttagaattaataataaaaagaaaatgaaagtacgtattaatcaagcaataaggaggtactgtattaagcaactaagattgtgcagtaattaaggttgctacttttaatttctccctatggaatgaatctctttattttcc

SEQ ID NO: 7975 - DNA, 412 bp, Glycine max
gaacacctttcactctcattgacaaccaacggtagttagtataccaccaccaccagcaagtcgtgaagcaaagacagatctttgctcgagtggtgattttgttgctcatgttcttagttggagccaggtttgctaaagcaaaagaaggaggagaagaagctgctgataggattttgaaactccctggtcagccaaaagtatcatttaagcaattttctggctatgttactgtcaacaaggttgctggtagagctctcttttactggctcgctgaagctgcccaaaatcctctcaccaaacctttggtcatttggcttaatggaggtccaggatgttcatcagtggcatatggagcatctgaagagattggcccatttagaataaacaaaacagcttctggtctatacaaaaa

SEQ ID NO: 7976 - DNA, 390 bp, Glycine max
  unsure (1)..(390): unsure at all n locations
ggacaaccagcaagtgagacattttttttttctcttttctcttaagccatataccactttggtcatactcataatcctttttcttcattttcactaagtccaccaacaccaagtcacggctcaaagacagatctttgctcatgtggtgattttgttgcttatggtcttagttggagccaggtttgctaaagcagaaggaggaggagaagctgctgataggattttggaactccctggtcagccaaaagtgtcatttcagcagttttctggctatgttactgttaacaaggttgctggtagagctctcttttactggctcactgaagctgcccaaaatcctctcaccaaacctttggtcatttggctcaatggaggtccangatgttcatc

SEQ ID NO: 7977 - DNA, 758 bp, Glycine max
gtgaacatgtgtgcacagaaccgaataactgctgaaattcatcccacagaatctgccaactccgaaatgaagttatcatccggagaacatcccgggaagaaacacatcattttgaacatcaggagcaggtttgaagagttcctctccaagcctcaaccagtagagcctttttcatataaaaatcttgctgcagtttcaccttcaacaccttctaaatcctatgaaatgaggcaaattcctggcttgaattctaggaagttctcgaaggagaacgattacgagtattccgtcagggtagtcaaatggttagagcatcaagggcatatagatgaaatcttcagagtaaggtttctcacttggttcagcctcaaggctactcagcaggagagaagggtggttagtgcttttgttgatgcattgattgatgacccagcaagcttagcagaccagctcatacacactttcagcgacgagatatgttgcgagccaaaatcttagtgaggatgaatatgttctacattaaaaatttgttttggtcagagtccaccaactctatatggcactggaagcttggatagaaagtttgtaatgctttgtgggagttataggtactgtccagagatatcaggtttttcaagtgttcatttgttcttcatggaggaagttgttcaaggtctctataccatttaagtttcgattacgtattgtgcagactaattgctggatagtggtgcataatgattaattcttatttatcc

SEQ ID NO: 7978 - DNA, 682 bp, Glycine max
ggaacgaactaaggcatcgttttcatttttgtgttttgttttttgttttttgaaaaagggtcttccccgccaccaaaccctagcttagcaaaatgccgagggaaatcatcactcttcaggttgggcaatgtgggaatcagatcggcatggagttctggaagcagctctgcctcgaacacggcatcagcaaagatggcatcctcgaagacttcgccactcaggggggtgaccggaaagacgtgttcttctatcaagccgatgaccagcattatataccacgggctctcctgattgacttggagccaagagtcattaatggaattcaaaacagtgactaccgaaacctctacaatcatgagaacatctttgtctcggatcatggaggtggtgcaggaaacaattgggccagtggatacgatcagggacaacacgttgaagaagaaataatggacatgattgacagagaagcagatggcagtgacagtcttgagggttttgttctatgtcattcaattgcaggaggaacaggctcaggtatgggctcatacttgttggagactctgaatgaccgctacagcaaaaaactggttcagacatacagtgtgtttcctaaccaaatggagactagtgatgtggtggtccaaccatacaattcacttttaacactcaagagattgacact

SEQ ID NO: 7979 - DNA, 610 bp, Glycine max
gattctgaaaaagccgtagtttcgttggaaagggtctcgtttttcctacttcaaaggtttcttcttcgtatttctcgtaaatttctctctcaacctcctcaaaggaaaaaagaaaaggcatatagttatatggataacaaatcaccgagcaaggagtccaaggaggtgacacgagagtcgcttattgctatttctaactctttacctgataagactctggaatcaacttctgccttagagagcaagaaatcagacggggttatgataccaaaccgtgatcaagatgacaagtttaggtctgaactgatttcaatttcttatgctgaatcccctgatgacaaaatctgatctgtttcaatggtaaactagttcatgtgtaactcctggattatcgtttggttgatctttctctatgtcaatgttgtgacttgactgtttatatactgtctcagctatcgtgcaactctatgtaaataccttcaccggctacatgcttgggtcatatgttgtaacgaccgtgacaactgacaagtgtgttgtctaagtactatgttaattcatgtgagatacttgaaagttcaaagcgtagtacattttcatatgttaaata

SEQ ID NO: 7980 - DNA, 636 bp, Glycine max
ttatggggacagctgttgtttatattcacttcttcaaccctcatttctggttaaatcagtactcactctctacccgtttcctgataatccctaatttgatccaaatgactcacttgtaatttcttatagaaaaaaattcaattctaatcacttcaatcaaccccaatatcttgaacacgaatgtcagacatggatccgtccaaaaaagtggccgatagatatctgaagcgtgaagtccttggtgaaggtacctatggagttgtgtacaaagctattgatacccatacaaggcagacggttgcaattaagaaaattcggcttggcaaacagaaagaaggggttaattttacagctcttagagaaattaagctgctaaaagagctcaaagatccaaacattgttgaattgattgatgcattcccacataaagggaatctgcatctcgcttttgaatttcatggagacggacctagaagccgtcatacgagaccgaaatatttttctttcaccatctgatacaaaatcctacctgcaaatgacactaaaaggtcttgcttattgccacaagaaatgggttttgcatagggacatgaagccaaataattcattgataggatctaatggacagctgaaact

SEQ ID NO: 7981 - DNA, 129 bp, Glycine max
gtacgtccgcgacacagcaaccaccttctgcgtacctcgtttgccgccgccgaccaccacaacgcaccttcaccttcacctcacctaaccgttcccaacgaaccaacaaacctgagacaatgccgcgcg

SEQ ID NO: 7982 - DNA, 231 bp, Glycine max
cccacccgtccgcccacccttcctacggttgcaaaaaaacaacagcggggtttattccccacacttggaccaagcgggaagcgcagctgggggatagcctagtatcctttaaactcccagaaattattactgttgtgtctttaaagtaaatatcggatgcctcatctaccctaaagggggttcgagtaagcgaacgccaacccgtagagagcgcatacttgtgtcttcccc

SEQ ID NO: 7983 - DNA, 1086 bp, Glycine max
gacagatactctttacaattgcttgaacctctcagaagcaaatgaggattattcacagcctcgcatgtttggttctcaccttcatctccttcaatccttgtaaagcagaacaagcacaaactattttgaattccctcagcattgaccaaatcctacagaaaatatatgaatggggaaatggtgcacaagggttccaagaaggccagattcaaatttcaggccctatagtggtggcaggagtgctgtgtttcatagcttcttcaatatctagtgctggtggaattggtggtggtggacttttcttaccaatattaaccattgtggctggcctagacctcaaaacagcttcaagtttgtcagctttcatggtcacaggagggtcaattgcaaatgtcttgtgcaaccttcgtgccacaagtcctaaacttggtggcaagtcattgattgactatgacatagcacttttatcagaaccttgtatgctgctaggagtgagtgttggagtcatatgcaaccttgtgttcccagaatggttgattaccatgctatttgctgtttttctaacttggtctacctcaaagacctgcaacagtggagtggtgttttggaagattgagtcagaggagagaaggaaaaatgatggatttgaagggctagaaaaaggactattggaagatgagagttctgaagaaagggaagagggagttcaggtagagaaagaaaaagaaaaggtgaaaagtattgaagaacaggttatggttcctgaagaaaatataagggtgaggattccttggttgaaattagtggtcttactcttggtctggttctctttcttctccctctatcttcttcgtggaaacaaatatggacagagtatcattccaatggagccatgtggtgtgggatactggattatttcatcagctcatgtccctcttgctttatttttcactgcttggattgtatatagaaaagaaagccatcaagaccaaaatctcatgcaagaggactcatgcctatcctcaaatggaccatcaaacaagcttatttttcacatgatggcactgctagcagggatattgggtg

SEQ ID NO: 7984 - DNA, 991 bp, Glycine max
  unsure (1)..(991): unsure at all n locations
acgtggatgcacgctacgtaagctcggaattcggttcggggggaaccaaattcgttttgttttgtttcacgttccgttctgggagttgaaagaaagaaaggaaggatgggagtgacaccgaaaattgctccttcgatgctctcttccgacttcgccaatttggcttccgaggctcagcgcatgctccacttcggcgccgattggctccacatggacatcatggatgggcattttgtccccaatttaactattggcgctccagttattgaaagtttgagaaagcacacaaagggatatttggattgtcaccttatggttacaaatcctcttgattatgttgagcccttggcaaaagctggtgcttctggttttacatttcatgtagagacatcaaaagataactgggaagaacttatccaaagaatcaagtcacatggcatgactcctggtgtagcattaaagcctgggacccccattgaagaggtttatcctctggtggaagccggaaatcctgtggaaatggttcttgtgatgactgtagaaccgggattcggaggacaaaaatttatgccagagatgatggataaagtccgtatacttaggaagaagtatccatcacttgacatagaggttgatggtggtttagggccttcaaccatagatgtggccgcatcagcaggggcaaactgcattgttgctggaagttcagtgtttggtgcccctgagccagttcaagtaatacccttactaaggaattctgttgagaaagcccagcaaaccttgatacagtaaaaaaaaaaatgtcgttttaagttgcagtacacttcacaactttgcataaacaatatgcttaatgtttaacattttccataagttgaataaaagatcatgtgacttgataatgtttattcatatttctnnnnnnnnnnnnnnnnnnnnnnnnnnnnnnnnnnnnnnnnnnnnnnnnnnnnnnnnnnnnnnnnnnnnnnnn

SEQ ID NO: 7985 - DNA, 421 bp, Glycine max
gggagttgaaagaaagaaaggaaggatgggagtggcaccgaaaattgctccttcgatgctctcttccgacttcgccaatttggcttccgaggctcagcgcatgctccacatggacatcatggatgggcattttgtccccaatttaactattggcgctccagttattgaaagtttgagaaagcacacaaagggatatttggattgtcaccttatggttacaaatcctcttgattatgttgagcccttggcaaaagctggtgcttctggttttacatttcatgtagagacatcaaaagataactgggaagaacttatccaaagaatcaagtcacatggcatgactcctggtgtagcattaaagcctgggacccccattgaagaggttcatcctctggtggaagccggaaatcctgtggaaatg

SEQ ID NO: 7986 - DNA, 411 bp, Glycine max
gaaatttgtgagaatcaagataggttgagtgttcaagatgaattatgtgacaacgcaagtgataaatcattgatcttgctgaagtctgctgataattttgacttgcgaaatgaattaaatattgaagatagggagtctaataaatctgacagccaagtgaatggaagccctgacgttattgataaactgagttataattctgaatcatgtaatgactcaagtgacacttcagactcatgtgatagagatacagtatttaccaatagtggggagtctagtagtgactcacttgatgttgctgaaattcttagaaagctaagtagtaagtttaattttccccatgaaaaaaattggcgaagcaaggaaaaataagttttgtgttgctcggatttcaaagactaagtctataag

SEQ ID NO: 7987 - DNA, 481 bp, Glycine max
tcagtggttcaataaatatttaactctatattaaaattgaaaaatgatatttaatgcgataaaataattaaattttatgatatacatgcttatggttcatatttgcatttttcttcttcttcttttttgtatatacgaatgaacaaatatgattggaacatgacagtagaaaaaccatatatgagatagcgtgagagagttcaacctgcaaaatttttattattttatatattattttgcattacactttatttaacattatttccattttatcccaaaccactccaaaaaaacaaagccattgactactacaatttgttctgtcatatatggctatatatatgtacttttgcagaaccgcaattgcaaaggcaatatcctccaagactcaacacaggacaatgtgggcgatgagcacaagatggaacacaatctttgttggttttgcattgatcgcctcttgcactagcttgttgagtta

SEQ ID NO: 7988 - DNA, 550 bp, Glycine max
ggtaccgtacgtacatggcctacgtcgatacggcagcgttttgaggtattctgcaattgttaccgaactcattccccttttttccgtcgttcttctcaatttgtctgagaaattcgtgaaggaacctcactctgttgctgcattcccccatggcttctgcttcagattttgcgttagcggtttcttctgaactcgagtcagttttgaggctggagactgttaactactttgttacgaggaggccatggcttgatctttatggagttaacgtgagacctgttgcgccagttgggagtgctagtaggaggccttatgtggatcctgcacttatacatcgttccttacctgatgagctgctttttgaggtttttgctcgaatgactccatatgacttggggagggcatcttgtgtatgtcgaaaatggaagtacacaattcgtaaccctgtattttggcgcaatgcatgcttgaaggcttggcagctatttggaattgtagaaaactattagatacttcaatcaaaatatgatggctcatggcggaaaatgtg

SEQ ID NO: 7989 - DNA, 429 bp, Glycine max
gatacaatacaacgattgaaagtccaagtcttggggaatttccaatttccagctccaccaagatccctcttttcctacaaacccatctctctttcatccctccaatcttcatcctgtgaaaaccgcgaacgaatcaacaaatgggtggttgcgtgttgaagctagtagattccgttctgttcctgttcttcctcctaatagcggtggtggctcctctgatcgacgctcaaacctgtcttcctctctcttacttccccgacatcctcgtccaactcaaggaacagtacaccaatgactacggcgattaccttgtcgcagaaaatccgcacttttttgtacgccttgtttggcttgagcttctcttccaatggccccttgcactcctcaacctctacaccatgctcacttccaggccttggttcaacaaca

SEQ ID NO: 7990 - DNA, 465 bp, Glycine max
ggagatagagagggtttgttttgttcttattgtttgtgtgattgagaagaagagagcgtgaaggagaagaagagagaggaatgggttcaccgacatcaaggattgtgttccgtattgtggtggtggcgcttctgcttcttcttctcttctacattggtcgccctctgtattggaaaatctccgccaccgtccacgacatccgcaacaacaagcaaactgtcagacaaggtctttcccaaatcgtcattgaggctcagaaatcggtcggttggtatcacgatgagtccgactcaggggttcgtgctaactaccgaaaactgcttcttcataagcccatttccacagtttttgcttagttatagttagataaatacatgtcactcaagattttctttctgctctttttttttctcctcacgattctgtgatttgcatatctggtttttgtcttatatggacaataat

SEQ ID NO: 7991 - DNA, 380 bp, Glycine max
gtagtaatagttcttatctgtgaatcttgtgttctcatgttctgctttcactgatcaagctttttactcaattattgaagccacgtgatagaatttaacataaattgaagtggggtctgttatagtaccatatctgcttttctacacaatgtgacaacaggaactttcacatgtcacaattgtagattaagcactcatgcagtccacctttcccaaatgatagctccctagctagtggcagcatctcaacttaaattcggtcatatagatgttgatatatatggcaactccatcaagtgtaaagtctttcaatataaaataaaatactatgtaatttcttttgtttcaccttttttaagtactcacgggttgatatgctc

SEQ ID NO: 7992 - DNA, 536 bp, Glycine max
gggaaattagacataagaaatgcgattatagagagcgaatagaatattgttcttcagaactctgtaggcggatctcctttagtcctttgtctccgttccgtcgtcaaccctacctttggatctgcgtttggccttcaggttttgaagtccgaaggacgaagaagaagagattcctgacagcgtaatcatgtttggtgtcgtaaggcgaagggttgcttctggcagcccgtctccttggttgctaggtcagtcagctcagaaaatccggtctggcccatcagtttctgctagagcttcttccattgtggaaaaagagattgtatttcgttcaggcggatgtggatttgtccagaacttcagtcatataactcctggaagctggattaattcaaagcctatgagggtggtcattcatccagaggcaactgttcgaacttgggggcgtctattttcttcagaaagtggagacacggttgatggtggggttcctcctttggctgaatctatctctgatggaactctggcacaatttttga

SEQ ID NO: 7993 - DNA, 473 bp, Glycine max
atttgtccagactttaacaaatctttgtttatggggagccaaccatgtttgtttgacatagtcaacaaacattggccatggtgagcaagcaatttcaaccttcataaggcagtcattaaactcttgctcaaaaggacaatcctccagactctcctatgcttccatgacataatctcatacattttttttttacccacaagagttttacattttgtcgtcacattcttattaatgtgaaaccgactcaacaggttggttgactcaaggaaaatagtttttactacattcatcaatgctgaatctttgtcggtaacaataacttgagggattgtatcacgtctcagaaaattacctcgaaaccgttccagagcccatgttggatcaagtggcctcggaataattaagaaggaggggttgaattaattattaacgaacctttactaattaaaaatctatccttcttaatattacct

SEQ ID NO: 7994 - DNA, 389 bp, Glycine max
gattgaaggtcaacttcaaatccctaatctctcaattacaactgcaactacttttccctccaatttcgcttcaccacacatgcatggattctttgattttcatcttctctcgcgttttctgattctgatcttagggttccttatcccccaactttattgcttcctcacgcgtctttatctttttttcttttcgttgatccaaccttttccactaaagcttcgattttttgctttttattttttttttatcttttttgtagtttgtttgtattgtttcgttagggaattaggaatcttcgattttcaagcgccgcttatatcctttgtttgctggtaattaataagggtccggtggtgtgtaggtggctgaagtttcgtgagaattttac

SEQ ID NO: 7995 - DNA, 436 bp, Glycine max
gaactacttttccctccaatttcgcttcaccacacatgcatggattctttgattttcatcgtcccccgtttttaatttttctccattgaagatagttgttaacagagtgatttgggagcttttgatatgtcgagtggatccgtgagacgggtttcccgtcaagatatccagctggtgcaaaatctcatagaacgatgtctacaactgtatatgagccagaaagaagttgtggaaacactattagctcaagcaaaaatagagcctggtttcactgaactagtttggcaaaagcttgaagaagaaaatgaagaattcttcaaggcttattatgcaagattggttttgaagcagcaaataatgcaattcaacaaattgctggatcagcaagtgcaattaatgcagttacactcaagtactgttgcatcactacctacat

SEQ ID NO: 7996 - DNA, 669 bp, Glycine max
gaaaccagcaattgcaggattgataaacttgcatgatctcaatacgagctctctacatgcttactatgatcctatgaagttatgattttaggtgcaatccagattgggacaatgtagcaagattgaaagtttggcaaaagcttgaagaagaaaatgaagaattcttcaaggcttattatgcaaggttggttttgaagcagcaaataatgcaattcaacaaattgctggatcagcaagtgcaattaatgcagttacactcaagtgctgttgcatcactacctatgtctaacgggtcacatatccctgcagtgacatcactacctaactctaatgggtcacatatccctgcaagattaatggcccttctagcatgctttctgctcaaagcgcaaacatgggtctgatacaaggaatcaatggtggtggaatgatcaaatctgagcctggatattctggttgttctccttacatgtttggtactgatggaaatgtcctggagacacgcccaactattggtggtgcttcagtcacatcattcactaatgttgagtccaactcacattctctgaatgaggtggtcctagatccagacacttcttcatttggatttctggggcagattcccagaaattttagcctttcagatctgactgctgatttttctcagag

SEQ ID NO: 7997 - DNA, 641 bp, Glycine max
gctgcgcactcgtcgtgtccctctccacacacgttttccttgttccgtggtggcacacactataatctcatggaaaaggaaaacatgctcaaaacgcctccaaaagttccaattcaacctcgaacacccgaacctgaatgcaaaacaccagctccagttcaacaacaagaccccaatgatcataataactcctcaaatgaattgcgcaaacctgttaccccagatcgtcttagagtccccaaggctttcaaatacccagaaagatatacaagcccaacagatttgatgatgtcaccagtaaccaaaggccttcttgctagaactagaaggggtggtggtgcggtgttaccacctgggggtaaaaatcgaccaaagattctagacatgcccttgaaggatgtcggtcctatccagaacaagcttccaatgcttattgatgagaagatcaactcagcttgaaggattcaaaggacttttgttcaacatgataattcatttgacagtggttcaaagggagtttaaagatgatgatgtaataacaataacatcacacagagagagaaagagagagtttatctccttgttcccatgttaaacaactctgttctgagattataagcttatgaagtttgtgatgctca

SEQ ID NO: 7998 - DNA, 486 bp, Glycine max
actggacctaggcaagtacgtacaacaatattaaacaacgaatctttgttcaattgcgaggcaaagcaagcaaagcacaacacaagatggggatacttagtccagaacagctccgattcttcaactctcaaggttatcttgtgattgaatctttcgcatgtagcgatgagattgagtccatgatgaagaggatggagcagttggtagatgactttgacccttcttccaccgcctctattttctccaccaagaaccagcaacagtcgactgataattactttttcgacagcgccgagaggatttctttcttcttcgaggagaaagcatttggtaatgatggtaagttaaagcagccgaagcaattgtcccttaataaagttggccacgctcttcatgagattgagccagcattcaaaaagttttcttcttctgagaaagtttcaagtttgatgcgctccttaggttacaagagacctgcagtcatgc

SEQ ID NO: 7999 - DNA, 566 bp, Glycine max
ggtcgtaaccctaaaatcagaaccagtggcactgacacaaaaaatatctgttcctctcgatcgaactcactcagtcatttccctctctgcgcgcgcgcttctcattcacagtcacagttcatggcggaggaagaagttgtggcacccgctgctagccccgttccctctgataacaaacgcaagctcgaagatctgcaacccgaaaacgccgaatctaatgccaactccatctccatctccgacgccgtgaacgccgatgacgccgccgtttccgccgagaccgagaacaagcgtctccgcctcgacgaccaccaggatggcctcgctaatagagcaaggaaaagagacagaggaaagatccgctctggagaatgtcactcccgagcatgatcaaactatatccgaatatccttctttggaggcaactgctaatgaacaaacatcagctgagattagcgagccagctgattccaaagaacctcctgtagaggactctggacaagaaaatgcagaggagccttctaaagaaactcaacaacaatctaaggattcaaccgagcaagatg

SEQ ID NO: 8000 - DNA, 677 bp, Glycine max
gataacagacctaatcaatcagtcatacgaatttccagaatacaaattcacactctctttggctctggtgttgtgttgtgttgaggtacttgagttgtgaaaatggtgtcgtcgcaggttgtgaatacttacccgttgtccagctacacgttcggcacgaaggagcccaagatggagaaggatacctccgtcgcggatcgtctcgctcgcatgaaagtcaactatatgaaggagggaatgaggaccagtgtggaaggaattttactggtacaagagcacaatcatcctcatatacttcttctccaaattggaaacacattctgcaaactcccaggtggtcgtctcaaaccaggagagaatgaaaatgagggcttgaagagaaagttgactagcaagcttggtgctaattcaccagctcttgtgcctgactggcagataagtgagtgtgtagcaatctggtggaggccaaatcttgaaaccataatgtatccatactgccctcctcatataacaaaacccaaggagtgcaaaaagcttttccttgttcatttatctgagagggaatactttgcagtgcccaaaaatttaaaacttcttgctgttccattgtttgaactctatgataatgttcagagatacgggccagttatatccactattcctcagcagctatccag

SEQ ID NO: 8001 - DNA, 335 bp, Glycine max
acttcactcactcactcatgggctgcgtctcctcaaaacacatcaagaaagacctcaagcaagaagaagaagtcactgtcaccaatggcggcggttacgtgaaccacgtggtatccctgacttcctccacctatggagcactaatgctggacaaggagaaggagcaacttcaacttcaacccaccgtcgaagaagaatccaaaacatcccctcctcggattcgcgaagaacccgaagtcatcaacgcttgggaactcatggagggtctcgaagagggagtgcccatttcaaataaccccatgaaaagccccaagtccacacctttccttcgcgga

SEQ ID NO: 8002 - DNA, 389 bp, Glycine max
aggagtgtaggagtggctcttggtttgcacttgggtggtacctttctctctactacttgtgttgtgttgtgtgtgtgggggttcagttcagcctttgattccgatggatcttcacggaaacccccacaattctgggatgaagaaacgaaagccggagcaggatactttgatcagtgatcatggaaattctgtgagtgtgggagagtcatctgggagtggtgatctctgcaagagttctacctcaggatcactgaattcaaacaatcaaaatggttccaattctgatatttcatgtcatgatgatgaggatatgattgatgatgatgcagatatgattgacgatgacggagatgaagatgctgattatgcttttgattacaatgaagatg

SEQ ID NO: 8003 - DNA, 283 bp, Glycine max
cttaggtggtatctttctctctaagcttgtattgtttaacttgtgttgtgttgtgttggggttctgttcaattccgatggatcttcacgaaacccctcacaattctgggatgaagaaacgaaaaccggagcaggacactttgatcagtgatcatggaaattctgtgagtgttggagagtcatctgggagtggtgatctctgcaagagttctacctcaggatcactgaattcaaacaatcataatggttccaattctgatatttcatgtcaagatgacgaggat

SEQ ID NO: 8004 - DNA, 318 bp, Glycine max
gaaaaccgagtgagtgtgaccgttcaacgcaacgcaatggtttacataacttcgtgggatgaattcgtggagcgatcggttcagttgttccgtgccgatcctgattctacgcggtatttgatgaagtaccggcattgtgagggcaagttggtactcaaggtcaccgataatcgacagtgtctgaagtataagacagaccaagcacaagaagccaagaagatggaaaaacttaataatatattctttactttgatggctcggggaccagaagtggatccatcagaagtcactgggaaagaaccactggatacacatacg

SEQ ID NO: 8005 - DNA, 1133 bp, Glycine max
ttcttttgtatgtcatgagagagagaaagggagagctgtgagcagtaaggaaggaacgactcagattgcagaaacgcagcagcagcgtgttggagagtataaagagagagacggaacgcattagtgaagactgaggtttctcaaaatctcaataatccctttgttgaaaccaaaacgacgacgcgtcacttcactttcatgtatctgcgtgtctcgtcgtttctacttgctgttgctgttgctgttgttgattagcctcattcactcactcactcactcactcactcgctcgcaaccacaaccttggatttcaatttttttcattcatggcttcgaccaccacctcctccctctgcacgtggctcgtcgctgcttgcatgtcagtcacgtgcgacgccgaccgcaccagaacccctcacgcaatgttccgctcctccaaaaagtctcgctactctcaattcaacgtttgtcgatccactcattctggtaaaacaatggctgtagctttgcaacctacccaagagatcacgacaataaaaaaaacctcccacgaagcaaaggcgagtggttgtgacagattgggtgtggttacaccacttgggcatgagccagatggcttctacaataatttgcttgatggtgctagtggcataagcgagattgaaacatttgactgtgcagaatatccaacaaggattgctggtgaaatcaagtctttctcaactgatggctgggtagcaccaaaactttctaagagaatggataaatttatgctctatatgctgacagctggcaaaaaagccttggttgatggtggaattactgatgatgtaatggatgagttaaataaagataagtgtggagttctgattggctcagcaatgggtggcatgaaggttttcaatgatgccatcgaagctttacgattctcatataggaggatgaatcctttttgtgtaccttttgcaacaacaaatatgggttctgccatgcttgcaatggatctgggatggatgggccctaattattctatctctacagcttgtgctacaagtaacttttgtatattgaatgcagcaaaccatatcattagaggtgaagctgatgtgatgctttgtggaggctcagatgct

SEQ ID NO: 8006 - DNA, 489 bp, Glycine max
ggagagtagaaacaaaaagaaaaaaaacattgtaagcgctgtaacagcaggtttcggaggcttttggggtagccgacgagacacagtggattccttaattctccatggatatggagatgaaagaaggtgaagcccccgtgttgtggttcgaaacctctgactctgtctgtcgtcgacaccagtttgaacccgatggtcaactctccgtagtgattgtcgatgattccaggcccttataccaaagggtggctggatctttcatgaataaatttttcccctcgggatatccgtgcaacatgaatgaaggctatcttagatacacgcagtttcgagctttgcaacatgttaccagtgcagcactatcggtgctatcaactcagtccttgctattcgctgcagggttgcggcccactcctgcgcaagcaactgctgttagttggattttaaaggatggaatgcaacatgtagggaagctaatatgtagcaatt

SEQ ID NO: 8007 - DNA, 392 bp, Glycine max
cttttggggtagccggcgagacacagtggattccttaattctccatggatatggtgctctgttctgtacccatcatctctctttttctttttcctttttggtttattagtgtgccttggatttgatttttgataagcacaggggaagaaagaaggtgaagcccccgtgttgtggttcgaaacctctgactctgtctgttgccaacaccagtttgaacccgatggtcgactctccgtagtgattgttgatgattccaggcccctataccaaaggatggctggatctttcatgaataaatttttcccctcaggatatccgtacagtgtgaatgaaggctatcttagatacacgcagtttcgagctttgcaacatgttaccagtgcagcactatc

SEQ ID NO: 8008 - DNA, 1190 bp, Glycine max
accgtgaacatcgcaaatgcctaatgctttgttggttacaattatgctttactttatttaatttactcctcgtgaaaaaagtgagcagaagcgtagaacttctaccttattatttaaactgctggttgcttgcaagcaagaaaccgggagagagaaaaaggagaaccttcttttctctctgttttgttgttattcttatttcagacctaaaaaccaaaagcaccgattctgctttctagaattacatcatcgtatcaagaaaaccttggaactacacgaaaatggtgtcggcgaacaaggagatggtcgtgtactgcttcgacaccctcctcgctcactacaacagcacggaagctccttcccctgccttcgatcaggctcaacatccattgtttgttacatggaagaaagtggtgaatggtggagatcctcgtcttcggggttgcatcggaactctggaagcacgcagcttgatcaatgggctcaaagattatgcactgaccagtgccctcagggaccggagattttccacccatacaggctaatgagctgccgcttttggagtgtacagtgtctcttcttactgactatgaagctgctaaccattaccttgactgggagatagaaaagcatggtataattattgaattttctgatcctgtctataacacaaggcgtagtgctacatacctgcctgaagtggctgccaatgaaggttggacaaaaacagaagccattgattccttgatacgtaaagcagggtacaatggtccaataaccgatgaacttaggatgcaaatacagctaaccagataccaaagcaccttatttaccatgcactatagtgagtacgtctcctatgtgaaggagagaagaggtgaagctcctattcttgcggctaaatcacccaactattgaatatgttgcctacctttcttgaggctgcataatttctttactaaaaaaaagaattctgttttcaaatgaattacataatataaaaagaaaacccacttgcctagggtcggaatcaatttgtttgtctaacccaaactaccgaagtgattggtgcaactttctatgctctccaaatttgtgtgcttttgaggagactaagaacattggacttagttcctaagaatgtcctctaccactgcagtttatgaaactgctgcactgttgaactgttt

SEQ ID NO: 8009 - DNA, 1426 bp, Glycine max
ggacaccaagtcctgctcttcttccagacagcagcagcaacaacaaacaaactctttctggattcagtttttgatgtgaaaatggcagtgactcttacatcaacactctttctggctttgctatttgctgcttcagcttttgctgctcttcagcctagagtacctgaagcttacctccaaaatgggaactttgaggagcagccaaaccctaaatacctgaagaaaacaaagctctttggtaaatacgctttgcctaaatgggagatcaatggtctggttgagtatgtctctgggggtccccaacctggaggcatgttcttcccagtgactcatggaatccatgctgtgaggcttggcaatgatgcctcaatctcccaaagcatcaaggtcaaacccggtcaactgtatgctctaattcttggggcctcaaggacttgtgcgcaggatgaagttttgaggatctctgtgcctccacagactggtgatgttcctttgcagaccctttatagcctcaatggtgacgttattgcttgggggtttaaggccacttctagtgttgtcaaagtgactttccacaaccctggagttcaagaagatccatcttgtggccctcttttggatgccattgctatcagagagttctacccgccaatgcctacaagagttaacttggtaaaaaatcctggctttgaggagggtccattccccattttcaactcaaccaacggtgttctgctcccgcctcaacaacaagatggcttctccccactccctggttggattattgagtccctcaaggctgtgaagttcattgattcaaagcatttcaatgtcccatttgggctgggagcagtggagcttgtggcaggcagggaaagtgccattgcccaaatcatcagaacagttaccaacaaagtctacaacatcacattctcagttggagatgccaaaaatgggtgccatggatcaatgatggttgaagcatttgccgccaaagataccttcaaagctcccttcaaatctgaagggaagggaacattcaagactgtaagcttcaagttcaaagcaattgcaccaagaaccagactcactttctacagctccttctaccataccagaattgatgactatggttctctttgtggccctgttattgatcaagttatagtgttccctgtggcctaaatatgagttccattccatctttactataatatgtagtaattgagatttttgcaaatcacttgagcttgtcttttttataattgcaagaagatgaaagatattctcaactattactgaatcttggtatatttctattttccttttctggggatgcatgcgagagaccagttttaatgtagtttcatttcttcatcataaaatatggttgaggtcattagtaacataagattagattcagtcc

SEQ ID NO: 8010 - DNA, 484 bp, Glycine max
gattggaatgtggaaagagtctccgcagtcctcaccagaagcaaaaagactgggttttggcgttaacctaagcgaagagagagagaggttgaagaaggtgaattgaatggcttcctcatcctcttatcctcggacggaaggtgaagaagagtatgggtctgaatcgggatgggtggatgctcgaagttggtgcgatcacctggcatcatccttatcggaggatctagggcagattccggggcctgatactccgtgccagacctgccaacacccaactgaaaactggttgtgtctgtcctgtaagcaggtcctctgtagccgttttgtgaacaagcacatgctccaccattctcgtgacactaatctcactcactgcgtcgccctcagtttcagcgatctctccgtctggtgtttctcctgcgacgcttacttggatcctcaactcattccccaactccgtcctcttcatcaactcgcctatatt

SEQ ID NO: 8011 - DNA, 427 bp, Glycine max
ggggtacactcaccacacactacacactagtttgtgtttttcgcgccactcagttattcatttagaaagctactgctgagttcacaagtttctcaagcttgatggggacacaaaagtctaatatgtttgatgcacctttcaaatacatggtgcctgaagataaggaaattcccgacagacctttgccatcacattggactccttctatgcaggcatataacacttctgggtctactccaactccctttttaaatcaacaggcagctggttctcacatgcctctctacatgtgggtaaatcaggtaaacaacacactacttcaatccgatgctttgcatgatccaaggatgctctccagtaaacccacagtagctggggatgctgtactggctttttcagaaatagtacacaaggacttttttttttt

SEQ ID NO: 8012 - DNA, 616 bp, Glycine max
attatttatcatctattcacattatactacccaccttactgctcctcctcctctctcccagatttggaaccattcaatttgcaattccatctatcttcattcttctcctccttatatattccactccactgggtaccctctcccccttattcctcacttctcttctcttctcttctcttcgagggtacccctcctcgcagatccgatccgcacccttcactaaacccattattattgattattgattgataataacatttgggtttcattttcattccaagttgttgcatttttcaacatgtctttagctcactgctgaaccccttttctttctttctttgcccccttttgtccaaacccccaaaacaaaaacaaaaaaaatgatgatcaacaaaacgctttttctcacttatgtctacttgttcatctacatcctgctctcttccggcgtcattttgtacaataagtgggttctgtcgccaaaatacttcaactttccccttcccataacgctcacgatgattcacatggccttttctggggcagtcgcatttttccttgttcgggtctttaagattgtgactcctgtcaaaatgacatttgaaatatatgcaac

SEQ ID NO: 8013 - DNA, 213 bp, Glycine max
aaaaaaacaacaaaaggaaaaatacaaggtgaagtcaatcatgtcttcaactaacttgatggcaaggccaagatataacagttatagaaaaaaaaaggctattatgcttaaaaaaaaaaaaaagaagaatattacgaaactgtaaaataaagctcaaacaaagcaagttcaaccacaaaccagacttttaataaataacgtatattttctccc

SEQ ID NO: 8014 - DNA, 843 bp, Glycine max
gatgtccccacttatctaacccagtaaacgtggaacacacctgacacctgatccgcgagcgagggtttgtgaagatgacgacgattcgcaggttttgctgcaacgatcttcttcgctttgccgccgtcaatctcgaccatctcaccgaaacattcaacatgtccttctacatgacctatcttgcaagatggcctgactatttccacgttgccgaaggccctggaaatcgaatcatgggttacattatgggtaaagttgaggggcaaggagaatcttggcatggccatgtaactgcggtgaccgttgctccagagtatcgaaggcagcagttagccaaaaaacttatgaatctgctggaagacatcagtgacaatattgataaggctttttttgttgatctctttgtgagagcgtcaaatgcaccagccatcaagatgtatgaaaagcttggctatgtgatttatcgacgagtgctacgctactattctggggaagaagatggtttggatatgaggaaggcattgtctcgtgatgttgaaaagaagtccatcatccctcttaaacggccggtcactcctgatgaattagagtatgactaagtctgcgtttcatgcaacagagttgcatgagcttattgtgtctcaaagtaaaccatgttgtgcttgataggctgtcaagttgaaaggagttgaacatattatgttggaacttcgaaggtttagtaaatgaaaaatgatcctagaagataatcttgctagtaaaatgaaaaatcttgtcttgtatccaatatgttataattaaatatcacttgcgcgtgttatttcattaaaaaaaaaaaaaaaa

SEQ ID NO: 8015 - DNA, 653 bp, Glycine max
gagtcacagtagggttaccttgcctcgcaaacgcagttgctttgctttgcaggtcgcaaaacgccacccttctctctctctctctcgtgatcctatctatctgtctatcatttaatttaatttcattctcttcctatcgaatctctctgcaacaccagcatccctgcatcaatgggcgcttctctgccccccaaggaggccaacctcttcaagcttattgtcaaatcatatgaaaccaaacaatataaaaagggtctcaaagccgctgatgccattttgaaaaaattcccagaccatggagaaactttatcgatgaagggtttgacattaaattgcatggatcgtaagtccgaagcatatgaacttgttcgtcaaggattaaagaatgaccttaaaagtcatgtgtgctggcatgtttatggtctcctttatcggtccgacagagaatacagggaggcgatcaagtgctatcgaaatgcactgagaatagatcccgacaatattgaaattcttcgtgacctatcactcctacaggcacaaatgcgagatttgtcaggctttgttgagacaagacaacaacttttgactttgaagccaaatcatcgcatgaactggattggatttactgtagcccatcatttgaactctgaatt

SEQ ID NO: 8016 - DNA, 1790 bp, Glycine max
  unsure (1)..(1790): unsure at all n locations
ctcgagccgctcgagccgctcgagcggtatcaaaatttttgaacctgaaaattgttattattttgatagggtttacagcaaatgcagcatagcctgcctcgtcacaaaatactgaacgccgcagctctgtggttgatcgacgcattcttcacttcaatcccacaatgtctataacgcacagcctcaccacttcactctcttcttcttcctctgctttcttagctccctcttccttcaattccagaggacaggtttcgttgcctgtgaagagcgtgagcatttgcaaatgcgttgccacacccgaagctgagactgcctacaagacaggggtcaatcgcaatccaaatatggggaaacttcaagctggctatctctttcccgagattgctagaagaaggtctgcgcacttgctgaagtaccctgatgctaaagtaataagccttggaattggtgatacaactgaacctattcctgaagtcataactgatgcaatgtcaaagagatcacatgcattgtcgactatagaaggatacagtgggtatggagctgaacaaggtgaaaagccattaagaagggcacttgcttcaacattttacagcgatcttggcatagaagaggatgatatatttgtctcagatggagcaaagtgtgatatatctcgtctccagattgtctttgggtcaaatgtaaaaatggctgtgcaagacccttcatacccggcctatgtagactctagtgtaattatgggccagactggcctcttccagaaggatgttgagaagtttgcaaacattgaatacatgaggtgtaatccggaaaatggtttcttccctgatttatcttcaatttctcgaccagacataatttttttctgttctccgaacaatcctactggtgctgcggcaacaagggaacaactgacccaactcgttcagtttgctaaggacaatggttctatagtaatccatgattcagcttatgcaatgtatatttctggtgacaaccctcgctctatttttgaaattcctggagccaaagaggttgccatcgagacttcatcatttagcaagtatgctgggttcactggagtccgattgggttggactgtggttccaaagcagttgctgttttctgatggatttcctgttgccaaggacttcaaccgtattgtatgcacttgtttcaatggtgcatcaaatatttcccaggcaggtggtctggcttgcctttcaccagacggtcttaaggctatgcgagatgttattggattctacaaagaaaataccgacattataatggagacatttgattctcttgggtttaaagtctatggagggaaagatgcaccatatgtatgggtccattttcccggccgaagctcatgggatgtattcgctgagattctcgagaagactcatgtggttacaactcctggcagcggttttggacctggtggtgaaggtttcatcagggttagtgcctttggtcacagggaaaatgtcttggaggcatgcagaaggttcaagcagctatacaagtgaatttagaatttatatctcatttggtttcaagagttgtattctcttggactgaagctagggtctgtcttatttaaataatgcagttgattttccttggaatttagattaagatgtaaagacagtgtttatcaattgaggacacgtttattttgctattgtttgctttatcttctatgccccaacttagatgatgttgtnnnnnnnnnnnnnnnnnnnnnnnnnnnnnnnnnnnnnnnnnnnnnnnnnnnn

SEQ ID NO: 8017 - DNA, 400 bp, Glycine max
ggtttagaacaaacataagtacattatctaaaaaacatttaaccaacagacacactaacgtactaaagtgatttatgattatgaagaaatgccttttttattatgtaaatgccaattcgttatggacaatttggcatggagtttaccctttcttgtaaatgttactttttgtaggaaatgggaattctcaaaattaatgaacctgcgttggattttgatctgcaacagttcttttcgtgttatttgacacatgcaaaggaatagagatcgcggtagtaaaaagtattaaggaggttggtattaataatgtaatgtagggatggtcatgtgaaattgaccaacgcagaactgcattcttttctatgttaatggctctattaataaagaataaattcctctg

SEQ ID NO: 8018 - DNA, 440 bp, Glycine max
gagaacaattaggaagacagagaaatcggacaaaaacctaaacctaaaccttaccctgcaaagtgttgaatttacagtgtagtagtaaagtgagtagagaaatcgaagttgaaaagataatagatagtaacagcaccattcaatcactcatcagagatggctaccgttgaaagtagaaggaaatcagtggctttggctctctccaagtacttttcattggatcctagtgttgttccagccgatagttcagacagtgatattaagagtctttacctgaacatcatagcggtttctggacatggggttaatcactctgatgaggtgttgaagtgggtagcatttgcagaagccttccccgtggcccttgatgcatgctttgagaatctcaagagattaaatgatgaactgtctggaaaggctgtgcttctgggcaatggatt

SEQ ID NO: 8019 - DNA, 498 bp, Glycine max
ggactccctctattattatcattattcttgcggtcttcatctctccaatatctctgcacacacaaaaacagagtttaactaggaatcaaccaaaatggacaaagttaacaccaccaacaacagcaacagcaacagcaacagcaacagcaacaacaactgtgggttcatgtcgtgcgacaaactggaccgagtggccaactgggtcggcgccaacgttgcctctgctttctttgcatccttggagcggtgctcttgcatcaacctcagcatcaaagacaacgaagatgacaccaacaacgatgatcgccctctcttcctctctcaccccactactcctttttcctccaactccaacgttcactcttgatcctatgattcctgtgttcacttgttaaaaaaaaattactcttttctttttgtgttttgtgtaattcgtggatcctgaattaactttcctgtcatgaatatatgggaatttggtgacaaaaaaaaaaaaaa

SEQ ID NO: 8020 - DNA, 608 bp, Glycine max
tgtccctccttcccaaaataatacaaaagccaccaccaccaccatctttactctttactctttactctgccccgaaagtcacatttttcttttcttttctttttctctgaaagatctgtgactattattattattattattatttctgatttttgtgggaaaatggctgactgggcaccggtgttgatcggggtggtgctgttcgtgctgctccaaccggggctgcttttttcctttccgggaaacgggaagcagctagagtttgggagcatgaagaccaacggcaaggccattttcatccacactctcatcttcttcgccctctactccatcctcatcctcgccgttaaagtccacatctacaccggctgaaccggttcccgggcgggatctcaggtatcatttggtttggtttctgagaaatgaaaggaaagaaaaacaccaccattgctgtaacaattgcctgttcttcttcttgtgttatccttttatggaaataaataaaaaaagcaaagatttttctatttatttagtaatggaaatgcatagatctgcctatcttcggtgttgatgttttacttttgattgattgaagtgtagttttgggt

SEQ ID NO: 8021 - DNA, 650 bp, Glycine max
aattaatcagaaattatcgttaacatcaattttaaattttaaagtaattattattatagtgaacaaaattatcataaaaatatcagtacatgcattacttcatatatttattattttataaactttatatacatatctatcatgtttatgcatcctaaacatgtgaaatatttgatacgtatatcatatttgtgcatcatatagttgatgatactaacgtttttgattcaatcaacaaatcatgaagatatggaagaactggaatgtacaagaccttgatgtttggaaatccaagtgtaattgtgacaacacctgaaacatgcaaaagggtgcttacagacgatgataaattcacaactggttggcctcaatctactatagagctccctggaaagaggtcatttatttcaatgtcttatgaagaacataagcgccttaggcgtttgacatcctcttcaatcaatggcatggaagcactgtccctctacttgacatatattgaaaaaaatgtgaaatcttccttggagaaatgggccaacatgggacaaattgagttcttaactgagatcaggaagcttactttcaaaatcattatgcatattttccttagctcagagagtgaacatgttatggaggctttggagagggat

SEQ ID NO: 8022 - DNA, 448 bp, Glycine max
aagagagtgaggtgtgagttgagtctgtgatgataatgatgatgatgatgtgttccatgtggatgtgggttgtccttgtggccattgctggtgcccttttagtcctaagatctatcctcaagaatgtaaattggtggctctatgaatccaaattgggtgtgaagcagtactctttgccaccaggtgacatgggatggcccttcattggcaacatgtggtcctttctcagtgctttcaagtccaaggaccctgattccttcatctcctcctttgtctccagatttggaagaactggaatgtacaagaccatgatgtttggaaatccaagtataattgtgacaacacctgaaatatgcaaaagggtgcttacagatgacgataaattcacacctggttggcctcaatctactatagagctcattggaaagaggtcatttatttcaatgtc

SEQ ID NO: 8023 - DNA, 562 bp, Glycine max
  unsure (1)..(562): unsure at all n locations
accggttgggagatccaggcttgagcacggcgtccgtacgctgacagaagcgtctagaaggaaggaagggagggaagaatagaatgggatctggaagtggaaaacacactggagagttcttcaggagaagggatgcatggaggaagcatccgatgctcaccaatcagctccgccacgccacccctggccttggcatcgccgtcgtcgccttcggtatctacctcgtcggcgaacaagtctacaataggctctatgctcccgatcctcattcgatttctcacgtgaaagccggggatcaccactaaacgtttggacggacgcactccattccatcatcacttaataagcttgctagcatgttctcgcagcctttaatgtttaaatttcagaccgtgttcgcttctttggcactcactatgttgtcttgtatgcctacattttatgccttcaatttgcattcacaatgaaactcaatttactttaaaaaaaaaaaaaaaaaaaaaaaaaaaaaaaaaggggggccccccctttttttnnnnnnnnnnnnnnnnnnnnnnnnnnn

SEQ ID NO: 8024 - DNA, 268 bp, Glycine max
cgggtctcgggagcccagtaaggtgcgaaggaaagaaagaaaagcaaagcaaagcgagtgggtgaggaggaaggaagggagggaagaatagaatgggatctggaagtggaaaacacactggagagttcttcaggagaagggatgcatggaggaagcatccgatgctcaccaatcagctccgccacgccacccctggccttggcatcgccgtcgtcgccttcggtatctacctcgtcggcgaacaagtctacaataggctctatgctcc

SEQ ID NO: 8025 - DNA, 476 bp, Glycine max
cctccgcgtccgaacatttgcggttctgcctgcaaattttcttcccctcaatctatattactcaggtggtgttcctgttcccctcaagcacccctgagattcattcccaaaaagcttaaaaaattctattcaattcaaattctaaatttaatttccatttcgttttcgttttctgttttgatttgatcttccaatggcgtccgatggcttcaccgacaagaacaccgtgttcagaaagctcaaggcgaagtccgaaaataagatgtgtttcgattgcaatgcgaagaaccctacctgggcgtccgtcacgtatgggatcttcctctgcatcgattgctccgccgttcaccgcagtctcggcgtgcacatcagcttcgtgaggtctacaaatttagactcatggagtcctgagcaactaaaaacgatgagctttggaggaaacaatcgtgcacatggtttctttaagcaacatggtt

SEQ ID NO: 8026 - DNA, 450 bp, Glycine max
caacaacatttgcggttctgcctgcaaattttcttcccctcaatcgtatattgctcaggtggtgttcctgttcccccccaagcacccctgagattcgttcgcaaaaagcttaataagaacaaaaaataaaaataatattcttcgttattatttcatttcaatttcgttttcgttttcgttttctgttttgatttgatcttccaatggcgtccgatggctttaccgacaagaacaccgtgttcagaaagctcaaggcgaagtctgaaaataagatgtgtttcgattgcaatgcgaagaaccctacctgggcgtccgtcacgtatgggatctttctctgcatcgattgctccgccgtacaccgcagtctcggcgtgcacatcagcttcgtgaggtctacaaatttagactcatggagtcctgagcaactaaaaacaatgagctttggaggaa

SEQ ID NO: 8027 - DNA, 259 bp, Glycine max
atttctatacaacttgatttggtcattggtgtgtggacattgcaccccaaaaccaaaaccaaaaccacattgtcattaagccataccgttaaaacttaaaagggtgtgttttgagtttcacaatttgctcccttcttttcatccttttaccactctttcatcataaattggagtcgcctatagtttcttatatactacaaaatatagaagaagaaaaaaaaaaaagaaaggaagatgaatacatttagttccgaaatat

SEQ ID NO: 8028 - DNA, 611 bp, Glycine max
agtccaggcgtcagacggctgcgaaaggacgataaaaagggatatttctaactcccaacacttccatatcttatcttctcctcctccatctttgaggttctcacggaaacttctgaagatggctggcatagcattcggaagcttcaatgattctttcagtttggcctccatcaaggcctacattgctgagttcatctcaacccttctctttgtttttgccggtgttggttcagccatagcctatgctaagttgacatcagatgcagctcttgatccaactgggttggtagccgttgccatttgccatggttttgctctcttcgttgctgtttctgttggagccaacatttctggtggccatgtgaaccctgctgtgacctttgggttggctcttgggggccacatcaccatcctcactggtctcttctactggattgcacagcttctcggctccatagtggcatccttactcctcaagtttgtcactggctatgatactcctatccacagtgttgctgcgggaattggagctggtgaaggagtagttacagagatcataatcacatttggattagtgtacacagtgtatgccacagcagcagaccctaaga

SEQ ID NO: 8029 - DNA, 861 bp, Glycine max
cgggtgaatagtgaatcattcatatttttgataaatgcataaaacctattcaaactatcaaaatagaaagaaaaattctaaaaaaaacctcctacggggtcttaggataaacaaattggattaaattaatgagtccgtttttacgttatttcgcactgtattgtacaattcctttatttgtgggatttatttctcacacgataattcattaaattatagaatggatttttacctatgcctagatctcggataaatgaaaattttattgataaaaccttttcaattgtagccaatatcttattacgaataattccgacaacttcgggagaaaaaagggcattcacttattacagagatggtgcgatttgattctatttttttaccgaaatcggtaaaaagtggaaaaaacccacgcttgctgaaggtgaaatttgtaaatataaaggattaattccttctgtcgtgtatcctcgattaatgcagcctcatatgcttaaactttaggtttatagtattaagcgaaaggtcatacctatacttatgtggttaggtcaaccctaacctactagtagtactgataggcagcattgggaaagaagcactacgcttgggaatcaagaacacgaaaactttgtatctatatatagagcgatagatatccatgtcttatcgagattgcgacaaacaagaatggttgggacaataaatatccatctcgttcatattttggatacccatataaccatcgaagattattgaggtgactaattccgcgaaattaagcagcgttgaggacaaagaaattgttggagttactgttttttttatccagtaccaacatacttaatgttaagaaatcat

SEQ ID NO: 8030 - DNA, 524 bp, Glycine max
  unsure (1)..(524): unsure at all n locations
gacaaccctaagaccctacgtcatggcaagcgatctattgagccttccctactgcttgtctaccacacaaattccacctagatcacatattagacatagaataagtactctttccaatgacaaatttctcaatagatctttgcaacaactcaactgtgccgagagcaaacaagatatccagttaactcaaaatggaaataggtgttcatctaactgagctaagcacgcgcccaatctttggacccatgaaattgtccagtccctggaaaatcatctagcggtaataacttcatatttcatttttcttttagtttagtgtagaacttgtgcagcaaggccaataacctaggcagatatatgatgtgaaaaatgtaatgtgtaagaattagtgtgtttggtaactcaccgcgtttaacttgatccacgtctcatagaaagctacattagtntgttctgcgtattttcttctttttgatgtagnntttaatgttaacacatgcctatangatgtgaaagcaaaacac

SEQ ID NO: 8031 - DNA, 486 bp, Glycine max
gacacactgactcactgttctaattcatttctgagatagaattccgttattctctctctctctctcttgtttcatcgatgggtggcacagttgttgctgaagtacccacaaagaggggaaggggcagaagggccctgaaggagaaaaccccatcaacgaacgatgctaacatcatcatagccacaccaatttcgccatcatccgaaaaggcggcacaagttgttccctcaaagaaaaaacaagattcaaagaagcagcaatctttcgaaaaagaattgctggagatgcaggaaatgctgcagcagatgcgcctcgagaaggagaagaccgaagagctcttgaaggtcaaggacgaggctctcaagctgaaggaagaagagcttgaaaaccgtggccgggagcaagagaagcttcagaccgagctcaaaaaattgcagaagttgaaggagtttaaaccctacatgaatttgcctgtgttgaaagata

SEQ ID NO: 8032 - DNA, 414 bp, Glycine max
cggggatctatcacaatagaaagcaaagctatataggattatttcccatatcaagaaaatgaaaatccctttttattttcccatcctcgtgcttgttgtcttcattgcttctggaaaacaagtgcaaatgacagtggtaccaaattgtgtggtagaaagcttgtcagttcattgtgaaatattcaagaatccttgcgaacttctttgccaacaacattttggatcacccgcagcacatggagcttgtggcattaagttccatgtatgtgtttgttatttatgttaaatataaagtttaaccataacaatcacagctttcatacctatttaatagtatgtaagccgatgaaaaaaataaatatataaataaaatgacttcattattagacccatgataggagagacaaataaaac

SEQ ID NO: 8033 - DNA, 659 bp, Glycine max
gagctcgtagttgtatcacattggtttattttgaaaccctaaagtttgcccccttacacgttttttgtcttcttttttctcccatctttgtttcgagaagcatttgacgaagagaagagacagtgaatcgcggtttcaattcaacccacttcatctcaggtgtttgaagttgagataaaaatgagcggaacagagaaagcaggatcaggaaccaccaaaacccccgccgatttcctcaaatccattcgtgggaggccggttgtcgtcaagctcaattctggtgttgattacagaggtatacttgcttgtctagatggctatatgaatattgcaatggagcagacagaggagtacgtcaatggacaactgaagaacaagtatggtgacgctttcatccgagggaataatgttctatacattagtacctcaaagaggactctagcagagggggcttagaaagtataggaatctgatttttttgtttttgtttggaagacgcttatgagttttaaaaggcttattggactgccctgcctttatgttgcaactctcgcctattgtaactgatttgccctggttatattttgaaggtaaagcggtatgaccagtttgtaaaatgctcgttgacatattttagtagaatattttagcctgttttg

SEQ ID NO: 8034 - DNA, 350 bp, Glycine max
ggagaaagtgatggattacgatttagcagcgttgaagcttttctgttcgcagctgaagcaggctcgagaagtagcaatgccttgtcaaactcaaagtcaaagtcaaagcagcttcactctcggcggcctccttttccagcgcccttggttgcagggcgttctcgtctccgcctccgacgccggctctctgcttctcgacgacggaaccgacctcgtcgagctctccctcaatagcgagtttcgccaccgtccatggaaactcgggatgtatgtaatggtggttggagggtatgctgcacgtccagggaaagcttcccatgaacaaggtttacaaaattggtgatctttca

SEQ ID NO: 8035 - DNA, 785 bp, Glycine max
gactacaccagaaccataaccaccacgagtttctctatctgctttcttcacaaagagtaactcagtcttctaaaaactttctcaaaaccattattattctctaatctttcgtttcttcaattaattaattggtttcttgctatggctgtggactctgcgatttcgtccccattgggtcccccggcctgtgagaaggacgcaaaggcgttgcggttcatcgaagaaatgactcgcaacgccgacgccgtccaggagagagtcctggaggagattctcacacgcaacgcccagacagagtaccttaaacgcttcgaactcgacggcgccgccgaccgccaagccttcaagtccaagattcccgtcataacctacgaggacgtccagccggagattcagcgcatcgccaatggcgaccgctcccccatcctgtccgctcaccccatctccgagtttctcaccagttctgggacttcagctggggaaagaaaactaatgcccacaatcaaggaagagctggatcgtcgccaacttctatacagcctcctcatgccagttatgaacctttatgtgcccggcttggacaagggaaagggcctatactttttgttcgtgaagtccgaaacaaggaccccgggtgggttactggcccgtccggttctcacaagctactacaaaagtgaccatttcaagacccgaccctatgacccgtacaatgtttacacaagtccaaatgaagccattctttgctcggactcattccaaagcatgtatactcaaatgctatg

SEQ ID NO: 8036 - DNA, 445 bp, Glycine max
gatgacatatctccaacataaaggaccacctcaccctccccctccattactcccactgcatcttcttcaaattcctgtcctgaagatgacagcaaagtggtatctcattgtgtgtgttgtagcgatctgggccgttgatctgggttcatcatcacaccatgcccgtgccccagcaccagcaccgtcagtggagtgttcaaacctggtattgaccttatcggattgcctcaccttcgttagcaacggcagcaccgtcaccaagccacagggaacatgctgctcttccttgaaaactgtgctcaacacagcccctaagtgcctttgcgaggctttcaacagcagcgctcagttaggtttagccatcaatgtcaccaaggctgtcacgcttcccgctgcttgcaaactctctactccttctgccgctaattgtggactgtctgcaacg

SEQ ID NO: 8037 - DNA, 898 bp, Glycine max
gggtccagccactcgtccgtaggagacaatcatgtgaaggacgaggcaagaaggaagtgttgtgggaggaaagaggcagagctgcaatcaccagagtggaagcgcgaaacggtcctccccggctttccatttttttctcttctgatgaaattttagttcatcccagttgctgattgagattgaatttaaattcgaaaaagcgtacttgtgccactgtacttttacagatctgcggctacgggctagcctatcgtatttttgcgtagatctagtgtccgtgaagcggttaccatttcaccactcaccactattcatctctttcttctatattgatctgaaattgaagatggaaagcgaaaagaaatcgtcagcaatatctgatgtgggagcatgggccatgaacgttgtcagctccgtcggaattattatggccaacaaacagcttatgtccaacaatggctatgctttcagctttgccagttcgttaactgggttccactttgccgtaactgctctcgttggtctggtgtcaaatgctaccggttactcagcgtcaaagcatgttcctatgtgggagcttatttggttctcactggttgccaatatgtctatcacggggatgaactttagcctcatgctcaactccgttggattctaccaaatatcaaaactgagcatgattcctgtggtttgtgtgatggaatggatacttcacaacaaacactactcaagggaagtgaaaatgtcagtggtggttgtggttattggtgtcggtgtttgcactgtaactgatgtaaaagttaacctcaaaggtttcatgtgtgcctgtatagcagttttgtcaacatctttacagcaaatttcaataggttctccttcaaagaaatatcaattggat

SEQ ID NO: 8038 - DNA, 431 bp, Glycine max
ggtattaggagagaagcatgtgaaggaggaggcaagaagcaagaaggaagtgttgtgggaggagagaggcagaggtgcaatcaccagagtggaagcgcctaacggtcctccccggctttccattttttctcttctgataaaattttagttcatcccagttgcgcataatcactcagattgagattgaatttaaagttaaattcggaaaaacgaacttgtgccactgtacatttacagatctgcggcttcgggctagcctgtgtagatctagtgtccgtaaagcggttaccatttcaccactcaccactacgaagatggaaagcgaaaagaaatcgtcggcaatatctgatgtgggagcatgggccatgaacgttgtcagctccgtcggaattgattatggcaacaaacagcttatgtgccacaatggctat

SEQ ID NO: 8039 - DNA, 824 bp, Glycine max
cttaaaggtacgttttctctgaaattgtttttgaattaagaaaaattaattagatgcccttgcttacataaagtagttattatttactactagcaaaattaattaaaattttatgagatggttgttttatattctgaactctccaagagatcttacaagtaggtggttttttgggctttctcgaacagatatccctagatctgcaactcgcaaggctggaaggagcatgcctactttggtttacgtctactgtgtgagcagaacaacattcagaggacatatgcttggagttgcagcatcatggcttgtccaagtaggcattgatttatatcgattcttttcctccgcgttccagggtcagcatgaggataatgatgttgatcaaaccaatcaagttggagttcttggacagaaggttttcattgctacagttagatgtacttcatctttaatttttgcctccataggagcaggaattggtgcaacccttattcgtccatcgctcggccagtgggttgggtggcctctgggtatttgggggggccccaccatggtaccattttgtcttgccaaattttttcaagtgaacctttgaaagctagttatattttctgccagattttttacccgcttcaactaactggggtatattaagaattttcctttatttgcagcccatgtctaatagacccactaggaagttggtggccctgcttttagctgaaagaattctaccaattttctcccatgatggataattccctattgtttcaatatagtacgcttttcaagctaaaaaaaaaaaaaaaaaaaaaaaggcggcc

SEQ ID NO: 8040 - DNA, 1039 bp, Glycine max
tcttacgcgtccgcccacgcgtccgacctcaccagccccttttagctcaccctgtgagtctcagcccccgcgcgcccagccaccgcacgccgccgtctccggcagccactgtccgttttcacttgtaatttgtcaactcagcataaaaggggtgggttaggctttgcaaccattggaagttccaacaatggcaggcatagctatacttttagatctatggaggaaaaatcaaaacttgagctctggattgcactcctctcatgcttttcagtcttccagtgcctttttttctgcctctgctgcaactgctgctgcagcgtcttttgctgcagggactggttttgcctcaagggcattgtttgggtcatcagttgcatattgtgatgctggtgcagcattaccagaagactacatttctaatatacaaagttcttttgaaaggaattataaatatgatgctttaagatatagtaccaagcagtataatgtggaacttaagcctctcttctctgcttttgaattgagggcatttacattgacttccttaaggtcgttcttgatgttctatttgccacttttggagcctcgtgtggaaatggaagatgatgaggatttcctggaagacgatcaggagcaccatgttgatctggttgttcccttcagaaaatcagtgaagcatatcatgcgtgagacaactgttgtgaccactagaaggattttagaaagaattgctgtgcattatgtttcacaaagaatggcatggaagcttcttaaagatatccctagatctgcaactcgcaaggctggaaggagcatgcctactttggtttacgtctactgtgtgagcagaacaacattcagaggacatatgcttggagttgcagcatcatggcttgtccaagtaggcattgatttatatcgattcttttcctccgcgttccagggtcagcatgaggataatgatgttgatcaaaccaatcaagttggagttcttggacagaaggttttcattgctacagttagatgtacttcatcttta

SEQ ID NO: 8041 - DNA, 364 bp, Glycine max
gatcgtacgatcgttaatttcctctctttgtttcgcagacctcaccaaccccttttagctcaccctctcactctcagccaccgcacgccgccgtctccggcagccactgtccgttttcacttgtaatttgtcaactcagcataaaaggggtgggttaggctttgcaaccattggaagttccaacaatggcaggcatagctatacttttagatctatggaggaaaaatcaaaacttgagctctggattgcactcctctcatgcttttcagtcttccagtgcctttttttctgcctctgctgcaactgctgctgcagcgtcttttgctgcagggactggttttgcctcaagggcattgtttgggtc

SEQ ID NO: 8042 - DNA, 689 bp, Glycine max
tttcgtgagtctcgtatctctaaaagctcattaaacccagggcccttcctaggtgagtctcatttctccaaaggctcgaaaaatccaaggcacgtccttaatagtcctcacaaaaaccaaggatgaacacttcctttgtccaaagcttgttaaacccaaggtccggccttggaatacaagaaaccgaaggtccagccttggtaagcgctcctacaaaaacccaaggtacacccttggtaagctctctcctttagaactacaacaaggatagtcaaaggtccaggttccacaaggtaaaaggacataccactagactagttggcaagaccttcaactaggagaaaatcaaactaactcctcacaagcatcaggggagaagctccataaaccaaaaggaagcatcaccaagatgattaacaagacctttaacctgtttgaaattaaacttgagatgatcttatgtcatttagttctttatttcacacaaaactgcctaggtaagtcttgcttcctacgctgccaagattatactctcatcaaggcaacttatccttactaccataagaaccaaagaatcatatagacaaaaggaaaaaacatccaagccaaaataagtttcaacaacaaacaaggcaaattcattataaaaagaagaatcattgctagaattacaaagctatttcgccccc

SEQ ID NO: 8043 - DNA, 341 bp, Glycine max
caactcgaagtataactcggctcagctcatctcaagtggttgtcttgtttatcgagttgaggctgaggtgaggccttgtttgcctgaccctgaccctgaccctgacccgacgaacgacggagaaagaagagagattaaccggggaagggtttagggtttgggagtggaagaatcgaatcgaatcgaattgagaatgtctctgacgagcgtgacaatgtcggaggaagtgtggttaagctgcgtgactcatgcattgtccactgagaccgaagagattatgggccttcttcttggggacatcaagcattcgaaaaacgggagtgtgactgcattgatatggg

SEQ ID NO: 8044 - DNA, 350 bp, Glycine max
tgaaaatgattgatattagcctccaaataggaattaagatctacgttagggtagtagtagggattaaatatagagaaaaaataggattaattgaattgcccagaagagtaactcagctcaactcaagtgtttgttattgtttatcgagttgaggctcaggacccgacgaacgacggagaaacagagattaatcggggaagggtttagggtttgtgagtggaaaaatcgaatcgaatcgaattgagaatgtctctgacgagcgtgaaaatgtcggaggaagtgtggttgagctgcgtgactcatgcattgtccactgagaccgaagagattatgggccttcttcttgggga

SEQ ID NO: 8045 - DNA, 447 bp, Glycine max
acaaaagaagagacatagaaagagaaagagaaccgtttgagaattttagagacgttaacggacttctaatccacaattcgccggaatttgggaaccggggtcgcgtccggagcctctcggcttagttagttagggtttctttttctctttcttctcttccattcggtttcgaattctcgcgattcgcgatgggggaacgacgctgaggttgaatttcaaggttctggtttttcgtcgtcgctgtggagtgaagaattctgtgttgctggtgatgtttacgccgccgagggtttggtcgggttggtccctgactccgaacaagagcggggttcggggaggaaccgggtcgggttcggaattgggtccgaattcgggagatggagcgagcgcgaagggaaaaggtgtcgtggttgttgagaatggtgggaacttggatcgcgagggttt

SEQ ID NO: 8046 - DNA, 459 bp, Glycine max
ggatgatcctttaatttcctgagttccggcgaattaacaagcttcaaattcaattgcttttcatgcaaatggatgtttatacacacatctcattaccatctttcatatcgcatcgcttctcttcttcacgattccaatgctcatcactttcttcttattctcctttcaagcttgtctgttccaacagagactccaaggaatctcaacgaaacgacgataacaataacaagggtgataaatcttcaacagactgggacaaggcatggtcaaaattcaaaaagcaagggggaaaaaaacccttctccaaattttcagataagtatgtgagctggaatcctaagcgttcagagttccctctttctgaggaggttgaccctatcaagagaacagagagatcaaacctcagtttctggaatagtccaactttcactttagggggtgcaattataattgtcttat

SEQ ID NO: 8047 - DNA, 308 bp, Glycine max
gattccattacagaagaagaagaagaagaaaagagaagaagcttcttcttggttaccttgacagacagagagtggagcaaacgacaaatcagcgagttggaacattttgtgtttggtggagatgcctattcggagcttggtagaagtggagccaccaagcccactgagatacttgatcggcgccgccgttatgatgatcggagttgtgttaccagtcggttacatgatgttccgtaacaagcgcgtcccctcctcttcctcctactccaaacagacgtaggaacaaggttttgatttgatatagagaa

SEQ ID NO: 8048 - DNA, 478 bp, Glycine max
aaacaagcagagccgaagcggaacgcttgctagcgatcggcgagaagctgcttcagagccgcgatctgagcagctcgcgcgacttcgccatcctcgcccaggaagccgagccgctcctcgaaggctccgaccagatcctggccatcgtcgaagtcctcctcgccgccgagaagccaatcaccaacgaccacctcgattggtacgctattctccaggtcgatcgcacgtgccaggacctcgatctcatcaaaaaacagtaccgtagactcggtcttcttcttcaccccgacaagaaccctttctccctcgccgaccacgccttcaagctcgtctccgatgcctgggccgtgctttccgacccggtccagaaagcgatttatgacagggacgtggccggttcggtcgaaccggagagcttctggaccgcgtgtccgtactggtattttctctacgagtaccctgcggtttgcgaggggtg

SEQ ID NO: 8049 - DNA, 711 bp, Glycine max
ctcgagccggtctcctcatctttccaccacaagtcttatcagattcatttcatccatccagcacgcgcacttcctttggagtctctgcctgaagatggcaagccttcagttaacaacaacacccttcactcttttgagacaacaaaggcagcaccccacaaagaagaagtccactgcttctcagctgaaccctcctcggccacgtcccctcagagtgagtgtgaggtcctataaagtggtgattgagcacgatggagagtccactgaggtggaggttgaacctgacgagaccattctgtcaaaggcattggactctggcttgtctgtgcctcatgattgcaagcttggagtctgcatgacatgccctgctcgcctcattagtggatctgttgatcagagtgatggaatgctaagtgatgatgtggtggagcgtggctatgcactcttgtgtgcagcctaccctcaatccgattgtcatattaagattatccccgaggatgagctattgtctttgcagttagccacagccaatgactgactactagtctgtttttgagttttgaatctagtgtaattaattccatgctgctgctgagtctttgcttgtttcttaaaaatatttgctgatgtcgctctggttttatatatactacttctgttactattatgtagcattttattgatgcttgaaatacaacatttgactcaaat

SEQ ID NO: 8050 - DNA, 403 bp, Glycine max
ctctttatgctctgctattcttattcattcactctgctccctcactccaactttcaaaaccctaatttcttcctcgaaatcttctcctcccttccccgatttcatttccactgctttttccttcgcttggccgtagtcgcttcaattgcgaattccgtcacattctttgtgcagatggcaggggcggataatggtgacggcaacgggagtgaaagggaattagcgggaaatagcgataacggttctgtggaagttgcagaggcttctgttagtgatagtggttgtgaagggaacgacagcgtttcttacgcgaacgtcttgcgttcgaggaacaagtctgttgaagcgcttgctatctacgagcgcgtgttggacagtgatggtgcagatgtagaggggctca

SEQ ID NO: 8051 - DNA, 568 bp, Glycine max
atcatcttatccgaactccgaagcatggttcgaccccacaactagtatacaatgcgacgtcgtcactcgtcaggaagtggatcgaggaaaaaaaatatcattttttagctctcacagaaagagagagagagagagagagtgtgtgtttatttgagtttgcgatttgtgatttctgatttgttggcccaacttggcaaagcaatggctctttctgtatcccttatgcaactcagttgcgtctctcttcttcacaataatccctcatcatcatcatcaccggtgacccttttgcccaaatccctctttccttgtggaatttccctgaaactgaaagggttggtgttttggtgtaaaagtagttcagtgtgtggaagaagaagaagaagagagtgagagttgggagtatcagtgtcaatgcctctttggttgaggctccagttttgtgggctggaaggctcttcatcttctatgccctcctcaaggctggcttggctggatctcaagccaacccacttgtctcagatttggaaactggggatactaatgatgaatctgctcctggtgctgc

SEQ ID NO: 8052 - DNA, 686 bp, Glycine max
attatgttagcgtataaaatgagagccaaatccaaaccctaatttcctaccacaccgcacttcaccgcccctcgtttcttcacactctgccgtgctctttcggcgcaggtcaagagattcgcaatagaaagtgagaaaaaaaaatgagtcgaggaagtgcaactgctgcgaagggcaagaagaagggtgcgacattcaccattgattgcgcgaagccggtggaggacaagatcatggacattgcgtctctcgagaagttccttcaagagaggattaaggttggtggcaaggccggtgctctcggcgactccatcaccgtcgtacgtgagaagaccaaaatcattgttacttccgacagcaacttctccaaacggtacctcaagtacttgactaagaagtacctgaagaagcacaatgtgcgggactggctcagagtgattgcttctaacaaagatagaagcatttatgaattgaggtacttcaacattgctgagaatgaaggagaggaagaagattaatttacccattttgagagaaccttgtttacccattttcccagtgttatgctcctcttttggattgagctatgttgctttgtttacattagttgcaatttaacagttttgcttatttatgagttgtggtgccattttccattgaattcagaatagagttcatttattgcc

SEQ ID NO: 8053 - DNA, 499 bp, Glycine max
aaaggaagagagagcaggtgagtgttgcttagtatccaagacaagacagtgataatattggaatttttggaagccaaattaggcttccattctgattctactattttatctgtctagttttagggtactgtttatcatcgttagaatctgaaggtgtgaagagtgaagatggcagaagaaaaagaatcaacgtcaattcctcttagtcaaggggacaatgcatctcgcgacgatcccgaagacccagccaagtctccactaagctcgcccaactcttccactcgcagggcttgctgctttgttctccagagttgggtctctaagaaatttatgactggatgcgtagttctttttccagttgctgttaccttcttcattacatggtggtttattcagtttgttgatggtttctttagtccaatatactccaggctcggcatagatgtgtttggacttggttttgtgacatcgttagcttttgtatttcttattggtgttt

SEQ ID NO: 8054 - DNA, 321 bp, Glycine max
aataagtctcattctattctattttatctgccaagttttggttcctttttttttttatcgttatcggtagaatctgaaagtgctgaagagtgaagatggccgaagaaaaagaatcaacgtcaattcctcttagtcaaggggaaaatgcatctcgcgacgatcccgaagacccagccaagtctccaccaagctcgcccaactcctccactcgcaaggcttgctgctttgttctccagagttgggtctctaagaaatttatgactggatgcgtagttctttttccagttgctgttaccttcttcattacatggtggtttattc

SEQ ID NO: 8055 - DNA, 765 bp, Glycine max
ggaacacaacacagcacaacacaacattctttcgtgaaactcagaaaaccctaaacccctctcaaaccttgtagattccgacatcctagaattagttactggtttagtagcttagcttcactcactttctatttcttccagaatgccaaatccaaagcacattattctgcagagctttgtcttcctctgcctgcttcttcaggcatcgtcaaaatccacgatcgagccatgctcgaactccgactcatgcaacgcgcttctgggctacaccctctacacggacctcaaagtctccgaggtggcgtcgctgttccaaatcgaccccatctcgctcctcaccgcgaacgccatcgacatctcctaccccgacgtcgagcaccacatcctcccctccaagctcttcctgaaaattcccatctcctgctcttgcgtcgacggcattcgcaaatccgtcgctactcactacaagacccgcccctccgacaccctctcctccatcgccgacgccgtctacgccggcctcgtctcctccgaccagctccgcgaggccaattccatctccgacccttcggttctcgatgtcggacagaacctcgtcgttcctcttccttgcacgtgcttcaacggctccgataactctctccccgcgatttacctctcttatgttgttcgccccgttgataccctcgctgccattggcggctaggtactccaccaccctcactgatttgatgaatgttaatgccatgggaagcactgctatta

SEQ ID NO: 8056 - DNA, 640 bp, Glycine max
tgacattgcttgagtattcttagaaagaattgtttcatttcaggaaattcaaagtaggaatgatttggattctggagagggacaaagatgtccagcgaagcaagtaaggttgaaatctctatgatcgaaaacagtgtccttgtggctctcctggtgtctcctactctattctcccctttcgttggcttttgaaggtgaaacttttcccctcttccgtgagaacagaacaacctcagaaaaccctaaacccctccaacccattcccacattgtactaccctgttagttagtcaagtagcttcactcactctttctatttccagaatgccaaatccaaatccaaagcaccttttccacgccactctcttcctctcgatacttctccaggcgctgtctaaatccacgattgagccatgctcgaactccgactcatgcaacgcgcttctgggatacaccctctacacggacctcaaagtctccgaagtggcgtcgctcttccaaatcgaccccatcgcgcttctcaccgcgaacgccatcgacatctcttaccccgacgtggagcaccacattcttccctcgaagctcttcctcaaagtccccatctcctgctcctgcgtcgacggcattcgcaaatccgtcgc

SEQ ID NO: 8057 - DNA, 1049 bp, Glycine max
cccacagggccgaaagaaaattaaaacggcgtttcgataactgccacaaaaaagtacaaatggaataagaaaaagaaaacccactcacactagtctctgtgaaaagcgacacgacacaacacaacacaagctttattctttttcttcgcttcttctgtacagcacccaagattgaagatgatagaccttgcgcgcgtgcagaaggagcttgtggaatgcagcaaggacgcggagggatcgggcatcaaagtcagccccaaaaacgacaaccttgttctcttgatcggcaccattcctggccccgtcggaactccatatgaagggggcattttccagattgatatcacattgcctgatgggtacccgtttgaaccccccaagatgcagtttaaaaccaaagtttggcatcctaatatcagcagccaaagtggagctatttgcctggatatcttgaaggaccagtggagcccagcactcactctgaagactgcacttctttctgtgcaagcacttctctctgctcctcagcctgatgatcctcaagatgccgtggtggcacagcagtatctgaaagactatcagacatttgttaacactgctcgctactggacagaaagttttgccaaggcttcgtctcgtgggattgaagataaggtacagaaactcgttgagatgggatttccagaagctcaagtaaggagcattttggaagctgttggtggtgatgaaaacatggcccttgaaaggttgctgtagatcatggtcaagtttaggaagacgtgtctccataatatgatggagccatatagacaataggttttaaattgaatagagtcatataaatctacttggaatatcggatagtcctttggttggacttttctcctccttggaagctacagttctcgactatttcctgattattatatatatcagctatgaaattaaataccttgttggcaaggtttctgcttaaaaaaaaaaaataaaatcttattttattcttccaaaaattaaatattacaaaaaaaaaaactaaaagggcggcc

SEQ ID NO: 8058 - DNA, 370 bp, Glycine max
gttgttctccccgtctgtcactcactgttttagggtttggtcaattggtgacagattgaagatgatagaccttgcgcgcgtgcagaaggagcttgtggaatgcagcaaggacgcggagggatcgggcatcaaagtcagccccaaaaacgacaaccttgttctcttgatcggcaccattcctggccccgtcggaactccatatgaagggggcattttccagattgatatcacattgcctgatgggtacccgtttgaaccccccaagatgcagtttaaaaccaaagtttggcatcctaatatcagcagccaaagtggagctatttgcctggatatcttgaaggaccagtggagcccagcactcactctgaag

SEQ ID NO: 8059 - DNA, 438 bp, Glycine max
gagaaaagaagagaaagcgagaaaggaacagaagagaaaagcaaagggctttgagttgttccaatggaagaagcgaaaccagcgatgggtcctcctcctcctcctgctcctcccactacgaagaagaggccactggaagactccaatgcccactccaattacttcaagattcgcgctgttattcgagaccttcgtcctcactttctcgaggttctccgaactccagactacaaaaattgcaaggcatcccatgaaattcaagaacagctgaagattgtggtcaagttatacgagaatatgaaagcagatgcggcttcactagcaaagtctaagaatgtgcaagatggccagatgaaggctggccagaacatggatcagaaaacactgaaagagcagcaacctcaacatggcaagcagagtcaagtagagaaatcattt

SEQ ID NO: 8060 - DNA, 527 bp, Glycine max
gacgccaaaaccactgtatcagtgtgtccttccattccaggtttttccaccacactagaaagtaactttaaggttactatgatcttttttcaacatgattcatcacattttcaagcacacactgcattaagaagcgagaaatcataactcatacatatatatggtcacttataaataattcttatagcaaaacggatggcatggaaagcgtagggaagaatgtgcctgtaattgtctttgtctaagtagagtctgtaattgtctttttgagaaaacaacagctaaggtaattacatagagccatatttcatctataaaatagcctgaaatctcatctgccactagttcttgaagaccacacttgagctaacttctctctatttcttcttttctctgggtgagggccatttttgagcaatggcgagaaaactaagcattgttgtactctgccttgttcaaatgctgcttcttctcgtggaaaaccatgccgagattgttgtgtccaccgttgaggctttagctccgca

SEQ ID NO: 8061 - DNA, 453 bp, Glycine max
agacgacagaacttgaaaacttgaaaagcggcgtttgctaattgcttcgaccgagtgattcagaggaggagaagtaatggctgcgatcgcgggagcgcacgtgtttggtgttgtgagttttcagctcaagcaagctgaaatgccctttgcatgttccagcttaatccgcaagcatattggagattctcctcagcgcaatgtggctctaagacgcagagcaaatggaacaattcttccccaaatcagagcccagaatcttccagactatgttccaaaatccgagttttacaaagtagaagcgattctcaggccatggcgagttccccaggtttctgcggctttgttgaaaatgggaattcgcggtgtcactgtatctgatgtcaagggctttggttctcaaggtggttcaaaagaaagacagggaagctctgaattttctgaagaccaattttg

SEQ ID NO: 8062 - DNA, 578 bp, Glycine max
ggtttctcttcttttctcactcagtgtcacttcttcaccgccatgaatgctatagccactgcttctgctctctctcttccgatttttcttagagctgggaagcttgacaccaaaagggatttgaaaggtagatttagagtgtttgctgtatttggagaagaagagaagaaaaatgcatggggtgcgctttttgatgttgaggatccgagatctaagtttccacagaatatacggcacgttttggatatatctcaagcactagaagtggcaagacatgatattcagtacttagattggcgagctcggcaagatgtgctaacaatcatgcacctccatgaaaaggtggtcgaagttcttaatcctctagctcgcgaatataaatcaattggcaccctgaaaaaggagctagccgagttgcaggatgaattagcacaagcacacacacaggttcatctatctgaagcaagggttaccactgctttagataaagctgcttacatggaagaattggtaaatgataggctgttgcaagatcgaagcacgactgatggttgcccaaacatcctcttctcccagta

SEQ ID NO: 8063 - DNA, 423 bp, Glycine max
ggttttgcactgccattgaaggaagagcacaaactgtttcttgttcgtatactgattccgttgcacaagccaaagtgcttagcagtgtagcatcaacagttatcttagtgcattacccaatttgtagagaaagactgcaagcttgctgatacaattagtaggggattgttgaagtactggcctataacaaatagtccaaaggaggttatgttcctgggtgagttggaagaagtcttggaagcaactcaacccccaggatttcagcgttgtatggtgccattgtttcgtcgcattgcacgttgtttgaatagccctcattttcaggtggcagaaagagccttgttcttgtggaacaatgatcacatcatgaacttgatcaaacaaaaccgaaaagtgataatgcccatcatcttccctgcattg

SEQ ID NO: 8064 - DNA, 980 bp, Glycine max
gcctccctttttaattgaaaccaaaccaaaccaaaccaaaccaaacctctctttctcagtttctctctcttagggttttctcctcccccattgacccaccgtccatcgcaaaggaagtcgcgcccaatttccatggtttgtagattaaatcttaaagcagtaagtcatcatggataaatcagagcagactcagcagcaacatcagcatgggatgggcgttgccacaggtgctagccaaatggcctattcttctcactacccgactgctcccatggtggcttctggcacgcctgctgtagctgttccttccccaactcaggctccagctgccttctctagttctgctcaccagcttgcataccagcaagcacagcatttccaccaccaacagcagcaacaccaacaacagcagcttcaaatgttctggtcaaaccaaatgcaagaaattgagcaaacaattgactttaaaaaccatagccttcctcttgctcggataaaaaagataatgaaagctgatgaagatgtccggatgatttcagcagaagctccggtcatatttgcaaaagcttgtgaaatgttcatattagagttgacgttgcgatcttggatccacacagaagagaacaagaggagaactctacaaaagaatgatatagcagctgctatttcgagaaacgatgtttttgatttcttggttgatattatcccaagagatgagttgaaagaggaaggacttggaataaccaaggctactattccattggtgaattctccagctgatatgccatattactatgtccctccacagcatcctgttgtaggacctcctgggatgatcatgggcaagcccgttggtgctgagcaagcaacgctgtattctacacagcagcctcgacctcccatggcgttcatgccatggccccatacacaaccccagcaacagcagccaccccaacatcaacaaacagactcatgatgac

SEQ ID NO: 8065 - DNA, 468 bp, Glycine max
cccactcgtccgaccaaacctatctttctcagtttctctgtcttagggttttctcctcccccattgacccaccgtccattgcaaagtcttgcgcccaatttccatggaactgtaaagagaggatagttagaagattaaatcttaaagcagtaagtcatcatggataaatcagagcagactcaacagcagcagcagcaacaacagcatgtgatgggagttgccgcaggggctagccaaatggcctattcttctcactacccgactgcttccatggtggcttctggcacgcccgctgtaactgctccttccccaactcaggctccagctgccttctctagttctgctcaccagcttgcataccagcaagcacagcatttccaccaccaacagcagcaacaccaacaacagcagcttcaaatgttctggtcaaaccaaatgcaagaaattgagcaaacaattgactttaaa

SEQ ID NO: 8066 - DNA, 798 bp, Glycine max
gtgttttcctgcaaccattttcttccttcgtcggttgattggtgaagttgctggtgaccccagaagaaggggtagtgttggaatattattgttaagctttgaactttgaagtagtggcagaaaggttcattgacccttttttggcagacttacttgtttgtggtccgaaactgctgattgcaactgttcagtggtcacaggaagcaccaccctccaaagccagcacttaaaacctttccttctcttccgtctctcttctttacccttctgtttttattaacaatgcaataagaggagagagaaagaacactcagtttaattagcaatggaattgaagaagcattttcttttatgccaagaaggaattggatgctgataagtggtatcgattgatctgttattttctgtgggagactgagaaacgatgccaagccagctatggttttctctgccaatgatttacaagaatggaaagattttcccaaagggctcaaggttcttctccttgagagagacaacatttctgctgccgagataagggcaaagcttgaagccatggactacaatgtttctacattctgtgaggagaatgaagccttgtcagcaatctcaagtggactcgacagcttccacattgccatagtggaggctgagttcaagcagtggccagggaggtttcaaatttcttgagaatgccaaggacttgccaaccattatgacttcaaacaatcattgcttgaacaccatgatgaagtgcatagcgcttggtgcagttgagttcctcagaaaaccactatc

SEQ ID NO: 8067 - DNA, 642 bp, Glycine max
  unsure (1)..(642): unsure at all n locations
cggaannttcccgggtcgatcccacgtccgtccgacgtgctggcgatgaagaaccgacagaagggggcattcattcaactaaaagcaagaacaattactttagtgttttctcttgtcacataaaagtcatctaagaagaattacaagatcatcatcacaataacaagatgagttcaggaattagagcatggagtgtggcagcaagtgttggaattgtggaggccttgaaagaccaaggcatatgcaggtggaatcatgccttaagatcagctcaacaccatctcaaaaaccatgttggctcattctctcaggctaacaagctttcttcttctgctatgatatccacaacactaaaacatgagaaggcaaatcaatcagaagagtctttgagaactgtcatgtacttaagctgctggggtcccaactagatatcataagcccaacaacaaaatattcttttctcttttcaattctaggaatcaagcaagcttaattagtctcaaatgatgatgagtattgaaagaatattgcttgtctttatggcagtcattatgtaaattttgatattgatagtgttgagctgttgccaaattttatttgtagtgttctttatggtaaagattggcaaataactcgtttatc

SEQ ID NO: 8068 - DNA, 561 bp, Glycine max
gattcattcataaatcttagttactttatcagtatcattcattatcactacgattgttctaaaagcaattattactcttgagaagaattaaaagatcatcatcacaataacaagatgagttcaggaattagagcatggagtgtggcagctagtgttggagttgtggaggccttgaaagaccaaggcatatgcaggtggaatcatgctttaagatcagctcaacaccatctcaaaaaccatgttggctcattctctcaggctaacaagctttcttcttctgctatgatctccacaacactaaaacatgagaaggcaaagcaatcagaggagtccttcagaactgtcatgtacttaagctgctggggccccaactagatatcataagtccaataagaaaatattctttctcttttaatttctagaaattatcaatcaagcttagtcacaaaggaagatgagggttgagatttctggggtcacattgtatagtatttgaagtttgttttgctcatgtgacaatcagtttgtcaattttgataaatgatagtgtttagcattgcc

SEQ ID NO: 8069 - DNA, 584 bp, Glycine max
  unsure (1)..(584): unsure at all n locations
ctacgaattactttagtgtgacctcttgtcacattaaaatcaacttacgagaattaccagatcatcgggacagttaccagattagttcaagaattagaacattgaatgttgcaccaaatgtttaaattggcgaaggcttttaagaaccatcgcttatccaggtgaacatgccttaagatcagctcaacaccatctcaaaaaccatgttggctcattctctcangctaacaagctttcttcatctgctatgatagggctccacaacactaaaacatgagaaggcaaagcaatcagaggagtctttcagaactgtcatgtacttaagctgctggggccccaactagaaattaaaagagaaagaatattttcttattagacttatgatatctagttggggccccagcagcttaagtctaataagaaaatattcgttctcttttaatttctagaaattatcaagcttagtcccaaaggaagatgagggttgagatttctggggtcacattgtatagaatttgaagttcgttttgctcatgtgacaatcagtttgttaattttgataaatgatagtgtttagcattgcc

SEQ ID NO: 8070 - DNA, 365 bp, Glycine max
ggagagctttaccaacttcaaaacttggagcttttcatttcattgatggcgttctctctcttcatccccagccaacccttccctttggtgccaacccttcttcttctcgttctcctccacgcttctctcttggaaccctctcacggcgctagaatttccaaggatgcttcaactcggcacctgtttgagtcgaggaacactaagcaccccaacaagtgtggagagttggtggcgctgtctcagtgctcgcagaactcaaagtgcagctggtgcaccagtgaggtccttgatgacatgtgtttcaccaaatctgaggcgtggaggttgccacaacaggtttactcttgcagcttgattcggtgaga

SEQ ID NO: 8071 - DNA, 541 bp, Glycine max
tctcgagccgattcggctcgagtacgcgaaaagacgacagaagggatgtagcgcagagaaagaactagaactagggtttcatctttgccatcagtaaacgacaatgatttacgacgttaactctcctcttttccgatccttcctcagccagaagggaggctcctctgataagaggaaatcggacgaacagaagccaaaagagcagaaacccaaagccagcgagaacaaacctataatgactgagtgataacagctgagctgcattcagttgtagaatgaaaataggtggtaggtattgtatttggtgctaaactaagatctttttggctgtgttttttacctttggaaaaaaggttttaaattttttaattttttggggccccccaccccgcgatgttggtctttgttattgtaatggtttgattttggatatggttataacgaaaacttataatggacacaagttgaacttgatgcacgcatgacacatgcaatgaagtcactcgtttaaaagttgtttgaaaaactagtaatgaactgt

SEQ ID NO: 8072 - DNA, 524 bp, Glycine max
  unsure (1)..(524): unsure at all n locations
cggccggatcccggtcgaccacgcgtncgccacgcctcctccggtgggaaagacaacgaggggggtgtaccgcagagaaagaactagaactagggtttcatctttgccatcagtaaacgacaatgatttacgacgttaactctcctcttttccgatccttcctcagccagaagggaggctcctctgataagaggaaatcggacgaacagaagccaaaagagcagaaacccaaagccagcgagaacaaacctataatgactgagtgataacagctgagctgcattcagttgtagaatgaaaataggtggtaggtattgtatttggtgctaaactaagatctttttggctgtgttctgaagtatatgccggcgatgttggtctttgttattgtaatggtttgattttggatatggttataacgaaaacttataatggacacaagttgaacttgatgcacgcatgacacacgcaatgaagtcactcgtttaaaaggttgtttannnnnaaaaaaaaaaaaaanaaaa

SEQ ID NO: 8073 - DNA, 433 bp, Glycine max
gggtagcgcagagaaagaactagaactagaactagggtttcatctttgccatcagaaacaacaatgatttacgacgttaactctccccttttccgatccttcctcagccagaagggaggctcctccgataagaggaaaacggatgaacagaagccaaaagagcagaaacccaaagccagcgagaacaaacctataatgacagagtgacaacaaatttgctgcattcagttgtagaatgataataggtggtagatattgcatttggttctacaaaattaagatcattttggctgtgttctgaggtatatgtggtgttttagactttgttattgtaatggtttgattttggatatggttataatggactcaagttgaacttgatgcacacatgcaatgaagttactcgtttaaaagttgtttgaaatacttcatc

SEQ ID NO: 8074 - DNA, 1747 bp, Glycine max
  unsure (1)..(1747): unsure at all n locations
tcccggcccgaccaagccttcattaaggtggcaaaagaccgcccctcggggggagatttcaaacacaacttcgcttattaaatctcttcttccaattccttctttcattcattcccaggttgtgatggcagcagcaccagcagctaccttcgctattggaaccaccggttccctcggccaaagaggaagctcgcttcctcaatcaaagtcctttgggttgaaattcaactctctgaatcatttgaagagcttctgtggcctcaaggccatgtcatccgtgagatgtgagtcggaatcctccttcttcggtaacaaaaccggtgctgctctacgggcgtcttttgcatccaaagctcaaaaggaaaacaaccaactacaactcgcagcctcaggcttcgtacaaagttgcagttcttggtgctgctggagggataggtcagccactcgcgcttctcatcaagatgtcgcctctagtttccgacctgcatctctatgatattgcgaatgtcaagggagttgctgctgatatcagtcactgcaacaccccctcacaagtcagggatttcactggagcttctgagttggcgaattgtttgaaggatgtgaatgttgttgtcatacccgccggtgttccaaggaagcctggcatgactcgtgatgaccttttcaacatcaatgccggcatagtcagggacttggtttctgctgttgcggataatagccctgatgcttttattcaaatcatcagtaaccctgtgaactctaccgtgcctattgccgcagaagttttgaaacagaagggtgtgtatgatcctaagaagctctttggggttaccacactggatgttgtgcgggcaaacacgtttgttgctcagaggaagaaccttaagctgattgatgttgatgtccccgttgttggtgggcatgccgggattaccattcttcctctgttgtcaaagacaagaccctcagcgagtttcactgatgaagaaattgaggagttgactgtcaggattcaaaatgctggaactgaagttgttgaagcaaaggcaggtgcagggtctgctaccttgtcaatggcgtatgcagcagctagatttgttgaatcgtctcttcgtgcccttgatggagatggggatgtgtatgagtgctcatttgtggaatcagacttgactgaccttccattctttgcttcaagggtgaagcttggtaggacaggagttgaggctttaattccatctgacctccaagggttgactgactatgagcagaaggctttggaagcacttaagcctgaactcaaggccagcatagagaaggggattgcttttgctcagaagcaaactgttgctgcttaaatttccttgtcagcaggtggtttcttgggttatggatttatttgagcataaatactacttagaggacttaggttgcagatttgttgtagcatctttactgcttccagaacttaggattcagactttctatgtatcaattctacttccagttttgttagtagaacgggaggacgcttccatttctgttctctaaaccgagcttaggttttggtcagaaatcttcaaagatgtaagcattataatgtagaattgaaaaaaaatgtaaacgttgctttttgaataatatggccattagaccagtttttggttttttgctgnnnnnnnnnnnnnnnnnnnnnnnnnnnnnnnnnnnnnnnnnnnnnnnnnnnnnnnnnnnnnnnnnnnnnnnn

SEQ ID NO: 8075 - DNA, 455 bp, Glycine max
aaacttctcattccagatctgtgtaaacgctattctcttccatttccatttctcaattgtctttctgtattccattatcgatgttgcaattttcattcaaaattacactctcattaactaattttagaacatgtatgcaagttgttttcagctctttctgtgttgtatgctatggcatcttaattggttcgattgaataatctgttaggtctaccctagcaaaacaaaccttatactttcttatttccttggtgctttttgtagctttcagataggtttctgtgtgttaatcgaatagacctgaattatttattgtatcacaggttgtgatggcagcagcaccagcagctaccttcgctattggaaccaccggttccctcggccaaagaggaagctcgcttcctcaatcaaagtcctttgggttgaaattcaactctctgaatcatttgaagagc

SEQ ID NO: 8076 - DNA, 328 bp, Glycine max
gtagattcttttttctctttagcgtttggtaagggtgcctatatttattctgcattcgtcctcgatccttaggcggagatttcaaacacaacttcgcttattaaatctcttcttccaattccttctttcattcattcccaggctgagatggcagcggcaccagcagctaccttcactattggaaccaccggttccctaggccaaagaggaaactcgcttcctcaattaaagtcttctgggttgaaattcaactcccagaatcatttgaagagcttctgcggcctcaaggccatgtcatccgtgagatgtgagtcagattcgtctttct

SEQ ID NO: 8077 - DNA, 565 bp, Glycine max
agggacaccatccactactcttcttagttccagcacaacaagctcttcatttctcccacactttcttttctttcaccaaaaatgtcaccagatttcacacttttgttcttcccggaactcatgcagtcccctatgatcactttccaagccaccctctgcgtccttctcttcaccctcatgttcacgctgctcttcactcctggtgggcttccttgggcctgggcccggcccagacccatcatccctggcccagtaactgccctgttagggatctttactggctccacgcctcaccgtgctttatccaaactcgcccgtaattaccacgcggaaaaactcatggctttctccatcggtttaacccgtttcgtcatctccagcgaaccggagaccgctaaggagattctcggcagccccagtttcgctgataggccggtgaaggaatccgcctatgagcttctcttccaccgcgcaatgggttttgcaccgtatggggagtactggaggaaattgaggagaatctcagccctacatctcttctccccgaagagaaatcaccgctctg

SEQ ID NO: 8078 - DNA, 435 bp, Glycine max
agggacaccatccagtactcttcttttcagcacaacctcttcatctctcccaggctttcttttctttgcaacaacactaccaaaaatgtcaccagatttcacacttttgttctccccggaactcatgcagtcccctatcatcactttccaagccactttctgtgtccttctcttcaccctcatgttcacgccgttcttcactcctggtgggcttccttgggcctgggcccggcccagaaccatcatccctggcccagtaactgccctgctcggggtcttcacgggttccacacctcacagcgctttatccaaactggcccgcacttatcacgcggaaaagctcatggctttctccatcggtttaacccggttcgttatctccagcgaaccggagaccgcaaaggagattctcggcagccccggttttgcggacag

SEQ ID NO: 8079 - DNA, 884 bp, Glycine max
  unsure (1)..(884): unsure at all n locations
gatcccgcccaacggtatctccttatccgtgtttttttcaaaatttgagctcgtttgttgtcgtgtttgtttataacgttggtgtttctaaactcgtgtgcgctccgattcaaattccaactccgaatcaaaccctagtacaacaaaccaacgaaaccctcttcttcccaattctccgaccccatcatcctcaatggccaaccctgattcctctcttcctctctccatcaagaaggagaacatcactcccattacctctaaaatcgaggaacttaatgaatcgagatcggagcttctgggcagagttcagagtttgaaacaggatttgcaaagttggaggtctaagttggatacacaagtcaaggtctatcgcgatgagctgtcagaacttaagaaaacacttaatgttgaagtggaccaacttagagcagaatttcaagatctgaggactaccctgcagcagcaacaagaggatgtcactgctagcttaagaaacctggggcttcaggatgcctcagatgtcaagcatgctccgtcgcaggagacaaagattgaagaaattgtcaaggaagaacaggtggtggtacctgaagaagataatagcagcaaagtagctgaaacttaaatggcctttttaatttggagtatctgctgctcgctgtgtacaccctagagaagctgaatgactctgtattattggtagatatttgatgtgtttgattactactgttgggtataatgcgggacttaagaatcaatggtaaatttcccgttacccttcctcgggtataatcgacattaattgaacaaattatggtatgctttccttttnaaaaaaaaaaaaaaaaaaaaaaaaaaagcggccggttttaaggaatccaggc

SEQ ID NO: 8080 - DNA, 504 bp, Glycine max
ggagctggtttttttgtcgcgtttgttgataacgttggtgttccttgactcgtgtactaatactagtactacccccaacacaacactcaccaaaccacgctccgattcaaattccaactccgaatcaaaccctagtacaacaatccaacgaaaccttcttcttctcaattctccgatcccatcctcaatggaaaacccggattcctctcttcctctctccatcaagaaggagaacgtcactcccattacctctaaaatcgcggaacttaatgaatcgagatcggagcttctgggcagagttcagagtttgaaacaggatttgcaaagttggaggtcgaagttagatacacaagtcaaggtctatcgcgacgcgctctgttccaagaaaaaaccggagtccctgacccttgctaattcatatcccaaaatgtaaggcttgaatgcctttgtgatggagaacggctttgaaagaaccaggaacttttcaggagctgtcagaactta

SEQ ID NO: 8081 - DNA, 523 bp, Glycine max
tgtaattcgacaaaacttgggggtattaacgtatttgctctaaattctaaaacccatggcaactgaactcgcaggttgagtactgttaaaccactagcttcttcttcctcttcctcttcgcttagcgtcttcgtctctcgcacttcgttttcagcttcacctcgcagaagaaagagtgtagtaagaggacgcagagatgaacatgaacgaagagagtggtgaaggaagcgcgaggagggtccaagtgcgcttcgtgacgaagttaggcgagccgtacaaagttccgaccaccgccatcgccatccccgccgacctcgctcgattaggcctctcctcactcgtcaacgcactccttcaatccaacgacgctgatcatcagccggagccgtttgattttttgatcgatggcgagttcgtccggatgtcgctcgagcagtttcttttggccaagggaatctctgcggaaaggatattggaaattgagtacgcaagggctgtggctccgcggaaggaggaggaccct

SEQ ID NO: 8082 - DNA, 905 bp, Glycine max
tcggtgcgagaagagacagaaggggacaggtagttggtgtgaggcaatgacgcggcctttcggtgtgaagggggggaggaagcgaaagcacgcggaacccaaatacgacgcccatgacgaagaagaagaagaagaaacgcaaccaaagaaaactgtggtggaggtggagcacaaccaagaagaagaagaagaaactccagcaccagcaccagaggatgatggattgagcggtatcccaattgcgcccagtgcgaacaacactaacaaacccaacgtcatcttcattcttgaaaaagcttctttggaagtcgccaaagtcggcaagacatatcagctcttaaactccgacgaccatgccaatttcctccgcaaaaataacaagaatcccggagattacaggcctgacattactcatcagtcccttttatctattttggatagcccactaaataaagctgggagattgcggtcggtatacataaggactgaaaaaggtgttcttatagaggttaagccctttgttcgtattccaagaacattcaaacgctttgctggtgtcatgttggaattgcttcaaaaattgagcatatctgctgttggcaagcgcgagaaacttctccgaaccatcaaaaaccctgtcacgcagtatttgcctatcaactcacgaaaaataggtctatcgtatagttcagaaaagcttgtagatatggatgactatgtatcaactgttcccagcaatatggaccttgtctttgtggtacgagcaatggcccatgggaagattgagacagattatacagaagattatgtagcaatttcggggtaccctctaagtgctgcttattgtattacaaggattactggtgcccttgagagaaagtggaagattttgtgatttaacacca

SEQ ID NO: 8083 - DNA, 395 bp, Glycine max
gaagggcagaaacaaaagcataaccctagctaggacgtgtttggagttggtttgagcgtattgaggcaatgacgcgaccttacggtgtgaaggggggccggaagcgaaagcacgccgaacccaaatacgacgaagaagaccaagaaacgcaaccaaaaaaagctgtggtggaggtggagcacaacaaagaagaagaacaacagcaacaaacaccagagggggatgaattgagcggtatcccaattacgcccagtgagaacaacaccaacaaacccaacgtcatcttcattctagaaaaagcttctttggaagtcgccaaagtcggcaagacatatcagctcttaaactccgacgaccatgccaatttcctccgcaaaaaataacaagaatcccgg

SEQ ID NO: 8084 - DNA, 513 bp, Glycine max
acagaagggggcccgaactccttcgacgaccgtcttccccaatcgcctgcgtctctctctgaattgacaagcttaaagacaaagtcttaaatggctggtccaaggattgcccatgctaccttgaaaggtccgagtgtggttaaggagataataattggaataacacttggcttagctgctggtagcgtgtggaagatgcaccactggaatgaacagaggaaaaccaggaccttctacgatttactggaaaagggtgagatcagtgttgttgcagaggaacagtgaaaatgttcttgttttgttgcctatgctctccatttataggcttttttttcccgtgttatattcaattggctcttcaaatgtaaatgagccaacatactatgagattgaaaagaataagtttcttgaactgattgaatactatgttggcctgtaaaagtttcatgcagttatgtttttattttgtgcttggcttattttcttcttgttgcacaggtgtatatgtttttt

SEQ ID NO: 8085 - DNA, 403 bp, Glycine max
cccacgcgttcgcgaacggcttggccaatcgcctgcgtctctctctgaattgactagcttaaatggctggtcctaggattgcccatgctaccttgaaaggtccgagtgtggttaaggagatcataattggaataacacttggcttagctgctggtggtgtgtggaagatgcaccactggaatgaacagaggaaaaccaggaccttctacgatttactggaaaagggtgagattactgttgttgcagaggaacagtgaaaatgttcctgttctgttgactatgctcttcatttataggctttttttttccatggtatattcaattggctctgcaaatgcaaacgagccaacatactatgagattgataagaatatgtttcttgaactggaaaaaaaaaaaggaa

SEQ ID NO: 8086 - DNA, 392 bp, Glycine max
tctcactctggagctaacaccagttccaccaaggggttgcaacgagacattacatattgaagaattgatggcagctttattggttgctaactatctatattctgccattgctatatctgcctttcagagctttattgtatgattaagttgagtaaaatgctactacgtcaacgtttaaagtagacaatatctataattatctataataaagataaaaaaaactaaatacattagaaaaaagaaatagaggcttggctcacgcgggaaaatgaaaaatataaaatatgactttgcaagttaacttttttttgtttagttctaagaatgttaacatgcaaagtcgtattttatatttaaacttttttgttcaattttctaaaatgtattttata

SEQ ID NO: 8087 - DNA, 413 bp, Glycine max
aggcaaaattcaatacattaatgaatgagcatgatagtatttgtgatgtagaagcagtagaaaagtaaatcttaagtagcagggttacttttataatatccaaacatttaattaatttttgtaacatctagttaaggttagtattttgggccagatctgttttttaagaattctagtattttagtctaaggacgtttaatgggcatgggcttgtactaagagtctatcattatgttatggtagttgtttacttgtaagttgctttcctaataagttattcctacaaagttgtagtttaaaaattattatcggaaattcttaaagaggtgtgagccacaagtcttgtaacctgaaaaataagcctcagctattgtatggcagaccttttctctgaatcttaaatccaaaattat

SEQ ID NO: 8088 - DNA, 524 bp, Glycine max
aattcccgggtcgacccacacgtccacccacgcgtccgaagacgacagaagggggcctacttcatctctcttataatcacacacacctaccttatagctatggaaactggaggctttcatggctaccgcaagctccccaacacaacctctgggttgaagctgtcagtgtcagacatgaacatgaacatgaggcagcagcaggtagcatcatcagatcagaactgcagcaaccacagtgcagcaggagaggagaacgaatgcacggtgagggagcaagacaggttcatgccaatcgctaacgtgatacggatcatgcgcaagattctccctccacacgcaaaaatctccgatgatgcaaaggagacaatccaagagtgcgtgtcggagtacatcagcttcatcaccggggaggccaacgagcgttgccagagggagcaacgcaagaccataaccgcagaggacgtgctttgggcaatgagtaagcttggattcgacgactacatcgaaccgttaaccatgtacct

SEQ ID NO: 8089 - DNA, 525 bp, Glycine max
gaacggatgtctaattgtctgttgaccggctattgcctatttcggtgttccttcctcgtttacgtcgcccccattgacacgttgttcccaaaatttaagcactataaatttcgacacttgccaagtactccaacgcctacttcatctctcttataatcacacacacacctaccttaatagctatggaaactggaggctttcacggctaccgcaagctccccaacaccaccgctgggttgaagctgtcagtgtcagacatgaacatgaggcagcaggtagcatcatcagatcacagtgcagccacaggagaggagaacgaatgcacggtgagggagcaagacaggttcatgccaatcgccaacgtgattaggatcatgcgcaagattctccctccacacgcaaaaatctcggacgatgcaaaagaaacaatccaagagtgcgtgtctgagtacatcagcttcatcacaggtgaggcgaacgagcgttgccagagggagcagcggaagaccataaccgcagaggacg

SEQ ID NO: 8090 - DNA, 763 bp, Glycine max
cacgatattttccttcttatttggttttttaagtgaaatgtgcggcaaacctttagatccagaatcaattcaaagttcaaacgataggagaagaagggagtagcgacgaactcaaacggcgtcgtatcgactcgttgttcatcgattggattgaagggagagagagatctggtagcggtagcggaagatggataagggtaagatcgaagaggtgatcgagaagcaagtcctgacggtggcgcaagccgtggaggacaagatcgacgacgagatcgccgccctggagcgtctggacgccgatgacatcgaggccctccgcgagcgccgcctccagcagatgaagaagatggcggagaagcgctcccgctggatctccctcggccactccgaatattccgagattccctccgagaaagacttcttccccgtcgtcaaggccagcgaacgcgtcgtctgccacttctaccgcgaaaactggccttgcaaggttatggacaaacacttaaatattttggcaaagcagcatatcgagactcggtttgtgaaactcaacgctgagaagagtccttttctcgctgagaagctcaagatcattgttcttccaacccttgccctcatcaaaaacgccaaagtcgatgattatgtggtatgtatatgatagcaaccacttgctcatatttgtttgtttgccatcaatgttagataaggtttcggctatttatttctttaggcttgtttggataaacttctcaataagccgata

SEQ ID NO: 8091 - DNA, 349 bp, Glycine max
gatcgtaaatcaattcaaacaataggagaagaagggactagcggcgaactcaaacggcgtcgtatcgactcgttgttcatccatttgagaggcatctggtagcggaagatggataagggtaagatccaagaggtgatcgagaaccaagtcctgacggtggcgcaagccgtcgaggacaagatcgacgatgagatcgccgccctggaacgcctcgatgccgacgacatcgaagccctccgcgagcgccgcctccagcagatgaagaagatggcggagaagcgctcccgctggatctccctcggccactccgaatattccgagatttcctcgagaagactcttctcgtcgt

SEQ ID NO: 8092 - DNA, 529 bp, Glycine max
gaatttgaaagaagagattccttcataattcgttcttttctactaccttgaaatgtttatgataggcattaattaattaataagaaagaatttctgggaagggatcacaatcacattgatggatagattaactatcacaaactaaactacacacacaagatccggggtttgatcaaccatcatgtctgacgaagtcaacagcgttttcaagaaatatctcaaccagcttcagcttcatcctctcagaaccaaggcgattactgcggcatttttggctggttttagtgatgcagtggcgcagaagttatctggggccaagaaacttcagttgagaagggtacttcttttcatgctctatggtttcgcctactctgggccctttggacattttctccacaaattgatggataaaatatttaagggggagaaaggcaatgacactgttgctaagaaggtgatccttgaacagataaccagttccccatgggacaacttttgttcatgatgtactatggcttggttatagaag

SEQ ID NO: 8093 - DNA, 443 bp, Glycine max
aaacaaaaacccttgcacaatatggccctaaacttggagtgtgtcgtgtggtgtgagacagtgtaactcggaagcgcagcagcaatggcaagagcgactctccttcacttgctgcggtcacagagcctccgccacgtgtccaaaaacgctccttcagcatatcgttgttttgggtcctctacctgtcaacgacccattagccccaatccatcattcaaaacttcctcccatcttgctattttccaaagaagatgggcatcacaaatcccaactacagaggaagacgacaagattagcatcggacctcgtagtggaggacaaccaggggagggtgacaaggaaactggagtcgtttattatggcccgatctcaaacaccataaagaaagtaaaacttctgtctctctcaacttgttgcctttcggtatctcttggtccggtcat

SEQ ID NO: 8094 - DNA, 417 bp, Glycine max
cagaaggggaaccacttttaaatttgagggatcaaagggtaagttgtttcagcgaaccagaaggaggggctcctcaactttaaaaagtgaagttagaattgaatgaatgaaaaagggtccgtggcaatggagacagagccaaaagggctagaagcttccctagaacatttgattgaccttcaccaccacaaatctcttgtccttgcccaccacacagacaaagccaagaaggacgcaataaggaaagccgagcacgtttctgatttgttggttgaagcggtgaatggtggggtccaagattccttcatcaaccagaagcgaattgagctcgaaattcgaactctggctaccaccatcacgaggttcatgaagcagactgatcaatggctcgctgccactcatgccctcaacactgct

SEQ ID NO: 8095 - DNA, 724 bp, Glycine max
ctcgagccgtgatctcttaccttaaaaaaaactccaaaagagagagaaacgctattattaggaactaaagcaaaaaccctaacgctagtagcaaccaaagcacaaatcctatataagccaccgcttaaccttgaccctgtatgcgactaaccctagttcattgcactgcaacttagccacttgaacccccttcgtaagcctcttcacatcttcacttcttcacttcttcttccgcactaatacgaaaccagagggaattcacaaaagaggttaccatgtcggacgatgagagagaggagaaggagttggatctcacttctccggaagttgtcaccaagtacaagagcgccgcggagattgttaacagggctttgcagttagttatttcagaatgtaaaccgaaggcaaagattgttgacctttgcgagaaaggggattcgtatattagagagcaaactggtagcatgtacaagaatgtgaagaggaagattgagagaggtgttgccttccctacatgtgtgtctgtgaacaacactgtctgtcacttctctcctcttgccagtgatgaaacagtgttggaagacggtgatatagtgaaaattgacatggcttgtcatatagatgggttcattgctgctgtggctcacacccatgttcttcatcaggggccagttacaggacgggcagctgatgctattgcagcagcaaacaccgccgccgaagt

SEQ ID NO: 8096 - DNA, 407 bp, Glycine max
ggactaaccctagttcattgcactgcaacttagccacttgaacccccttcaatacgaaaccagagggaattcacaaaagaggttaccatgtcggacgatgagagagaggagaaggagttggatctcacttctccggaagttgtcaccaagtacaagagcgccgcggagattgttaacagggctttgcagttagttatttcagaatgtaaaccgaaggcaaagattgttgacctttgcgagaaaggggattcgtatattagagagcaaactggtagcatgtacaagaatgtgaagaggaagatagagagaggtgttgccttcctacatgtgtgtctgtgaaccaacactgtctgtcacttctctcctcttgccagtgatgaaacagtgttgccagatggtgatatagc

SEQ ID NO: 8097 - DNA, 647 bp, Glycine max
ggtttttatccttccttaaggttaagatttgggtggcatattttcaagtggttgagaaaaattatacagcgggagtgttgtgatttctaaatctgagattctgaatctgaagctacgatgagaagttgaagttgaagaagcaaaatggtgaagcattcgcaagcgtggttgttgtgatttctaaatctgagattctgaatctgaagctacgatgagaagttgaagttgaagaagcaaaatggtgaagcattcgcaagcgtggttggcaatgcggagcaagacttgtgcgctaacactcctggcactcttgtccctctccaccctcaccctcctcttcctccgaaccacttccgattcctgcacccaacctcaggttcggaatttggatgcgcttcagcctcggactgattccaagttaccgaaccctctggaattcatgaagtcgaagctcgttctcatggtctcgcacgaactctccctctccggaggacctctcttgctcatggaactagcgtttctgctacgctccgccggatccgacgtcgtttggatcaccaatcagaaacctcctaaacccgacgatgtcatctacactttagaaaacaaaatgctcgacagaggagtgcaggtggtggatgcgagaggtg

SEQ ID NO: 8098 - DNA, 644 bp, Glycine max
ttaatgcagtgcttcagttaactgaaaagcaccaaagtgatccataccagcttcaagggagccacatgagagggaatattttttaatggatcttccatctgaacgtccttcaaaatccatttaaaccaatgaacacctgacttgcacctggacaaaaataatgtcaacaccttacactatcatttgtaaattcggcagatttaagatttatagaatagactgataaacactagatattagaaacacaagaaatgcatctgtacatcaataattaaaagaagattccatgtcccacaaaaatgctccctatctgatgtgttttgcaccccaattaagaggggtgacaaatgatgaagagcatgataaaattcaaaatgcacataacaaagtgattccaactctaaccaattacatctatattttgcttgatttattatacggaaaaaaacataagatgcctgtgagacaaacttagaacaaagacacatacaagtttctaagaaataaataataggtttgaggaacaattcagtagcaggattactatgactgcaggaaaaacagacaaaatatcatctttagtaaaatctcaagaacagatagacttaaaatctttgagaaaatcatgaaatttaatgacaccc

SEQ ID NO: 8099 - DNA, 859 bp, Glycine max
aacaccctgctggaagagaacctgtttgatatctgccaatttcaaatcaccaacaagacagaatttatgcggaggagctgctccagaaacagggagcagcgaaagcggatcattttctgtcttccctactacagcatcaacccaagctatttcataatctcccagctttttgaagagtacattactcatgagcttctcggacagttgaaccttataagcacataaatcagaggtaacatcaattgtctcttcaatttggggagcataaacatgtggacagacatgcttcaggcagtgctgtttcagatgctctgtagcttcagctgatccatgcaccaaaaccagcttcaagggagccacatgagacagaatctttttaatggatcttccatctgaacgtccttcaaaatccatgtaaaccaatgagcacctcacttgcacagtcctttcgtcagatacaacttttgatggctttgtatcgagtatcaaacttgcagcaccttcatctagttttccatttatatcacctccatgcattgctgtctggtccatgtcttcatccttaattacataatcatctggatttatgacctctccaaaatcatcccactctgatgtattctcataacagggaaacattggagcaacacttgtcagagggccaacaaatccatcaataaatctgtcccggtatcgtccgcctctgggaccagacacttcaggtggtacatgattattgccagaatcaatgaccattgaatcactagtattattatcagccccatgagatgttttaaattgttcctccttcataagactagcttttaaagcttctttttttattcgattttgctcttca

SEQ ID NO: 8100 - DNA, 470 bp, Glycine max
ccaacttttaagttattattattattatgaacactattgtgttaacaatgctgccattttttctcttcctgttagtttggcttcctagggttacctgtggctggacggctgcacatgccacattctatggtggtgcagatgcttcagggaccatggggggagcatgcggctacgggaacttgtatcagcaagggtatggaaccagtacagcagcattaagcgctgcacttttcaacaatggacaaacttgtggggcgtgtttccaacttgtttgctacaattccccattctgcattcgtggtgctggccctataaccataaccgccacaaacttttgtccccgtaatggctccttttctgccaacggtattggctggtgcaatcccccattgatgcattttgatatgtcacaaccagctttcaccaagatcgccctttatcgagctggagtcgttcctgtgctctttaga

SEQ ID NO: 8101 - DNA, 677 bp, Glycine max
atcagatctctcaatatctctcatttctcgattcatctctctcattgctctgcattgcaacactcacacaccaatggcactcagacccatcgacaacgctcttccgacaacaaccccagagagacccaaaaaacaacccaaagtcgctcttgcaacccaaaagcaacaagaccgtgctgccgtcaacggcgaaaacgtagttccattgccctcatctggggatgccactgttgactatgtctcctccgacaaccttaagcccttgtcggaccctgaagttaagattcagagcttggttgaagatttggattcgaaaaattggacgaaggtttgtgagtcgctgaatgatgttaggcgcttctcgttgctccactcctctcttctgttcccaatcttgggtaaaattgtgttggtggtggcgaagacaatgaggaaccctcgtagtgctctctgcaaaactgctattatggctgctgctgatattttcaacgcctttggtgacaagttgcatgacccagtaatctccgatgcatttgatggcttgctgctacagctgctgctgtaaggcatcccaagacaaaaggtttgtgtgtgaagaagctgacagggcacttggcttaatggttggttccatgacccctcttccactgcttcagaaaatgagggtatatgggagt

SEQ ID NO: 8102 - DNA, 466 bp, Glycine max
agcgatttgtacgaggtagtggtgctgttctgttgcgtgaacaaattgaggtgtgcatgttcattattgggcaccgatggattcagtttctgtgcaaatagcgacgtcaaaatttgttctttgccccgcggcgacggccagttctaagaagaatgccatcatcaatttcagttccaatttcaaaggaactctcaccaaaatccatgccatttccccaaatggctctgcctctagctgcacttcgcgtgtgtctgtgtcaagtttaaagacagacaagaacaaaggcagaagtaatcttgaatccctgttttgttatgataaggctattccagaagaaataattgagaaacctgttgggttatctttggaagagaaagctattggtaacaattcccgatgcactgattgccaggccaaaggtgccgtgctttgtgccacttgtgctggttctggtctatatgttgac

SEQ ID NO: 8103 - DNA, 300 bp, Glycine max
tcgcaccacgcgtagatttcggctcgaggaggaagtggtgctgttgcattgcgtgaacaaattgaggtgtggtgtgcatgttcaacattgggcaccgatgatgggttcagctactgtgcaaatagcgacgtcaaaatttgttctttgcccgaatgcttcagcggcgaaggttgcgagtcccaagaagaatgccgtcatcaatttctcttccaacttcaaaggaagtgttaccaaaatccatgccattccccctaatggctctgtctctatctgctcttcgcgtgtgtctgtgtcaagttt

SEQ ID NO: 8104 - DNA, 975 bp, Glycine max
  unsure (1)..(975): unsure at all n locations
gggggcttgtagaagactacagaaggggacaaataacaatggggctttgtacagttcagcctatcactctctcgaagcttcctaacgcctcctcttttcttcctaaacctaaaccctctcttcctcagtcttacactccctccgccgcacacttatctcggtcagtttgcttaaggaatctgtcgccaaaggcaacatcttctgaagaagaaaggtccagtgggggaagtcaatttttcaatgagaagcgcgatggtgtaataatcctggaggatgttaaagaggataataataagaatgagttcgataaaacggtgattgaagatacaaagcaagacttgtttgatgatgatggacagggtctatcatttgatttgctggataagctcaattttgatactgatgacactggttccattgtcgtgtatgggggtggtgccttggtggctctgtggctaacatcagcggttattggcgcaattgattctatcccattgtttcccaagctgttggaagttgtggggcttgcatatacagtgtggttcacttcccgttacctgcttttcaagcaaaatagagatgaattgggtgctaaaatagaagagctcaagggacaaattttcggttcagaggataattgattgctctgaacggatgaattgtttgtgctgcctcttaaaacaatgtacagttacagttacctttgttttagttttggctgagaaggaaaaatatagtcagcaccagatttctcgtattcaagttattgactgctattgccaaattgcctctagtgcattgtgggtgcatgttgcattttttattgtttacatacggtctatattttttttaaaaaattgtaactagaaaatttgaggacgtctggtttccaaaagcacactcgatatctaacattaaggatgcaatgtaaagggggcaaaaaaaaaaaaaaaaaaaaaaaanaaaaaaccgccc

SEQ ID NO: 8105 - DNA, 500 bp, Glycine max
tggggcgacaacatagcgcacttgtttcgttgatcaccgttcttcacctgccggtgacggaattcaaaaacacccgcctctttctctttctctctctgtctgtcaccagaatctgttccattcatcttctctggtttcgattccaattcgctcggggatctgaagattgatgacaaatactctggttctgtaccaataacaaaaatcaagttgagtactattctgctggaaaataatggaagcacatcctactttctccattgaaagttccaagcaactcaatatcatggggatgtccggagcactttcttcatcctggtcaatccttccaatacccccagaagagttgtttcccaagctggcctgaatcacagctggattttgtagaacaagagcttatgataagaccttttactcattcaagatatttgaattcctgtggagttattgggcatatatttttcgtctttccctggatattcaactgatcttcatcactc

SEQ ID NO: 8106 - DNA, 584 bp, Glycine max
tcgttcacgcgttctctttaccttcttaacgcaccaagcgaagcgaaaagcgctttctaacttaagtgatggcgaacgcagctgaagtttcagccttgaaccgcatcaaactgcatcttttgggtgaactctctccactggccactcccctaaactattttgatgaatcaaaccctagcccctctgaatcttccaattcccaatcttcttctgtttctcttaaccactacttcactgacctcttcgaattcgactccaaaccccaaataatcgacctccaaactcccaaaacactaacttcagctcagaagaaacctcaattgaatcggaaaccgtcgctgctaatcgctgttccaaagaagaccgagtggatccagttcgggagcccggatccgaacccggtgatggctgcgccggagaacctgccgcagaagaatcactacagaggtgtccggcagcggccctggggcaaattcgccgccgagatccgcgacccgaacaagcgcggctctagggtttggctcggaaccttcgacaccgccgtcgaagccgccaaggcctacgaccgagccgccttcagactc

SEQ ID NO: 8107 - DNA, 494 bp, Glycine max
gaacacaatactcttcaaacactttaccttcttcttaagacaacaagctaaaagcgcttctaacttaagtgatggctaacgctgctgaagtttcagcgttgaaacgcatcaagttgcatcttttgggtgaactctctccactggccactccccaaaacaaatttgaccaaacaaaccctagcccctctgaatcttccaattccgaatcttcttctatttctcttaaccactacttcactgacctcctcgaacccgaaattgaatttcctctcttcgaattcgattccaaaccccaagtaatcgacctcgaaaccccgaaaaccctaatttcagctgagaagaagcctcaatttaatcggaaaccgtcgctgctaatcgctgttccgaagaagaccgagtggatccaattcggaaaccctgaggtggcggcgccggagaaccagcctgagaagaagcactacagaggtgtccgtcagcggacgtggggcaagttc

SEQ ID NO: 8108 - DNA, 1847 bp, Glycine max
aaacatgccctcccttcatcctcttctcatcttctttcctttgcaacaactagttagggttttgagtttgtgttgttgcttttatccctgaaaatcaaatcagactcagaaagagaaagagaaagaaaatggcgctgaagtttctgaacaagaagggatggcacacggggagtttgaggaacatagagaacgtgtggaaggcggagcagaagcacgaagcggagcagaagaagttggaagagcttcgcaagcagatccaggaggagcgagagcgcaccgaatttcgtcttcttcaggagaaagctggcctcgttccgcaccaggagaggttggagtttctgtacgattcggggttgtcggttgggaaatctgcgaattctgaaggattcaaggccctcgaacagttaccgaaatccgatgcaacggatgcagcaggcgcaggctcctctgcttctgcttctaaggagggggcgagtgtgctcggggcgctgttcgaggagaagcctcagtctgccaatgatgcttggaggaagctccattctgaccccttgctcatgatccgccagcgcgagcaggaagcgcttgccaagataaaaaacaaccctgtccagatggctattatcaagaaatcgattgaaggaactgaaaataaggagaaagtttataaaaaggaaaagcggaagaagcactggtctagtaaatcaaagcataaaaaacagtctgattcagaagatgacactactgagaggagaaaacgaaagactggtaatgaagtttctgacaagaagcatcataaggctcaatcagattcagagtatcagtcaagtgaaggagaaatgagaagaaggaaggatcgctatgaggacaaaaaatacagggaaagatcacccagtcaccaacagagacaaagaaatggcaaagactacaaagaagatgctggtgacagaaattataacaggtccaggtcagaaaggagtgtccaaaagggtcaattggattcagggtatgaatcaagtgaaggagaaaagagaaggaagaattactatgaaggcaaaaaatgcagggaaagatcacccaatcaccaacagagacaaagaaatggcagagactacaaagaagacactggtgacagaaattataacacttctaagtcagaaagatatgcttcagaaggttggtccaatatagatgcccctaaaagcgggggtggacgaatttctgaagcaagctccaatagatattctgcttcttcacctgaacatggatcacactataagtgcaggaacgtggctcctaagctttcagaagaagagcgggctgttaaacttaagcagatgcaattagctgctgagttgcatgaagagcagagatggaaacgtataaagaaggctgaggagtcggatacaaaggaagcaattcagaatgataatgtttgtggcaagaattttttggatactgttcagaaaagtgtatatggtgcagctgaaggagggagcacatcaatagctgagagtgtccgtcgtcggacatattattctcaaggcaggtctggcggtgaaggcaatgcatttcggcgatgaacactcggtggttttatcgctaattgtagctctcttagttgtcgccagacccctcttgcatgtgctttcttccttggaccaaaaaatgattccttccatgtataatatgcgaaaagttgtttaatttcaagtagataatatattaagaattcatagttcatccttcatgattcgaaatttctatgttcctttgtgattttaaggtattcatgtcctgatgtaaaatatttaaaggcgtttggaatacagcatcaatatagtattttg

SEQ ID NO: 8109 - DNA, 301 bp, Glycine max
gatccctgaaaatcaaatcagactcagaaagagaaagggaaagaaaatggcgctgaagtttctgaacaagaaacatcataaggctcaatcagattcagagtagcagtcaagtgaaggagaaatgagaagaaggaaggatcgctatgaggacaaaaaatacagggaaagatcacccagtcaccaacagagacaaagaaatggcaaagactacaaagaagatgccggtgacagatattataacaggtccaggtcagaaaggactgtccaaaacggtcaattggattcagggtatgaatcaagc

SEQ ID NO: 8110 - DNA, 853 bp, Glycine max
ctaagacgacaaggacaacattatttgacgacttaaccccaaacaaaggctctgcaattgcaaattcagaggatgtcgatcttcgagtacaacggaagcgccgtggtggctatggtcggcaagaactgcttcgccattgccagcgaccgaaggctcggcgttcagctccaaactatagccacggattttcaacgcatttccaagattcacgacaagctcttcatcgctctctctggcctcgccaccgatgctcaaacattgtatcagcgtcttgttttccggcacaaactgtaccagctgcgtgaagagagggatatgaaaccagagacctttgccagcttagtctctgctctgctctatgagaaaaggtttggtccatatttttgccagcctgtaattgctggattaggggatgaagacaaaccattcatctgcacaatggattgtcttggggcaaaggagcttgcaaaagattttgttgtttctgggactgcatctgagtctctgtatggtgcttgtgaggcgatgtttaagcctgacatggaaccagaggaattgtttgagaccatctcccaagcactgctatcatctgtagatcgtgattgtttgagtggctggggaggacatgtctatgttgtcacgccaaccgaagtgaaggaaaggattttgaagggaaggatggattaacttgtaagccacctgagttttctgtttagtttggagttgaatggcatgacatttacaatccctttgttaaagggtacctttgttattgtggctctttagataaatgtatcctgaaaattatttatagacggttcacttgttctatattttagattatcagtgaaag

SEQ ID NO: 8111 - DNA, 820 bp, Glycine max
catcaacaacaaattgaaaggatgtcgatcttcgtttaccacggatttccaacgcatttgcaagattcacgacaagctcttcatcgctctctctggcctcgccaccgatgctcaaacattgtattagcgtcttgttttccggcacaaactgcatcaacttcgtgaagagagggatatgaaaccagaaacctttgccagcttagtctctgctctgctttatgagaaaaggtttggtccatacttttgtcagcctgtaattgctggattaggggatgaagacaaaccattcatctgcacaatggatgcccttggggcaaaggagcttgcaaaagattttgttggggctggcactgcatccgagtctctgtatggtgcttgtgaggcgacggttaagcctgacatggaaccagaagaattgttcgagaccatctcccaagcactgctatcatctgtagatcgtgattgtttaagtggctggggtggacatgtttatgttgtcaccccaaccgaagtaaaggaaaggatactgaaaggaagaatggactaacttttaagcgtgtttgttttgacgtactcctactttcggaggagcctgaacgtgaaaggggaaatttgttggattgacgttcatcaccatttcaaatggaaaatcaaatccgctctgggccaaccaaatcactcttttcttgtcattttgttatcctagtttggatttaattgaaaatcatttacccccaatttctgcagacggctatacctttattaactgttagaaagttttactctgtttcagtgttaagcagctacttccgtatttcaa

SEQ ID NO: 8112 - DNA, 397 bp, Glycine max
acacgcctccgtacggtgccaaaagaccacaaaaaggggaagacttaaccccaaacgaagaaaaaagactgagagcaattgcatcaacaacaaattgaaaggatgtcgatcttcgagtacaacggaagcgccgtggtggctatggtcggcaagaactgcttcgccattgccagcgaccgaacggctcggcgttcagctccaaaccatagccacggatttccaacgcatttccaagattcacgacaagctcttcatcgctctctctggcctcgccaccgatgctcaaacattgtatcagcgtcttgttttccggcacaaactgtatcagcttcgtgaagagagggatatgaaaccagagacctttgccagcttagtctctgctctgctttatgagaaa

SEQ ID NO: 8113 - DNA, 457 bp, Glycine max
gttagggtttagtacttccaaaagctctgcgaagtcggaaaaaaagttggcggaaaagttggtagcgaaagaaagatgtcgatcttcgagtacaacgggagtgccctagtggctatggtggggaagaactgcttcgccatcgcgagcgatcggagactcggggttcagctccagaccattgccaccgatttccagaggatttcaaaaatccacgacaagctcttcatcggtctctccggcctcgccaccgacgcccagaccctctaccagcgcctccttttccgccacaaattgtatcagctccgcgaagagagggacatgaagccccaaacctttgccagcctagtctccgctattctctacgagaaaaggtttggtccatacttttgccagcctgtaattgctggactaggagatgatgacaaaccattcatttgcacaatggatgccattggag

SEQ ID NO: 8114 - DNA, 715 bp, Glycine max
gtttgggcgggggcaatttcggcacaagagtaaaatcttaatactactatttatttaatttttttcggatgaatagaaaatttatttagaatagagcgtgaataaggttaaataaattctcgtagcagcgttttgtttcccatcgcccccttttgctctccctctgtgcagacatgttgttcttctcgtacttcaaggatttggtggggagggaagtaatcgtggagctgaagaacgatttggccatcaaaggaacattgcattctgttgatcagtacctcaacatcaagctcgaaaacactagcgtcgtcaatcaagaaaagtaccctcacatgctttctgtaagaaactgcttcatcagaggttcggtagtgagatatgtgcaattgcctccagaaggggtggacattgaattattgcacgatgccacaagaagagaagcccggggcggttagtgtcttcattttgtgatgtatcttatttatgagaattcggtgggcttacataaggtggatgttaaccttcctacttcagaaggaaactcttttcagatgttaaaggttatgtaactgtattggcttttccttttagttcttttggaagctttgtccagttttaatgtgacaaaaatgatactggtgtaactgcatttctttttctttcccctagtgcctctatattcgaagaaatatcaccaagtataatgcatttatat

SEQ ID NO: 8115 - DNA, 395 bp, Glycine max
  unsure (1)..(395): unsure at all n locations
gagaataaggttaaataaattctcgtagcagcgttttgtttcccatcgcccccttttgctctccctctgtgcagacatggtacagattcgtttctttgttttctgttttctgtttcctgattttcgtttgagtggtgaaaattgggtgggttgtggtggcagttgttcttctcgtacttcaaggatttggtggggagggaagtaatcgtggagctgaagaacgatttggccatcaaaggaacattgcattctgttgatcagtacctcaacatcaagctcgaaaacactagcgtcgtcgatcaaganaagtacctcacatgctttctgtaaaaaactgcttcatcagaggttcggtagtgagatatgtgcaattgcctccagaaagggtggacatt

SEQ ID NO: 8116 - DNA, 461 bp, Glycine max
gaagaggagtctgtcgtgtcttgtgtcccagctctttatatttttctcatagcctgacctttgccgaacataacggcgatttctccaaaaccttcaattccaccttcttcttctcatcttcacaccctacccctttattcttcttcacacacaattccttcaactctctttctctctctctctctctctctaaaaatgtctcatgtagtggtcactcgatccattcacacctccctcacgcgccccacctcaggatctgcacaccacagagcccaaacgttgttgaagcctccaacttttgcttccaaagtgttcccacaacaaaggaacaacccctccaaagtttgctcccgaagttgcctcgtcaatgcgaggaaatctgcacccactgaagttgttcccgtctcacccgaggatgattcaaagattgaagaagagttgcagcactcgcgtggtatgcg

SEQ ID NO: 8117 - DNA, 850 bp, Glycine max
cggaattcccgggtcgacgcacgcgttcgttcgggttccaaaaaaactccatagatcgaagtggagcttccatttcatagccggcggtgaagatagatagttagcagacttggctgaccctgagcaggaggaataagaataagatgcctccttatgattgtatgtttctgtttaagccccatataaggaaggaagctgtcatggatttagttgtgagggtgggaaagcatgtgtgcagaagaaatggggttgtcactgatatcaagagtctcggaaaagttcagttgggctatggtgtgaaaaagctagatggcagatattatcagggcctactgatgcaaatgagcatgatggctacacctgaaatcaacaaagagttgcattacctaaacaaggaagaccggttactgcgttggcttttggttaagcagcgtaatacaaaatttgggcttgactcctatggtgatgaaggtagatatgagctaagcaaattgtcccagatcggtaaacatggtgatgaggatgaggatgaagatgatgaggaatatgaagtgaatgaagaagaaacagtgaactaaaagatagctgagtatcctgttagtttccattgtgagagtacaaaaccattttgcatagtattgttggtgtcaaacatttgcttacttacggtactaggtatcaatcaaacatgaccagtgggctcgaacatgttatttcataaactccgagctgtctcttgctattcgaaaaaaacatctttgtagctttggtgaaataattgtaactcgtggttgtgttagccaggatctacgaacagtttggttcattcaatatacttctaattggtgcc

SEQ ID NO: 8118 - DNA, 421 bp, Glycine max
ggtggaagtggtggattaggaggaccggtggtgccgggtggtgcggggactttaggtggagctggtggtttgggatgtggtgttggtggtgctggtgtctttcaacattgtaataatccttgatatcattctggggcttgcatgcatggctgttcttgttaatctagggctgccaatattaattgttttttaggttagataatcttagcctcttagcatttgatttacttgttatgttattttagattcaagttgttataattgtcttggtttactgtttgatgtttctggtcattaaaggctgcatgcatcgacagggtcactatcgttgttgttagttttgtactccactttttgttagtgttttcaatgtcatctgtcgttgcctttctttccttctttaagcaacagagtacaactt

SEQ ID NO: 8119 - DNA, 433 bp, Glycine max
gaaacacagagtcaaccgcagaaggcgcagtccaaccctcaaaatgcattcattcggctacagagccaacgcgttgctaacctttgccgtaaccattctggcgcttatgtgcgctatggcttctgtatccgacaacttcaacacccccactccctctgcacaagtccaggttctgaacatcaactggtttcagaaacaacccaatggcaacgacgaggtcagcatgacgatgaatatttccgcagacttgcagtcccttttcacatggaacacaaaacaggtttttgtttttctagctgctgagtatgaaactcctaagaattccttgaatcagatatccctatgggatggtatcattccctctaaagagcatgcaaagttttggattcatacatcaaataaataccgcttcattgaccaagggagcaatttg

SEQ ID NO: 8120 - DNA, 471 bp, Glycine max
gaattcccggctcgacccacgcgccgggcgggtgggcgaacaacttctccaatctctcttcttctcgtgcactgtagaaattcagaagctcatcgtcatcgcgagaaatcttggtcataaaccctaaactagttttagtttctggaacattgataaccaattcaacaattgagaagcgatgcttggcgatggaggcgaaaccccctcaaggtatgaattgttgagcatggtgaagaagcattccaatttaatagggaaaacggtagttgaggagcaagatgcttctgatatcgaaatggatatgaggttttggcacgatgtctttgatttgtattttgtctgtggcaaggaatcaaggggacgccaagatgatgatcttgttttctttgtcagaaaattgggttcccatggttctggttccaacaataaaacagagagcgttgatccttattttgtacgcagttgagcgac

SEQ ID NO: 8121 - DNA, 541 bp, Glycine max
ccagggaaaaaaaaaaaaaaaacatgacgtttacccagaaaaatgtaaagtggaaattgtagacaagcaaagttacctaacaaatgaggattataccctcttttaatgtgatggaactgaaattttcccagccatgaaaaccttgggaacccacatggccacaaaactcattaaaatcatgtgggacaaacatatgaaaggacatgagttacaatgtcagactttgtagtttaaaatctcttttcattttctcatcctttagatctagcctcagtgctctgaagatcctctgtcaaaaagatccaaaacccttttcttatccattgtcttgtttcctttcatcactcaaatcttagaccaactctgccatatcgagtcttttatgtgcttttacagctaagtctgttgctgaaaattggcacaactcgaagctcccaagtgcatgcagctcaggttcaaggtacatagaaccaacacgccatcagtattctctgaacttgcatgacagctacttgcttttctcatcccaaggtacatacta

SEQ ID NO: 8122 - DNA, 688 bp, Glycine max
cgcaagcctggattcggttgtgatataaacctgcgttgcgctaaacgacaccgttttcactgtctctgagaatggaggcactaagtcgctccgtggaagaaatattcgaggatttccagggccgaagagccggcatcatcaaagcccttaccaccgatgttgaagatttctacagccaatgtgatcctgagaaggagaatttgtgcttatatggatttcctaatgagcaatgggaggtaaatttacccgttgaagaagttcctccagagcttcctgagcctgtcctgggcattaactttgctagggatggcatgcaggaaaaagactggttatctttagttgctgttcatagtgatacatggttacttgcccttgccttttattttggagccagatttggatttgataaaactgacaggaaacgactattcagtatgatcaatgaactgccaacaatatttgaagttgttactggtgcagcaaagaagcaagttaaggagaagtcttcagtttcaaaccacagtggcagcaagtctaagtccagctctaagcgagcttcggaatctcaggctagactgccagagccattgcgatcataagatgaggatgaagaactggacgatcaagatgacgatgaacatggagagaccttgtgtggggcatgtggtgaacattatggcactgatga

SEQ ID NO: 8123 - DNA, 490 bp, Glycine max
ggttgttgttgttgtgcattttgcactttgcaaaaattttgttgcagaggcagagaggaggcaacaccacaccacaccgcaccactctctacactctcactctgcaacactcaaatctcgtttccacctaaacgacttcgttttgcgttcttttcccttcttctgatttaggtttcagagggaaaaggagcagcgatggactcacgcacgtataatcctcgcaccgtcgaagaggtttttagggatttcaagggccgaagagctggtctcatcaaagccctaaccactgatgttgaagatttttacaaccaatgtgatcctgagaaggagaatttgtgcttgtatggctttcccagtgagcagtgggaagtaaatttacctgaagaagtaccaccagagcttcctgagcccgtgctgggcattaactttgctagggatggcatgcaagaaaaagactggctatctttagttgctgttcatagtgatgcat

SEQ ID NO: 8124 - DNA, 415 bp, Glycine max
gacgacagaagggggttgttgtttgttgttgcattttgcacttgcaaaattttggttgcagaggcagagagaggaggcaacgccacaccgcaccactctcactctgcaacacccgaatctcgtttcacctaaacgacctcgtttttgcgttcttttcccttttcttcttctgatttaggtttcagagagaagaagaaggagcagcaatggactctcgcacgtataatcctcgcaccgtcgaagaggtttttagggatttcaagggccgaagagctggtctcatcaaagccctaaccaccgatgttgaagatttctacaaccaatgtgatcctgagaaggagaatttgtgcttgtatggctttcccagtgagcagtgggaagtaaatttacctgctgaagaagtaccaccagagct

SEQ ID NO: 8125 - DNA, 834 bp, Glycine max
caggtacctccttggataaggctttttcttcagtacttgttcttggtggaacaaccttgtaagtttgtaacaatgacttcctcggttacttcctcttttcgcatcagcaatttgaattctgtttttgttggtgagacaaataaattcagagtttcaactgttcctggtgctcatgttggtttcattagaaagactgtagaatgtaaggaatcacgaattgggaagcaaccaattcctgtgccatccaatgtcacagtcaaattggaaggacaggatatacaagtgaaaggtcctttgggagaacttgcattaacttatcctcgagaagtgttggttgagagggaagagtcagggactctaagggttaaaaaggcagttgaaaccagaagggccaatcaaatgcatgggctttttaggacacttacagacaacctggtgattggagtatctaaaggttttgacaagaaacttcaacttgttggtgttggttatcgtgctatggtagaaggaaacgaagttgtgctgaatcttggattttctcatcctgttaagatgacaatccctgatggcctcaaagtgaaggtggaggaaaacaccagaatcacagttagtgggtatgacaaatctgaggttggccagtttgctgcttcaattaggaagtggagacccccagaaccatacaaaggaaagggtgtcaaatatgctgatgaaattgtaaggagaaaggaaggaaaagcagggaagaagaagtaatggggggtttcaattttcctttttcatttatctcctgttgtttttcctcatttgttagcaatggaaatattttaaccgagt

SEQ ID NO: 8126 - DNA, 740 bp, Glycine max
cttttaggctgacttgtgagaaagaagcttaagggagaaatgaccgaatgctattcacttctaaatcttcgatttccatcgtttcccgtcattgatttcggcgcaaaaatcttccccaaacgtttccccaaatccatttcattctcacacccttcatcgaagtttcaactttgtggaatttcccgagctatggaagtggtcgaaggaagtgaagagagtaaagggtcgtcatcccctctaatgaagctcttgttcgtggaaatgggtgtcggctacgatcaacatggacaggacataacggttgcagcaatgagggcttgcagggatgcaatctcttctaattcaatccctgctttccgcagaggttccattcctggtgtcagttttgatcagatgaaattgcagattaaactaggggttcctcattccctccagaattccttggatattgagaaagtgaagtcagtatttccctatggagaaattttgaatgttgaagttgtggatggtggtttgatatgctcaagtggggtacttgtagaagagatgggtgacaagaatgatgattgttacattgtgaatgctgctgtttatgtgggctattaactttcaggttttgcagagctttgctctgtttgttctcttgttaatggatgattactacatttttgtgctgtgtaataacataataacaaagttgtacattactacatttctctaaattctgttcttgctcggct

SEQ ID NO: 8127 - DNA, 515 bp, Glycine max
ttttaatttgttttgttattcttgttttccctttgcaattgtttcgtgtatatcttcttacatataacaaaccattcatttttatggcattggcattgggtaacattgttgctcttcctctctcaaacttgaaaccttctctaaagttatcttcttcttcatcctcttgttgtatcaccaaactcttccccatttcccgcatcaatgtctctcccacctcggtattagttcgagcctcttcctcatcctctttcgggtctcgcctcgaagacaccatcaagaagaccgtagctgagaacccagtcgtcgtttattccaaaacctggtgcacctattcttccgaggtcaaaatcctcttcaaaaaactcggcgtcgaccctctcgtcttcgaattagacgaaatgggtcctcaagggccacagttgcagaaggtattggaaaggatcacagggcatcacactgtgccaaatgtatttattggtggcaaacacattggcggctgtacagatacactg

SEQ ID NO: 8128 - DNA, 429 bp, Glycine max
ggaagaagtaatagtatggcattggcatcggctcgagcgctattcctctccaaacttgaaaccttgtccaaagttatcttgttgttgtatgaagaaactctttttcactcactcagtccccatttctcgcatcccaacaacgccaaagcgtactcccaccaccgtagttcgagccacttcctctttcgggtctcgcctcgaagacaccatcaagaagactgtagccgagaacccagtggtgctttattccaaaacatggtgctcctattcttctgaggtcaaaatcttgttcaaaaagctcggcgtcgacccattggtcttcgaattagacgaaatgggtcctcaaggcccacagttgcacaaggtattggaaaggatcacagggcaacacactgtgccaaatgtatttattggcggcaagcacattgg

SEQ ID NO: 8129 - DNA, 660 bp, Glycine max
ggaaacagaaaatatattaggagagatatactaatatttatatcatgaacatccttccgacgaaatgagtgatttccatcaatgaacagtatactcggtaaaagaaaaagaaaaaaacatgtgaaagtgacagtaagctttgatgttaacaggttaaagatataagcctaagctaagtggagacgctgttgccatttctgctcattgagtgaaagttccattgggcgtggtttaatggaagggatgaagcagcttgcgtacaacactgcggtgaagctcattctggctgcactcgaacacaacttgctccctgactttgtcaccaggagatatggtcgcttcatggcggctaacatccttcgctctggctacaaatcatcctccgaacttcaactctccgatctccttcactttgcgcattctctacaacagatgcccatagcaatcgacactgatgagacaaattctcaactttatgagttgcctaccgctttcttcaagttggtgctcggaaacaaactcaatttcagctgttgctatttcccttctgcctctatgacactggatgatgctgaagaagcaatgttgaaactgtgctgcgagagatcaaatttgaaagatggtcatacagtacttgatttgggatgcggttggggatca

SEQ ID NO: 8130 - DNA, 901 bp, Glycine max
gggccctggggtttccagctctggttacgggcctctatcagtcctacagggtgcccgtgacccacccggcaaggtcacgtcatcataggtaaggatgcatatcgctcgactgatttctgatttcatctattgtttgcaaggatcgcgcctgcaagacacccagtggacccgaagaggtccaacagggtcttggagttgtcaagctctaattacgggtctctgtcagttctacggagtacctgtcacctccagcaagggcatcaggccccctactaatcgagctttcatcaagaagtactgcgtccccaggcaggcgcagggcgaaacaccacagcagcattgggatggccggtagcgggcaatagacacaccgccaccacctctagagttcacctcagctcatccgcaaaaaggttagagcgttgcctacgacacatggccgaccagcaggcgaccaagtccaaagccaaaggtaagcaaagtactaggtccgtgaccgacaagccatcatgcgtccagctcaagacgttaaagaagcgctactaggaggcaacctagtaccttttaaatctctgcttgttatttgatcaccttttgtttctcaagtcatagcaggacacacctagttgctcatgatcctaggaatttaaataaaacaagcacaagctcggaaggtagtcatacctcacaaaaagaaatatgtatatatgtatgtttaggtagaaagataccttgaatacttcacaaaatatatatatgtatgtttaggtagcaagataccttggatatgcatgtatatagcaaaaaatatctcacaaaacatatatatgtatgtttaggtagcaagataccttggatatgcatgtatatagcaaaaatattatacgtatgtttaggtagc

SEQ ID NO: 8131 - DNA, 446 bp, Glycine max
  unsure (1)..(446): unsure at all n locations
acttcacaaaatatatatatgtatgtttaggtagaaagataccttggatatgcatgtatgtagcaaaaagatacctcaccaaaatatatatatgtatgtttaggtagaaagataccttggatatgcatgtatatagcaaaaatacctcacaaaacatatatatgcatgtttaggtagcaagataccttggatatgcatgtatatagcaaaaatacctcacaaaacatatatatgtatgtttaggtagcaagataccttggatatgcatgtatatagcaaaaatacctcacaaaaataaacacatgtttaaggtagcaaaaaaatttaatttcctttttccaaaatttgggggnnnnnnnnnnnnnnnnnnnnnnnnnnnnnnnnnnnnnnnnnnnnnnnnnnnnnnnnnnnnnnnnnnnnnnnnnnnnnnnnnnnnnnnnnnnnnn

SEQ ID NO: 8132 - DNA, 830 bp, Glycine max
gatattaaattttttcgtcacccagaagaagagcgagagagagtgggggaacgaagaagctacagctacagctgaaacagaagctccttcgatctacaatctatagcgattaagctctcattttctgagagtgttctttctttctctctctctctctctcaccgtgattccaccatttccccatcatgatttctgctaccaaactcaaatccgttgatttttacaggaaaatcccgagagatttgactgaggcgtcgctatcaggagccggattatccatagtggcagctctggctatgatgtttttatttggaatggaactaagtagttatttgtctgttagcacctcgacatctgtaattgttgacaagagttctgatggtgactatttacgtatcgatttcaatatcagttttcctgcactctcatgtgagtttgcatcagttgatgtgagtgatgtgctgggaacaaacaggctcaatataacaaaaacagttcgtaagttttctattgattccaatttaagacccactggtgctgagtttcattcaggtacagttgcaaatgctgtaaagcatgatgatgaagtagatgaagaatctgttgaaggttctttttcactcacaacacataattttgataaatatgttcatcagtaagtggcaacttctaaaaatatttcattcaatttttctttgctttagctttgtgagaactcagaagttccttttaatatgcattgtttactcggtttttaataattcttttgcaggtttccaattactgctgtaaatttttatgcaccttggtgttcctggtgtcaacgtttg

SEQ ID NO: 8133 - DNA, 826 bp, Glycine max
acacgagagaagagctatgacgcacgctgccctaagactcgaaattcgggttcattgaaagaaactgttgaatcgcgtcgattaaggttttgagatttctaggctttcatctcagacagtgaaaaaatgatagatataagtacacttaatgctgcacagattactgtgctgggatctgccttttgtgctatgctttccatgcatttcacgtcgcagttactgtctcagcatctcttttattggaagaatccgaaagagcaaaaggctattatcattatcatcctcatggctccaatctatgcagctgtctcctttgtgggtctcttggatatcagaggaagcaaggagtttttcacctttttggagtcagttaaagaatgttatgaagctttggtcattgccaagtttctggctttgatgtatagttacctgaacatatccattagtagaaacattgtgcccgatgaaattaaaggcagggaaattcaccactcttttccaatgacactctttcagcctcgtactgttcgcctgaaccaccataatttgaagcttctaaaatattggacatggcagtttgttgttgtccgtccagtatgttctgttctgatgattgcattacagctagtcgggctgtatccaacttggttgagctgggcattcaccatcgttctcaacatatctgtgtcgttagccttgtattctctggtggtcttttaccatgtgtttgctaaagaactggcaccacacaaacctttagctaaattcttgtgcatcaaaggaattgttttcttctgtttttggcagggaatgttgctggagcttt

SEQ ID NO: 8134 - DNA, 959 bp, Glycine max
ggtattgtagattgtagatccatccactccctcgcacaggcatcaggtgagtttgttgtgatttgaatggagggaagtggaggtggcggtggcagtggcggtggttcaccttctgcacctgtgaagcaatacttgcaggaattctcgaagctttttcagtactatctggataaatccactccccatgccctctacagatggattgggactttcgtgattgcatccatctacgttctgcgtgttgtttatttgcaggggttttacattgtctcctacggcctcggaatctaccttctcaatctcttgattggctttctctcccctttggttgatccagagctcgatccctccaacgccgatgagttcaaacccttcattcgccgcctcccggagttcaagttctggtattctttcaccaaggctctctgcatagcgtttgtgatgacctttttttccctgtttgatgttcctgtcttttggcctatattactctgttactggtttgttctctttgtccttacaatgaggcgccaagttgcacacatgatgaaatacaaatatatccccttcaacttggggaagcagaagtatagcggtaagaaatcttctgcaagtagcagtggctctcgtgcagactgaaacttgtctctcatgattggaagatctacttagttaggttttgtgaacattcaggctagttaattccccccttttctatgaaagaatttgtattcatggtattatggatgtcagtatgcattatgctgttacggaaaatcttaatgtccactcgttttattatacatgaagaattggtgattgatagtgaatctcattgtcggtacacatgttattgattggacttttcttgtaaatctcagcttgtattgtgaatttgtgatgctgtaatttttccttgcttggtggcttctacctcaatattaaggcaaagttcatct

SEQ ID NO: 8135 - DNA, 731 bp, Glycine max
gtaggtggtgaggctgacctcagagcagtagatggcttccacttccatagttccattccagctcttaacaattacatgagacagagaaagggttgacggacagagaacccaccttttgttgtattgcagatccatccgctctgccaccaggtgaatggaaggaagtggcggtggcggtgcttcaccgtctgcaccggtgaagcagtatttgcacgatttctcgaagctgtttcagtactatctggataaatccactccacattccacgtacagatggattgggactttcgtgatagcatccatctacgttttgcgcgttgtttatgtgcagggtttttacattgtctcttatggactcggaatctaccttctgaatctcttgattggttttctctcccctttggttgatcctgagctcgatccctccgactcccctttgcttccaaccaaaggctccgatgagttcaaacccttcattcgccgccttccggagttcaagttctggtattctttcaccaaggctctctgcatagcgtttgtgatgacctttttttccctgtttgatgttcctgtcttttggcctatattactctgttactggtttgttctctttgtccttacaatgaggcgccaagttgctcacatgatcaaatacaaatatatccgcttcaacttggggaagcagaagtatagcggtaataaatcttctgcaaggagcagtagctctcgtg

SEQ ID NO: 8136 - DNA, 877 bp, Glycine max
atttatttggaggccatgagattttttaacccaccatcacttaaaagctaattaatggggtttttagttttaatctagcctgggaagggtatagatggtgaggctgagctgaacgcagtaagcactaaggagtagcgagtattggctgatacttgcaccctcttaacaataacatgagacagagaaagggttgacggaaaggaaaaccaaatcaaacccaacccaccttgtccgatctgccaccaggtgtggttgttgtgatttgaatggaggcaagtggaggtggcggtggcggtgcttcaccgtctgcaccagtgaagcaatatctgcacgatttctcgaagctgtttcagtactatctggataaatccactccccattccccctacagatggattgggactttcgtgattgcatccatctacgttttgcgtgttgtttatgtgcagggggtttacatctgcaagtagcagtggctctcgtgcagactgaaacttggttcttatgatttgaagatctactaagttaggttttgtgaacattcaggctagttaattttccccctttttttaatgaaagaatttgtattctgggtattatggatgccagtatgcagttacagaaaatcttaatggtccactgttcatgttatacacgaatacgtgctaatattggtagaatttcgttgtcggtacacgtattgattggatttttcttgtaaatcttagcttgtattgtgaatttgtgatgctgtaatttttccatgcctggtggcttctacctcaatattaaggcaaagttcatctaaaaaaaaaaaaaaaataaaaactaataaatcaataaaaggtgaaaagttttaataaaaaaatgggcgttc

SEQ ID NO: 8137 - DNA, 566 bp, Glycine max
gctgaacgcagtaagcactaaggagtagcgagtattggctgatacttgcaccctcttaacgataacatgagacagagaaagggttgacggaaaggaaaaccaaatcaaacccaacccaccttgtccgatctgccaccaggtgtggttgttgtgatttgaatggaggcaagtggaggtggcggtggcggtgcttcaccgtctgcaccagtgaagcaatatctgcacgatttctcgaagctgtttcagtactatctggataaatccactccacattccacgtacagatggattgggacttttgtgatagcatccatctacgttttacgcgttgtttatgtgcaggggttttacattgtctcttatggcctcggaatctaccttctgaatctcttgattgggtttctctcccctttggttgatccagagctcgatccctccaacgcccctatgcttccaaccaaaggctccgatgagttcaaacccttcattcgccgtctccctgagttcaagttctggtattctttcactaaggctctctgcatagcgtttgtgatgacctttttttg

SEQ ID NO: 8138 - DNA, 368 bp, Glycine max
catgtattgtagattgtagatccatccgcatccgctagctcgcgcaggcaccagcaggtgaggttattgtgatttgaatggagggaagtggaggtggcggtgcttcaccgtctgcaccgttgaagcaatacttacaggaattctcgaagctgtttcagtactatctggataaatccactccccatcccccctacaggtggattgggactttcgtcattgcatccatctacgttttgcgtgttgtttatgtgcaggggttttacattgtctcttatggcctcggaatctacctcctcaatctcttgattggctttctctcccctttggttgatccagaactcgatccctccaacgcccctatgcttcct

SEQ ID NO: 8139 - DNA, 364 bp, Glycine max
cctcgagccgaatcggctcgagatccactccctcgcacaggcataccgtcagctctcattcactgatatgtttccttttccaccatcttaggggttctgctttcctccttatccacccagatctcattactcatttccccttgttttaataatatccgtctattttgcaccaccacacaaccctaatattgggatcacaggtgagctcgtcgcgatttgaatggagggcagcggaggtggcggtggcagtggcggtggttcacctactgcacctgtgtctcaatacttgcaggaattctcgaagcttatccagtactatctggataaatgcactccccatgacctctatacatggattgggact

SEQ ID NO: 8140 - DNA, 510 bp, Glycine max
gacttccaacttgaggattcaaaagcaggaattctttgaattctctgagcaatcagtgctgtccaatctctattggggtattgacagcattgaggctgcaattcaagctcaacagccagaagaaagatccttcaggctaaggaactcagaacaaatgcttcaggtgccagcaatgcttgatgaggaagaggtcacagccacaattccaaaccgttacttggtgtgctgctcctacttttacctctcagtggttaggaagctccagggagatgagtggcaggcagcactgcattttctccaagcagttttggtctcaccaaagcttgtttggacagaatttgcatcacaactttgtgaaagtcttttcccacaatcaggcatcaccatgatgcagagaaacaagagcagtagaagtctggaatctgtgtcttctgaggatgagatggatgaagcaattaaggaggtggcaaggaagtacaaggagtggcttgtgtattaccaggtcatgct

SEQ ID NO: 8141 - DNA, 485 bp, Glycine max
gacacaaaacccgctaataacaacattcaacaattttctttttcttcatcttttttctttttcccagcggttcaggaaactcttcttcgtcactgtggttgaaaatcgaatcctttctctctctctctctctaggcaataaagtgaaacgcatcagagaaattcaattcaatggatgcaaatcgcgagcaaattgtggacgttgggtcggtggtggaagccgtttctgctgacgacggtgacgctcctctctacagcctcgaaagtctctgcatgcgttgcggtgaaaacgggacttcaagatttttattgactttaattcctaactttagaaagattttgttgtcagcttttgaatgtccacactgtggtgagaggaacaatgaagtacagtttgctggtgaaattcaaccacgtggttggtgttactccttggagatcccatcatgcgaacaaaaaatgcttaatcgacaagtggtaaaagct

SEQ ID NO: 8142 - DNA, 578 bp, Glycine max
ggtcgtgaacgtgtacaattccacaaccactttatttactctccttctctcctctcccttgagcagattaaaatcatgggtccgatggtgctgagccaactcgccaccggtcttagcgttctcgccggagcggttcttgtgaaatcggttatggaccagaagcccatggcaggcccattcactcgctgccccacgtgcaacggaaccggtcgagtcacgtgcctctgttcgcgttggtccgacggcgatgtcggatgctccacatgctccgggtcgggtcggatggcctgcagcagttgcggcggctccgggaccggtcgtcccttgccggccaaaatcgcgattcgcccaccgaaccgcccaattaattaggtcacctattcgttgggctcgctcgccactactccttgtagcgttagtataacattctatttttatttttatatcaatcaattatcaattattatgtaatataaagttgaacgttaccacctaagcaaattaattgttaggttccaatcatatactactagtattactgtaattcgtattcttgatttcttatacaagcatagatt

SEQ ID NO: 8143 - DNA, 467 bp, Glycine max
cccaccccatacataacataaaatcttcctccgttcaatcttcatctctctctctctattcatctccgttaagcaaaaatcatgggtccgatggtgctgagccaactcgccaccggtcttagcgttctagccggagcggttctggtgaaatcggttatggaccagaagcccatggcaggcccattcactcgctgccccacgtgcaacggaaccggtcgagtcacgtgcctctgctcgcgttggtccgacggcgacgtcggatgctccacgtgctccgggtcgggtcgcatggcctgcagcagttgcggcggctccggtaccggtcgacccttgccggcgaaaatcgcgattcgcccgccgaaccgcccaattaattagttcaccaattcgttgggctcgctcgctcgcttgctactactccctttattttagcgtcagtataacattttaattttatatagcttttt

SEQ ID NO: 8144 - DNA, 568 bp, Glycine max
gcaatcacaatttttctcatacggcatttgtcggcggtgacgaaaggaaagaagaagaagaagcgttctttcggagagttcgaagatgtcgggcgttaccaacaacaacgaggaagacaagaagccaaccgaacagggagcacacatcaaccttaaggttaaggggcaggatgggaatgaagtttttttcaggatcaagagaagcactcaattgaagaagcttatgaatgcttactgtgaccgacagtcggtggatttcaactccattgcttttctgtttgatggacgccgcctccgagctgagcagactccagatgagttggaaatggaggacggggacgagattgatgccatgcttcaccagacaggaggttctgttgtctgaaggatgtgattactttgctcctcattataagtaggaattagttaacttagagctatgtatggcataagatacatattttattatctgctattatatacagcttttgccggtggattttggaggcattgtgcttcctcttcaatatgatgattatgaatggattgttatagaaaaaaaaaaaaa

SEQ ID NO: 8145 - DNA, 702 bp, Glycine max
ggttgaacttcattgtttttggctaagcctcgaaatccagaaaaatcgtgagcgaagatgatgcacatgaccttttactggagcaggaaggtgaatctcctaatagattcatggaagaccaacgattggacggagtatctcatcactctgctcgcatgcctcgtcgttgccgccttctaccagttcctagagaatcgccgcatccgcctcaagctcatcggcgccggaaatcccttcccggcagagatcgaggccccgcttctgcgacggaagcttgccggaaaccgcgccaaggtgggcgtgaaggtagccggagcgtttctgttcgggctgagctcggcgatcgggtacttgctgatgttgtcggtgatgtccttcaacggaggggtgtttgtggccatcgtcgtgggtctcgctgttggttacttcttcttcaggaacgagggcgaagattcccttgttgttgatacttcttgtgcctgtgcttaaatcctaattacttttaaatctcccaatttcctgtaataataatataataggagtagcagtgcttgttaattattttcctttttttaatttagcaaacttgtttcaaggaatttgggatgtgtaatttcgtgtacgaaattgtatttaattgtaattgtaataatcaagtcaagatagtacccccattggaatgcttgaattcttggcctcgag

SEQ ID NO: 8146 - DNA, 562 bp, Glycine max
acgagccgccttctaccagttcctagagaatcgccgcatccgcctcaagctcatcggcgccggaaatcccttcccggcagagatcgaggccccgcttctgcgacggaagcttgccggaaaccgcgccaaggtgggcgtgaaggtagccggagcgtttctgttcgggctgagctcggcgatcgggtacttgctgatgttgtcggtgatgtccttcaacggtggggtgtttgtggccgtcgtcgtgggtcttgctgttggttacttcttcttcaggaacgagggcgaagattcccttgtcgttgatacttcgtgtgcctgtgcttaaatcttccaatttcctgtaataataataatataataggagtagtagtgcttgttaattatttttccgttcatttctagtattttccgtttttaatttagcaaacttgtttcaaggaatttgggatttgtgatttcgtatatgaaattgtaattaactgtaattgtaatcaagatagtacaatgggaactcttgattctaagttgaatttaatgtgggatcagaggaaaaaaaaaaaaa

SEQ ID NO: 8147 - DNA, 388 bp, Glycine max
caccagttccctgatgagtccttgagtgaagcattggagaggtttcggggtttgttgagaaagactcccacacatggattctctgagccaattcaattgaacatgtttatagatgggctgagaccataaaccaagcagttgttagaggcttcatcaggaggaaagataaagctgaagacccctaaggaggcaactgagttgattgaaaatatgtctgccagtgatcatgctattctaggtgatagagtgcatcaacccaccaagaggagcttattggagttatcatcgcaagacattgtgttggcacaaaataagttgctttctaagcaacttgagatcttaatagaaacaattggtaagttgccaactaaattgtctactggtcaac

SEQ ID NO: 8148 - DNA, 536 bp, Glycine max
ataaagcttttaattaaagtcgattgagatgctttaatggttggaaggttggcgtcgtatatgaacaatgttgaggtagcaaatttatgaacttcatctgtgatcttttatataattgacatagagctggccacattatacatcttttggaaccttagctagtccaatccaataagagctagtccacctcaccccatggccatgggatgaagtccttagcatgacccgattgcaaggtgaattcaaatcatcctagaataagaaagcattttactttcaaacgtgtaaaaactttccaataaggtcatgcatatatcaaccatctcaatccatctcaaaattttcttataaataaaccatcatcagcaatgtcaagtacacacgtttatgacattttctatcgtttgccaaaattcttattggtttgagttattatagtgtctttgtaggtacctcaactcttcaccggtcaccaccgatatctaccattttgaaagagagaactattgcaaaatcatctcagagctaacttgatc

SEQ ID NO: 8149 - DNA, 525 bp, Glycine max
atcaccttctcaacaacgcgaatatattccgttaatgaaaaagcggtagccgctagagcaggagattgaagggcgaaaaagaagactgagagaagagagatgggcgtgacgaaggaagaagttgaatcatccttgaaggccaaactgaacccttctcatcttgaagtggttgatacatctggagggtgcggtgcaagttttgtggtggagattgtatcagaacaatttgaaggcaaaaggctacttgagaggcatcgaatggtgaatgctgccttagaggaggaaatgaaacaaatccatgctctctctattaagaaagctgttaccccagaccagtggaaacaacagcaagaatccaaccaatcaaatcctgctgcctaaagcatatgtttcggttataaaataagaaatccatgcagtgtattgctgactgttgatattctttgtggattctagttctatgtagttttatcatactcgatttataattggaccaataaattttgtttacaaaaattctggttt

SEQ ID NO: 8150 - DNA, 468 bp, Glycine max
atactttttatcatccaggaaagattgctctatttattatctatccagcgtcccacgtgctaaaatcaaaaggcatccactctttttgataatcaatgatacatattgtgttatggttattccatgcgtctagctcgtaagaaactcacacaccttctgaaatgatcagtattgagcagaaagtttgtgataacggaaaaagaaaggtaagtacacgtgctttatattataaaattcattttgtctctctttattttgaattgatagcgtttgaatttaaggaataggcaaaatagaagaaaatagaaggcattcacagaatattccctaaagtttgctttcgccaaggacaaggaacacatggtattgtttttactatcgtgcattcctcgcaaatcagtgtacgccacatagccttatcctcctctgtgtgacaacgatcttttcaaggaaatcaatcttctaccc

SEQ ID NO: 8151 - DNA, 355 bp, Glycine max
aaagataaaaatggatacgctcggagcccaacactggggcaatgaaaggcaccatgcataaacctcaaacgaacctaggggcagattagaagttctcacccaataggttccttgctacaaggtcatgacggaagacaacgattgggaccttagagccttacactggggcaatgaaaggcaccatgcagaaacctcaagcgaacctaggggtagattggaagttctcacccaataggttcccagctacaaggtcatgacaaaagataacaattggtacctcaaagccttacactggggcaatgaggggcattgtgcataaacctcaagtgaacgtatgggcagatcaaaagttctc

SEQ ID NO: 8152 - DNA, 367 bp, Glycine max
agacgacagaagggaactccattctataccatcaaacaaacaaacgcataagaaacatcacaaaaaaacaattaagctaccaaaacacaagaaaaacaaaaattaagaagaaaagcaagcatttgcaacttgcaaagaagccaaactacacataccctcaactggttagtgacagtgtcttcttgattgtaaaaggtaattctctgaacaccgggcaaaggcggtgcatcgacaatgctgaaggaattgtgggtcactatccacgtgtacttgttgaagggcaacccattgacctgcagcatgacccaaaaaaaaaaaaaaaaaaaaaaaaaaagcggcgctctaaggatcaagcttacgtacgcgt

SEQ ID NO: 8153 - DNA, 377 bp, Glycine max
tatatgcagtacctgtacctcataatgtaaaaccgtagcgcttaagtttttattaaattcatagatacaacacatacacaataaattccatgtatcaaaccgaaagaaccgttcgttcactttactgatcgagactccatttcaggaagcaccagcgcatgtggaaagtaatcaaattccattttttgctcatcttaattacgggcgtggtagaattaaactaattatatattattatggcgatgatattagcgacaaaatcgaaaaactggaacaaaaaatgtggcaatctctcatggtttttgtacgcaccgaaagcttgtgattatgcatccacagcatgaattaacaaataaattggctgcgcaaattttgct

SEQ ID NO: 8154 - DNA, 456 bp, Glycine max
ctccttaaggttccttttgaatccaagggtggcctttgttgtataaaatattttgggattaacccatgtcatcaagcttcaaggggattgacaaacccttggcatcactctacgatcttaaatcaagaaagtttcacttagtcacataccaaggttgacaatccattgccatccttcaatggggcacacaatcgatcccaaagccttatgttttcttgttgtgcaaaataatcgaagcttttttaaaaaaaaaaagaaaagggaaaaccctaggatcaatatttcgattgattgattaaatgtcaaacagctccattatcgtcacccaaaattgtcaagtgatttaacagaacatatgctctgagggagtccccgaagagatttgcaaaaaaaaatagaatgaggttgcatgaattctcacgtcttccaaaaagagatagtcaatctgtgttttcc

SEQ ID NO: 8155 - DNA, 340 bp, Glycine max
  unsure (1)..(340): unsure at all n locations
ggaaacgtgaaagcaaaacagagaagaggagctgcggaactcttcacttcatctcagcgagacagatagaaaaagcattaacgatgagatttcacggtaactttattatttgccgttatctttctcggttgcgaaatcaattcaattcaaacttcgaattcccactcccgaatttccggcatcgagctccattcttcctccgttcttactctgccgaagtgccagctcaactgtctccggagctcttaaacataatggagcaaagactctccgctattgagtacaggacttcttgtcttaacaattttctaaatcagccagaagcatcancatcagagta

SEQ ID NO: 8156 - DNA, 709 bp, Glycine max
aggtcagacacaactaaattgaacggtgggtgagtatatccttcctggaaaaagaaaatttcattcacaactcacaaggactatgcactaataggtatcttaaatatattcacacattaacatgacgtgattggtggtgacgttattagaatgaataaaaaataatagtagtatttaacaggtgtgaagaaggacatttgtttcttcgttctccctttccccacacacttcaataaactaattaaggctgtacaatagctagaaccacttatttcaccaaaataataaataaaaaactaggacacttaggctgcacaagtcttggccagtagacaaatgacaaataacttttaagaaatttagatgataaaaattaagcttaaaaaacttttaatctcaaaccatagaattaatttcgttttatcctctaaaagaaattccaaattatatgcctgcaaaaatattggtttacttgggttcttatcatgttaagtaatgatgtgtttggtggagaataaagaaataatattagagaaataaaattatacttttttatgaaacacattttttatggtctactttaattcaaaaagaattcttctatttccatccctttattttcatcctctaaaccaaacatacctaattgcgatacaaaacaaagctgatatttcctcaattacaaaaaactaaaatgaaaatctttccc

SEQ ID NO: 8157 - DNA, 556 bp, Glycine max
ggacttcaccttacactctcgatgtatttgcaagttttgaagatctattaaaattgacgcgaacacgaaaagactagaaaaaagggttaagaagtaaaagtttggtgtgaggtgtgagtgttctgcacgcaccgaatcaacaataatttctcaaacagcgttgtaaaagaaacacattagactaggcagataactatggctgtacattctgattcggcttcatccgagaagaaatcaagcaatggagtgaatgagttgctgacttttaatgctgagaacatgcaaagcaacatgaaaattatctattacagccgaacatttttatctataattggtggagttgttgctggtattttgggatttacaggcttgaaaggatttgtgttttacttacttctcatggcatttacttcacttgggctcgtggccaaagcaaagttttccacccacacatactttgactcctggaatcgagtgctacttgatggctttctgggtggcctaatgtcgttcgtgctgttctggacatttgcctatgacattgatcatatatttt

SEQ ID NO: 8158 - DNA, 278 bp, Glycine max
tgggcatgaacgataacactgaactagttctcacgtttgtgcttgcacttgcacctctccaacgataacaacgacgagcacaagatccagttacatattattcgagtagacaaggcaggcacatagtatggctggaccttttgagttgggttcatcaaagaagaaaccaggggatggagtgaatgatttaccccacttttaatgctggaaattctgcaaagcaccatgaaatttatttattacagccgaacatttttgtctataattggtggagttgt

SEQ ID NO: 8159 - DNA, 229 bp, Glycine max
gacgagcacaagatccagttacatactatgtacctgccttgtctactcgaataatatgtaactggatcttgtgctcgagtagacaaggcaggcacatagtatggctggacacttttgagttgggttcatcaaagaagaaaccaggagatggagtgaatgatttactcacttttaatgctgaaaatatgcaaagcaacatgaaaattatttattacagccgaacattttt

SEQ ID NO: 8160 - DNA, 1095 bp, Glycine max
caccgaccaccgaagctctcttaaccctaacactggttgacattgcatataataatagcagtgtttttagagggtaaatattcattgattcattgattccagatcctgaactcaacaacaacccaaagataaaaagcacaacacaagacactgaactcgcactcactgggttttcaaccatggatgcgatacggaagcagctcgatgtgttgatgggagccaaccgtaacggcgacgtccgtgaagtcaatcgcaagtactacgatcgcgacgtctgtcgtctctacctcgtcggtctctgccctcacgaactcttccagttaacgaaaatggatatgggcccttgccctaaggtccactccttgcagctccggaaagaatatgaggaggcgaaagcaaaggggaccgataattatgacagggagttggaggatgtaatagataagcttattggtgagtgtgataggaaaattggcagggctctaaagcggctcgaggacgacgatgcgaaagcggctattgcaatttcggtctctgaagttactcaaacagatgaggtgcttgagttgtcgaagcaaatcaaagagaaattgaaagaagctgatcaatatgatcttgaaggcaagtcagatctcaagattcgagctttagaggttgtagaggaacttagaactaagagagcggacaagcagtctatgcttcttttagatgccttcaacaaagatagggcatctttgcccacacctctgccaaatccaccacctttggcacctcttcctgtagttgctcctgatgctcgaacacaggagatgataaatgaaaacctgaagaaggctgaggatcttggtgagcaaggaatggttgatgaggctcaaaaagcattggaagaggctgaagcacttaagaagcttcctgccaggcaggagccactgttggattcttcaaagtatacagctgtggatgtgcggattacatgatcagaagctacgtgtgtgcgacatttgtggagcatttttgagtgtttatgacagtgatcgccgtttagctgatcattttggaggcaaacttcattagggtatatgcagatcgtgagaa

SEQ ID NO: 8161 - DNA, 625 bp, Glycine max
ttaggcctaaaaccgcgctgtgagtgctgagaacgttacctcattcaaaagcagcaacagcagattattcttctttgtttctgttctttcttcatcagccgattcagctttgtccatggccaccgaaccaaaagcagccgccgatgacgtcaagatcgatctcttcgaagacgacgacgagttcgaagagttcgaaatcaatgaagagtgggatgacaaggaagaagggaaggaagtgactcaacagtgggaggatgattgggatgatgatgatgttagtgatgatttttctctccagttgagaagggagttggagagcaacaccgagaagaactaaaccacctgctagttattattgcttgatatgacatgcgctatgtcttgggttgggtgttcgagctcttggaaggagatgaaaactatgccttgttaggaaggaaattgaagaacatagggacatgacttttctgttatttcctgaatatatgctttagaagttattgagtgcttgtactttaattgaattctgcattattaggtgctgtctggctttaaaatttgacttacaatctcgaattatttgttcttattttcattttagggttgggtgggcatgcttttctcc

SEQ ID NO: 8162 - DNA, 527 bp, Glycine max
ggcagacacgttacttgattcaaaagtagtacaagattcttgggctcatagggttgacactccaacctccctagtcggttttcgaaataaccgcatccatggcgaccgaaccaaaagcagccaccgatgacgtcaagatcgatctcttcgaagacgatgatgagtttgaagagtttgaaatcaatgaagagtgggatgacaaggaggaaggaaaagaagtgactcagcagtgggaggatgattgggatgatgatgatgttagtgatgatttttctctccagttgaaaagggagctggagagcaacactaattagaattaaaccacctggtagttattattgcttgatataacatgctatatgacttgggtgtttaagctctaggaacgaaactgaaaatgaaaaatatgccttggttggaaggaaatgtaagactgtaagaacacataatacggacgtagtttttctgttcttgaacatctgtgtagaagttattgagtgcttgtacttaaattgaattccgcataa

SEQ ID NO: 8163 - DNA, 1045 bp, Glycine max
acaacccgtccgaccggatgcaagaggcctgcttatatttgcagtaacaacaactaacgtgcaagttccaaggcggagaaaacaataatggccaccaacgaggagagggatatggagaacaagaagagtgaggaagaactgaagcatctcgggtttgtgaagattgcggcaatgaaagccttagtgtgtgtgtcgaatctctacggcttcgcaaagcaaaactcgggacttttgagatctgctgttggaaccgtggaagacactgtaaccaccgttctgggtcccgtctaccacaaattcaacgctgttcccaaccacatcctcctttttgtcgacaacaaggtggatgaagctgctcacaaattcgatgagcatgcaccttctttggccaagcaggttgcaagccaagtcacttgtttggttcaggaagtgacacacaaagctgagaaagtagtgagtgaagctcaatctggaggggcacgagcagcagcaaattatgtagccactgagtccaagcaaattgtgctctttggttcagtgaaattgtggactggtctcaaccactatccaccattccattcagtggcagagatggcagttccccgagctgcacactggtcagaaaaatacaacaatgtggtaaagggaacgagtgaaaagggttttgccgtgtttggctatttgcctctgattccaattgatgagatagcaacagcgtttaaacagggagaaggcaatgtgaatgaagatgaagcaggttccgtggcagagagttcttagagcactactaatagggtagctattttcttcataaaatctgcttctggctagtatttgtttcagtttgagggcaatgtggatgttcatggaagtgtaagaaatgggttcggagtgtgtggatggtgtaagttaaccaagttcgtagaacattatgggattatgtcaatggttgcgctaaatgtcaccaagttgatgttgtttcgtccttttcttgcattaaaaattatcttgattgtcgtcaaaaaaaaaaaaaaaaaggggcggc

SEQ ID NO: 8164 - DNA, 761 bp, Glycine max
tggtctgcgcctgatttctcagttctctcacacactcattcggtgctccgaatctcagattctagggttagggttcccaatttctccaccgatcagaaaatgagttcaactggtggttctaccaagggcggaaggggcaagcccaaagcctccaaatccgtttcaagatcgcagaaagctggtctccaattccccgttggaagaatcgctcgattccttaaggctgggaaatacgccgagcgtgttggtgctggtgctcctgtgtacctctctgcagtgctcgaatatctcgctgctgaggttttggaattggctgggaatgctgctagggataacaagaagaatcgtattgttcctaggcacattcagcttgctgtgaggaacgatgaggaactgagcaagcttttggggtctgttaccattgccaacggaggtgtcttgccgaacattcaccagactctgcttcccaagaaggctggaaaggggaagggcgaaattggatctgcctctcaagagttttagggtttttgttttacccatttggactatagttttgattttattgcgtttgtaacatacatgtttcggttattttctacatgtcttctctgagaaattaggtgcttctcagtctgatgaactggatggtgtattatcacttttgaatcagatgtgaatgtgaagtgctatttggattatctgtcgaattaatttattttataacgatcgcgtttcataagctggcgcacattgctttttac

SEQ ID NO: 8165 - DNA, 565 bp, Glycine max
gacatatgcagtgtggggaaggagtaaacaaacgttggagtcagaaatgaaagagcaaaggaaaaaccatgctgctcactgtcttgtcctaccttatccagcccaaggacacatcaatcctatgcttcagttctccaagcgtttggtgcagagaggagtgaaggtaacacttgtaactgttgtgtccaattggaagaacatgagaaacaaaaacttcacttccattgaagttgagagcatctcagatggctatgatgatggagggcttgcagcagcagagagtcttgaggcttacatagagaccttttggagggttggatcacaaacttttgctgagcttgttcagaagcttgcagggtcaagccaccctccagattgtgttatctatgatgctttcatgccttgggttcttgatgttgccaagaaatttgggctacttggtgctactttcttcactcagacatgcacaacaaacaacatatacttccatgtttataagaagttgatagagttgcctcttacacaggcagaatatttgttgccagggttgccaaaacttgcagct

SEQ ID NO: 8166 - DNA, 659 bp, Glycine max
gaaaaacagagcataggaaatagctttcctcggttataaccttcaaggtggaaagaaaaacccacccactatcccaattccaataaataccttcctctctatattttcgcacaataccctctcacccttcaacgatgagttactacaatcagcagcaaccacccgtcggtgttcctcctccccaaggttacccaccgccggattcttacggaaaggacgcgtaccctccgccagggtacccgccgcaaggaggataccctccgcaggcgtatccagcacaggggtaccctccaccctacgcgcctcctcagtacgctcagcctccgccgcaacaacaccagaattcatctggcccaggttgcttagaaggatggtaagtctctctctctctctctctctctgcatatttctgagtgaaggtgttcgtggcaactcagatcgggattcactcgattgattgcggttgcgattacgggtgcaccatcatctatggtgcgcccgcccgcggctgatcattgattagctgtagttgcgttgtttcactgctgtcatctgacgcgacacgcgcgcacgatactcgaagtggatgtcatcttttttttttcgccgggtcccgccacttgcgggtttcttaagtatgatgtgccaagaggaacgaa

SEQ ID NO: 8167 - DNA, 641 bp, Glycine max
ggaaatagctttcctcggttataaccttcaaggtggaaagaaaaacccacccactgtcccgattccaataaataccttcctctctatattttcgcacattattctctctcaccctccaactatgagttactacaaccagcagcagccacccgtcggtgttcctcctccccaaggttacccaccgccggattcttacggaaaggacgcgtaccctccgccagggtacccgccgcagggaggataccctccgcaggcgtatccagcacaggggtaccctccaccctacgcgcctcctcagtacgctcagcctccgccgcaacaacaccagaattcatctggcccgggttgcttagaaggatgtttggctgctctctgctgctgctgcctgttggatgcctgcttctgagaaagaaaagagaggttgctttgcacaaattggatttgaaactgtgttttgactttgaacatgaccattatcgctcttagtttttattattttctatgttgatttacatttcgtggatatgaaatattgttctgcttcattaacaggaggattcgtggttttttgtttttcatgtgtttttgtttatattggcgattgatacaaaaaataaaaaccctctaatagcgcactaatc

SEQ ID NO: 8168 - DNA, 638 bp, Glycine max
tgataggttacccaccgccggaatcttacggaaaggccgcgtaccctccgccagggtaccctccacagggaggataccctccgcaggcgtatccagcacaggggtaccctccaccctacgcgcctcctcagtacgctcagcctccgccgcaacaacaccagaattcatctggcccgggttgcttagaaggatggtacgtttctctctctctctctctgtgttataaaatcaaaattgagtgagtgaaggtggttgtggcgactcagatcgattgattgcggttgcaaccatcatctatggtgcgcccgcggccgatcattgattagctgtagttgcgctgtctcactgctttcatctcacgcgcgcacgttactcgaactgaatgtcatctttttttcggtgggccccgccacttgcgggtttatcaagtaacctaataagatatttattattttaagaaaataagcatcgataaatctttattaatttgaaataggaaataatatactacctacgtccgaatatatataatcgtcccgatacacatatgattttttaattaattcacatcttttacgaaaattgattaatttaaccagtgacattaatatttttgtcaaaattattcttaaaatttt

SEQ ID NO: 8169 - DNA, 359 bp, Glycine max
cttaatttgaaataggaaataatttatgataaatgcaaactttgaatttttaattgagaagactcgattttgaattttcagtctcgtctgttcttttttctttggtaaaacgaggaatcgctgcgattcttgtgtgaaattagtgagagtttgttcaatgcacgggttctaatttcttgtttaattgttgcaggtcggctgctctctgctgctgctgtctgtcggatgcgtgcttctgagaggagaagaggttgctttgcacaaattggattggaaactgtgttttgactttgaatatcggcgctaggtttgattattctatgttgatttacatttcgtggatatgaaatattgcttcg

SEQ ID NO: 8170 - DNA, 684 bp, Glycine max
cggctcgagctttttcaccccaaacccattgcattgtggtgaatgtttgagtgcagaaggtaaaaaagaaaatggtggtgaagattcgattggcaaggctcgggtgccggaaccacccattctatcgtgtggttgttacggatagcaaaacaacaagagatggcaagcaacttgaagttttaggtttctacaatcccgtcgcaggcaaggatgatgacaaaagaatgagcctcaaactggagagaatcaagtattggctttccgttggagctaagccttcagagcctgttgagcatcttctatttagagcaggtttaggacaatctcatcaattccctgttgctgctctaaatggacatatcctcaaccaagaccaaccaaccattgctgctgatcacaatggtatatctccagaagctatattttctattgccctacaagtttgaagataatagctaccatacatttggagaaggtgggtggttgcaccctcttctgttcaataccacctagaaataaattgataggttatcttgctgtcgacaaactggttagatttgtttcctgggaagtagcaaaagtagctcatctgattttggtttatgtatgcatgtctcacattcttgtcaacacaccacttggtttttatgcttatgcaattcttcttgattctgacaatttatt

SEQ ID NO: 8171 - DNA, 1104 bp, Glycine max
cggctcgaggagaaagggcttttttgagtaataggattattatcagtgaaaagagttccctttattctctgtaaataaaagggttgttgttattattattattgcctagtgtttgttttcagatctgtgtcgtattattaagcacaaccaagcaagggtgcaaggtgggggtgtttttttcttttttttttgctggatgagtggtagctgacactcacttatggcgtctgaaacggcgtcgtcggcggatgaagaaaccgttgttgttgttgcggctgctgcgggtgcaggagggactgataagagaggcaagcaccggattcttgccgaattgaagcgtctcgaccaagactccatgtttcttcaggaagaattggaagagcttgagaaaacagaaaatgtgccgaccatatgcacagaattgctacaaaacatagacactaggcctgatccattactcccagaagtccatggacccgtaaatctcttatgggatagatggtttgaagggcctcaagatccacaggcatgtagatgttggatactttgatttgaagctgtgtcaattgccttgcgttgcaaataggatgccacatataactgcattaaagtgactctggagctgaagaaaatgtttgatgacatgttataccacgcacactaattctataatggatccttgcttttattacattagattctgttccgaatactgtttatgtgtaatcacattcatatactgcattcaactgagaagtatcattatttgtgcttgtaatcccaatccaactgttaatgcacctgaccttggtggactttcatgtgtgcacgagacgttagagacattttagcatcattcagccttgaaggtggtgtggcttttggaaaggcctttacaatgcaatggtttgacgagtcatcaactagtcctgaatgataacgagattttttgggcagagacctcttggggttgggagagcaaagaaagctcataatcccttgtttgagtcatttcacaattaaatgttatgataagattttgtaatcatgttacttctaagcctttttaagttttggtgttttatttaacaagccattactttt

SEQ ID NO: 8172 - DNA, 384 bp, Glycine max
gatgaatagtactagtacattttgaaaatagaagtaaatgatgaatcccttgagtttgtgatatatagagagagagagttatgagcatgtatagctatagttgtatctccacaagcacaatgattcgtcggttatggtgtttacagagcggctctccctccgtgcccccctcgagcaccaagaagaagaagccccttgtcttgttgggcgcacctcatgtctccgccatcgtccttgaagcccttctgaacgcttctacttgtccagattcttcatttgaggttgcggctattgtgactcaacctgctgccagaagggacagggggaagaagctctctctctctcccttggcctctcatgctcttcagaggggcttctctcctg

SEQ ID NO: 8173 - DNA, 456 bp, Glycine max
gcaatccgacccgaatacttcactctcagtcccaggatccgaatactaccaccgcggatcctcatgttctgcttcagaacctttccctggttcggaccagaatggattctctacaacacttcctatctcaatccatcaacaccaacactcccctcgccgtcgatcaaatcgccatggtctccagccagatcgtctcctccatccatcaattgatcgtcaacggctcagctctcgtctcttactctcaaaattccaccgccgcctccggagcaccggatccaccgttgtatccgaagaagccggagccggaaccttcagtcgccgataaagcgaagcaaatactcgattccaaatttgggcctctcgaagacgacgacgacgacgacggcggcgccgaagacttcgacgacggtagcggaatcgtggagctcgacgccatagaaatcctcgccgagc

SEQ ID NO: 8174 - DNA, 455 bp, Glycine max
gtcaaaacggtggcaaaagacaaccgaaaggggatatgaacggtgaaccggatcccccttcgaagtgaattatattgcagcgaatcacacacactctgaacaacgcccaccatgcaggccagtgataggtttaacatcaattcccagcttgagcatctccaagccaaatatgttggaactggccatgccgatttgaacagatttgagtgggcagtgaacattcaacgagatagctatgcatcatatattggacactaccctttactgggattctttgctattgctgaaaatgaatctattggaagagaacgctacagctttatgcagaaaatgctcctgccttgtggtttgcctcccgaaagagaagaagattaagaattgccatctggattgcaaatggatcacacagtacagttaatatagcctatgacagtttgttgtaccatgttatctta

SEQ ID NO: 8175 - DNA, 332 bp, Glycine max
gaacgttgaacgggatccctcttcgtagtgaattacattgcattgggttctagcagcgtatttcactcaccatgcaggctagtgataggtttaacatcaattctcagctcgagcatctccaagccaaatatgttggaactggccatgctgatttgaacagatttgagtgggcagtgaacattcaacgtgatagctatgcatcatatattgggcactaccctttactgggattctttgctattgctgaaaatgaatctattggaagagaacgctacagctttatgcagaaaatgctcctgccttgtggtttgcctcccgaaagagaagaagat

SEQ ID NO: 8176 - DNA, 322 bp, Glycine max
cggctcgaggctcttttcctctttccattcacttgttctgttacgaaaacttcaggctgggataccatttctttatttttcagtttctcaatctgtgacctatgtgaactggggtctatcagcgtttttcactctccatgcagaaatgaatttgtgagttttatgtacgctagtgatacgtttaacatcaattctcagctcgagcatctccaagccaaatatgttgggactggccatgctgatttgcacagatttgagtgggcagtgaacattcaacgtgatacctatgcatcatatattgggcactaccctttactgggat

SEQ ID NO: 8177 - DNA, 1052 bp, Glycine max
cgagcatgttccctacacggatccatacactcccagaaaacatttttcattctatttctcagcaccagtcagcaacaacaacatccctttcctttccacaagacaccaaacaaagttcacagctttttttgttctttcacctcgattcacgaactgggtcatcctctgattgtggattattggatttcattttgagctacaccaaacccccaagactttgacttccaaagccagctctttgtggtttgccaggttgccagttactgtgatatcataatggattccccacaatctgttgtgtcacccttcaggagctcagtgttgggtgagagtgagaagcacaagtctgatgttttcccaggaaactctagtcctttttccaaggacattgaagtgaatgggaaggaagttgtcatgtcaaatgtagaggagtatcttggagtgcttgatgtttacatacatcaggccagggacattcaaaacatttgcatataccacaagcaagatgtttatgctaagatttgtctgaccagtaatcctgagacaactgtgtctaccaaaaccatcaatggaggaggaaggaaccctgtgttcaacgagaatcttcgtattgatgttaggactgttgatgcttctctcaagtgtgagatatggatgcttagcagggtgaagaactatcttgaagaccagttgcttggttttgctttggtacccttgtctgaagtactggtccagaatgggaaacttgagaaagagttctctctttcttcaactgatctattccattctccttcaggttttgttcagttgtcgctttcctacactggtgcttcacctgatgttatggcaatttctgcaatgccaaacaaggtggccacagatggtaccgtgcaggactcagatacgtccgagtcactggcccgggatttagacaaaatcgagttcccagatccaaagattgtgaatgaagaccacttgatggtttcagaatacttcggcattcggtgtgaggagactcagtgttctgatagcttggctacttctgatgctga

SEQ ID NO: 8178 - DNA, 624 bp, Glycine max
ctccaaatacacaacaaaatcataaaccaacactacagcacctctagatttttattttcttcactgttcacactattttctcctttcctttcacattatcccttcccttttttaaacaagccatcttgcttttgtttcttctcttctcatcaccaacacggtgtgtgtccttcatcctggattagagccacaaacataacacattccgctttgactttggaggctaagggcctaaggcaggttcccaatcactgtgatatcatggaatccccacaatccgttgtgtcaccattcaagagctctgtcttgggtgaagctgagaagtataggtctgatgttttcacacaaagctcgggtcctttgtctaaggacattgaagtcaatggaaaggaagctgccgtggttaatccagaggaatcatcggtgttgttgatgtttacattcatcaggctagggacattcataacatctgcatataccacaagcaagatgtttatgctaagatttgcttgactagtaatcctgagaattctgtctctaccaagactatcaatggaggaggaaggaaccccgtgtttaatgagaatcttcgtctaagtgttaggactgttgattctgctgtca

SEQ ID NO: 8179 - DNA, 706 bp, Glycine max
  unsure (1)..(706): unsure at all n locations
cccacgcgtccggttgaatgccctctttgtatgtagtatcttaaccaccttattaataactcatatgtatatatatcctcttaacatacatcctccaaatacacacaacanaatcataaacaacactgcaggcacctttagatttttattttcttcactgttcacacacgatttcctcctttcctttcacattatcctttacctttttttaaacaagccagcccagcttgcttctgttccttctcttctaaccagtatcacctacacggtgtgtgtgtcccttcatcctggaaattagagccacaaacataacacattccgctttgactttggaggcaggtttttgtgctttgtctggttcccaatcaccgtgatatcatggaatccccacaatctgttgtgtcaccattcaagaggtctgtcttgggtgatgcagagaagtataggtctgatgttctgtctaaggacattgaagtcaatggaaaggaaggtgccgtgtgtaatgtggaggaattcattggtgttgttgatgtttacattcatcaggccagggacattcataacatctgcatataccacaagcaagatgtttatgctaagatttgtttgactagtaatcctgagaatactgtctctaccaagaccatcaatggaggaggaaggaaccccgtgtttaatgagaatcttagtctaagcgttaggactg

SEQ ID NO: 8180 - DNA, 701 bp, Glycine max
tcgtccgtccactcgtccgcggatccatacactcccagaaaacatttttcattctatttcggagcgccagtcagcaacaacaacatccctttcctttccacaagacaccaaacaaagttcacagctttttttgttctttcacctcgattcacgaactgggtcatcctctgattgtggattattggatttcattttgagctacaccacacccccaagactttgactttcaacccaaaaccaggtaataaaatcaaataaaatctcatcatcttcctttgtctataccctttcttctagatacatatttctttctttctttttgtatttgaatctttttttttctctctctctgaattctcttttgttttctagtgctggtgtgtgatttgaaggaggaattttaaagtggcttgtggttttagaattctgtgactaacgcgtcctgggtcaccgtgcccctcccttggattccgctggtagtgttttttgtgcaggaaaacagataaagtcggtggctttattggaatatggttgccagttactgttgatatcataatggattccccacaatctgttgtgccacccttcaggagctcagtgttgggtgagcgtgagaagcacaagtctgatgttttcccaggaaactctagtcctttttccaaggacattgaagtgaatgggaaggaagttgtcatgtcaaa

SEQ ID NO: 8181 - DNA, 256 bp, Glycine max
agggggcttctgcttctggttttgttagttccgagttgccttttgagggaactcaagtagtcaagttcaagcttccgactacttctctgtctcacgttctgcgggcgttgccagctactgttgatatcataatggattccccacaatctgttgtgtcacccttcaggagctcagtgttgggtgagggtgagaagcacaagtctgatgttttcccaggaaactctagtcctttttccaaggacattgaagtgaatgg

SEQ ID NO: 8182 - DNA, 327 bp, Glycine max
aattcaagcaaataatggtatcgagtatagatgaaagagggggatatggcgaaattggtagacgctacggacttaattggattgagtcttggtatggaaacttaccaagtgagaactttcaaattcagagaaaccctggaattcacaaagggcaatcctgagccaaatcctgttttccgaaaacaaagaaaagtaaataaagtgataataaaaaagggataggtgcagagactcaatggaagctgttctaacaaaaggagttgacgatttttcctttttgcattaggaaaataatagaatccttccgtcaaaattccaggaatggat

SEQ ID NO: 8183 - DNA, 429 bp, Glycine max
attatttcagaatcctacactgccaactccgaactcacgtcaacacattcaccggtttctctatcttctccttttaaattccttccttttccttttgattccgctcttctaatcgtcgttccaatttcacagttttctatacatctcccaaccattccatcgatgcttcaagttattacaggaataggttccttcgccatagcatatgcaactggaatgtgcttctgcttgactcgaaagaggtaggtggaagaaaagaaaagttaatatataacttcctaaaagcctgtaagagtttgaaacactgcagttttcgcctaagatttttctccattgtccatatggataattagaatttaatggataagaacttgggaccatgattgtgaaggatcattctggtggtactgaactggcaatgaattatgc

SEQ ID NO: 8184 - DNA, 878 bp, Glycine max
gacggaaagcatgatataggagccaacattttttgtgctaagtgcaaaccacgccagaatttcattatttccattaactcccgattctgcttaaattggaacaccaccaattttcgtgggaaccaacaaaacaaaaaaagggtccaattttttgaaaattattaccatcattcatattcatcaacgacccctcttctgtgcccacttccaaatcttctcctctcgctatgggttgcggctcctcccttccagataggggctcaaggcagttgggtcgacccaattcagagaatggtggagggcaggacgccaagaatctgagggtcaagcttgttctcttaggtgattctggtgttggtaaaagctgtattgttctacgatttgttcgtggtcagtttgatccaacatctaaggtaactgttggagcttcttttttgtcgcaaacaatagctctgcaagactctacaacagtcaagtttgaaatatgggatactgctggtcaagagaggtatgctgcgttagcaccgctatattaccgtggtgcagcagttgcagttattgtttatgatataacaagcccagaatctttcagcaaagcacagtactgggttaaggagctacaaaaacatggaagccctgatatagtgatggcactggtcggtaataaagctgatcttcttgagaagcgggaagttgctgtccaggatggcactgactatgcagagaagaatggtatgtttttcatagagacatctgcttagacagcagataatataaatgaactgtttgaggaaattgccaaaagactgcctcgcccatcagttagttgatgtagccagatagcagttcagtaagggaagggatctgcattagctttg

SEQ ID NO: 8185 - DNA, 325 bp, Glycine max
tatttttttttgttatatattttataatagattgttattcccaaatttttattcaattgaaagcggtactgagatagttgttgacaacattttcactcaagatttgcaacactctggtgtttgtaggaccaacacatcttggtgtcttgtactgactaacagcggttcctagtcctaggtaatgatcaagaatcttctggaatggtcctctccgaacaagtcgtagttcgagggcaccaatgcagttcactttgcgcgaactggtgtagcctgcatcaacgaaagacttgtccaaacagttacagcattcatggagtagttcttg

SEQ ID NO: 8186 - DNA, 1216 bp, Glycine max
gggagttcatagttccaataccatatgtcaaacaagtaaagctgtcaaaagctggtgggaggcttgtaattgcctctgatggcatacgggatgctctatcatcagaaatggctgcaaaattttgccgtggtttgcctgctgaacttgctgctatgcaggttgtcaaggaagcactaagaacgagagggttaaaggacgatacaacttgcatagtagttgacattatcccacctgataatgaattgccaccaacacctcccccccccaaacggaacaagctgagagatcttctttccttcaggaagagctcccgtgattctgccagtaagctgtcaaaaaagctttccgctataaatatagtggaggaactgtttgaagaaggatcagcaatgcttgctgaaagattaggaaatgatgacaacttgaactcggggcaatcaacatctggcatttttgtctgtgctgtatgtcaagttgatcttgctccaagtgagggcatctctgtccacgcaggttctatttttctccacccagctccaaacccctggggaagggtcccttttctatggttttgattggcccgcgattaagaagggatgctatgtgaagggaaaaacgcccaaggttggaggttaagggtgtcattaggctccaaaaattggtgtgctattctagtattctatatgctatctttggccatttttgtattcacgatttttataggcaaaaattaattgattgaatctcactatcaagtagcaacagctgtatatgtgatattcccgaattcatctaaaatgggcattgcatttgagtagcaaattaaggctggggagagtgcctggaatgggtttttgtgcggctcaagattcttcatctctgatttggatggtcgggtagattcttttgtatagtatagtttatgttgcctaactctccacaaaagtaggtattttcttgattaagtatgcagcactgcactctacttcctccccaaattctgtatataaatttccatggaccttttctacccctggggattagaagcttcaaatctcttctatggattgaaaagtcaattcatctaactttaagaacctgctcgttaaatgtttcctttttcctgtgtcattttggtctcactcttatgtttgtcccttttaggagggcagtgtttctgtccgtttcaaatagctgaaaggataatgtaatgatt

SEQ ID NO: 8187 - DNA, 378 bp, Glycine max
  unsure (1)..(378): unsure at all n locations
gaattcctctaaaatggggccattgcatttgagtagccaattaaaactgggagagagtgcctggaatgggtttttgggcggactgaagattcttcatctctgatttggatggttaagattgttgccgggtagattcttctgtatagtagtctatgtcgcttaccttcccccaaaagtgggtattctcttgattaagtatgcccccccaaattctgtatataaatttccatgggccttttctacccctggggattgtaagcttcaaatctctactatggattgagaaatcaattcatctgaatttagaaattgcttgttaccacaaacacgaatctctccacaaaaaaaaaagcgcccgctcgaattcgnacgcgtggn

SEQ ID NO: 8188 - DNA, 501 bp, Glycine max
agattgttgaaaacggcatagtattgtatggcttgcttgggctaaaattagaaccctaagcccctcagcgagacagccgccgccgccttcttcaataaccgtcgcaatcctctttcggcaaaaaaagaaaacccttcttctcactcatattcttacgcacacaaaacaagaaacacaacacagcaccaacctcggcagcacaacgtgctaacaattcaaagaaacaaaaacacagacacaaacaatggctggtcgattccgcgagctgatgaagaaatacggaaaagtcgcactcggggttcacttgagcgtctccaccgtttccatcacgggtctatatgtcgccatcagaaacaacgtcgacgtggaagccatcctcgagaagctccacatgggcaccgtttccgaggaacaaaaccctaaccctaacccctccgacgacgtcgctgcgccgcccaagaaccggacggctcagctcgccgcctcggccggcggcgcctt

SEQ ID NO: 8189 - DNA, 403 bp, Glycine max
actcgagccgaatcggctcgaggtagtatcacagttcgggatggcttgcttgggttaaaatatttagaaccctaagccactcaccgatagagaagccgccgccaccttcactagtcaccgtcgccgccgccgccgccttcaccagtcaccgtcgcattcctctttcagcaaaaccccttcttctcactcacactctcacacccatattctcaaacacacaaaataacaaacacaacacagcaccaacctcggtgataacaattcaaagaaacacagaaatacgcagacacgaacaatggctggtcgattccgtgagctgatgaagaaatatggaaaagtcgcactcggcgttcacttgagcgtctccaccgcctccatcacgggtctctacgtggccatcaga

SEQ ID NO: 8190 - DNA, 656 bp, Glycine max
caattttacccttaggagaaacgaaaatgacatgacatcctctgatctgatctgtgtggcgaagtcgcccttgacgacgactcagcgaagctgaactgagagtggagcttcgtccacagggaaacgcataagcatatcggaattccggggaagaaagaaagaaacataatgtgttcttcggagactatcaacatcgctgcgagtacacagaaacttgatgttgataatcgaattgctctccgcttctactacagaatcgccgataatatcctcaaacaggctgatatctttcgtgcagagacaaatattgttgatctgtatatcatgctcctaagattttccagtttggtctccgagacaatacctcgtcaccgagattatagatcatcttcacaaggcaaaaaagaagctttgagaaagaaactgttacattctgtgaatgagctagagaaattgaaaccgaaagtgcaacagaagatcaatgagtttaacagcaggcgagcatatcaacccaatgggtggggaaatgtcattcaaataattttatggatttttctccagcaaaaaagcaaactttgactagttataataaaaaaaaggcagtcataccaaccactggagagtttgtttaccaaggatcaaggggccaacagttt

SEQ ID NO: 8191 - DNA, 452 bp, Glycine max
gaccgcctctttcgtaaagcagagttcgcaggcgcagtttgccttcgtttgagctctgttctgttctgtgcctccacaaaccaaaccaggcacaagtaatactgtgtaatccaacaaactgaagtatagctaggtgaaaggaagtagtcaagtacaagagaatggcgaagtcattgagatcgaagagggagaagaggctgagggctattcggagggagattgttgaacctttctatgacaagaaagaagctgctaagcttgctgcccaagaggctgcccttgccgcccctaagctggaggttccttcgaaaccaaatactgctatggaagcatccgcttccactgacaacaccaacatggatgtggaggtggctgatggaagccaaagcatggcttccttaaagcctgttggtggaatagggaagaaatccaaaaagaagttgaaaatagct

SEQ ID NO: 8192 - DNA, 401 bp, Glycine max
aagggttcttccttgtaagagtgaagtgggtgaaggtaatgattaacctgtatcactgggcttgggacattggtggtctcttcgtccccatcgttgttgttgtaagcggcgggcatggcctgtggttctaataaatctaaagccttgctctctgaaaccccatcgagcttaggatcagtgagggattgggtctttggtttcttcttgtcttgttggaaataggtttgggggtggtgtctgtttcagagagagagagagtgaaggcatggcgatggaggcatggagagaagaaagagaaaggaagtgatagattatcaaactccgtgtgtggtcggaaaatagtgcaaatgagtagaataaaaacttgaacaattccccgttgtggttggttgagttttcac

SEQ ID NO: 8193 - DNA, 625 bp, Glycine max
ggaaagtatgagcacgtaaaaattaaaagtgataaataattgtgataatgaaacagttagaagcaacgagcagcggctaacaccggaatctgcaaactcaaaagttccatctcttcttccacacatccatcgttaatcattttcccgcaaaatattttctttctctgttctgtgccttcttctccaccgttggttcaaaaatctcagccgttgatcagattgagcctccgtgttgatcttcatcgccatcatggaggtccgttccaatcccgccgccgacaactcctccgaccaccttcgaccgcccgccgtttcgtccaagcagccgctgccttctcctaccgccgtcgacacctccgccgtttctcagagactccagaaggaattaatggctctcatgatgagtggaggagatctcggggtgtcggcttttcctgatggagagagtatttttacatggattggcacaattgaaggtggaaaagggactcagtatgagggtttatcttataaactctccttacgttttcccctagactatccttttaagcccccccaaggtgtagtttgcagacaatgtgcttccatccaaatgttgaccagtttggcaacaattgtctggaca

SEQ ID NO: 8194 - DNA, 709 bp, Glycine max
aagacgacagaaggggtgaataatacaaaagaaaataatagaagaaaaatttttgaataataattaaaaaattccttcatatttttagagataggagacaaaatttacatggatatagtaagtcttgcttgggctgctttaatggtagttttttcattttctctttccctcgtagtatggggaagaagtggactatagggatactcaaaattgagttaagggatcaaagtacccattttgttttctacttgggtttttcaatttcttaactttaactattgaattaaagtatttcatttatactaattaattgagttcaaatataaacaaatataaaatagatctgcatttcagggttctattatattctagtagtgtaatgtattctatgtatatgtatattatagaaattgaaaatactctttcaatcaaacaaagatttgaattatatctatattcgtattttgagaaaatcaagagaatccaatagaataggaaattgcttcctattccaaccgaattcttcttaaaatttctctttcgatgaactgacgcttaaccaggttttatatatatcgaaaatgggggaccgggtaatccccattcctgcccccctttttcttttttctaatatgataccgggattgtaaaaagaatccgaagaataagagttgttttttgattatttcagattcattggaatccatcc

SEQ ID NO: 8195 - DNA, 399 bp, Glycine max
acaacaaaaggggaattgaagaggttccctttccatcattttcagttccaccaaaattcacaaatctctcggcatggggtgcgtgtcttcgaatttgctgaaccaagacgaagacttcagcacccaacttggctcctccgcactgggccaccacatcgtgtccctcacctccaccacctacggcctcctcaccctcgaccctccttccacgcctccttcccgctttaccctcggatctctcttcccctccgaaccagaggtcatcaactcatgggagctcatgtccggcctcgacaccgacagcttccgcttctctcctttacctttacccaaacccaaagaaaaccgcctcactcgcccaaccggttccaaactcttattaaccccaactctggcgga

SEQ ID NO: 8196 - DNA, 416 bp, Glycine max
tatctgtaaagagggtgatgtaatcaaagaagggcaagtcatagggtatttggatcaatttggcactggacttcctattaagtctgatgtggctggagaagtgttgaaactacttgttgaggatggagagcctgttggttatggagaccctcttattgctgtgttgccatcttttcatgacatcaagtgagatagccttttcctgttaatgattaatcatgcggcattttttttattaggggagctattcgcgtattcgcaaaagtttttaataggttacaaataaatgtgactaaatatttggtacggaggttccttattgaaaatcatactttgtataccaattgcttaaattgtaccggataagctattctgagaccgcctcattatgtatcttacttgctggagtttgatta

SEQ ID NO: 8197 - DNA, 790 bp, Glycine max
gaactctttcggagagagacacagaagtcagcgagtgcaccataaatgtagaaacccctcaaatcaaaacaaaaccatacaacacaaatcgtagattgaaaaaaataataataaagaatcagaaaaaatgggttctgagaacaaagaagccgcaggtggagaacttaacaattcgtctccttcgccctcttcttctcatgcttggaaaagtcgaatcgttattccaacccttctcgcaggagttgctggtgctggagctgggttgatttcaaagcatcgaagaactcttggtcttgctactgtgtgttctaactatgctgtgaatttcaccattgtcaccgggtgctattgtggggcacgtgaatttgtggctgcaactagaaaaacgggacctgatgacatattgaattctgcagtagctggatttggaactggtgctcttctagggcgtctccaaggtggtcaacttggtgcaatccggtactctgtcatgtttgctgttgtggggacaacagcagattttgctatactgaaactgaaagatgctttgagagatcacactaaaacaatataccaacacattgagaattcaaagaagagtggaacttggttaaaattgccggaatggttcccaatccaagtactcgacgaggaagctcttgctgcaaaacgtgctcaagaagagcagttccttcagcagagggcaaggattcgcagcctaagggaagaagaatcttgagaacttcaattttttggtgatgtatgcgctcatcttggagtaagtgaggag

SEQ ID NO: 8198 - DNA, 1042 bp, Glycine max
ttgtgtgtctctctcattcttcacccgctcagcacgcagaggagcagaagcctaagccttcaacatggcgagagggttaaagaaacacttgaagaggctcaatgctccaaaacattggatgcttgacaagcttggtggtgcctttgcacccaagccatcatctggaccccacaagtcccgggagtgtcttcctctgatcctcatcctacgaaacaggctaaagtatgctctaacatatagagaagttattgccatcttgatgcagcgccatgttcttgttgatggcaaggttaggacagacaagacataccctgctggtttcatggatgttgtttctattcccaaaacaaatgaaaatttccgtctactgtatgacacaaaaggtcgattccgtctccactctgtaagggatgaagagtcaaagtttaagctctgcaaggttcgatctgttcaatttgggcaaaagggcatcccctatttaaacacatacgatgggcgcaccatccgctatcctgacccactaatcaaggccaatgacaccatcaagctggaccttgaaagcaacaagatcactgatttcatcaaatttgatgtggggaatgttgttatggtcactggtggaaggaacagaggccgtgtcggtgtcatcaagaacagagagaaacacaagggaagttttgagaccatccatgtccaggatgcaactggtcacgaatttgcaactcgtatgggtaatgtcttcatcattggcaaagggacaaaaccttgggtgtctcttcccaaaggcaagggtatcaagttgtctatcattgaggaggctagaaagaggcttgctgcacaaaatgaaacagttgcctaaatgattttgctggtaaaatttagctattttatctcttcggctgtctgagcataggatttttggtgaaatgactgagcatagttttgtatcaaactttatattacaattttgagctgttgatttcagtttttattaccttgtgattattaatattttggtgagatattgatctttttagggggc

SEQ ID NO: 8199 - DNA, 545 bp, Glycine max
ggataaagcctagaatagaaaacgctgtgctgtggctgagaaggggaaaggcgcggttgaaagattgaaagctcgacatgtcagggaaaggcgcaaagggtttgataactgctaaggacaaagataagaaaaaaccaatttctcgctcctcaagagccggtcttcagtttcctgttggacgcattcatcgtcttctgaagtcaagggtgacagcacatggaagagttggggcaacagctgcagtttattctgctgccatcctggagtatttaactgcagaggtgttggagttggctggcaatgcgagcaaggatctgaaggtgaagcgtattaccccaagacatctacagcttgccatccgtggagatgaagaacttgataccctcatcaaaggaacaatagctggtggaggtgttattcctcatatccacaagtcccttatcaacaagtcttcaaaggaatgaggaggtttatacattatttgaatcaagaaattgactgtaaatttggctatatcttttgatatggataatttgctccctgca

SEQ ID NO: 8200 - DNA, 365 bp, Glycine max
atccgccgaattcggctcgagatcgggaaaaggggcaaagggattgataacaggtaaaacctcagcttcagccaaagacaaagacaaagacaagaagaaacccgtttctcgttcttctagagctggtcttcagtttcctgttggacgaattcaccgtcttttgaagtcaagggtgagtgccaatggaagagttggggccacagctgctgtgtattctgctgctatactggagtatctaactgcagaggtgttggagttggctggtaatgcaagcaaggatctgaaggtgaagcgtattacccctagacatttacagcttgctatacgtggagatgaagaacttgacaccctcattaaaggaacaa

SEQ ID NO: 8201 - DNA, 366 bp, Glycine max
  unsure (1)..(366): unsure at all n locations
ggaaaagaggcgaaggtagctcatgacatgttccttgaaggaaaaaaaacgcagttgaaagattgaagctcgagatgtcggggaaaggcgcaaagggtttgataactgctaagaacccttcttcctctaaggacaaagacaagaaaaaacccatttctcgctcctcaagagccggtcttcagttccctgttggacgcattcatcgtcttctgaagtcaagggtgacagcacatggaagagttggggcaacagctgcagtttattctgctgccatcctggagtatttaactgcagaggtgttggagttggccggcaatgcgagcanagatctgaaggtgaagcgtattacccctagacatctacagc

SEQ ID NO: 8202 - DNA, 321 bp, Glycine max
tgggttgcaacgtgtactcaaacatgtcctagctaactcattaagaaaacacctttcctgaactttttccattgccattctacgagaacgttaaagttgatgtcgttgggtggaagcctcccatagcattgtctagtaatacgtctgaaatacgtgccattaatgtaaaaatatacttgtgcagaaaccaaacttcagaattcagtttgttaggaggcaaataaatatcgttgctcacactcttccagggatgacaacttcttacgttatactcagttttttattatataccctcttgtatcttccaacttagaatgaaaa

SEQ ID NO: 8203 - DNA, 635 bp, Glycine max
ggcggcttggtttgttctacttgttcttacactgggattaggacgagacgtttctacactaacaataatacctttccctctttctcctttaccttcccccaccaacctcaatcattctctttccctaaacctctcagactcatgtctcagcctttgaccaccaactctgctgatggtgattcctccgtcgccgcacctcccatcctcttcgattatcatcttatcgaccaaaaacttctccaaaacatagtctacgatgctcttgtctggagcaccctcaactgcctccttgttggtgacaaatcagttcagagatcaggaacagttcctggtgttggcctggtgcatctcccgctttctttattacctgggccatttcctgaaaatcattggaagcaagcgtgcgaattagctcctatatttaatgaacttgttgatcgggtgagtttggatgggaaatttctccaggaatctctctccagaactaagaatgcggacgaatttacctcaagacttttagatattcattctaagatgctacagattaacaaaaaagaggacatacgcatgggaatagttcgttcagattatatgattgatgagaagactaaatcacttttgcaaatagagatgaa

SEQ ID NO: 8204 - DNA, 428 bp, Glycine max
  unsure (1)..(428): unsure at all n locations
gggaacgaaaatgggtggtagatctggcggcttggtttgttctacttcctcttacactgggattagaacaaggcgtttgtgcacttctaacaacaccacctttcccttcccccaacaacctcaatcactctctttcgctaaacctctcaaactcatgtctcaacctttgaccaccaactctgttcttgttgaagaggctgctgctgatggtgattcctccgccgccgcacctcccctcttcgattatcatcgtatcgaccaaaaactgctccaaaacatagtttacgatgctcttgtctggagcaccctcaactgcctccttgttggtgacaaatctgttcagagatcaggaagagtttttttcctggtgtgggcctggtacatctnccactttccttattacctgggccatttcctgaaagtcattg

SEQ ID NO: 8205 - DNA, 378 bp, Glycine max
gaaacgattctccgtttattcaaaaacgaaaaacacatctctctgattaatacgcactctcgctgtgagtttgaatttagttgggagactcgaaataatgtcgtcgacgacgcacaatcgtcgttcgtcgtttactccctcgacggcgtcgtctttggcgaaagcgaaacgacatccatcgtcggtgtcctcgtcgtcgtcggggaaggcgaaggtggtttctactcagaacttggctgtgaagagagcgcctctcgccaacctcacttatcaaaggaacgcgccttattcttcttcttcttcttctttggtgcaaggttcaaataaagttgcccagtccaagaaagaggctcctgcaaagaacagcgtctcaaaatc

SEQ ID NO: 8206 - DNA, 2563 bp, Glycine max
ctcactagtcggcggccgccctttttttttttttttttttttttttttttttttttaccgttcttggtggtatcaacacggcactgtgtcgggatatcttatccatttctccgggaaaatagatatccccggaaaatatttttaattcaatctttttttttttcttctccaatcggaccaatccccttactcgacttcttatatttaaagtgattagtgtatctacttcaacgatactattgttccgtaccattatggaagaagattctggtaaaatatgcacttcctcgggaatgaaaaaaaattgatctactttaatttggtattttgtcttaaattctttaactccttgatactcaattaaaaaatcctcttttttaaaaatggaatttatacctatagtcctatatttagtaattcccgagctctgtgttcggtattgaggatcatcgaaataagcaagaatgctatttctacgaaaaataccattgattggtatttcaatcgagatactggaagctaacattagctctttgtctcgttcttgaatcgattggaattgaaatggaataattaatctatttctccgcctctttgctaataaatccgtagtatcatggaaaatagtaggatgtgtaaaatgacaatgatctatagatatgatttgattaaatattgaataatctgaaatccttctttcttttttatcagaaggattgaaacgaaacaatttatgtcttactttttttttacttgctaaaaggttacaaaaatctctttctccagtagaaagataatgaatgttcatttgatcttgatcttttcggattgaaaaagagactgaaccggacctgtatgattttcctgataaaatccataaatgacttgtttttggtaagatatggacattactatatctaaattctgatgcatggtacacatcggtactccaatgcatttctccttctaagtcagaatagacatgttttcgaactttttcttttaaattaaaagtgtatgttcctgcgcgaatctcggcaattacttgttctgattttacatattgattgttttgaactaatagaaaactttttggtggaatagtcacattatgtataatatcaccactttcaatagtaacatacaaatctatataacatagaaaagcaggatgcccatgacgtgtacgtgtaggatgaaccaaatcttcattgaattgaatttttccattataaggtgctcgcacctgttctgcagtacctccagtgaagactccaccagtatgaaaagttcttaatgtaagttgagtgcccggttctccaatggactggcccgcaataatacctacagcttctcctaattccaccaagtgaccatgagtaggactttggccataacacaatcgacagatccaagatgtattcctacaggtaaagggagttcggatagatattggttgggtttgaagggttttaaatcgattgataagtccaattccaatatcttgatttctaacggcaatgcatcgtgaacctctgtatatatcgtctgctaatacacgaccaattaatgtttgtatccatattctttccggcatcattccattctgggtattcaccgaaattccttgaatggtaccacaatccgttcgacgtacaacaatgtgttgaaccacttcaacaagtctgcgtgtaagatatccagcatctgatgttcgtacagcagtatctacaacccctttacgagctccgtagcaagaaattatatattctgttaaagaaagcccttcgcgcaaattgctttgaataggtaaatcaatcatttgtccttgtggatccgacattaatcctctcatacccactaattggtgtacttgagacgcatttcctctagctcccgaaaaggacattatatggactggattaaaggggtcggtcatcctaaaattaggattcatttcttgtcgaaaatattcacttgtagcataccatatctcaatggattggcgtaatttttctactgcatgtacattcccataatgatgatgttgttccaaaataaaactttgttgttcagcatcttggactagccatcctttagaaggtattgttaaaaggtcatcaattcctaatgaaatggatgtatccgtagcttgacggaatcccagagtctttacttgatccaggatatgtgatgtatatgccattccaaagtgatctattaatctgctaataagtcgtttaatggcagttccacctatcactttattgtgaaagactagattggcccgttctgccataagtacctccatattccactcagtgggattcggttcaacaatgggtttgagtcaatgattggaaaactgccttttctttatcttgatttgcgtagaaattgaaaaactatgattttcgttaaaccatgaagacctgaatttacatcggtatcataaattttcttatcttagataccaaccatctatatgatctatatacattcgaaccaatgttggtcatatttctttttatcgagatatcgaagtacagatacaaggtttttg

SEQ ID NO: 8207 - DNA, 768 bp, Glycine max
gcggatttggatttgggggagcatttggttgattagggtttcttcggctgcgtgctgatgctcttgttttctcacagtcacacaacagcaatggaagcaatcacagagggagtgaacaacatcaacatctctgattcttacaagaagaatcgcattcaggtctccaacaccaaaaagcctctcttcttctacgtcaatctcgccaagaggtatatgcaacagcataatgaggttgagctctcagcactaggaatggctattgctacagtggttactgttgctgaaatcttgaaaaacaatgagcttgctattgaaaagaaaatcacgacatcaacagttgacatcaaagatgattctagaggcagacctgtccaaaaggccaagattgaaatattacttgggaagactgaaaaatttgatgagttgatggcggctgctgctgctgctgctgaagatggtgaaaatggagatgttgaagagcacactgcataagttcatcgaaggttatacctgtcttgggtgaagatatgtactctttaatgaactgcgcttgtgttgttagtatgtagcggacaaacaaagcaaagaattcgttatatagactggcctgcaatgttgaactatgcaattccttcatttcttttccctataaatagaggctttttgtgtcttagctgttgctgtgttcagttttcgatggataaaaagcattggcacatttaacttgttcagtccgaatgataaaattttaagagtctttctgttccc

SEQ ID NO: 8208 - DNA, 1145 bp, Glycine max
ttcctttggttttactttatctttcttccaggaaagtgatgagaatatatacctttttttgcgttttataattttcttttcctttgttctcctttttttctcctcttctgccctccacacaacttctctctcctctctctctctctacaaatccttctttcttctcttcgctgctcactgtagcgtaccatggctttcagagttggaggagcgggaggaggaaatgcctcttctggcatgggtgttgctgagcatagcgtaagcacgttcctggaattgcagaggaagaaagttcatcgctatgtgatttttaaaattgacgagaaaaagaaagaggttgttgttgaaaaaactggaggccctgctgagagctatgatgatttcactgcatccttgcctgaaaatgattgccgatatgctatctttgactttgattttgtgacatctgagaactgccaaaagagcaaaatcttttttattgcatggtctccttcggtagcccgcattcgccctaagatgctatatgcaacatccaaggacaggttcagaagggagctgcagggcatccattatgagattcaggcaacagacccaaccgagatggatcttgaagtcctcagagagcgtgcaaactgagcaccctacacaagagggttgtgtctaggtgatgtagttaagatatctgaggcctcagggaatgatgttgactgataccctttagttgttctactatgatctctgtctgtttcgcgacatatttctcataaatagctgacttatcattttatcaagtaaataacctgcacctgtgaaggctgattaggggttcctgcctaagaaaccccactgcaggggaatttatgcttttccttattgccatgatggttctcgggtgcagatttatatagtaatggctattggaaattcgacttatattctatgaatttcaaatggacgcagctggtgagtctgctttgttacatgccaatccagtataggtttgtttttgtagcgaattccagcattggaatatttgctttctgaaccaaggtatgggaactaatgtacacaaggcattgtgttaagcttattttgagttgtttaaataaaaaagaattaaaagctatagaaaacaaactaaaaaa

SEQ ID NO: 8209 - DNA, 978 bp, Glycine max
tagtcaacaactattaaatttttatagagactgggattaaattttgaaatggttttctctagaaaaagaaataggcattaaaaaataaggccccgccccattaatacgagatatcgttgagagtttttacaggcctggttcgggagactataggatacggctttttatccgaactgaactcttggggaagggaattccacccactcatcaatggcatctactctcttcgcttgcccgtcgttgtgttcctcctcttcttctatattttctacttccgtcaaattctccttaaacccgaataaaatttctcttccgttcgccggaaacaaaaaacctctttcggctccaattcgaaggcggttcaatgtcattgctatggctccccctaaacccggtgggaaggccaagaaagtggttggaattataaagctggctcttgaagctgggaaggctacacctgctcctcccgttggccctgctcttggttccaagggtgtcaatattatggctttctgtaaggattacaacgctagaaccgccgacaagcccggttatgtcattcctgtggaaattacagtctacgacgataaaagctttactttcatattgaagaccccacctgcttcggttctacttcttaaagccgctggggtggaaaagggttcaaaagaccccaaggcggaaatggtaggaaaggtcacgattgatcaattgcgtacaattgctgctgaaaagctaccggacttgaattgctcgagtatcgaatcagctatgagaattatagcgggcactgcggcaaacatggggattgtggttgatcctcctgttcttgaacccaaacagaaggaatttgtgtagagaaatttcagtttggccgagtgtaaaatcgcgcaggacatatttactgacttgttttgtcttctaaacagcaagggaaaccagtctttttagttatttggtatttgcatgaatgatatt

SEQ ID NO: 8210 - DNA, 560 bp, Glycine max
taaatattttgcactgaataacattttttcttaattttttttatcatttcttttatttctaatattaatattatttaaaaaattataaaacctgtctggacataaaaaagaaaataactgggctacacgtttatgacggcgatactaaagcgtgcgttttgtttgagcgcctattgcattttgtgtcgatggctagtgctgtcagtacggtttccggcgacctgaagccgtcgagcttcgatcgtgtcagagaagcaccgccgccgcctcctgattcctcccttcttttggctaccagacctcccagacaagcggtgtcatactggacatgctcaaagctttgtgcattttgttttgttgctggagcggttttcggttactcgctcaggggacgagttaagcgctgggcttccaagatgctcaagaagctcagctgaaactaacataattcaatgattctcgttaaaggtagtcatttggtttggttagacttcaccttcatagattacatgtaaaacaatgatatcaattttgtgaaatttttagacgctccgtcattg

SEQ ID NO: 8211 - DNA, 358 bp, Glycine max
gagcattagttagagcgagacaacacctcagagaacccaaattccgcgtcaagaggttagggtttggcgtttctgcgagaagaagaagagagagcagaagcagcaatggaagcatacggcggcttcatggtcgacgagaaagccgttagggttgagaacgctttccttgatttcctcaaaagcttcaagtctagtagccagcggaacgaactttattacgaagcggagatcgaattgatgaagagcaatgactccaacaccatgttcatcgatttcgaccacgtcatcagattcagcgacctcctccagcaaaccatctccgatgaatacttgagatttgaaccttatttgaagaacg

SEQ ID NO: 8212 - DNA, 623 bp, Glycine max
  unsure (1)..(623): unsure at all n locations
tgtgcgttgtgcgttgtttgaggccaaaatatctgttcactgattaaagataaacacagagacagggattccagaaccagcgatgaaacctcaaacaaaacaaaactaaactaaactaaattaaaagtaaaaacaaaacatgttggtttttcaaaatcaatggctgtgtcttcctctcactcattcccttttctccaagttacttcccagaacaaaacatgcagcaacagtgttatccccaagactatgccccgtttggtgtcattcagtagctcgtgccaccactctgcccacttctccaggtggggcggagcaggttgtggacagttcgtttgatgcacctaaagtgaaattattgaagcagaaaatggaacttcttggtatcaacttggaaaagtcttgtttgcctgggaagtaccataacctgttttgtccaaaatgcaaaggtgggcagttaaaggagaggagtttgtcttttcacattatctctgattgtgaatttgcaatgtggaggtgttttcgagctcaatgtggttgngctggtcaggtgacataacatggatttataaaattatgtctcctttcaacataaaaactngtaatggggtaacaaagacaaacta

SEQ ID NO: 8213 - DNA, 650 bp, Glycine max
ggagagcagcaacaaacaaacgcagaactgcccaatcttcaagctaacataaacaccatggaagccgtccaagtcatatccaccactacaatcaaggcaccaccgagtcacaataaccatgactcagttcagaaaatcgatttaactccctgggatcttcagttcctcccaattgaaaccattcagaaaggccttctttttcgcaacaaaaaacacacagaaaaccaaatcgagcacctccaacactccctttcatccactctcgccttctttccacccctcgcaggtcgtcttgtcattctccaacaccacgacaacactgtctcgtcccacatcgtatgcacacaacgcaggagcactctttgtccacgccgttgcagacaacaccactgtcgttgatattcttcaacccaaatacgttcctcccattgtttgctccttctttccgctcaacggagttaaaaaccacgaaggcacgtcacagccagtgttggcagtgcaagtgacggagctacttgacggcgtcttcatcgccttcacaatcaaccacgtggttgcagacggcaagtcattttggcatttcgtgaattcctgggctgaaatctcacgcggtatccctaaaatatcaaaaatcccttttttcgaacgtt

SEQ ID NO: 8214 - DNA, 443 bp, Glycine max
gcggggttttggtgtatgagggaaaaaagtagagtggtatgtgggttgctgcggcaacaaaaccattcatcaaattccaattccacagacacactacttctcttccgcttcttctgatggcaaaccaagcttcactctccttttcttcttccgtgtctcctgttcacgcgcctctcaagcgcgtgggcacgcacaacggaagctttcattgcgacgaggccctcggctgcttcatgattcgcctcacgaacaaattcaacagcgccgaaatcgttcgctcccgagaccctcaggtgttggaggttctcgatgctgttctcgatgttgggggagtgtatgaccctgcccgagatcggtatgatcatcatcaaaagggatttgaagaagtttttgggcatggtttctccactaaattgagtagtgctggtcttggttataagcat

SEQ ID NO: 8215 - DNA, 524 bp, Glycine max
catcgcaaacactcagactagttaacacatgggagtgccagagggcgggtgcgaaagttgaaagttgaaaccctaaacggcgggaaaaagagaaacgcccctggcgggaatcaacataaaaaacgacacccacttcgcatgaccaacacttccaattctctttctttctccctctctagggtttcgaagatgttctccggctcccagttcgacgccaccaccgccttctccggcggcggtttcatgtcttctcagccgtctaccctcaacgattcctctcccgcgccgtcaaaaagccgcgaaactcagggtttggtgccagtgacagtgaagcagataagcgaggcctctcaatccggtgatgaaaagtcgaatttcgtgatcaacggtgtagatctgaacaatgtaacactggttgggatgatgtttgagaaagttgagagaaatactgatgtcagttttgttttggatgatggaacaggacgaatcaaatgtcgaagatggattaatgaggcttttgacac

SEQ ID NO: 8216 - DNA, 448 bp, Glycine max
  unsure (1)..(448): unsure at all n locations
attttgttaggtttacttccgtccttttcctgcactcctgtatccgataaataccatgcttgggttaatgctgaattcttattggaaaaatgctttgtgggtaccttagatgaaggtcagtgaagatttcattctaataatgcataaacacatgaagatggcttggctccaatccgttatacctcttcatgggccctctctatttactgaccagaggccatcaagcaaggaggaataaattctgtaggtatacacgtttctgtttaaagatctcaatgggagtttgttctacaattatggatgagtacagttatcttgtaaactagaaatttggattaacaatgtaacaattctctgtggattgttgactctgttaacttatatgaaatcagagctcaagggtaagatggtnnnnnnnnnnnnnnnnnnnnnnnnnnnnnnnnnnnnn

SEQ ID NO: 8217 - DNA, 674 bp, Glycine max
  unsure (1)..(674): unsure at all n locations
attactaaattatatcagataacatgacgttatactcgactcgctttgcacaaaccctaacacctaaaagccagaagaagcgaaatcgcaatcgcaatccagcgaatatgaaggtcgtcgctgcatacttgctcgcagtgttgggagggaatccttccccttctgccgatgacatcaaacacatcctcggcgcagttggagctgaggctgagaatgagttgattgagttgctcttgactgaagtcaagggaaaagacttcaatgagctaattgctagtggaagtgaaaagatgtctgcagtgtctggtggcggtgcagcggttgccgttgctgctgcaccagctggaggtgctgctgcacctgctgccgaagcaaaggaagaaaagaaagtagaagagaaggaggagtctgatgatgatatgggtttcagtttgttcgactaaaaggtctgaagtgttttttgtgtttttacatttgcagttctatttagtattttagcccaatcacaaggttttgttacctgagttacatattgttttaggtttatgggttttgcttattcacattggagcccacgtcctgttatctgatataatttagtaatgtttgattcggaaaaaaaaaaaaaaaaaaaaaaaaaccncgcggccgctctagaggatccaagcttgcgt

SEQ ID NO: 8218 - DNA, 383 bp, Glycine max
cgggacatttgaagaaaaagaaaaagcagtagcagatcgaagataacaatgtctttatttgctagaagtgtttccacactactggtgcttatattgttattaccaacgttgaacaatactatggcagagaaggcacttattggggttacaaataatttgggaagtcgaaacttaactgtttcctgcaagattgataatcatccacaccttctcggccccactgattactatgagtggaagttttctcctgaatataatgacgaatttggaacggaaccattattcagtaattgttcctttcaatgggaaagtgcccatcactcatttgatctctacgtacttgttagggatggtgattgcaacaattgctcatggcatattaa

SEQ ID NO: 8219 - DNA, 765 bp, Glycine max
gtctctcttgaggttgcagacttagaagagagagagagataatgggtctcatctcaatgcaattcaggttctgaaaaccaaagcttttcataggaaaagttgtgctaagatgccggggaaacctgacactgatgattggcgtgtagagcgcggggagcagattcagtttcagtcttccatttactctcatcatcagccttggtggcgcggagtgggggaaaatgcctccaaatcatcttcagatgatcagttaaatggttcaatcgtgaatggcggaggtgttgccaaagaataccaaaacatcaaacatgccatgttgtcaaccccatttaccatggagaaacatcttgctccaaatccccagatggaacttgttggtcattcagttgttttaacatctccttattcagatgcacagtatggtcaaatcttgactacttacgggcaacaagttatgataaatcctcagttgtatggaatgcatcatgctagaatgcctttgccacttgaaatggaagaggagcctgtttatgtcaatgcgaagcagtaccatggtattttgaggcgaagaccggcacgtgctaaggctgagattgcaaagaaagtaatcaaaaacaggaagccatacctccacgaacccgtcaccttcatgcaatgagaagggcaagaggcaacggtggtcgctttctcaacacaaagaagcttgaaaataacaattctaattccacttcagacaaagctcccaatactcgtgcaaacccctca

SEQ ID NO: 8220 - DNA, 400 bp, Glycine max
ggtctctcttgaggttgcagacttagaaagagagagagagagagaatgggtctcatctcaatgcaatttaggttctgaaaaccaaagcttttcataggaaaagttgtgctaagatgccagggaaacctgacactgatgattggcgtgtagagcgtggggagcagattcagtttcagtcttccatttactctcatcatcagccttggtggcgcggagtgggggaaaatgcctccaaatcatcttcagatgatcagttaaatggttcaatcgtgaatggtatcacgcggtctgagaccaatgataagtcaggcggaggtgttgccaaagaataccaaaacatcaaacatgccatgttggcaaccccatttaccatggagaaacgtcttgcttcaaaatccca

SEQ ID NO: 8221 - DNA, 559 bp, Glycine max
ctcgagccgctcgagccgaatcggctcgagcattgttcgaatattggaatcaaagcaaagcagtagaacaagcaatatctctgcatcgatgaatctctctttgattacaattagtttcagtaatgttggaatcaaagcaggggagaagatggaaaacagtgaggaacaaaagtacagagtccggagattagagatctcagacaagggaaaaggcttcatcgagttactgcagcaactcagcgtatgcgattccgtctccgacaaggaattcgaggatcgattccgagacctcagtgttctcggcgacgagcacgtgatcggcgtgatcgaagacgaggcttccggaaagatcattgcgacggggagcgtgtttatcgagaagaagtttttgaggaattgcggcaaagttgggcacattgaggatgttgttgtggattctagcatacgcgggaagcatttgggaaagagaatcatcaagttcctcacggagcatgcgcgttcaatgggatgctacaaggagattcttgattgcagcgtcgagaacaaggcgttctacgag

SEQ ID NO: 8222 - DNA, 432 bp, Glycine max
ggagaaatggagcattttgtttggagggtgttgcctttgctcacaatcctcatgtccttagtagtattcttctacttgcaggattcttacagggcccatttgcatcctctcgtaaagttcccgcggagtaagtgcagccttcttccccatcgtcatttctggataaccagcaaacgcattgtgaccccacaagggatcatttctggttcagtggagataaatgaagggaaaataatatctgtcatcgagggatatagtaagcaggggaagtctaagcaagaaaaaataattgattatggaggtgctgttgtcatgcctggcttgattgatgtgcacgtacatcttgatgagccaggaagaactgcgtgggaaggatttgatactggtaccagagctgctgctgcttgtggtgtaacaacagttgttgacatg

SEQ ID NO: 8223 - DNA, 650 bp, Glycine max
  unsure (1)..(650): unsure at all n locations
ggaaaaagggtgttatgttatccgaagcagggtggattgaaaagcacgaacaggagcgatggccgcggcaacgttgtacttggcaaaaccgccttcgtcttttactcccaaaattccgtttccaagagtgagggacagtggaattggaactgtaaagtgtcaagttaaaacccaagtgaaagcgggtatcctgggactgggtctgggtctgttccacttccttaacttcgtcgaacccggttcatgtctccaactgcaattccacgaaccccccaatgccctctctttgcccacatgggccattcacgtgtccagtgtcgctgaatggattatagctatggctttggtgtggcaatacggagaaaaatctggatacccagcttggaagggcctttcttggggaatggtacctctacttggtggagctttttgtgcgtgcacatggcatttcttttataactccgactccctcgaggtattggtggctcttcaggcggcactgactgttataggtaatgccacaatgtgcatagctgcatatcggatttacaaatcatcccaaggctcctagaacttctgaattgcatggatgtgagaatctggaagcatgtatataggcctcaatgaaaatcaaaggctnttgctgattg

SEQ ID NO: 8224 - DNA, 449 bp, Glycine max
gcaggagccattactctcccccaccgccatgacggttgcaagccccgcctcttccagcaccaagagactcttcaagatcacgctctctctcctccgcctcggcttcaactcctccaaatgcaaaacggcagccaagatggccgtggccaggatcaagctgctgaggaacaagcgagaggtggtcgtgaggcagatgcgtcgcgacattgctcttcttctccagtctggtcaagacgccaccgctcgcatcagggttgagcatgtcatgagagagcaaaatgttttggctgcaaatgagttcattgaactcttctgtgaattagtggtggccaggctcgcaatcatttcaaagcaaaaggaatgtccagcagatttgaaagaaggaattgctagcttgatatttgcagcccctaagtgctctgaaatcccagacttgtggcacttaagaa

SEQ ID NO: 8225 - DNA, 626 bp, Glycine max
aaatatttcagaatttatgaaggcatatttgcttagtaatataaaatcaacgacaaaggtggaaaacagtgacattgctaaaccttaaaccctaatttttacaatccgagagtgaagaggttgatgggtcggcgaaagaacaacagcaacaacaatcagtgctcctcaagcaaggaagacgctgacatgaatagcaaccaccttcggtttgaagaagctgacgaggctgtcgacgagagttccaacctcgaccaatccatgtgcgacatcgaagaatccgatgataaaaccagcgccgactattacttcgattcctactctcattttggaattcacgaagaaatgttgaaggacagtgtgagaaccaagacatatcaaaatgttatttatcagaacaagtttttattcaagaataaagtagttcttgatgttggtgctgggactgggattttatcactattttgtgccaaagcaggggcagaacacgtctatgcggttgagtgctcccatatggctgacatggcgaaggagattgttgaagctaacggttactctaatgttgtaacagttttgaaggggaagattgaagaaattgaacttccagttgctaaagttgatataattat

SEQ ID NO: 8226 - DNA, 1720 bp, Glycine max
gattcagagttgcatcgactgaaacccctaggaaaaaccccagtttctctctttcactagttccgttcaagttctaaccaagcactcacagtacttttgcttctctcgaagatgtctctacgagtgctgaaccctaacgccgaagtgctgaacaaatcggcggcacttcacatgaacatcaatgccgccaagggtttgcaagatgtcctcaaaaccaacctcggtcccaaaggaaccatcaaaatgctcgttggtggtgctggtgatatcaagcttaccaaagatggcaacactctcttgaaagagatgcaaatccaaaacccgacggcgattatgattgctagaacggctgtggcgcaggatgatgctagtggtgatggcaccacttccactgtcatcttcattggcgagcttatgaaacaatcggaacgttacattgatgaaggtatgcatcctcgtgtgttggttgatggttttgatattgcaaagcgagcaactctgcaattccttgaaaagtttaagactcctgttgtgatgggtggtgagcctgataaagagattctcaagatggtagcaagaacaaccgtccggactaagttgtacgaatcacttgcagatcaattgacagatataattgttgatgcagttttatgtattcagaagcctgaggaagaaattgatctgtttatggtggagatcatgcatatgcgacacaaatttgatgttgacacacgcttggttgagggtattgtccttgatcatggttctaggcaccctgacatgaagcgacgtgcagaaaactgctatatcttgacatgtaatgtatctttggagtatgagaagagtgaagtaaactcagggtttttctactcaagtgcggaacagagagaagctatggttgcagctgaaagacgacaggttgatgaaaaagttaaaaaaatcattgaactgaagaataaggtttgttctggtaatgatagcaattttgttgtcctcaatcaaaaaggaattgatcccccatctctggacctgcttgcaagggaaggaataattgctcttcggagagcaaagaggagaaacatggaaagattggttttggcctgtggaggggaggcagtaaactctgtagatgatttgactcctgaatgtctgggttgggcaggattggtatatgaacatgtccttggtgaagagaaatatacattcgtagaaaatgttaagaatcctttttcctgcacaatcttgattaaaggtcctaatgaccataccatagctcagattaaagatgctgttcgtgatggtttgagggccgttaagaatacccttgaagatgaatctgttgttttaggtgctggtgcatttgaagttgctgctgacaatatctgatgaacgtagttaagaaatcagttcaagggcgtgcgcaacttggtgttgaggcttttgctgatgcgcttcttgtggtgcctaagacacttgctgaaaactctggacttgacactcaagatgtgatttttgcccttacgggagagcatgacaaaggaaatattgtggggttgagcctgaacacaggagaacctatagaccctgcaatggagggtattttgacaactactctgtgaagcgccaaatcataaactcagggcctgttatcgtgtctcagttactggtggtggatgaagtaattcgtgctggacgtaacatgcggaagccaacttaggtg

SEQ ID NO: 8227 - DNA, 433 bp, Glycine max
cagtgcagcatctgagaaactaaaccccacaaaaatcctcgtccctccctcaccgtatacggcagagccactgcaacaggaagcagagttcgccgctgctccgcgaccctaccctatcaattttcgtccttcttttcgtaattgcagcgaagaatggcgaagaggaaggagcggattcagaacccggagccattcgatccgtacggcgccgaccccgcgaagacgaagaagcgttcgaaggcgccgaagcggcaccagcaggaggagcagttcatcgctcccaaactcagctccaagatcatgaagcaggcgctaatccagcagaaggaggaggagaaggaggaggcgcccgagaacaacgccgcagcgaatttattcgaagaggttccgaatttcgaggaagacggcggtgacgacatcgacgacttcgccg

SEQ ID NO: 8228 - DNA, 584 bp, Glycine max
  unsure (1)..(584): unsure at all n locations
ggattctatgaaacactcaaattgatgaaagcaggtggaaggaaaatagttttgacaattgttgaggatgaagatgaagaaacaacaagagagctgattaagttattgaaggctgcggtatctgcaaatcgtgacttaatatttggttacgttggagttaaacagatggatgaatttgctgaaaattttgatattgatactaaactaccaaaaatggtcatttgggataaaagtgatgattacctttcagttgttgattcagaaaccatagagggggaggaccaaggaactcaaatcactaaatttctcgaaggatacagggaaggaagaaccataaagaaaacatttagtggcccttcactaatgcgattcatccatcgatcctttgacattagaatggtgtacatcattgtttttgtggtggcagtactgatgctaattcagacattcagtaaaggaggtgatgaataccagagtgtacccaatcaagttcaaactgatcatgcaatcaagttctgtttctgaagctgaaaacaatgagtataaacctggtgacaaggaagactaanaattaacataataca

SEQ ID NO: 8229 - DNA, 287 bp, Glycine max
ggatatacttttaaaataaccccaaactcaggagtacttgaggttaactgttatgatcctctcaaaatagaagtcccatcaagtggctcctcaaagggtaaagatgagaatgacaatagatctagtttcccaacagagtctgactgccaggctgcaattgtccattctcaaggacaaactgaagatccaatgcagaaagcaaggggactagattttggtaggaatgaaagcagtaagatagattcttcccctgtaaaattaaggagcacggggcacataaataaaaa

SEQ ID NO: 8230 - DNA, 589 bp, Glycine max
tacagctgaggtaaggcgacacaaggggatcgatagcggcggttcaagcataatgggttccgcggtgaggttggcttcaaggtccttcttcgctaatcgttctagaagcttcgtcaagagctcaacgacgccgtttgtcttctcttcgtcttccgcatcatgcatctctcgtgcttcgagggttctgtcggttgtgataagcgttgagtcgttgatgcctcttcacagtgctattgctaatgctaggctcacctccaatatcgccttcgattccacctgctggagctcgctttctcgaggacttaaaccaacattgtgacaggcctgctggatccattcaagatgaaagaaaaaattaaaaagaaagaatcataacttttcttttgtctcgccctaggatgggaaaagatcatcaaacatttaaattgtggtcagttgtactctgattccctccaactgcagacttgtataattggatttcctcattgcctgaaaatagatgaccaacatgctcccaattgctctttctcaaaatcttcttgaatggattaacaataagatgtcagcttccttaaggatgttaaaatga

SEQ ID NO: 8231 - DNA, 523 bp, Glycine max
aattaactcatcgcacttctttcatcaactcatatttcacttacaaaacaccctctcctaccttctctcttatcacttccagccatgactgcaactgatattgctcgaacagcggtcggcatcataggaaacatcatctcgggcgctttgttcctgtccccagcgcccacttttgtcgaaatatgcaagaagggatcagtggagcagtactcggcagcaccatacctagcaacgctggtgaactgcatggtttggaccctgtacggtctacccatggtgcacccaaatagcattttggtggtaaccattaacggctctgggtgcatcattgagcttatctttgtgacactcttcttgatctactctggtgggaaaaagaggctcaaggtcctcctgtggctcttattggaacttatttttatctctgttctcacctttatcactttaactaaggtccacaccttcaagaaacgctctgccattgttggaaccacttgcattctcttcaacattatgatgtatg

SEQ ID NO: 8232 - DNA, 397 bp, Glycine max
gaaattttggaggtttcagtttaactccttccgatgagagccatggaggattggaatgatgaacagtgtgatgacaccctcaccatgaccaccgtttctcagcactttttcggcgatgattctgaaacgccaagcttctccatctccatcatcgagaacatgaaggaagactatggcctattcgtgtggccctgcagcgtagttctcgccgagtacatttggcaacacaagcatcgattttcaggagccaccgttgttgagctaggtgctggaacttccctgcctggcttggttgcagcaaaactcggtgcccgtgtcactcttactgatgactccaccagattagaggtgcttgacaacatgagaagggtgttgggattgacatggggagtttggg

SEQ ID NO: 8233 - DNA, 452 bp, Glycine max
ggatagatacctaaatccctaattctcctctcctcgcactccaccacgacctccacggcttctccacacctcgcaccctcgcactcgcagtctctctctctcatgctctcgccaccacaaaaatggtgcttccttgaaacttggtgaaacctagtttcatttttctaccattcttatattgattttgtgttggaagcagctcgaattttgtgtcttgatagagtagctatagtatccgattatgagagtaaaagtggtgactattctaatccatggagactttgcaccgtgacccaggtggaggaattgaaaatcttgatctgcgtgtttccaatttgggccaccaggatcatttttgctgcagtctatgcccagatgtcaacattgtttatggagcaaggaacaatgatgaacacatgcattggttccttctaactacccctctcaacttt

SEQ ID NO: 8234 - DNA, 510 bp, Glycine max
  unsure (1)..(510): unsure at all n locations
ggatgggtattgggccgcgtttggtagagaagagaagaacttcttgtatggttattataaataataaattggcgcggttgttgttcccgccaagtgtgttgcatcgtcggcgggcgcaatggagcaagagaattacaaaatcaaggcagtgaatttgcttcgaagcagaatctgtgatcccaaattcatcttcatcaatgaatctccagaaagcaaccacagcaagctgaaattcatgatatcgagttcggtgacggaggcgtgcaacaattctattcttcttctcggtccccgcggctctggcaagaatgcggttttggaacttgtcattcaagatttgctgcaagaatatccggactcgatctcagtgatgaagttgaacgggcttttacatagtgatgacatctctgcgttcaaggaaatagctaggcagttatgcatggagcatcaattgctattctcaaaagcggcatcatttgatgacaactnccaatttatggtggccatgct

SEQ ID NO: 8235 - DNA, 655 bp, Glycine max
agcatacatgaggcctcaaaaactggggttcctgaggtttgttgtcgtttgagaggattcgatcggcgaatcttgttttcgacctcaaattgaattcaacagtgaattgctggaaggaaaagggaacgaaccaaaaaatgggagacacaaaccacgcgtccaccgtcgatgacgatttgctcctcaaaaacttcttcgccgaagttagcgaagttgaaagggataacgaagtgcttaggattctctcttgttttaagttgaatccttttgagtatctaaacttatcatttgattcatcaattgatgatgtgaaaaagcagtaccgcaagttatcattgatggttcaccctgacaaatgtaagcatccgcaagcaaaggaggcttttggagcattagcgaaagctcaacagttattactggatcaaaatgaaagagattatattcttagccaagttaattcagctaaagaagaacttagagcaaagaggaagaagcagctgaagaaagatacagcttcaaaaatgaagtctttggttgaagagggaaaatatgacaaacaatatgaacaatcaggagagttccggcaggagctcaaagtcaaagttcggcgaactattaacagaatcaagaatggaggagaagaaaaatgcaaatg

SEQ ID NO: 8236 - DNA, 538 bp, Glycine max
gttgcgagttgagaccgggcctttgcattttcttgcgcagccatacagactctgcgccctgtgctgcgtgtgtgtgtgtgcgagagagagagacaacgaccccagacgcttccactctttctttggcggcggcgtcgttttctctacgctttacccattcattcattcattctcaggttcggggcatttcattctgattcactatggccaatggtccagcaccgttttctgagattgggaaaagggcaaaagaccttttatacaaggattacaacttcgatcacaagtttagcctctcaattccaaactccactggattggggcttatagcaacaggattgaagaaggataaactttttgttggtgacataagtacactctacaagagtggaaatactacagtggatgtgaaagttgatacatactctaatatatatacaaaggtgactgtgaatgatatcttgcatggtacaaaagctgctttgagcttcaacatacctgatcacaagtcaggaaagctggatgtgcagtaccttta

SEQ ID NO: 8237 - DNA, 265 bp, Glycine max
accgttttgagttcggttgagtagagttgagactcttcctttggcggctgcgtcggtttctctccgcttcacgcattcattccttctctggttcggtgcatttcattctgattcactatggccaatggtccagcaccgttttctgagattggaaaaagggcaaaagatcttttgtacaaggattacaactttgatcacaagtttagcctgtcaattccaaactccactggattggggcttatagcaaccggattgaagaaggatc

SEQ ID NO: 8238 - DNA, 589 bp, Glycine max
gggtcccactaaccttgaccaagatgataggcgcgtggacttcaacataatttcaggtacatccatggcatgccctcacgcaagcggtatatcagctttgatcaagtcatttcatccagattggagcccagctgcaattcggtctgcgcttatgaccacagcttatacaacttacaacaacggtaaaaaattgctagacagtgccacaaatggcccgtcaacgccgtttgaggtcggtgctggacatgtgaaccctgttgctgcgcttaatccaggtcttgtctatgatttagcagtggatgattatctcaacttcctttgtgcactaaactacacacctgataggattgaggttgtggcgaggagaaagttcaggtgcaatgcacacaagcactacagtgtaaccgacttaaattacccttcatttggtgtggtgtttaaaccaaaagtgggagggtccggtgcaacgatagttaaacacaaacgaactcttactaatgtaggggacgcaggaacatacaaggtatcagttacagttgatatttcatctgtcaagatcgcagttgagccaaatgtgttgagcttctcc

SEQ ID NO: 8239 - DNA, 468 bp, Glycine max
ctctctccatctctccctctctattagcagcagattctctaaaccactagttctctctaaccattatctaaaacatgaaacgcagagacatgttctgtgcttctcaagcctcaacagccatatgtctgagcatggaacaagcctcatgctcctcttccaacagcattctactaggaggccgaaccatggaccgccacaaccccattatcaatgactcaagaaggagcacttccaaatccctcactgccccatgttcctcttctcagtcccccatcaaccccaagccttaccatgagctccacaaggccaagaaaaactcttcttcaaaaaatgcagcaaagggtcatgataatcagcatcagatgagaagtacagcagaaagactcactgaacatgtcaccaacacttctaaaccagttgatggcattgttcgtaggggttggcttaaaccacctgctaatttaatca

SEQ ID NO: 8240 - DNA, 878 bp, Glycine max
  unsure (1)..(878): unsure at all n locations
atcacgcgttcgcccacgcgtacgattaggtcacgcgcccttggggcatctatccattttttgaaccttcccttcccacccctcaactttcaaatttcaacaaaatcgcagacatggcatctgcagtgcccgcgacggggcgagagttgtcgaatcctccatcggacggcatcaccaatcttcgattctccaatcacagcgatcatctgttggtgtcctcatgggacaagagtgtccggttgtatgatgcgagtgcaaatgtgttgagaggagagtttatgcacgctggtcccgtcctcgattgctgcttccacgatgattcctccggcttcagtgtcgccgccgacaacactgttagacggcttgtcttcagctctaacaaagaggatattctgggaaggcatgatgcacccgttcgttgcattgagtattcatatgctgcagggcaattgatcactggtagttgggacaaaaccctgaaatgttgggaccctagaggtgcaagtggccaagagcgcacacttgttgggacatatccacaacctgagcgtgtctactctctctcactggttggacatcgcctggttgtagcaacagctggaagacatgttaatatctatgatttgagaaacatgtctcaaccggaacaaagaagagaatcctcactgaaataccaaaccagatgtgtgcgctgttacccaaatggaacaggatatgcacttagttctgttgaagggcgggttgctatggaattcttcgacctctcagaggctagccaagcaaaaaaatatgcttttaagtgtcacagaaaatcagaggctggaagggacatagtctatcctgtgaaatgcattgctntccaccncatatatggaaca

SEQ ID NO: 8241 - DNA, 373 bp, Glycine max
ggaagagaagaggatgaataagagtgggggaggagagatgagtaagtggccgttcacaatgtctcagtggcaggaactggaacatcaagctttgatttacaaatacatggtggctggtcttcctgtccctcctgatctagtccttcccattcagaacagcttccactccatttcccaaaccttcttgcaccatccctctaccaccatgagttattgttccttctatgggaagaaggtggacccggagccaggacgatgcacgaggactgatgggaaaaagtggaggtgctccaaggaagcctacccagactccaagtactgtgagcgacacgatgcaccgtggccgcaaacgttaaagaaaacctgtgggatc

SEQ ID NO: 8242 - DNA, 313 bp, Glycine max
  unsure (1)..(313): unsure at all n locations
tcaggggctaaaaacaaaacctagaaagcttagggactaaaaagatagtaaaccctgaaaatttaaaagaaaaaggagcatggttccatagaatgacggaaattccgaactttataaccactatttggatatttcttcttgtgagatactacctccaatcctttttataagaaacaagtgatagtgtaaaatacactatcacttgttagtgacttcattccttgaatcagaatggatacaaagcaggtttaaactagagagaaatatttacgtcaatcagaatccagccatgaactaaaaaataaaacacnga

SEQ ID NO: 8243 - DNA, 375 bp, Glycine max
ggctacttccaatttgaagaaagagctttgcactctgaaattcaaacaacccctcctgggtttgtggatgatgccattgccatgacatgaagaccttattgccttagccttcttcttgtgctcaaacaatgggttgttttcttcattgctttggttcctccaagagcacaaaacctaggcgcaaggcacaccatcaccatcgactcgctagagacaggttagagcaatgctctattcaggattactccgaaacggtggtaattggcactgcatcacaagaagtccaggctaaacctttggagcagataaacgtgagccccaaaaagaaagtaacttttgatgtcaatgtgaaaacgtacgagcctgatgaagttg

SEQ ID NO: 8244 - DNA, 390 bp, Glycine max
ggttactaccaatttaaagaaagagcgttacactccgaacaacactccctttctgagtttgtggaagatgccattgccatgacatgaagaccaaacccattattgccttagccttcttcttcttgtgctcaacctgaaagcaaaagaaacagatctgagataatgggttgttttcttcattgctttggttcctccaaaagcacaaaacctaggcgcaaggcacaacatcaccaccatcgaattgctagagacaggttggagaaagttgctccttgtggtatgtttcaccttccaatgatgtgattttgggagtgtattgtgttggggtgcattttttgattcttttgtgaatttgatagtgtttgttgtttgcttttcctttgtaatatg

SEQ ID NO: 8245 - DNA, 481 bp, Glycine max
gaattgaaaagagcaaagtttggaaatttgggaaacttgaaagcatagcagagagatcacatcgcggctctctcatgtctcaacccaaccacccgctgaatctaaatgatgataacagagagagatgtaagaatacaatcaaacagcatgaagataatcttaagtttcttaattctcaatcaaatcaattagctgaatcaatatttgacttgcaagtgagtcttgcaaggtaccattcaactaatgtaattacgttagagaatggaaatggtgcctttcatactgaagaggaaacaatggaacaggtaatgaagaaagagaactctgctgctagtatatttagttggctaaaagttaatgcacagacatcaaatttgacattaacaaaggatgttgtgggaagttgttgcaacccttgccaaagttgagagcgatgatcttagcaggattttttctgaatttttgggcttggagacaatgc

SEQ ID NO: 8246 - DNA, 601 bp, Glycine max
acggccacgcgtacacaccggtagcgatacgactacagcccttgtcccggtctctccgtcgctttttctctatcttcatcacacacacttcaatctttttcgcttttgtctttctttgtcctttgattgctgccattaattaattaattaatattctccctccctcttcacatcaagaagttagaagaagtccatgcggtgtcagcttgtgaagaagaaatgtgagaaggatctgggtttacacctgacctgacagttctagcagtggagtgcaacagctactatctaatctaatggggtccgagcaaaatcgatttcctcagcacgaaagacgaaagagatggggaggatgttggggtgcattttcttgtttaggttcacagaagggtgggaagcgcattgtacctgcatctcgcattcctgacagtagtgggccagcctctcagccaaatggacctcaagtgattgggttgaccaatcaagccacgggactagctccttctctcttagctccaccttcttcaccagcatccttcacacattctgccctgccttccactgcaccatcacctagtcgtttctttacctagtctgctaactc

SEQ ID NO: 8247 - DNA, 855 bp, Glycine max
cggacgcgtgggttctggtacatcattgtctttggctctcggtgagggttttagggcacacaccgcagcacacaccgcagggagacggtttctttcactctctgcaattcgcgatggctgacgaggactatgaagatattgacatggggtacgaagatgaaccgccagagcccgagattgaggaaggtgcagaggaagatgtggagaacaaaaacgatgaaataactggagagcctattgacaccgaggataaggaagaggaacaaccagtgaagcggcctcgaaagacatcgaaatatatgactaagtatgagcgtgctagaattttgggcacccgtgctcttcaaatcagtatgaatgcacctgtcatggtcgagttggagggggaaactgacccactcgagattgctatgaaggagcttcgagagcggaaaataccctttacaattcggcgctacttgcctgatggaagctatgaagattggggagttgatgaactgattgtggaagactcctggaagaggcaagtgggtggtgattgatgattgaactgacaggtgtggggaggagtaacaggccctaaatttttgtctcctcgtaacatttatctttgaattgtttgaggttgatactgatctatgatcccacccaccgtaaaacttggtttacagcgatgtctttgaatgtttataacttgtgcttttaagcttagtataatttctatttcagcttgtttatatatctctgggcttgcaatagtgtttgttgttgtttgtgaaatcaactatcaggacaccctcagctctacgaagattggagtgatactttatactgtacattggttgtctagtgagc

SEQ ID NO: 8248 - DNA, 792 bp, Glycine max
  unsure (1)..(792): unsure at all n locations
cccacgcttccgcatttgtgtatttgagcttaggaatagaagtagagggaactagtgaagagataaagaagacggaggcggtttggagtatgacttcttgcacctcttttgcatcctttctcatttcttcttcttcatttccttcattgtgcttcgcgcaaacccactcaatcacatgtaaacaacgcttcccatttccttctgtaaagggaagaagaaagttctcaactttatcattttcatccaccaaaaggctcgttacaagagccgctgagtacaaattcccagaccctattcccgaatttgcagatgccgagactcaaaaattcaaaagccaccttctcaaaaagctttcaaagaaagatatgtatggagaatcaattgaggaagttgtaggaatttgcactgagattttcagcactttcttacactccgagtatggaggtcctggtacactcttggtccttcctttcgttgacatggccgatgccctaaatgaacaaggattgcctggtgggccacaagctgcacgtgctgcgatcaagtgggctcaagatcatgttgacaaagactggaaagaatggactaatggtgataacaacaaaaaatagggtacctcttgtatgttatttagtcgttataactggtgcttatgttgtaagagacctaaatgatcggttttgatatctatttcttaagtgcccgttcggttttnnnnnnnnnnnnnnnnnnnnnnnnnnnnnnnnnnnnnnnnnnnnnnnnnnnnnnnnnnnnnnnnnnnnnnnnnnnnnn

SEQ ID NO: 8249 - DNA, 446 bp, Glycine max
caagaaccattcgggatagccgtgaagttcaaagcaagtttcccttttatgtcgagtcgcattgcaatgactgcatcggattttgtctttcttggcttcatcaaggtctcgcaaagaacgaggtcgcatccctgaggcagtttttgaaaccattgcatggattattctactacaaaatccttccttccaagcatagtttcttgcccctgaaattcacagaggataatatggcagcattcttcaagtctcgggagcggtttctttcaaagaatgtcactttcaaattggattgaactgttggtcaagcccgttgagaaaattaaatactcgatccttgttaagatcctccatacagctttttacatctgctgcacacactccattccacttgggcatcgcttatccattttgttgaatccgggttgtattacaacacagttcaaaat

SEQ ID NO: 8250 - DNA, 379 bp, Glycine max
taccagatgagcaatctgaggacctattcctggcagcaagagtagtccttcaattgagcttggtatgtctccatcgtacttcaagaaacaaaaatattggcaattttcttcaagttactcgcttttcttgtataaaatccagattatttgaatagcatgagtaaatggttttcaaccgataccatagattctgtgacaaagaacatactgggtaaatcaacttttagatggtttcctcatcagttttgttcattgcatcagctgtaagcaaaccattttcacaaagaggttgagtcgctcctactcttaaaagtacaaacttgtaattaaaacaatttcataagcaagttgaatatcatgacactggcaatgggcatca

SEQ ID NO: 8251 - DNA, 418 bp, Glycine max
gggctacattttctatcagctcctcgcctaccagccttcacaaaggcgctatcacccacccttaggatccaagtttacactacccttgcttaccacgctaccttcgttttacacatgcaccaacaaccacatcaccctcaaactcctcttgttttgcccaagattcaatctttgcgcaacgaaactagagctattccagttaccaaagacctgtgggataattcaattctgaaaagtgaaatcccagtccttgttatattctatgcaaattggtgcggcccgtgcaggatggttcaccggataatagatgagatcgcaacagagtatgctgggaaactcaaatgttttatagtcaacacagacactggcatgcaaactgctgatgactatgaaatcaatgctgtaccagcgggtttga

SEQ ID NO: 8252 - DNA, 670 bp, Glycine max
ggatttttgttttgggtttttgctcgctgatgttttcacaaaatcggtttccactgatttcgcattcttcactcttccatgtctaaaatctccgaaatggacgttgctttcaaagacgcaaacgccaaatcccctctctgggaacaagtctcaagattcaaacttttgcatcaagaagatatagagtttcaaagatttggtatgcgtaacaatgttgatcagctttgtgtttttgagtgtggaatcccaggaagtgcttgatgctgaactctcagcttgagtttcacagttgataaatgtaactgacagttgaatacagtcaggaaaggagatgttcccttgcaacagatctcagcttgtttacttacgaataaaggatggtactgtgcctgtctgatttttttcagaagtacctcctgaagaaacttaatattgccagtggagcaaaggtggaaataatgtgtcgaggtcagccagtgctcccatctgtacaactgcataatttagtagatttatgaattaaagtgtagttttttcctttgtttttttaatgcagtttttttcttactttttaatgcaggttttgtctttattttgtggtgttcatgattactttatttgtttcttatggttgattattggctatttaagaaatctagaggttgatccg

SEQ ID NO: 8253 - DNA, 778 bp, Glycine max
  unsure (1)..(778): unsure at all n locations
ccctcgagtcncaaaaaaaatcaaaacgctttgggtgatacataaacagaaggcagtaactgtaccaaattgtaataaccggagaaaaatcaagcaccgagtcctcttctctctgtggtcgccgcgactacgcttcttcgaaactcgaggcgcgtgaaaaaagaccttctggatctggatctcgaacgccatggcgttttggagatctctcgtagcgttctctgcggctcttctgcttctcatccatggcgctcactgcttctacctccccggcgtcgctccacaggacttcctgaagggagatcaattgcaagtgaaagtaaataaattaacatcaacaaagacccagcttccttatacatattattctcttccctactgtcccccatcaaaaatagtggatagtgcagaaaatcttggggaagtacttcgtggtgatcgcattgaaaattctcgttatgtgtttaaaatgcgtgaaccacaaatgtgcaatattgtgtgtaagcttaaacttgatgccaaaactgcaaaagagttcaaggagaagatcggtgatgagtatcgggtgaacatgatccttgataaccttcctctggttgttcccataaaacggatggatgcagactctactgtttatcaactcggtttccatgttggactcaaagggctgtatagtgggagcaaggaggaagagtattttattcacaaccactttggcttttactgtcaagtatcataaagatacacttactgaatctggtagaattgtgggctttga

SEQ ID NO: 8254 - DNA, 301 bp, Glycine max
cggctcgatcacactcacacacagatctctctatctatcgttcattgtcgtttcaatctcaaacgccatggcgttttggagatccctcgcgttctctgcgatccttctctcgctcttcatccatggcgctctctgcttctacctccccggcgtcgctccacaggacttccagaagggagatccactgcaagtaaaagtaaacaaattgacttcaacgaagacccagcttccttatacatattattctcttccttattgtccaccaaataaaatagtggatagtgctgaaaatcttggagaa

SEQ ID NO: 8255 - DNA, 928 bp, Glycine max
atacgagtttccggggtcatgctgaggccaagtgtttcaccaagagcattgagatattggaaaagaattcatcttcatcagttgccatgaataaaaaaaaggagaaccttcaaactgaatgcaattcttctggctccgaaatggagcccaatcccacaatggaagactctggatttaaggttcgagaccttggaaaaattatgcatctttcttgggctcaagaacaaggctgctttgaggagttttgctgcgctgacaagagaaattgctgtgggcaaagtgaaacaatcaagcctaccaatccacaagagctgttgccttcagtttctcgcgaccttgatctaaatgttgttttcggcgcctgatttaaatgaagagcttacacctccattcgagtcttctagggatgaagataatggttgcactttgcagcaggctgttgaggcagatgatgatgctgcttcgcatgatttagagaaaaatttagcaagatcacacggtagtggtggttcccaaacttggaaccatggacctaccggtgaagttccagcagttgactctcgcggagatgcatgtaggaagagggtggcaagcaccaatgaagagacacatgattgcgacagcaccttgataaatgattctcctttacgcgcatctgatggtccattctccttagacgagaactttgagtattgcgtgaaagtaattcgctggctaggaatgccagggtcatatcaagcaggagtttaggttgaaattgctgacatggtttagtttgaggtcgacagaacaagaacgtcgggtggtaaatactttcattcaagctctgattgatgatccaagtagtttggcagggcaactagttgactcattttctgatattatatccaacaagaggccaagaaatgggctctcttccaataaggct

SEQ ID NO: 8256 - DNA, 987 bp, Glycine max
gcgcccttcttcttgcttgttgccagttgagtctcagcctccttcttcaccggctcttccttctcagataatatcagctcaatgtggcatggagatgacatgtaagggttgcttcatcccttagccgttgctctgcttcaacattgcggaagcagaagaagcgccgcagctatggtgaagtactccagagaacccgacaatcccaccaagtcctgcaaggccagaggcgctgacctcagagtgcatttcaagaacactagggagactgcctttgccatcaggaagttgccccttgttaaagctaaacgatacttggaggatgttttggcccacaaacaggctattcctttccgacgcttttgtggtggtgttgggaggacggcccaggctaagagcagacactccaatggtcaaggacgctggcccgtcaaatcagctaagttcatcctagatttgctgaagaacgctgagagtaatgctgaagtaaaaggtttggatgtcgatgctctgtacatttcccatgtccaggttaatcaagcacagaagcaaaggcgtcgcacctacagagctcatggaagaatcaacccttacatgtcatctccatgccacattgagctgatattgtctgagaaggaagagccggtgaagaaggaggctgagactcaattggcaacaagcaagaagaagggcgctcttcgaagtggtgcttcatcttaaattacccttgaagctactggatgaccttcattcctgatttatgtcagttttgtctatcgttttcctttatatttgttatgagctgcttttgaagcttggacagcaccttttgcttggtatactatgtttcaagttaattgagttacttggggattttttttgccgcaattaaaagtccaacctacccctttttcttctcccaccaacttcaccgtcctcttcctcgatcatgtctcacttcaagggcaagtaccatgatgagcttattgc

SEQ ID NO: 8257 - DNA, 470 bp, Glycine max
  unsure (1)..(470): unsure at all n locations
gaacccaaagtttcaaaccaacaacaccaacaaggttcaaaatatggagatgaagagagagattattaccaaggaggaagagcacaaggaggatagcatgcacactatagtgttcacagcaggtacatttcttctgatggtgtgtctaaagcactttctagttgagcaatggcgtgcttgggttttcctcatcctcaatgtcattttgttagccattttattcatgtctatgaggccagccaagctggaggatcacagttcaggaagtgaaatcagtgttgaagaagtgaaaagtgacaataataaattagagaaaaagaggtctcgagaaactgaggaaggaaaagattgctacacaaatctatgttgtagtaccactagtagtagtacttatgttcatgttaaaaacccnaaaaaaaaaaaaaaaaaacaaaataaaagcggccgccctagaggattcnagaaaacgt

SEQ ID NO: 8258 - DNA, 334 bp, Glycine max
ggagttgaaatctgaagctgaatcgtatcgttgagtttagggtttgaaattggatctgacagcatagcatagaatggcgggggttcgtagagacgcattgctgacgagagataaaggccaatcatcggtccgatttcgaatcgtcgtcgccgtcgtgatcggcgttctcctcggctgcgtctttgccttcttctcctccgctcccactcctcttcacattccctaccctattaagatggtttcatctgcatgtgaatcgccagaacaagttaatgcgcttaaagttgatattctatcagcgaaagtgaaaaattctgagctgaagaaacgggtc

SEQ ID NO: 8259 - DNA, 858 bp, Glycine max
  unsure (1)..(858): unsure at all n locations
gaaccaactgagttagattttggtgttatcctttgatataaactaagctctttcatttttccaatattaaaacttccagcttcttccttcctctgtgactcaaactgcatcaaccaagttagtgggattttctataaattgttgtcaatttgtcatgtcatgtatatgagaaactcatgaaaactctggtggtgacttattagttctctcggcaagtaaggatttcaaacaaactaaagttgaagagagtataaatgactttggaaactcttcaatccaatgagttctccaacttcattatctatgacactatctctgcaactccatttagcagccatggctccccagaggctagtttcttggaaagttttgtgaactatcaggagcagcatgaccaccctacatttgataattgcgcaatgaggacccgaaagcgtgaagccagcgaaccagaaagcattggccggaggcagaattcggtggcagtgcaagggaggaagaagaggagaaggaagccaagggtttgcaaaaacacggaagaggctgagacacaaaggatcacacacattacagtggaaagaaaccgccggaagcagatgaatgagcatcttgctgtccttcgttcactcatgccggagtcctacgtccaaaggggtgaccaggcctctatagtgggtggtgccatagagtttgtaaaagagctggagcacctcttgtaatcacttgaagctagaaagctgcaacttttgcaccaagaagtggcacaaaccaatgaaaatacggncattttcaaactcatgcaacctccttttgcacaattgttttcgtattcacagtacacatggtcccagactccta

SEQ ID NO: 8260 - DNA, 895 bp, Glycine max
gaccaaaaaaactactagtgagggatcgcaagggagtgttttggtgcgggttaaaatgcaacgataacggttgaaatagaaaaaagaaaaacagtgttttggtgaagctgagaaaacaaaggtttaaatcacctctgaatttctgctatggcttcaaccagatcagtctttcttcttcttttcattcaattgtgcttctcacttctacccttgtcattcgctcaatcccccgccaccgggtctgccgaaggttacaccatttatggtcgagtgaagatccccagtgtgggaacaaaagattatattcttcctggaaaaatttcaaatgtcaaagtcatactcaatggtggtcaaagagttacttttctgaggcctgatggatatttcgcattccacaatgttcctgccgggacacatctaattgaagtggctgcaataggctatttcttttctccggtacgagttgatgtaagtgccagacaccatggcaaaattcaggcagccctgacagaaaataggagggggcttagtgagtttgtcttggagccattgaaggatgaacaatattatgaggttagggagccattctctattatgtccattgtgaaaagtccaatgggtctgatgatgggatttatgctgattgttgtcttcctcatgcccaaattaatggagaacatggatccagaagaaatgaggcgtgcacaagaagaaatgagaaatcaaggagttccatctttagcaagcctgttacctggtgctgcaagaagcaactaggtgtatgagtaacggaaaaccagtgagcaagttggttacccccaagcaggagctgaaaaaatgacatacgatgattggagaattttcttgtgacaaattgatagcgatggaaatcttt

SEQ ID NO: 8261 - DNA, 710 bp, Glycine max
cggctcgagcattttgcttcatcgtattccacccacctcggaggcctaagccaaagcagatcctgcggacattgtaagtaaatcttatgaagatggagatgataactaatgttaccgagtatgaggcaattgcaaaggaaaaattgccaaagatggtttatgactactatgcatcaggggcagaggatcagtggactttgaaggagaaccgaaatgcattctcaaggattctgttccggccgcgtattcttgttgatgtgagcaagatagacttgactgcaactgtattgggcttcaaaatatcaatgcctatcatgattgctccaacagccatgcaaaagatggctcaccctgaaggagaattagctactgctagagcagcatcagcagctggcacaatcatgacactatcctcatgggctacttccagtgttgaggaggttgcttcaacaggtcccgacattcgtttttttcaactttatgtgtttaaagacagaaatgtggttgctcagcttgtgagaagagctgaaagagctggtttcaaggcaattgcccttactgtcgacactccaattcttggtcgtagggaggctgacatcaaaaacagatttacattgccaccaaacctggttttgaagaattttgaaggattggatcttggaaagctggacaagactagtgactccggtcttgcctcttatgttgctgga

SEQ ID NO: 8262 - DNA, 342 bp, Glycine max
cagacttacatgccttgtgactctttcatttttctccatacctgtccttgttccttctgagcttaatcgtattcctcacttcggctgcttggcaatccaagccaaaagatcctgcagacgtcataagaaaatcttatgaagaaggatatgataactaatgttaccgagtatgaggcaattgcaaaggaaaaattgccaaagatggtttatgactcctacccatcagggtgctaggatcagtggactttgacagagaaccgaaatgcgttcacaaggattctgttccagccgcgtacccttattgatgtaagcaagatagacttgactacaactgtaatgggc

SEQ ID NO: 8263 - DNA, 379 bp, Glycine max
gaaaagagcattttttttttctttcggttcagagctatgatcttttgagtcttcttattcaaagtatgaccttccctcctttgttgcctgtttgacattttagcaactgggtataccaaaataggaagcccggttggagcctgaaggttattatcaacctatatctttgctgggccaccatctggattttcaaggccttaaaaagttccgaacctccgattggaccatttttcagccactggatttgccatcctcccagggatcctcttctccctttcagcagtacctcttgccgtctttgttgggtgaggttgaactttacatttgctttggctttgactcaagaagtatattctctagtgaatgatcatggtgaaag

SEQ ID NO: 8264 - DNA, 613 bp, Glycine max
ctcgagagttgttttattcatgtcgtgaactctctcccttcatctagctcgagtttttttcttgcttccgggagctctgaacttgaccgacgtcgttttcacatcaaaacgcttcaactaaaaaaatggcgttcttgtggaacaaaactagtatcgcttcccattttcgatctcactctcagaagactgagggtttggcttcttttccgcgccgtcgattccacgtcgaacccggggctcgtgaaaaagctctcttggcagaagatgcaacgctgaaaccgttcaaatcatataagaagagtgtaaaacagctcagaaaaattgggaatgctctgacagttgttgttgttgcaggatgctgttacgaagtatatgtcagagcttttacaagagaggaagctcagaaactgtaatgtcctgaaagttctggatgaagcaaatattgggagttagttttctgttttgttgtatttttgtggcaacaacttggacgttatgattagccatgtcagaataagcagaaaagcatttgaaccaaaaattgcttgcttgtgcattagttttttcaccattccaaatgtatactgtctgatgataatgctgattggctgat

SEQ ID NO: 8265 - DNA, 419 bp, Glycine max
gaacaaataagaaaccactgccttacttcagctcttaaaacatcttttgaaaatttataaattcctcaatataagcttaaacaaaacaagcacctattgtttatcagtctttgtcaatcgttcctgtagctgaatacaaagttctgatattcgggacagcaatttacactgttggtctagcgaatttaatgaatgcatacccgttgacttgatgggattaccaagcacctgttggagctgacaacagagctgtgatgattctgggtcatttatgcaagcttcagatataagttgcagcaatttaaaggtttgttgcttgtgcattagttttcacaccattccaaatgtatactgtctgatgataatgctgattggctgatcacaaatctgtggcttcaggtgtgagaaataactagccc

SEQ ID NO: 8266 - DNA, 521 bp, Glycine max
ggatcaaccctgccgacagtataatccatgtggttgccaaacggcttgtggaaagcagtgtccttgtcttcaaaatggaacctgctgtgagaagtactgtggatgccccaagagctgcaagaatcgatttcgtggctgtcattgtgctaagagtcaatgcagaagccgtcaatgtccatgttttgctgcagatagggaatgtgatccagatgtttgtaggaattgttgggtcagttgtggcgatggtacacttgggattcctagccaaagaggggacaattatgaatgtagaaacatgaagcttcttctcaaacagcatcaaagggttcttcttggaaggtctgatatatcaggttggggagccttcttaaagaatagtgttggtaagcatgaataccttggagagtatactggagagttgatttctcatcgggaagcagataagcgaggaaagatatatgaccgtgaaaattcatcttttctcttcaatttgaacgatccagttgttcttgatgcttacc

SEQ ID NO: 8267 - DNA, 645 bp, Glycine max
gaaaggttagagtatagtatgagaagaagtgggtcatcggaactgaagtgaagtgatgcgcggcaacatttgggaaacaaaatggttgacagtgagcataaccctaacactcaccgccgtttccatctctgcgtacgtattaaagagaaaatggaatcatctgaactccaaaattgaggagcttgaggcatctctcaagtctttctcagacaattgcgcctccgaaagacaaggccgaattagagctcaacaggccttgagaaaagaagtaacacagtcgcaacctaattctcaaaagcttaacctcacttcttatcccatgatgccaattggtgtcgtccactcgtgcttctccaccaggaacgggacgccgaggcaaccgttactcgtcccacttgctaggggcgtgtttggttttcaacacacctcgcgttccaccggcgtctctggagggtcttgaggaatattctcattgctggattctctatgtgtttcatttaaatacggatctcgataagctctggaagcacccgtctaaatcagggttcaaggccaaggtgagggttccaagactgaagggtggaagaaagggagtgtttgccacacgatccccacatcgtccatgccccattggcctcacagttg

SEQ ID NO: 8268 - DNA, 628 bp, Glycine max
gaacttgtgacaggaagtgctaagcaatcaaaggatcaaccagctgctcacaacaatggtagcaaatgcaaatcaagtggaaagtcccatcagtctgagtctcaggccaaggggatgaagatgtctgcaccacccaaagaagaggatgagagtggagaagaagaagaagaagatgatgaacagggtgcaacatgtggtgcttgcggtgataattatggcactgatgaattctggatctgttgtgatatgtgtgaaagatggttccatggtaaatgtgttaaaattactcctgctaaggctgagcacatcaagcaatacaagtgccctagctgcagtaacaagagggttagagtttgaaagctctaaacctttggatcaatcaccaattaaacagacaagatttagaatgtttgataacatttttacaagtgaaaattgcttcctgttctagtgaatggttcactttaatgactatgcagatggaatttcaagttttgctactgttcattactactgtctaatcttcttgggaattgtgttaagtagtcattgacaacaaatatattatataaatatattctgcagtttctggttttgattttaataaatatttcatttatttctaaaa

SEQ ID NO: 8269 - DNA, 734 bp, Glycine max
tcgcccacgcgtccgtccagtgtccccgtctcttcctcctctctctgcatcgctgcgttttccgaatcgaaaggtgacgttagtaagtaacaatggtggagaaggccaagggtaggaaggaggaggttgtcactcgagagtacaccatcaacctccacaaacgcttgcatggctgcacatttaagaagaaggctcctaaagcaattaaggagataaggaagtttgctcagaaagcgatggggacgaatgatgtaagagtggatgtgaagctcaacaaggctgtgtggagccaggggatccggagcgtcccaaggaggattagggttcgcattgctcgcaagaggaacgacgatgaggatgcaaaggaagagctctattcccttgttactgtcgtcgaaatccccaaggaggagctcaaaggtttggaaaccaaggttattgatgatgaagattgattatgtgttggttatatatcatgttttgtttttagttgatgtggatttgcgaatatcttttattttgttgagacattggagatatgtagtttgataattgtttgccttcctctgttttgattcttagaatggttaaaaggcatcaatgcatgcttttgagtttagacactctttttccttctttttttgttgctgtggataatgaggaaaataatttcttcttaaaagaacaggatgtaacaaaatttggtaaaggagtagcttaagccttttgatact

SEQ ID NO: 8270 - DNA, 687 bp, Glycine max
ggcccttcgccgccgcagcatccgaattcctttgatcgttggtgtggagcgatggaacacggctcatacactgatcagagtaaatcaacatttagtctcgtagatgaggatcatacttttgcaaacgctgttagattcaccttaaatcaagacccaagagtgtcattttgtggctacagcattcctcatccttcagataatcgtgttaatatcagagtccagacaacaggcgatccatcacgcgaggtgttaaaagatgcatgtcaagatctgatgcttatgtgccagcatgttaggagcacttttgataaggcagtcagtgattttaaaatcagcaaggctaggaagaataatgaggatatggatgtccagtaaatattttgcctgcgtagcagctacaccctcaaatatgatgagcaggaaaaggcaggtgccaaactagtgttcattatcagtttttacatttacttttagaaatgaaacttcattcctgaaaactctagtagctggtttggtcttccgttacgtctgataatacttgcccccatttttgctcatgggacatggaaccaaacagacgctaaaatttcattcagtcttggtttgaatttaccatgcatttgttaagtttcactttcacaacctcatacattcaatagctcatgtagtcaattcatgattttcccc

SEQ ID NO: 8271 - DNA, 763 bp, Glycine max
gcaatttggttcacaaaaaccctaaacggtggagaacgtggggtttactctaatcggtaatcagatccggcccaaaccctttgacttgtcttctctctttcactctgttgttcttctcgcaatggaggttcagattccaatccacaccgtttttgacgtaccctctcttctccaagctgtggccgccgacactgttctcgccgctgcgcaatctatcgctttgattggatatctgctgactaatgacactaattcagtgtcaccaaatttgacagcagcgaatggaaggtttcctttagaagacctttttgggaggaaacatgcttatctagaaaacaagaatagtgaaacagaggacgacgacgaggatggagatgaggatgatgaagatggacatgatcaggatgatgatggagaggacgaagaattctcaggtgaagaaggcgatgaagaaggggatcctgaagatgatcctgaggctaatggtggaggaagtgatgatgacgacgacgacgacaacgacaatgaagaagatgatgacgacggggaagatgaggaggaggaggaggaggaggacgacgaggagacttcacagccacctactaagaagagaaagtgagaatattcgtaggagattgtttccaggcatttgagtcgagcttagttattaggacagataaaatagcaacctctttcagtagacctatcttgctttatttatatgtcaacgatgataattattatattatttctcattgtttct

SEQ ID NO: 8272 - DNA, 499 bp, Glycine max
  unsure (1)..(499): unsure at all n locations
ctgcaaaagaacaacagaaggggagggaaagaagaagaagaagaaggaatctggcgtggaagtaaccaatcgagagtggtaacagaaatagcaataacaatttggttaacaaaaaccctaaggtggagaaagaaggggtttactctaaccggcaatcagattcggaagcctttgacttgtgttcactctgttattctcgcaatggaggttcagattccaaatcacactgttttcgacatgccttcacttctccaagctgtggtcgccgacactgttctcgccgctgctcaatctattgctttgattggatatctgcttactaatggcactagttcagtgtcaccaaatttgactgaagtggatggaaggtttcctttagaagacctttttgggaggaaacatgcttatctacaaaacatgaatagtgaaacagaggacgaggatgatggagatgaggatgatgaagatggacctgacgaggatgangatggagatgacg

SEQ ID NO: 8273 - DNA, 558 bp, Glycine max
cgggtcgacccacgccttccgcttgcaggaagacgacgaaagagcgaaggcatttcattagcagcgttaaagaagagagaagaaaaatgcgaaagttcgatccatggcccgttttcttcaagcgcgagtggaaacgcaactggcccttcctcgttggattcgcagtcaccggagctctaatcaccaaactttcccttggccttaccgaggaagatgctaagaattccaaattcgttaaggcgcacaaaaggtgatttctgaatcgtgacatctgcctggctttgcactttatgttaggtttgtcaagattactttgcttgtcttgattttatggattgtaataacagaagagagatgctctagatagtctctttaagtctgtatcccatgttcttattttcagttttggattgtttacctaaatctggttgaaaaaaaaccacaatagttaataatttctgatttgagttatttccttcatttttaatacttatcctttagtttctcgtgttatgcatccaccataatcttggggacaatgtatgtctttaatggggt

SEQ ID NO: 8274 - DNA, 764 bp, Glycine max
tttcttctcttgtagtttcctgaacagcaggtctctccagattcatctaccataggagcatactcacgtgttgcagcagggaagaaggcctccaaatctcccgtggccataatatccagtaaccaggcgtaaaaatgcttgaatctttgattgatagagtaaatgcttggcttcttttcatcagctgctgtttcttgtccagatccttcaccttctaatgaagtagattctctctctgccagagcttcctcttcaaactgctcccgtccttcaagtagaatgctgagatacttgtacatattgctttgaatcataagcttgatgttttgtaattcttctgcagaaaacttgtttccatataaaaacttggcctgtttgaatagagtggctgttccagatccttccatgccaaacaacaaaagtttctgaactcttccatgctccaaatattcgggcacagatcttgttgaatggttagttgaattatctttgaccccgggaggattagtaggaggtacaggcaatgacaataatgaacaaatgaaacgagtggatgccctttccccatatgtttcccttaatattattttgcccttcttcctcataagatccatcttcataaacccagaaatgggtatctcgtggacattgaacatttgctagctttaacattctaagctcaatctttgttatttctcggccattcatgtagactctagtattcccattgctcgcgtccgtctgaagcttgcctccaatattta

SEQ ID NO: 8275 - DNA, 1207 bp, Glycine max
ggatacggatagggaagagtattcagtgtctcgtgtagaataatcaatggaagtaggaatgtctctgaacgcgctggttcgtcttcctctctcgaattcacgcttccacgacgatgctgctccgatgattattaggcactctctgttttcgagccgaaagcaacagcagcagcagcagagttataaggttccacagcgtcatcaagtgttcgtggttgaagccaagggcaaaaagggaatgatgtctcgtcaatttcagcgcaatgctcctcctcctttacccaagattgaagacgatggcaatcccaaattcgtcatcttcattcgcatggccaatgtatacctttggtaccctcttagtatcgtatcaggcggcaccactgctaaaataatggttgcagctaaagataattttctcggcaagtatatctacaaagacactcttgatagaaatctcgctgctgttatctacagagatgagaaggaggtacagaaatctgcattcaaacagtaccgtgtattgcgaacagctactgatttcagatacggctacaaacttgttgagaatggcaatataagagctgcactttctaccactgatgttattgagcttccaacacaagataaactaaaaaccgtgcttgacaaagtgaaagacttttttggagatgcaaaggaatcttttggaaagataacatcattgggcactactgaaacagaggagtcagaggaagacacaaaagaaaaagccaaggttaaaggatgaaactatagctggaaatgatttgcttgaattgttatgagtagcctgtggccctatgagatcagaaagctcaattatgtttatggattggttaatggggaaacttctgtgcacaacaatgctactccaggttttgttcttagatctgtaaccatcaaaattgttttatattctgcagagtgaacaccatctttacgatactgattgatcactcgtgtatgttgtaatccatgatgctttggaatggatagcatgtaggatgacatgtaatggcaccgttatcagttcaagagattcctggaattgttgtgtaaattacgggttgtaatatctatgcattttatttgacaggaatttacttagagattgcatttcaactagaccaatttactctagaattgtgatcttctaaactcgatgcaatctggaaaatttgtagaattc

SEQ ID NO: 8276 - DNA, 551 bp, Glycine max
gaaatctcacgttcactgcgagagtgtgggagccagaaaactgctgcttctcgacccacttttgaagttcaaaacttaaaccctagttctctctctctttctttctcctgcatcttcaaccatgtcagcgatgctgcaacctcagatcattctgctcaaggaaggcacggacacttcgcaagggaagccacagctggtgagcaacatcaatgcctgcaccgccgtcgccgacgtcgtccgcaccaccctcggccctcgcggcatggacaagctcatccacgacgacaagggaaccgtcaccatctccaacgacggcgccaccatcatgaagctcctcgacatcgtccaccccgctgcaaaaatcctcgccgacatcgccaagtctcaggactccgaggttggcgatggaaccaccactgtggtgttgcttgcagctgagtttttaagggaggccaagccattcattgaagacggtgttcactctcaaaacttgatacggagctataggacggcctgctccttggctattgagaagattaaagatctagctg

SEQ ID NO: 8277 - DNA, 548 bp, Glycine max
tgtgagtggcgagggaggcactgccacaagcaatggaagagtcttcatccattgaggaatcggtggcgagcgtggtcgaagaagcgaaggaggttcaagacgccgtttccgctcacatctctaaggcttccagcgacgaggaacctctccggcaacgtgtccgtcgcgtcgattcccgaatccattcgctccgttcctctctcgattctcttgtctccaccaaacaaatccctccctccttagccgataagttggatgaagatttgcagagagcgagatgcatcatcgttgacggtgacgcctcttcgctcctccctggccatgcacaaggaagctttctgaggatgtttctgggtcctatcaatgttcgtgcctccaggaaggacgttcagctcaaggtcaaagaggaatacaacagttacagggatagaactgccctgctattcctgctttttccggcaacactgcttattctaagatcttgggtttggtctggatgcttgccaacttttcctgttcagatgtaccaggtggatatatcatcatta

SEQ ID NO: 8278 - DNA, 746 bp, Glycine max
cccacgcgtccgctgcaacaccaaaggatcctactgaacaatgtaaagctgcatggtgcttttcaacaggagatgaacttacaatacaatgggagtcatcacaatcagtgtcaggtctcacctttagtttgctaaatcaaacatctctagagtcgccggtacagttattgagagggaggcagatgcaatatcaagtaaagaaaacaaagtcaaagagaaaaggcgaagacatgaaaatcgagttagaggagaaagagatcgagggagaagaagacgaggagagttttataacagtagtccgtttcacagaagataacccagatggaaaagcaactgctcttctaaattggaggctattggttgttgaagtattgccagaagaagatgcagtactgatgcttctcctttgcctttcaatactcaaaagtgtatcagaaatgaagaaacaagacgtgggaggcttgttggtgaggagaagattaaaagaagcaaggcttggaagtagggattggggttctgtgatacttcatccatcttcatggtcatcatccattgattcaacttatcttcaaccctggcattggaatgctgtggttgtcatgaaatctgatgctgtagatcagctgaaaaggtatccaacattaagtccatcaccagtggaaggtagtgacaagttatacaaacaaggaattttaagttaagcctgtcttcaattttagcaagtactattactatcattaattccc

SEQ ID NO: 8279 - DNA, 862 bp, Glycine max
gttcaggatattgtttttattagttctgcatcgcgttttgctctggactctcaccgttccttcagagtggaaccctagttgtctctatccttaaggttccgccaccgcaccaagtctcagcacccaaccaggtcttctttcattcatggcggaggaacttatttctcaattaaacaatatgctagaagaaaatggaacaccaagtcatgtagaaagggctgctgatgctgatgatgctgatgctgagctttctccaccatcacaaaaaggagatgacactaaagaaggaaaaagaaagaactcttgcaacagactgatccaccatcaatttctgttattgaccttttcccatctggagattttcctgaaggtgaaattcagcagtacaaagacgataacctatggagaactacatcagaggagaagagagaactggagcgcctgcagaagccattatataattcagttcgtcgagcggcagaagttcatcgtcaggttcgcaaatatattaaaggcattttaaagcccggaatgctgatgactgacatatgtgaaacattggagaaacactgttcgtaagctaatatcagaggatggccttcaagcaggcattgcattccccacaggatgttctttaaattgggttgctgctcactggaccccaaattcaggggataagactatacttcagtatgatgatgtgatgaaattggattttggtacccatgttgatggatatatagttgactgtgcttttaccgtggcattcaaccccatgtttgatccactgcttgaagcctctcgtgaagcaaccaatacgggtattaaggaagctggaatcgatgtgcgcctttgtgacatt

SEQ ID NO: 8280 - DNA, 484 bp, Glycine max
gagttctgcatcgcgttttgctctggactctcaccgttccttcagagtggaaccctagttgtctctatccttaaggttccgccaccgcaccaagtctcagcacccaaccaggtcttctttcattcatggcggaggaacttatttctcaattaaacaatatgctagaagaaaatggaacaccaagtcatgtagaaagggctgctgatgctgactgatgctgatgctgagctttctccaccatcacaaaaaggagatgacactaaagaagtttcaaagaagaaaaagaagaaatctaaaagcaagaaaaagaaagaactcttgcaacagactgatccaccatcaatttctgttattgaccttttcccatctggagattttcctgaaggtgaaattcagcagtacaaagacgataacctatggagaactacatcagaggagaagagagaactggagcgcctgcagaagccattatataattcagttc

SEQ ID NO: 8281 - DNA, 475 bp, Glycine max
cctcgatccgaatcggcccgatagctacaggtctccttcctccgtccaccatcgcaccaagtcgcagcttcatagcagcaccgcaccgcaccgcaccaggtcttctttttttctttcatggcggaggaaattacttctcaattaaaaaaaaatttgctggatgaagaaaatggaacatcaagtcatgttgtagaaggggctgctgatgctgatgctgatgctgagctttctccaccatcacaaaaaggagatgacgctaaagaagtttcaaagaagaaaaagaagaaatctaaaagcaagaaaaagaaagaactcttacaacagactgatccaccatcaatttctgttattaaccttttcccatctggagattttcctgaaggtgaaattcagcagtacaaagacgattacctatggagaactacttcagaggagaagagagaactggagcgcctgcagaaaccattatataatt

SEQ ID NO: 8282 - DNA, 438 bp, Glycine max
cccacgcgtccgagcagcagcagcaagctatggcggaagaaccgaaagttccaccaccttccaatcctacgttgtcgtttgatcctagtcgaacggttggtattatcaagaggaaggccttgatcaaagacttagctgcggtataccatgccgaatgccttgcatactgtcaagagcttttggaacttcaaactaaatgggaagagccatatattgacttaaaaactccagaggaatcaaaaaaggagacagcacgaccctctaaacgtgtaaaaaagttgcgttaggttttcaggtggttgatgcataactcatttagagagcaaaatatgcaccgtcagaggataccttttgcttgctgctggtgtagctgatagtatcagagcacacatttaatgtagtattgatgtacttttcaaatgctactgagacgtcatg

SEQ ID NO: 8283 - DNA, 425 bp, Glycine max
cccacgcgtccggaggaatagcagcagtagcaagctatggcggaagaaccgagagggccaccaccttccgatcctccgttgccgtttgatcctagtcggacggttggtatcatcaagagggaggccttgatcaaagacttagctgcggtataccatgccgaatgccttgcatactgtcaagagcttttgggacttcaaactaaatgggaagaggttttcaggtggttgatgcataactcatttagggcgcaaaagatgcaccgtctgaggatataccttttgcttgctgctggtgtgtacctgttagtatcagagcacacatttaatgtagtattgatgtacttttcaaatgctactgagacgtcatgtttgagatttcatccatcggcctgcagttgtggaaacatttccccctactcgataaa

SEQ ID NO: 8284 - DNA, 326 bp, Glycine max
gaacagccaaaggacttgcccacgttcattctgttggtggtcccaaatttacacatggaaatattaagtcctcaaatgtcctcctcaaccaagataatgatggctgcatttctgattttggccttgctccccttatgaatgttcctgctaccccttctagaactgcaggttatcgtgctcctgaggtgattgaagcccgtaaacactctcataaatccgatgtgtatagctttggtgtcctccttcttgagatgcttaccgggaaggctcctctccaatctccgggacgtgatgatatggttgatctccctaggtgggttcagtct

SEQ ID NO: 8285 - DNA, 759 bp, Glycine max
  unsure (1)..(759): unsure at all n locations
cccatgcgtttgtcggntaatctcaacaccccaccaaattgaatttgaaaaccaaaatcgaaatcaaaatcatttggctcctttgattcattcatcaaatcaaaaaatccattttccatgggcacttctcagagccgcgaaggcctcgaagtcaccgactcagactccgactacgaaaacgaagaagaaacagagcactacgaagacgcgaaaaccacccactccaccgagctcgatgacgtggacgcgaaactcaaagccttaaaactcaaataccaaacgccgtcttcctccgccaaaccgcttccccaaaacgccgttaagctctatctccacatcggcggcaacactcccaacgccaaatggatcctctccgacaaacacacctcctacgctttccacaaagacaccgacgaaaacgaaaacgacgatgtttggctcctcactgtaggttccaaggtccgcgctagggtttcctccgaaatgcaattgaagatgttcggcgaccagcgccgcgtcgatttcgtcgccgacggcgtctgggccctcaagttcccctccgatgacacctaccgccgattcgtcacggaatttcagagctgcatgttcgagaacgtgtacggaatcgagtgcacggaagaaaacaaggtcaaaatctacggtaaagagttcatcggctgggtgaagccggaagccgccgacgattccgtctgggaggacgccgtctccggagaaccgtctccttcgccgtcgccgtcg

SEQ ID NO: 8286 - DNA, 1003 bp, Glycine max
  unsure (1)..(1003): unsure at all n locations
gatagccatagattcccattttggcagccactctttctctctaccctccaacgtgctctccttccaatcacactcacaataacaaactaaccaattcaaagttcacacacacacacagcttgggaagaaaatcgagaattttccgagaaaatccgaagaaggcgggccatggtttccccggaaaacagcaattggctgttcgattacccgctgatcgacgacgttattcccgtcggcgacgcctccttttccgtctccgcctccgccttctcctggcccccacctcccgccaatgtcagtgttgaaattgatgcttcgcttggggattctgatggccccaaagatactgctttgaagaaaagggtttgttgaattgggctccattttggagcctggaaggcctgccaaaacagacaaggctgctatcctgattgatgctgtccgaatggtgacccagttacggggtgaagcccagaagttgaaagacactaatcagggtcttcaagaaaagattaaagagttaaaggctgagaagaatgaacttcgcgatgagaaacagaggctcaaggcagagaaggagaagctggagcagcagctgaaatcattgaatgcacagcctagtttcatgcctccccctgctgcaatccctgctgcatttgcggtgcaaggccaagcccatggcaacaagttggtaccttttattagctatcccggagttgcaatgtggcaattcatgccacctgctgcagtggatacctcacaggatcatgttctccgtccaccagttgcctaagctggcactgtacaattctctgggccagcattttggctcaaggttgtatccattttaccaataccttcttggctttgttagttctcttcttctaagtattctaactggacccagtggtgacttctgactgtatccggcatatgatactattatgattaatgctggtatttgcatgtnnnnnnnnnnnnnnnnnnnnnnnnnnnnnnnnnn

SEQ ID NO: 8287 - DNA, 826 bp, Glycine max
agccgtaaatattaaatttaataagttccttcttttttttttccctttctccctctcggaactttgaaaacgtgcaagcaaaccccacacccccacgcaacaacagtccccatttgttccgcagcaaaacaaaaacaccgcgtcttccccgtgcggggaaaaagaaaagaaaagaaaagaaccctcaattttccgggaaaacccttcagaatggtttcccgggaaaacaccaattggctcttcgattacggcttgatcgacgatattcccgttccggacgccaccttcggcgtcaattcctccgccttcacatggccccctaacgccttgaacgcttcctccaatgtcggcgttgaaattgatggctcgttgggggattctgacagtctcaaagagtctggctcaaagaaaagggttaggtctgagtcatgtgctgcttctagctccaaggcatgtcgggagaagttgcgaagggataggcttaatgacaagtttgttgaattgggctccattttggagcctggaaggcctgccaaaacagacaaggctgctatcctgattgatgctgtccgaatggtgacccagttacggggtgaagcccagaagttgaaagacactaatcagggtcttcaagaaaagattaaagagttgaaggctgagaagaatgaacttcgcgatcagaaacagaggctcaaggcagagaaggagaagctggagcagcagctgaaatcattgaatgcacagcctgctttcttgccaccccctcctgcaatccctgctgcatttgcggcgcaaggccaagcccacggcaacaagttggtacctt

SEQ ID NO: 8288 - DNA, 694 bp, Glycine max
atcactgttcacacatagccatagattccccttttggcagccacaaagcaacaccctttctttttctctctaccctccaacgtgctctcttccctcctccacttcatccaaatctttctcattttctctcccaaatcacactctcaattacaataacacacactcaacttgagaattttccccaaaaatcccaagagctcgcgccatggtttccccggaaaacagcaattggctgttcgattacccgttgatcgacgacgacgttattcccgtcggcgactcctccttcgccgtctccgcttccaccttctcctggcccccacctcccgccaatgtcagtgtcgaaattgatgcttcgcttggggattctgatggcctaaaaaatcctgctttgaagaaaaggactaaatctgattcaagtactgcttctagctccaaagcgtgtcgggagaagttgaggagggataggcttaatgacaagtttgttgaattgggctccatcttggagcccggaaggcctcccaaaacagacaaggctgccattctgattgatgctgcccgaatggtgacacagctgcgggatgaagccctgaagttgaaagactcaaatacgagtcttcacgagaagattcaagagttaaaggctgagaagaatgaacttcgtgacgagaaacagaggcttaaggcagagaaa

SEQ ID NO: 8289 - DNA, 659 bp, Glycine max
ttttaaattaaatattaatagcctaatagccacagcaacaacaaggcacttgatataactttcttgaactactaatagcctaatagcgagtattggtatttaactagactgcatgtgatttcatgaataggattagataatgcttctaaaaaaacttataataaacatgagaatgtatattcccttgacaataaaattaaaaaaaaatcctaaacgatttttttttatttctacactgcaacgtgctctcttccctcctccacttcatccaaatctttctcattttctctcccaaatcacactctcaattacaataacacacactcaacttgagaattttccccaaaaatcccaagagctcgcgccatggtttccccggaaaacagcaattggctgttcgattacccgctgatcgacgacgacgttattcccgtcggcgactcctccttcgccgtctccgcttccaccttctcctggcccccacctcccgccaatgtcagtgtcgaaattgatgcttcgcttggggattctgatggcctaaaaaatcctgctttgaagaaaaggtgcacaattctccccccacccacattttctttcttgttaaattaatattttaaaaatgatgaaagaagataaaacgtaaccaccgcgaagcgctt

SEQ ID NO: 8290 - DNA, 571 bp, Glycine max
tctgaatggctgataataccaattcagtaatggtttttccttagagacctatggaatgtggactattaaatgctacttttattgccatccttagtaatacattcttatgtaatgaatatatttcaattcccttttactgttagatgattacttttttcctttctaaaacatatatgtctgtgattgaaggccatatacaattttgtttggtcaaacatgactgctgacattttattcttactatatttacctctccacctgtgcctctataaaaaaagttattttttgactggcttttctttattacaatattatctactcctagtgttgacattgatggctcgttgggggattctgacagtctcaaagtgtctggctcaaagaaaagggttaggtctgagtcatgtgctgcttctggctccaaggcatgtcgggagaagttgagaagggataggcttaatgacaagtacaccttttactccaaattccaactatctcccgtcttttgattatcctttttagtttttgtgtaaatgtgtcgttgaggcacgtacctaatatgatagacgtg

SEQ ID NO: 8291 - DNA, 442 bp, Glycine max
tctttctctctaccctccaacgtgctctccttccaatcacactcacagtaacaaactggccaattcaaagttcacacgcacacacagcttgggaagaaaatcgagaattttccgagaaaatccgaagaaggcgggccatggtttccccggaaaacagcaattggctgttcgattacccgctgatcgacgacgttattcccgtcggcgacgcctccttttccgtctccgcctccgccttctcccggcccccacctcccgccaatgtcagtgttgaaattgatgcttcgcttggggattctgatggccccaaagatactgctttgaagaaaagggctagatgtgattcaagtactgcttctagctctaaagcgtgtcgggagaagtttgcggagggataggcttaatgacaaatttgttgaattgggctccatcttggagcctg

SEQ ID NO: 8292 - DNA, 419 bp, Glycine max
gcaacaagttggtgcctttcatcagctatccgggagttgccatgtggcaatttatgcctccggccgccgtggatacctcacaggatcatgtactccgtccaccggttgcctaagttggcattgtacaattatttgggcttccattttggctcaaaagttgtaatcattttcctatagctttttagttattatcttctaagtgttccaagtaactggattcagtggtggctttgactgtatttggcatatgatactattatgaagtaatggctggtatttgcatgtaaatgttaataagcatgtctggctgtcttcacagcggctttgatggttgttactgtttttgatataacccaaaggcagaaccaaaataatgacaataataataaaaggtcaagcacagcgacttgttattttcg

SEQ ID NO: 8293 - DNA, 116 bp, Glycine max
agaggttggtgagcgaagtggaggcgtagagcgagaccgcgagaggaaggatatggtaatttctaaaattaaaatggtttcaaattgaaacgatgtagtttcaactataacctcag

SEQ ID NO: 8294 - DNA, 346 bp, Glycine max
ggctcccactaataaacttttcaaataattaaacccacacatgaccatggcggaagccactgcatcggaactggaaatcgtcgagcccaccaccacggacgccgccgccgcagacgtggctgtcgacggcgttgaatcaaacctgaagcggactagagaggacagcgatgacgaagaagacggtgtttcgaagaagcagaaggtggatgcagaagaaaagaaagcatcaggtcccgtgaaattgggtttcaaaagcttcgcctcttccgtggaaatgttcgattacttctacaatctccttcatgcttggcccgcttatctcaatcttaaccagtatgaacatatg

SEQ ID NO: 8295 - DNA, 601 bp, Glycine max
agtgataagactgaagaattgaggtgtgttgtaaaggagtgcagtgctgagtggaaagggattttgtgagtccatgacaactaaactaagtccaggacagttactgccaaaacccacaccacactgcatttttcacagtcccaaaaccctcactttcttctttttttaattaaatgaagccctgtagctatagctctatttgtcggatattcatgttacacgcctccaaatcatatcaaatcaactgaaaaccattactaacttattaatgcatattttatgtatataatactactactataacaatatactagaatatagaccatagaatactatacatatatgtatttttaccttagcattattctgttactcatgccttgaaattcaccaacctatattgtaggttgggttgtcagattatgttttccttggaattgtctttttttgagaaagatatgatatacaaattcaaaggaggaggtaaagaaagaaaccttgttaatgattgtttggtttatttatcttatcttatacattaacttttgctgtctactagggggagggccttaatcaataatccccacaaacaaccacagtg

SEQ ID NO: 8296 - DNA, 756 bp, Glycine max
gctatttcatgccctcttatatgctcgctaacgtttgttagctcgtttccaagtacagaaggcgggtctgggagacttttaagtgagagaagaccgctgataaaacagtagtgctgctcactgataggtagggaggaaggaagcatacaggggaaggggatagcaagagagacatgcgagttcgactctcgttctatccatccatgttcagcagtccttgtccatgttggaactgttgatggcagtaccgctcaactacgagatgcttgaaagtagttgcttttactgtatttattgatattgggttagtgttccgtgtaccgcaccgagccttaataggttgtttgagattctgtaagtaactactccgtgcttcaattggtcaaagtaaatgaaatgaaacgttgatatcaatcactttttatataagaaatcattagcaaaaatcttaagaaaagaaaggtaggtttcttacttatgaaaaggttattggactcttgtgctagaattgcttttttttggggagaaaaatgaaaattatcgtctaattgaatttctttgaaatagtgttgtatatagagaacatcttctatcatatctcatcgcatctttacagtttatagattgagaaagtgttccgttagtgttgtaagcgaccttgcttggttaacaatttggagagtttgcttttacacggaaacgaagactttctagaacaaatattaaaccgggcgtttatcgaagaggcaattattt

SEQ ID NO: 8297 - DNA, 431 bp, Glycine max
tacggcgacagaaggggaaggtggttgtggaagaagagatggaggaagcaaagggagttgtgaagcacgttttccttgcaaagttcaaggacgacgtcactccagagcggattgaggagctcatcaaggactatgccaatcttgtcaatctcatcccacccatgaagtcattccattggggcaaggatgtaagtgctgaaaacatgcatcaaggcttcactcatgtgtttgaatcaacctttgagagtacagaaggcattgcagagtatacagctcatcctgcccatgttgaatatgcaaatttgttcctttcctgcttggagaaagtcattgtgattgactataagcctaccgttgttaagctttgattggagaagtaaagcctcgttcactgctagtgttcgtataaaaataaactttgttttctgtct

SEQ ID NO: 8298 - DNA, 320 bp, Glycine max
ctatagaaacaatgaaagtggacgaatggtgctaaatcaaacctttacaattgaacctatgctgactattggcagcatcaatcctgtgatgtggaatgacgactggacagttgtaacggaagatggaagcctttcagcacagtttgaacacaccattctgataacacctgacggggctgagattatgactcaatgctgaaagatgcaacacttgttatttatggataaaaccacatcgagaaacttcattatttaaatgcaactgatttaattacttctaaaaaaaaaaaaaaagacaaaaaaaaaaaagcggccgctct

SEQ ID NO: 8299 - DNA, 617 bp, Glycine max
ggcagaagcagaggcacaccaatcccatttaatttatcgttcctcttctcctcttcactttccaaccaccaattcactctttttcttctcgccctctgccgtgggaggagtttgtaacatggctgctctaccaacggcggagcttagtgacgcaaatgcaacacatgtagcaagttgtgatgtgagggtgttgcatccagtgttcaaggtttacggtggggccaccgcgttctccggccccgttgtcaccgtgaaggtgtttgaagacaacgtgttggtgagggagcttcttgagacgaaaggcgaaggaagagtattggttgttgatggaggaggaagcttgaggtgtgcattggtgggagggaatttggcactgattgcacataacatgggttgggctgggattgtggtgaatggctgcatcagagatgtggatgagatcaatgcaagtgatattggcgtcagagccttggcttctcatccactcagatccaacaaaaagcgcactggtgaaaagaatgtccctgtttatgttggtggaacatttattcgtgaaggagaatggttgtatgcagataatgatggcatcctcgtatcagaatttgagttgtcaaact

SEQ ID NO: 8300 - DNA, 497 bp, Glycine max
gttgaagagtattttagttcaagaaaacatgtgaatcaaaatgaacatggacataaaactttggattgtctatttattgtcatagattttagataaaattatcttcttttttttttgtagttctaaactgatgagatgttatgatttgtgttctacaacctttaaagcagttaacttcttcaggcagttggtaatggggaagtccaaattatgcttggttgaattccattatttctcacaaagtataagtctatgtgggtgcaggaggagtttgtaacatggctgctctacctacggcggagcttagtgacgcaaatgcaacacatgtagcaggttgtgatgtgagggtgttgcatccagtgttcaaggtttacggtggggccactgcgttctccggccccgttgtcaccgtgaaggtgtttgaagacaacgtgttggtgagggagcttcttgagacgaaaggcgaaggaagagtattggttgttgatggaggagga

SEQ ID NO: 8301 - DNA, 746 bp, Glycine max
cccacgcgtccgcccacgcgtccgcccacgcgtccgcacttatatttatttgtttcttctttaagtgaacaactgaagctgtgacagtttcagatgagtgaagcaacaacaagaaacgaacggcgggttctggtggcggtggacgaaggcgaggaaagcatgtacgctctttcttggagcctcaagaacataattttccaaaattccagcgatacccttatccttctttacgtcaagccccctcatgccgtttattcccccttagattccacagccaggatagatcatcctgaaactccaggatatttgttttcgtcggacgtaagtgcggccatcgagaagtatggccaagaagtggcagattgcgtgttagagaaagcaaaaaaattgtgtaaagatctccaaaacgtcaaggtggaaacccgggtagaaattggagacccaagggacgtgatctgtgacatgtctcaaaagttgggtgctgacttgttaatcatgggtagccacggctatggagttgtaaagagggctttccttggaagtgtgagcaattactgctcacagaacgtgaagtgcccagttttgatagtcaagaagccaaaaccatctgctggtgctggaaaatgatctgccacttttgttctgtatttgggctatctatgtacaattttgttcatgggtatgtgacgtttttacctatggcgtaactagtggttctaggacgatcttgcaatgtggatgatatt

SEQ ID NO: 8302 - DNA, 449 bp, Glycine max
agacgacagaaggggagaccaagaattggtttgtcgttttcatcattactccgatgaaataaagttgcgtcatataccattagactggtcaaagctcgtgagtcacttgtctttgtgtcttgttgagtaacaactcaacctgtgacagttgcaaatgagtgaagcaacggcaagattcgaacggcgggtcctggtggcggtggacgaaggcgaggagagcatgtacgctctttcttggagcctcaggaacgtaattttccaaaattccagagatacccttatccttctttacgtcaagccccctcatgccgtttattcccccttagattccactggcaggatagatgatcctgaaactccagttttggtgaattaaagcggtggtgttaggatggttaatttcaagatatttgttttcgccggacataaatgcggccatcgagaagtac

SEQ ID NO: 8303 - DNA, 622 bp, Glycine max
ggttgagccttagtatggcgttttgaaccaaacgacagttgcgtcagaactacgctgaagaatatcatcaccatcaaagtgtttcgttggaaggggaatttggcagatcattggaagaaaatggcgggtggtggaaaggtttcgttcaaagtcacactcacctccgatccaaagttacccttcaaagtgtttagcgttccagaggcggcaccttttactgccgttctcaaattcgccgccgaagaattcaaagtcccgccccagaccagcgctatcatcaccaacgatggtgttggcataaatccccagcagagcgcaggcaatgtcttccttaagcatggttcagaattgcgcctgattccgcgtgatagggttggtgccttttagatgttacagatgtgtctgactggagttggtgccttttagatgttacagatgtctgactggatattgacccttctcgctagatacatgaactgtagcttcatatgtagtaatcaataaataccattgctactgatttcatatattgatattgagatcaaaggtgtcatcaagcgataaaggttatttcttacttcaatgatgatatacatgtttcgggactaacaccctgaacatt

SEQ ID NO: 8304 - DNA, 421 bp, Glycine max
ggaatttggcagattcattagaagaaaatggcgggtggtggaaaggtttcgttcaaagtcacactcacctccgatccaaagttacccttcaaagtgtttagcgttccagaggcggcaccttttactgccgttctcaaattcgccgccgaagaattcaaagtcccgccccagaccagcgctatcatcaccaacgatggtgttggcataaatccccagcagagcgcaggcaatgtcttccttaagcatggttcagaactgcgcctgattccgcgtgatagggtcggtgccttttagatgttacgggtgtctgacttgatattgaccttttttgcaaaatacatgaactgttgtagcttcctaagtagagtaatcaataaataccatggttactgatttcatataaaatacatatgttagtaag

SEQ ID NO: 8305 - DNA, 1668 bp, Glycine max
atcaccaccagcaacgcaacttcattccattcccaattcccactcaaccaccaaaccctattcagcatttcccccaaatcaccgtcacaccatgggctcctccgcgatggtgttggacccgaaaccctcatcggagcctccgccgttcctcccgtcgacgaaatcggactaccttcaaggcagcttcggcggcgacgccaccgcctccgacgaggacgacctctacagccgcctgaaatccctccagcgccagctggagttcatcgacatccaggaggagtacgtgaaggacgagcagaagaatctcaagcgcgagctcctccgcgcgcaggaggaggtcaagcggatccagtcggtgccgctcgtcatcggccagttcatggaaatggtcgaccagaacaatggcatcgttggatccaccaccggatccaactactacgtcagaatcctcagcaccatcaaccgcgagcttctcaagccctccgcttccgtcgcgctccaccgccactccaacgcgctcgtcgacgttcttccgccggaggccgactccagcatctcgctcctcagccagtccgagaagcctgacgtcacttataatgacattggaggatgtgatatccagaaacaggaaatccgtgaggctgtggagctaccccttacacatcatgaactatacaaacaaattggtattgatcctcctcgtggtgttttactgtatggaccccctggcactggcaaaacaatgcttgccaaagctgttgcgaatcataccactgccgccttcatcagggttgtgggatctgagtttgtgcagaagtatcttggtgagggtccacgaatggttcgtgatgtatttcgtctcgctaaagagaatgcgcctgcaattatatttattgatgaggttgatgcaatagccactgctagatttgatgcccaaactggagctgatagagaagtacagcgtatccttatggaacttttgaatcagatggatggttttgaccaaacagttaatgttaaagttattatggcaactaacagagcagacaccttggaccctgctctgttgcgtcctggaaggcttgatcgtaaaattgagttccctttgcctgatagacgtcaaaagaggctcgtatttcaggtttgcacagccaagatgaacttgagtgatgaggtagacctggaggattatgtttctcgtcccgacaaaatcagtgctgctgagatatcagctatttgtcaagaagctggaatgcatgctgttcgcaagaatagatatgtcatactgcccaaggacttcgagaagggttacaggacaaacgtgaagaagcctgatactgacttcgaattttacaagtgatgatgttgtagctttgagattggtgtgtgtactcgcgaagttaaatatacagtgcagggggtacatttctagaggaatcacgatcatgagaaatgatgcaatgtttctgtttcttgttgacctttcatcttattttgtaatttagattatttaatttactaaatatattaattgtggaagcttaatgttgagttcgtactgcatgtctgatttcaaaagtaatatggatgacttgcttctgccttcattttgccttgatgctaaaaacaagatgacttaagtctataaaatgagtatgtttttgattt

SEQ ID NO: 8306 - DNA, 457 bp, Glycine max
  unsure (1)..(457): unsure at all n locations
atttcattccatcataatggccgcctcagcgatggtgttggatccgccgcccttcctcccgtcgacaaagtccgcctacctccaaggcggcgacgccacggccttcgatgaggaagatctctacagccgcctcaaatccctagtgcgtcactcgagttcgtcgacatccaggaggagtatgtgaaggacgaactgaagaatctcaggcgcgagctcctccgcgcgatggaggaggtgaagcggatccagtcggtgccgctcgtcataggccagttcatggagatgatcgaccagaacaacggcatcgttggatccaccgcaggatccaactactacgtcagaatcctcagcactatcaaccgcgaattgctcaagccttctgcttncgtcgcgctccaccgncactccaacgcgctcgtcgaggtgctgccgccggaggccgactccagcatctcgc

SEQ ID NO: 8307 - DNA, 204 bp, Glycine max
gatggggttttatcatgagcgcgaacaccgattgtgtcaatgttcctgtgagctcaaggcaagggagagaatagtccaataaaaaaaaagatgcatgtttggaagtttttctttcttcttgaagaagagaaaataaaatggcttgttcaatatatgggacaagcgtttcatgctgcaaataataatgaatgattttcaggggct

SEQ ID NO: 8308 - DNA, 975 bp, Glycine max
gggactagatatttttttctctctcctcttcgccgctaattaacccttttctccccagcattcaatttctattagtatccaaaccttgattgcgttcttggattttcttgtgggtagggggtttctcctctctttctctgcagtttgatggatcgggaaggaggatccaacgccggatcttgctactactccgttctcgggattcgtagggatgcctccttctctgatattcgcactgcctaccgcaaactcgctatgaggtggcacccggacaagtgggctctgaatcccgcaaccgccggcgaagccaagcgccggtttcagcaaatccaagaagcctactcagttctctccgatcagtctaaaaggtcaatgtacgatgcggggctctacgatcctttggaggaagaagaccaagatttttgtgacttcatgcaagagatgatctcgatgatgaacaatgtgaaagacgagggggacagtttggaggacctacagaggatgttcgtggagatggtgggggaagatcatggccatgggatcggctttgacttgaaccaggatcagacggctgggaagcgaggacgcgtaaatggatcaaagggcaacgcgcccaagcgcagcaactcccgcagttagtgtgccgtactgaatccgtcttgtaattttcttacttgacattggatgatgattgaaatgaaaatccttttggtgggattaaattaaatttgctgaacaactactagtacattagtaatgctcttccttagttatggaacaatacaatacaccaagtgcaactgtgcaaattgtgctttgcattctagtactgccccggggctgcttctttttttttttttttttcttttttcctgccaaaaatataatactaattcagatcagatgatccccattttcttgccggaaaaaaaaaaaagaataaaaaaaaaaaaaaaaaaaaaacccacgcgtccg

SEQ ID NO: 8309 - DNA, 855 bp, Glycine max
ttctctctcctcttcgccgctacataaagtctttcctctgcctcattattttactcttgtctccccagcattcatattaatatcatgccctccttctgcatccaaaccttcattttgtagtgggtgggggtttctcatttctctgccgttccatggatcgggaaggaggatccaacggcggatcttgctactactccgttctcgggattcgtagggacgcctccttctctgatattcgcactgcctaccgcaaactcgctatgaggtggcacccggacaagtgggctcagaatcctgcaaccgctggcgaagccaagcggcggtttcagcaaatccaagaagcctactcagttctctccgatcagtctaaaaggtcaatgtacgatgcggggctctacgatcctttggaggaagaagaccaagacttttgtgacttcatgcaagagatgatctcaatgatgaacaatgtgaaagacgagggggacagtttggaggacctacagaggatgttcgtggatatggtggggggagatcatggccatggaatcggcgttgacttgaaccaagatcgaacggctggaaagcgaggacgagtatatggatcgaagggcaacgcgcccaagcgcagctaactctcgcagttagtgcgccgtactgaatccatcttgtaattttctttacacattggatgattgaaatgaaaatccttttactagattggtaatgctctttagttattagttatggaacaatagatcaagtgcaactgtgcaaattgtgctttgcattctaatactgccctttggggcttcttttttttcctgccccaaatatagtgattcagttcagaggacc

SEQ ID NO: 8310 - DNA, 387 bp, Glycine max
gtggactagatatttttttctctctcctcttcgccgctaattaacccttttctccccagcattcaatttctattagtatccaaaccttgattgcgttcttggattttcttgtgggtagggggtttctcctctctttctctgatattcgcactgcctaccgcaaactcgctatgaggtggcacccggacaagtgggctctgaatcccgcaaccgccggcgaagccaagcgccggtttcagcaaatccaagaagcctactcagttctctccgatcagtctaaaaggtcaatgtacgatgcggggctctacgatcctttggaggaagaagaccaacaggatttttgtgacttcatgcaagagatgatctcgatgatgaacaatgtgaaag

SEQ ID NO: 8311 - DNA, 467 bp, Glycine max
  unsure (1)..(467): unsure at all n locations
ccgctacataaagtctttcctctgcctcattattttactcttgtctccccagcattcatattaatatcatgccctccttctgcatccaaaccttcattttgtagtgggtggggggttctcatttctctgccggtccatggatcgggaacggaggtgccaccggcggatcttgcttcttctccggtctcgggaattcgtagggccgcctcctcctctgattttcgcactgcctaccgcaacctcgctatggtaaagtagtttcccccaccgttcaatcctttccctctttttaattaattaaattatactaatnaattcctgatttttcgaaaaaaaaaaataaaattgggccgggctgagaagaggtggcacccggacaagtgggctcagaatcctgcaaccgctggcgaagccaagcggcggttcagcaaatccaagaagcctactcagcagttctctccgatcag

SEQ ID NO: 8312 - DNA, 552 bp, Glycine max
cgctaattaacccttttctccccagcattcaatttctattagtatccaaaccttgattgcgttgttggattttcttgtgggtagggggtttctcctctctttctctgcagtttgatggatcgggaaggaggatccaacgccggatcttgctactactccgttctcgggattcgtagggatgcctccttctctgatattcgcactgcctaccgcatactcgctatgaggtggcacccggacaagtgggctctgaatcccgcaaccgccggcgaagccaagcgccggtttcagcaaatccaagaagcctactcagttctctccgatcagtctaaaaggtcaatgtacgatgcggggctctacgatcctttggaggaagaagaccaagtccgtaaagttttttcctttcattttttttcaattactatttttataagaaaaaaaaatgttttttttttaatgagcaggatttttgtgacttcatgcaagagatgatctcgatgatgaacaatgtgaaagacgaggtagtgattttgatgatgggttttgtttttg

SEQ ID NO: 8313 - DNA, 436 bp, Glycine max
ggctcgcgttcacaacacaaaccctagaagccaacatttttcaggaacgagtgcgagcagaggtagtggagtgcggatgcgtaattgaattgccagaattaaaagtgttcattcagttatttctttgattcttgctttcattttggaccgtgctgctcatcatcacaggatctttcaggaataatttggagacgtattttaatgaagttagatcattggaagcagttagattcaaggcgctttgcatccagtgggcacagtattatctaaaatttagaaatcaaacataggatgttagacaactatgtaactttaggttacttaattagtttacatactttgcattacattttttacaattgttgtttcatcttaacattgaacaacctttgttgatagctagttttttgctaaaatctatttgaaaactgaatgc

SEQ ID NO: 8314 - DNA, 497 bp, Glycine max
ctcgagccgaatcggccagtcatacactgagagagagagagagagagagagagaacatcgttgcagtggcgcgcccaatggctctgggaatctcaaacatactgcactgccccaaattgagtttctcccacaacaattttcgcccaaaagtttcaacctctctcagcctcaggtttccccagacagcagcacggagtgatagaaagatcatctgtgctgctgcatctgcggctggaagctctaatcccgatggtgaatttaatccttatgaggtgctaggtgtaagccctattgagaaatttgacatggtcaaggcagcatatgctaaaaaaaaagaaggacgctgagatgaacggcgatgaagcaactgcttctagactggaaaaggcatatgacaaactcatgatggctcaattgtctaatcggaaaaagggtgtgacttttggatcatttaaggtttcaaaggagatcaagtatgcggacaagcttccagttat

SEQ ID NO: 8315 - DNA, 944 bp, Glycine max
tggacacaagaaaggagcgagatagcgaggaaatttggttcttacttcttacccgcagacagaggaaggaagggaaatagatggaagctgtgtgtggaagtggaagcagtgtttgggtcacatcctcccttacacgctcacccaagatcacactccctctattccgcgccagttaccagcacctaacagcatttccttcacaatcccttcttttctcctatcacccttctcgctatgctaatgctagaaccctccgcgccagaacctcctccaaacccattttccttccccacttaattgcttctctggaacaagttgaccagacttacattatggtcaagcccgacggcgtgcaacgtggcctcgtgggagaaattatttctaggtttgagaagaaagggtttaagttaactggcttgaagctcttccagtgctcaaaggaattggccgaggagcattacaaggacctaaaacaaaagtcattcttccccaagctgattgactatattacttcacgtcctgttgcgtgtatggctcgggagggtgttggggtagtcgcatcggcccgcaagcttataggggctacagatcctcttcaagctgaaccaggcacaataagaggagaccttgctgttcagacaggaaggaatgttgttcatggcagtgacagtcctgagaatggcaagcgtgaaatagctctatggttcaaggaaggcgaattatgcgaatggaccccagtccaagcaccatggctgagagaataataaaccacagatgcccaattacaatgattcttgctgtttctaggttcaataacctgatcaattgttttcagtggcaaatgtagcacttcattaaaccttcgagtttaaacagttactcaaattttgtaaaattttgcattttgactattattcaagcctattcctggcattccatttcct

SEQ ID NO: 8316 - DNA, 466 bp, Glycine max
gtagacagagagaagcagagaagagagacaattgccgtcactttctgaacattggaacgttaggttaatgggttgggttcggtgaaacaccaacctttcccaagccaagtttcacttcacaactcctcaacacaagaactaaagtagtagtagtagcttcacttcactcacaacacagcaatgcccactggcttctctctcatctttgcggcatcacttttccttttgcttctcgattgttgctctgggagttttgttggggtctgctatggaagaagtgctgatgacctccctacacctgacaaggtggcacagttggttcaacttcataaaatcaaatatgtcacgatttatgattctaatatacaggttctgaaggcctttgcaaacactggaattgagcttatgattggggttccaaattcggacttgctttcagtctctcagttccaatctaatgcagact

SEQ ID NO: 8317 - DNA, 500 bp, Glycine max
gaattgttaatttgcgtccataattcactcatcctcctcgcaatttccgatctttctgtagttgtctggtctccgtcaaccatcaatcaccaacgtagatcgcacacaaataacaatgggtttaggttttgttgtcggattcctcgggcttctgattctatttcacgccgcatattctaccatccaatacaagggtttgttgaagattacggaggaagagttttcagggcctcctttgaatgtggtgattgaggtgactctagggttagttttttgcatgtgggctgcactaaccgtgccaggaaagtttttgtcaatccaccctcactctgaagagaacagaattgtttctttaccttccaacgtggacttcatgatcttcaaccatcgatacaaagtctttcctgtggaaatggatgtgaagctgaagcattgagaacttttatataattggacggagtaacttcatttcttacacgaggaagaaagagtctttcctc

SEQ ID NO: 8318 - DNA, 361 bp, Glycine max
gattttgtgtttaattaatctaataaaataacccaaatttcgaatggggtaatccttccgagttctgagaatgagatgttgctaaatgtttcagatgttgtcgacaagtatgaggttcaacttattagggcactacgaacatactctgggcattgaaaactggtttgtccctcgaacattttccgcaccatatggtcccacattcttagatgcctaatcattggaaaaggctactttggctctacttgatgaattgtatggctgggatttttttccctttgcttgtagaatcctctcaaaatttatttaaccattgtgtactcatttagaacaaacaactcttcccaaatatcaaaaagcg

SEQ ID NO: 8319 - DNA, 730 bp, Glycine max
ttcctctctgcgctgcgcaccattctcaatctccgatctataaacccccaaaccctcctccattcccagccatctctctctctctctctaaaaccaagtctcgtttctctctcctcttgctgggcctcttcttcgggcttcccggcccatcgccgactccaacgccacaacctttttctgctttttcgatttagggttttcgcgcgctctcccttccttctcctggatctgctaggagaagcgctgaatgctctgagcttcaacgctgtttgttagagatggcgtcttcgtatcccggttccgttagtgccgcacaggttggttcctacttcgtgggacagtactaccagattcttcgccagcaaccgaatctcgttcaccagttctactccgattccagcagcatgattcgcgttgacggagactccgttgaaaccgcgcacgatgtgttgcaaattcattcaattgtctcgttactgaattttactacgattgagatcaagacaatcaattctcttgactcttgggatggaggtgtgcttgtgatggcctcaggttttgtgaagataaaggatatcggtgggaagcggaagtttgttcaaactttctttcttgctcctcaggagaagggttactttgtaatgaatgatatgtttcatttcattgatgatggagtaatgtacccaaatctggtaccagtggcatccgaaacgattgacacacaaccaca

SEQ ID NO: 8320 - DNA, 633 bp, Glycine max
gtgattccttcagtcacttccctcattttttaacattcccctcggcgctgcgcacctttctcgatctccgatctataaaccccacaacaccctccttccttctttctcaaccttacactctctctctctctctcaaaataaatctcgtttctctctcctctcgttgggcctcttcaacgggcttcccggcccaacgctacaacctttttttctgctctttcgattttttagggttttcgcgcgctccccctttcttcttctcctggatctgctaggagaagtgctgcatgctctgaacttccttccatactcttagagatggcgtcttcgtatcccggttccgttagtgccgcgcaggttggttcctacttcgtgcgacagtactaccagattcttcgccagcaaccgaatcttgttcaccagttttactccgattccagcagcatgattcgcgtcgacggagattcagttgaaaccgcgcacgatgtgttgcaaattcattcaattgtatcgttactgaattttactacgattgaaatcaagacaattaattctcttgactcttgggatggaggtgtgcttgtgatggtctcaggttctgtgaagataaaggatatcagtgggaagcggaag

SEQ ID NO: 8321 - DNA, 744 bp, Glycine max
  unsure (1)..(744): unsure at all n locations
gggatgaagggggaaaatagttcagtttgttattcaccaacgttaaacgttaacgctaacgcggtcttataaaatgttagcttaataataatttgaaacctcttactttgagagacagtggcagcggtggtactctcaaattgatcctctcagtctgaggaaggaagacggtgcgttcgtaaaaagtgaaaaagaaatggcagaactgagtttgggaattctaattgatattgttgatgaggaatggatgagagacactctccctgatgatgatcttccactgcccccaacactggttgtaaggacagatgatactgaggactcaaatcaggagacgcaacaagttaatctggatgcttggcacgatcttgcctttggtcaagaatagaagtttcatcattaaccagtgttgtgttttgtacttagtgagtagatggtccctgttatttggacttggcatcttcctttctatttccccgatagattgtaacttatcaactactagtacctgttaaggttatattaaggaattgtggtgtcattgctgaatgttaatgtttgctgtgcctgtcaggaaagcacttttgtatttttgcttcaaggttgaagtaagtttagggcaaccagtgcctactggtatgctctggagtctgacacctgtattaagccccgttacagtaatatttagttgtttaatagtaaaaaaaaaaattttnttttttancnntagcggccgctctagag

SEQ ID NO: 8322 - DNA, 385 bp, Glycine max
gaactgttgaatcgtcttgattaccattttgtagcatgttctgtacaactagaatgtgtttgattataagacattattatttattttatctgctgcaagtatctaattaagcaatagtatcattacagtggatgtggaatttgcaggtatataaactgctaattagtcaagttaacttgtctcaaatatcttaaagtgctaatttccttgtgtctgtcctttttatagtttgactattattagtttgttgaattggagaaattgatacaagggcaccaaatttggtgattacagtatttgtttgatgtgttggcatttttaattttttttaaaaaaaacattctaaaacgattctgactgaaaaccgacttagaaacatcacatt

SEQ ID NO: 8323 - DNA, 1646 bp, Glycine max
caccaagtgaggctcttacagagagggtaggctggttttacttgaaaagaatcttttctatgatcagactcgattatattctacatgaacaggctccgtaagatccagtaaaataagtaatgtagtatagtctgaattatatcatatgtatttcagtaaacttaatagtatgacaacgcattcatttcctatgcattgattcgatttctgatactatcggagtgaaaaaagtagatctaaagaaaaacgcgggttggattatattagtaacaagtaaattctttgtacgtaaaaagttccaagattttgttggacagaataacaattgcaaagtttgagatcacccagaaagcattatcaattttaaaagcctactcgggtattgagcgtttatcaaagtttacttaataagaacttaatttttttttttttcaataaagaatagtttgtaacttcggaaaaagagaatctagtttattttcttacatagaatcctcatatatgtgtgaataacacatacattttttctatagatacattcgaaatctttgattagtgctcgagccggatgatgaaaaattatcatatccggttctttcggaggatggatctataagaattcacctatcccaataacaaaaaaacctgacttgaatgatcctgtattaagagctaaattggctaagggaatgggtcataattattatggagaacctgcatggcccaacgatcttttatatatttttccagtagtaattctaggtactattgcctgtaacgtaggcttagcggttctagaaccatccatgattggggaacccgcggatccatttgcaactcctttggaaatattacccgaatggtatttctttcccgtatttcaaatacttcgtacagtgcccaataagttattgggcgttcttttaatggtttcggtacctacaggattattaacagtaccctttttggagaatgttaataaattccaaaacccatttcgccgtccagtagcaaccaccatctttttgattggtactgtagttgccctttggttaggtattggagcaacattacctattgagaaatccctaactttaggtcttttttaaacttataaaattgattccattttgaaataaaaaaaaatagaatgccatgtgtattgtgtatctagggagaattctttttgaaacgactaatccctagatacatctattccattttaggtctattccgaacatatggattatttttttttaaagatctaaattacatattttcatccctatcgtaagtttagaaaaatagaaagaagaaatctgaaaaaatcctatgccaatggatttcaaatttatgcaaaatgcttttctatttctaaaaagtccaatatatatttgacatcttctacgcgaaaatgttcaattttcagaaggtcttcatgactgttattcaaaagttctaataatgtatgaatattggatcttttgagacaattatagatcctggtagacaattctaattggtcaataaaaatggatttcaatgctatttcttgtttctttttcattagtttctcattagacaatatatcatgaatagtaataaggtgcatagaatctatgtgttgattgttttataacttaaag

SEQ ID NO: 8324 - DNA, 1406 bp, Glycine max
  unsure (1)..(1406): unsure at all n locations
ttcctttaatttttttcattatatctattcattgagtaagtgatgatccaacagttcttactcagggaatttttggacttcgatttaaggtttttttgaatcatcgtggttatagtatgaatctgatgtttttttaattgattcatagggtcctaacaagagaattcctatcaataataaaaattcaataataataaagaagacaacagtaaaatcatattatacacaataaaaaaatgaagtaaatagtagaatattcaagaggccttaaaagatcaagataaagacgaaggagccgacttgatattttagcattataaccaaaaagaatagctttcggatctctattttttattatcgtcaaagaaaattagaatcataggattaaataaagaaatttcaaactttctattacacatatctgttttcgttacaagcagtatttgggtatttttgtttgagccgtacgagatgaaattctcatatacggttctcagggggggtccgttggtttacctatctcaataaagtctatgattggttcgaagaacgtcttgaaattcaggcgattgccgatgatataaccagtaaatatgttccgcctcatgtgaatatattttattgtttaggaggaattacacttacttgttttttagtccaagtagcaacgggatttgctatgactttgtattatcgtccgaccgttactgaagcctttgcttctgttcagtatataatgactgaagctaactttggttggttaatccgatccgttcatcgatggtcggcaagtatgatggtcttaatgatgatcctacacgtatttcgtgtgtatctcacaggcggttttaaaaaacctcgcgaattaacttgggttacgggtgtagttttggctgtattgactgcttcttttggtgtaaccggttattccctaccttgggatcaaattggttattgggcagtcaaaattgtaacaggcgtacccgacgctattcctgtaataggatcgtctttggtagagttattacgcggaagttccagtgtgggacaatctaccttaactcgtttttatagtttgcatacttttgtattacctcttcttactgcggtatttatgttaatgcactttttaatgatacgtaagcaaggcatttctggtcctttatagtgaatatggatcatagatatttgtaatcccaatcattttttattttggggaggaatttatttcattgctacaaatatggattatttaaaagaataagacatgtatttggatatttcccttcaacttaacaaaaattgaatttttttccaaacacgcacgtatctttttatgcaataaatttgtttactaatgtnnnnnnnnnnnnnnnnnnnnnnnnnnnnnnnnnnnnnnnnnnnnn

SEQ ID NO: 8325 - DNA, 1075 bp, Glycine max
agagaaccccctaaagttccgacgaaaaaaggttaaataattttttattatcttaattgaagtaatgagcccccaatatggagggctcattacgtcaactagtccccatgttcttcaaatggatctcttagttgttgcgagggttgcccaaaggcaatatataaggcatacccagtaaaacttacaagtaaaccagatatagagatggcaattagggttgctgtttccattattagaattctaaagtttcaagatcacaatagatctataggataagatccttatatttacagcgaaatggtatacaaagtcaacagatctaaatgaataaaaaatagtatttatggctacgcaaaccgttgaggataattctagatctggtccaagacgaactgttgtaggggatttattgaaaccattaaattcagaatatggtaaagtagctccggggtggggaactactcctttgatgggtgttgcaatggctctatttgcgatatttctatctattattttggagatttataattcgtccattttactcgacggaatttctatgaattagattcacaagaatcgggtaattagtttttcaatagaaaggaaagttaagcattttggtttcttattgtttgttagtctatttcatttggatttggtagtttgatcgtggaatttctttgtttctgtatttccggaatatgagtaaagtctatgattggttcgaagaacgtcttgaaattcaggcgattgccgatgatataaccagtaaatatgttccgcctcatgtgaatatattttattgtttaggaggaattacacttacttgttttttagtccaagtagcaacgggatttgctatgactttttattatcgtccgaccgttactgaagcttttgcttctgttcaatatataatgactgaagctaactttggttggttaatccgatccgttcatcgatggtcggcaagtatgatggtcttaatgatgatcctacacgtatttcgtgtgtatctcacaggcggttttaaaaaacctcgcgaattaacttgggttacgggtgtagttttggc

SEQ ID NO: 8326 - DNA, 831 bp, Glycine max
aagccatctcttcttcccatctttttttaaaagaaagtcaaaaaaatcaaaaaggtgggaacgggggtgaaacaaattgggctcacagaatacttcagggctggccacgcacctgtcaggaactgtataaaaaaggaccgataactcagaaaggtctgatacttgaaaagagcaagttatgtaggcagtggccgttccggttgctcgaccaaagccggtcaaagaattctatgcctggccagaagccagaagtgaagtgagccttacaagaagcgaagccgaaggaaaatgagactagctaagactagggaaagagcggctagctaactagctgatagagatggcaattagggttgctgtttccattattagaattataaagtttcaagaccacaatagatctatcggataagatccttatatttacagcggaatggtatacaaagtcaacagatctaaatgaataaaaaatagtatttatggctacgcaaaccgttgaggataattctagatctggtccaagacgaactgttgtaggggatttattgaaaccattaaattcagaatatggtaaagtagctccggggtggggaactactcctttgatgggtgttgcaatggctctatttgcgatatttctatctattattaacagtaccctttttggagaatgttaataaattccaaaacccatttcgccgtccagtatcaaccaccatctttttgattggtactgtaattgccctttggttatgtattggagcaacattacctattgagaaatccctaactttaagtcttttttaaacttataaaattgattccattttg

SEQ ID NO: 8327 - DNA, 490 bp, Glycine max
tgttaatgcactttttaatgatacgtaagcaaggcatttctggtcctttatagtgaatatggatcatagatatttgtaatcacaatcattttttattttggggaggaatttatttcattgctacaaatatggattatttaaaagaataagacatgtatttggatatttcccttcaacttaacaaaaattgaatttttttccatacacgcacgaatagttgaagggaactctccgaagaaaaaatggattatgggagtaacaaaaaaacctgacttgaatgatcctgtattaagagctaaattggctaagggaatgggtcataattattatggagaacctacatggcccaacgatcttttatatatttttccagtagtaattctaggtactattgcctgtaacgtaggcttagcggttctagaaccatccatgattggggaacccgcggatccatttgcaactcctttggaaatattacccgaatggtatt

SEQ ID NO: 8328 - DNA, 374 bp, Glycine max
aagcataaaaagaaaagaaataacacaactatcctaaaaaaatcagattgcaactaactgaaagggagataagaaatcctgggtttcctcccaataagcgtatttttaacgtcattagcttgacgagtcaaatgccttcaaggtggcatgaaggtcacaaagaacacatattccttgtatttttgcctcctagctagagactccatgaaagtcatgtattctggaagcaccttccatatcattgcaagagaagtgctagtgatcaaggaaagaataacacttaaggctttctcatgttctccatgtccttcttccttgacaatcagttgatgaggatgagtattgacttggagaatactttcttgttgaatttc

SEQ ID NO: 8329 - DNA, 593 bp, Glycine max
ctgggaaatcaagagcagagctgaaacttcttctcttcacttgaaactgtgtttgaaaaagaaaaaaaacatggccacactattctcacctttgtctctgcactctgctcgcccctcttcttcttccttttcttcttcttcttcttcttcttcatcttctcccttctttgccttttgcagcttccctttgcgctctcgcatttcatctttgaaggcacaaacaattcttcttcagaagatgaagcgcgtggtaaaggcagtggaagaagagacccagcaagaactcaccgctgtggatgagtctgaacaaccatcaacctccgaagcaccacccgttgtggttcccgtttccccatcagatactctcaccatgttctttcaggcagagggaacagtgagtgaaacagctattccagctttaaccaaagctttagaggagacagatggtgttactgatttgaagtttcagcttgccgagggacttgcaattttagagttgaagaagcagacaacagtccaagctacaggagtggcttctagtcttgtagaaaccatacaaggttcagggcttaaatacagacattaaatctgag

SEQ ID NO: 8330 - DNA, 498 bp, Glycine max
ctgtggatagatagaatagatagggtgtgggaaataagaacagcaacttctctttactgtgtgtgaaaaaaatggccacactcacacttttatcatctctgtctctgcgctcttcttcttcttcttcttcttcttcttttacactctcttcttctttttcttctccctcctcctttgcctttttttgtagcttccccttgcgctctgccacttcatcattgaaggtacaaacaattcagaagaagaagcgcgtggtgaaggcagtggaagaagatacccagcaagaactcaacgctgctgatgactctgaacaaccatcaacctccgaagcaccacccgttgtggttcccgtttccccatcagatactctcaccatgttctttcaggcagagggaacagtgagtgaaacagctattccagctttgaccaaagctttagaggagacagaaggtgttacagatttgaaggttcagcttgctgaaggacttgcaattttag

SEQ ID NO: 8331 - DNA, 619 bp, Glycine max
cccttgcgtccgatttttattggcacaaatagatggaaaatttctcgtctctttgggggaaatttttgaaaatgcgtctaaaggtgttgtgactgaagaaacaaccttcattatccaaagggtgaatgctggcttgggattgtgtttaactgcaggacctagagaaaagggtgttgtagaaaagacattggatttcttgttccatgtctctgttttgaagcaccttgatctctgcatacagagtttactcttgaataggaggggtaaaacctttggctggcaacatgaagaagaggattacatgcacttaagcagaatgttatcatctcatttcaggagcagatggttgtctgtaaaggtgaagtctaaatctgtggatggcagtagttcctctggcattaagacctctccaaaggttggtgcttgtttggaaaccatatatgaggattcagacacgtcttccgtgacaactccgtgctgtaattctataatgatagaatgggctcaccacgaaactaccacttccagttcacgtttaccttagtccaatctcaacaattttccatagcaagcgggctggtactaaaaaatgtgatgatgtactacatgatccctctaa

SEQ ID NO: 8332 - DNA, 763 bp, Glycine max
  unsure (1)..(763): unsure at all n locations
cccacgcgtccgcccacgcgtccgcggtctcgtgggtttaatgatagaatgggctcaccagaaactaccacttccagttcacttttaccttagtccaatctcaacaattttccatagcaagcgggctggtactaaaaaagttgatgatgtactacatgatccatcttatctgattgaagttgccaaatgtggacttttctttgttttaggtgttgaagcaatgtccatttttcatggcactgacattccttctcctgttgaacaagtatcattgacatggaagttacattccttatctgtcaatttccttgttggaatggagatacttgaacaagatcggagcagggttacttttgaagctttgcaggatctttatggtgagcttcttgataatgcaaggttaaaccaaagtaaagaagttatttcagatgataaaaagcatcttgagtttctgaggttccaaactgagattcatgaaagttactcaacttttcttgaagaacttgtggagcagttttctgctgtttcttatggtgatgttatttttggccggcaagtttcactttatctacaccgttgtgttgaaacttccattcgacttgctgactggaatacactgaccaattctcgtgttcttgagcttttgccacctttagaaaaatgcttctctggtgctgaaggataccttgaacccgctgaggataatgaagcaattttggaggcttatacnaatgtgggggtttctgatgcccttgacagggct

SEQ ID NO: 8333 - DNA, 384 bp, Glycine max
gggaatcgttgctatttctcacagttgcactggagtagcagcaagagcttgtggtttagtgggactagaacccactagggttgcagaaatcctcaaagatcggcctttgtggtttcaggattgccgagctgttgatgttctcaatgtgctgcccacagcaaatggtggaaccattgagctgctttatatgcagctatatgcaccaaccacattggctcctgctcgagacttctggttgttgcgctacacttctgttttagaagatggcagcttagtgatctgtgagaggtcacttaaaaatactcaaaatggtccaagcatgcctcctgtgcagcattttgttagagcagagatgctgcctagtgggtacctgatcagaccatg

SEQ ID NO: 8334 - DNA, 1041 bp, Glycine max
catccatggccaaactaccaccaccatggccagggtaacaacaaaaaagcctcttcttcatcatttcttcagttcccatcatcaacccaacctgtgatgatgggaaaagatgcttcttgccctaaggtggtggtagagttgcagcagaatggtggtgatggcaaagtattctctccctcttctgcaaatacagctgtgtcccagcccaacacctctcagaaaagaactgctcctgctccagtggtggggtggcccccaattcgttccttcaggaagaaccttgcaagcagcagcagtgcttctaagccacctcctgagtctcaggctgagcagcacaacaaggttgctggtaaaaaacctgttgacaactatgctaataataaaggtttgtttgtcaagatcaacatggatggtgttcctatagggagaaaagtggacctcaatgcctatgacagctatgaaaatctctcttccgccgtggacgagctattcagaggtcttcttgctgctcaaagagattcctctgctggtggagttcacaacaagcaggaggaagagaaagcaattacggggttattggatggaagtggagagtatactcttgtttatgaggataatgaaggagacaggatgcttgttggggatgtgccatggcacatgtttgtatcaacagtgaagaggctacgagtgttgaagagttctgagctttctgcttttacccttgggagtaagcaagacaagataccccttgactcagcaatgaaatgaacagcggtttgaggttttgatcacctgctgaaaacttgaagactcttcctaatttgacgttttggttctattgtctgatgaaaagaacatggaatgaagctagttgcgtacattacaactaagtaatgtgatgaatgtgtcctttttttttttttttcctaaatgaagttttgaaatgtttatgggttttgtataaatagggaagggaaacttcacggatgtgtgtacttatgatcccctgttgagtagcccttaacctggtttggtttgggg

SEQ ID NO: 8335 - DNA, 355 bp, Glycine max
gactggtctctgggcggtaaaatgaagaacacagaaagagaagaatctcttctctctcttggttgcttctctcctaacaatgggttccagagcaaggcttctccatggccaaactaccaccaccaccaccagggtaacaacaacaaagcctcttcttcatcatttcttcagtgccctaaggttgcggtagagttgcagcataatggtggtgatggcaaagtattctctccctcttctgcaaatacagctgtgtcccaacccaacacctctcagaaaagaactgctcctgctccagtggtggggtggcccccaattcgttccttcaggaagaaccttgcaagcagcagcagtgctt

SEQ ID NO: 8336 - DNA, 632 bp, Glycine max
tatctggcatatagtattagtaaaggtcttgttaatcagtgtccttaggatattgattaaaaaattaaaaggagaaagtatttattatgaaaatcataagagagcataaaaaaatcatgagcagtgtaattttacacatcccaataatttttttctccttttaattccttaaccaatgtcctaagagagttagcatttgcctatattagtaatagtacctaccttgaaatggggaatggttagtttgaggaaatcaggattgggctggaaatctgcatcaaatattgccacaaattcatagtccttcacatagtcacatgacatgggtggcttaagattcccagctttatacccagttctaatcaatctgtgcctgtacacaatgttcacccctttctctttccatgaggccacctcttctttgatgagcagctgtaaattcccatcatccgaatcatccagcacttgaatcaatattctgtcttttggccaatcaagttgagcagcagcaccaattgattgtgaataaacctctctctcattgcacatgggaatctgaacaaggaccattgggaagtttgaaggatcctcaccatcacatgcatctgcatcaaaggttggcaacaacatct

SEQ ID NO: 8337 - DNA, 238 bp, Glycine max
  unsure (1)..(238): unsure at all n locations
caaagagattcaatctcagtctcgaacaaataaaggatatctctgatcgctctcaagaatttgtggataagctttttgaagaatcaaagaagcttgaagactatgcatcacaggctgaccaaatgcaattgaagagcattgatgagtttaagaaagcatacgaggagcaatcaaaatctgatacagagaaacttattgccaatatgactagtttagtttcagatcacattcnggcgaa

SEQ ID NO: 8338 - DNA, 854 bp, Glycine max
tcttcaatccattcttctctctctctcctatttgagtatctttcttcctttcggtcagagtcaacaataacataacaacccttccctactttctcgagtattgaattgaaaactctccccacaactcaaattgaaaaggaagacaaaaaaaaaaccccattgctttgttttccattattggtgccaaagtttcaaactttctctgcttcctctgctcctccagggtaagaactgctttccctttcgagtttacagtgatttgattcttgccccttttgtggtttgatccaaatcaaaggacgtttctctactggtgctttgattctaagttttggtggggggaaatgatgggaaattagggcctgggtctggaatttttcatcatttctatcgaaaaattgtaccttgttgtgcatattttgttaaaaagtttcgattttgagcttgtttggtcatctgggtaggtgtctgtgtcatctcacacccaggcagctgtaattgtacaaatcccatggctgtcttgtgaaaaattgtagaaattagggcttaggtcaaagcctcaagcttttctttgtatgttacattcccttaatcaacattgaaacatgtcgtctgctggtgtcaccactcttagccctgttccaagggaactattgttgtccccagatggatactataccccattgcacttgtcattggatcaagagtttattttcatatatctgtcctattatggatctttgactccaatgcgggttcttccctgcgataccatcgagtctgtgaaactcaaaatccagaagtctgatgggcttccttcattgacaaacaaacaaaagttggtttgcgatggg

SEQ ID NO: 8339 - DNA, 541 bp, Glycine max
atacggtggtgggccgggatcaacgggctttgctggtgctggtgggatgggagcaggaggtggaggtgttgggggcggcgggcttggtggtgctggcggtggttctatgtatagattgctaggctcgggtggaatgcctgctggtggtggaggttatccggatagtggacactatggtttatcagcttcatctgggtaccagaatcagcaccaccctccttctggggcttcacctgtgcctagggttccgcccatgtatcccaacgtgcccccttactactgaagaggtgtatcatcgcttattgggcgcagatgctttgtgtgcttctggtgattgcgtgaattgcagactatgtgctctggtgtaatgtatttgttagactgtacttttacagcctcttgacttcatctgctcccttttaagccttgattcatatgaatgttactagttaaagctgttgcgatagactagttttgtacttttagctggatcatctgggctgatacagcctgtttcaattatatagtcctggactatggt

SEQ ID NO: 8340 - DNA, 1475 bp, Glycine max
gactcgctgtacttgtgttgtgttgtgttgtgttgtgtaacaatggctcagttgaaagcatcccctgttactgctccttcccttcatacaacaggtgttgccctacgtggaaaattgagtaaggttgtgctggcttacagtggtggcttagacacatcagtcattgttccatggctcagagagaattatggttgtgaagtcgtttgcttcactgctgatgttggccaaggtatacaagaattggaaggtttagaagcgaaagctaaagccagtggggcttgtcaattagtggtaaaagacttgaaggaggaatttgttaaagattatatatttccttgcctgcgtgctggtgcagtttatgagaggaagtatttgcttgggacctcaatggcccgccctgtaattgcgaaggccatggttgatgttgccaaagaagttggagctgatgccgtttcccatgggtgtacagggaaaggaaatgatcaggttcgatttgagctcactttctttgctctaaaccccaagctcaatgttgtggctccatggagggagtgggatattacaggtagagaagatgctattgagtatgctaaaaagcataatatacctgttcctgtgacaaagaaatccatttatagcagggataggaatctttggcaccttagccatgagggagatattttggaagacccagctaatgagcctaaaaaggacatgtacatgatgtctgtagaccctgaggatgctcctgatcaagcagaatatgtggaaattgggatagagtcagggcttcctgtttcagtcaatgggaagaggctttcaccagcatctttacttgctgagctcaatgagattggtggaaagcatggaattggcagggtcgacatggttgagaatcggcttgtaggtatgaagagccgtggagtgtacgaaactccaggaggaaccattctgtttgctgcagcacgcgagttggagtctttgacacttgatcgtgaaacaatacaagtcaaagattcattagcccttaaatatgcagagttagtgtatgctggcagatggtttgatccgcttcgggagtccatggatgcctttatgcagaagatcacggagaccacaacaggttctgtgactttgaaactttacaaaggttctgttactgcaaccagccgaacgagtccctttagcctgtataggcaagacatttcatcgtttgaaagtgggcagatatatgatcaagctgatgctgctgggttcatcaggctttatggtcttccaatgcgggtccgagcaatgcttgaacatggcatctaagtgttcgtttcatttccacatgtacttcatttcattgtccatttgcttgtttagacttgaagctagagagtactatggattgatagtcgatccgatcatccgaaccttaataaaatgaatcgtatttaatattcatcctgaaattcaagttcagatattag

SEQ ID NO: 8341 - DNA, 555 bp, Glycine max
ctttgatttcaaacagagagtaacaatgactcagttgaaagcatctcctgcgtctgcgtgttcgttccttgccattgctccttcctttcatcatgcatcactaacaacagggcaccttctgcgccatcaattctccaaggcaaagcctttgtcactcaaagagctggggctaaaaacaagcgttggtgccaataaacttcaagttattaaagcagctgcacgcattgatacagaggtagtttctgaaaccacgaaggctggtggcctacgtggaaaattgaataaggtggtgctggcttacagtggtggcttagacacatcagtcattgttccatggctgagagagaattatggttgtgaagttgtttgcttcactgctgatgttggccaaggcataaaggaattggaaggtttagaaccgaaagccaaagccagtggagcctgtcaattagtggtaaaagactcgaacgaggaatttgtcaaagattatatatttccttgcctgcgtgctggtgcagtttatgagaggaagtatttgcttgggacctcaatggc

SEQ ID NO: 8342 - DNA, 367 bp, Glycine max
tgcaagacgccgctcaaatacacttttaatagaactctctcacagtttcactcactcactgaacttgtgctgtgctgtgcaacaatggctcaattgaaagcttctcctttgtgttcaacccctgccactgctccctcccttcatacaacagggcaccttctgtaccatcagttctggaaggcaaagccttcgtcattcaaagagttggggctaagaacaagcgttggtgccactaaacttcaagttattaaagcagctgcacgcagtgatacagaggtagtttctgaaaccacaaaggctggtggcctacgtggaaaattgaataaggtggtgttggcttacagtggtggcttagacacatcagtca

SEQ ID NO: 8343 - DNA, 587 bp, Glycine max
tgaagattttcagtcagtcttgacaactttcacacgctatagccgattgagagtcattgcagaactaagacatggggatatatttcattcagatattgcactttgcagcatagagtttgactgcgatgatgatttgtttgctactgctggagtttcccggcgcatcaaagtttttgacttttctgctgttgtgaatgaacctacagatgctcactgtcctgttgtggagatgtctacacgttcaaaacttagttgcttgagttggaataaatatgctaagaatcaaatagctagtagtgattatgaaggaattgtgactgtttgggatgtaaccactcgaaagagtttaatggaatatgaagagcatgaaaagcgtgcatggagtgttgatttttcaagaacagatccctctatgcttgtatctggtagcgatgactgtaaggtcaaaatttggtgtacaaatcaggaagctagtgttctaaatatagacatgaaagcaaacatatgctgtgtcaaatataatcctggatctggcaattatattgcagttggatcagcagaccatcacatccattattagatttgag

SEQ ID NO: 8344 - DNA, 640 bp, Glycine max
gtcgacccacgcgtccggaccaatgttggggaccctaattgagtggacaaggtcaccattaagccgccgcgtggaacggtggtcacagtgaagccagacaccttgaatttcaggagggtgggacagaagttgaactttcttgttagggttcagattagggctgttaagctttctccgggtggttctagtgtgaagagtggctccatagtttggtctgatgggaagcacactgtcacaagtcccttggttgtgacaatgcagcagcctctggattagagtttgaggttttgggtgtagaaattttgggtttttatccatcatggatatcttataaaaaagttagctctatatgcttaatagagaatgtgtttgtgaaggtgttctgtttgtaagaactggtggaaggatggtttgttagaaagagcgtgatgccgctctgccaaaagggggaaaagttattatcaaagtcaaaggtatggtggaagcatatctttcatgttgtataattaagaatgtttgtagaaaatgttgtgtttagaagaggataagaatattttggaaggttcctttcctttttgagtgatgctgtctgttgaatcctttgaaattttttaatatcttgatcagtcaaatatttggt

SEQ ID NO: 8345 - DNA, 392 bp, Glycine max
gacagaagggtcaggcaccggggaaggaggtctaatttacggagtaaagcagtaagtataagggcttagtgctccgattgcgccttaggactaggactgataggtaaatgcccctgactcttccaatgaaggtgggtaggcttttcttttgtttaggattggcaagaggatggctgcctcggtctcaaagctgttagataatgcgctcttatcaatacagggacgcgagaggaattcctcgaaggtagtccctaaataaagggatagggcattatcggtgtggggatatctttgaatatgactcttagtataagaaggaagaggttggggctttctttctctcctgtttaggaagatagcaggcatcaagacgaagagataaattcattccc

SEQ ID NO: 8346 - DNA, 581 bp, Glycine max
aaaaaaatggatgagaaaaaagatatagtatataatatatggaaatgatttgggtggcggggaattgtctttcatctggtaagactgatgacgaagttgttatcaccttcagcaccaccatgtccatgtctaagggttccaattccaaatccaaccgtaaaatatcgatatgcatacagtcacagagggcaattgcgtgttcgatgcagtgataatagtgatgaagagaaggagaaggagaagaagaagaagaaggaaaagcggttgtctcagcagtcgtcgtgggaagcccaagacgctgagggaagagactatctctaccgacttgggaaagaggctgataacatgaacatcgccgtcggccagcgtgctggcgtcatcgattctcttttcgccggcaattttctcggcaaagattcggacattgtctttgattatcgtcaaaaagtgacgaggtcctttcaataccttcagggcgattattacatcgctcctctcttcatggacaaagttgtatgtcacattgtgaagaactacctagctcgtgtcctcaacactaaagttcctttaattctaggtat

SEQ ID NO: 8347 - DNA, 439 bp, Glycine max
gagggtgaaggaagacgcgtgcgtggataatatagagaatagtaatgtaatggccagagcaaagtggtgcagagttgattgatcgatgattgatgatggttcgggcgtcggtgaaggtgggttccgccaagttcgtagtgatctgcgtggggcttttaggcttcgctctcgtcgccgactttctatgggcctctacctcttccactcttcccacctccaccaaaccctccgcatttgtggttccctccaaccacaataagaagaaatatgagaatgccactgcttctggaagattccttgccgcggcttacgccgatttggatgcgccgcagctcaagtggcaaaagatggctcctgctcccgtccctcgccttgacggagccgccattcagattcgggatctcctctttgttttcgccggctacggcaccatcgattt

SEQ ID NO: 8348 - DNA, 399 bp, Glycine max
aattcgagcggacgattatagaatggttaatgttagcctcttgaggctttctttccttttcgctcctatgggagtgaggtccaagatgtgacctatgccgtccttcataatagtcacgaagttcttcacttaggctcttgcaagagttataactactattggaggcatgtttttatcttttcatttctttcattatttttcttctttcttcctctcttattttctctctttcatcttgacttagttcttccactttttttttacctttttcttttctctcttgtttttctttccacaacttaagggatctcaactcatctaatatcttatacaacgggtccttaggagtagaaccctcaccattaacactagatgaagaatgaagactcatgttggttc

SEQ ID NO: 8349 - DNA, 1168 bp, Glycine max
ggctgtgcccataatttctgaggctgaggaaagtgagttaggatagccccagaaatagaaactcgaagttactcacttactcaactaccaccaccaccaccatgttctgatattcccccaaccacacacagtcactcttaaaaaaataattaaactttatgcaaatgcaaagcatgtcaaccaccatggcttcgttttctcctccgacccatttctcagccgcaccttcttcctcgaaactccgtcttgtctacaagaacaacaatttcttctctctcaggtcgaagagtcttgctttctctcccttgaaggctgctgctgctgagaacggcgttgggaccgccgtggagccgccgccggagcaggccgtgccggtgccggagccgcctccgcctccggtggacaatagttctgtggggaccaatgggtctgctgttgcggttgaaagtgaggtggttaaggttcaaagtagtttcgtggatccgaggtgggttgcaggaacatgggatttgaagcagtttcagaaaaatggaaccaccgattgggacgctgttattgatgctgaggctagaaggagaaaatggctcgaggataacccggaatcatccagcaatgaaaatcctgtagtttttgacacctctatcataccttggtgggcgtggatgaaaaggtttcatctccctgaagctgaactactcaatggccgtgccgcgatggtaggattctttatggcgtattttgttgatagcttgacaggagtaggtctagttgatcaaatgggcaacttcttttgcaaaactctgctgttcgtagcagtgttgggagtacttctgatccgaaagaatgaggactttgaaaaccttaagaagctatttgatgagactacattatatgacaagcaatggcaagcaacttggcaggatgagaattcaagcacttccaaaaatgagtagtggaattgctgttttgtagttctccctccctcaattgtctcttaatacagtgctgtctgataattttgttagtacaaaacaagacatggatatggattagacattatatttcgtttccttctctcgtcctagttccaaatgaccgagaaagtttgtttgtttgcaatgctggaattttcttgagagtctgagattgttttgttaattttagtagt

SEQ ID NO: 8350 - DNA, 556 bp, Glycine max
ggcaagtgagttaggatagccccagaaatagaaactcagaaaaactcacccactccaagttactcactcaaccacaaccaccatgttctgatattcccccaaccacacttttcacacaccaatcaaactaatgcaaatgcaaagcatgtcaaccaccatggcttcgttttctcctccgacccatttctcagccactccttcttcctcgaaaccccgtcttgtctacaagaacaactttttcttctctctcaggtcgaggagtctttctctctctcccttgaaggctgctgcttctgagaacggcgtcgggaccgccgtggagcctccgccggagcaggccgtgccggtgccggagccttctctgcctccggtggacaatagttctgtggggaccaatgggtctgctgttgcggttgagagtgatgtggttaaggttcaaagtagtttcgtggatccgaggtgggttgcaggaacatgggatttgaagcagtttcagaaaaatggaaccaccgattgggatgctgttattgatgctgaggctagaaggagataatgg

SEQ ID NO: 8351 - DNA, 1080 bp, Glycine max
gacacactatccagaagaaaagaaacgagtggttctgctgcatctccaaccctgggaacagcatctccacactcatttccaaattatcaagcactaatgaaattaacacaaccaaaaaaaatttagaaacagaagaaacatatcaataacttaagtcacatacattctgacaccaaaaaaaaggaaaggaacttgagccacattctgtccctggtggactcaagaagagtctttcataggacagttaaaattatagcttgcaaaaagggttcactagcaaacattgcaatggcctcaacctcttctgctctcactatatcctcttcttccacccttcttgatggcaaggctccaagacagtcaccagctgcttcccctcaatgtgtgagcctcccccctccccctttgcactctcagaaccgttcatggaagaccactgcttattgtcgcaaggttgctcgaaaagttatggcaatggccacaggagaggcaccagctgaagctaccccaactgaggtgccagagattgtcaagactcttcaagaaacttgggacaaagttgatgataagtatgcagtgagttcacttgccttggttggggtgattgcattgtggggctcagttggattgatctcagcaattgataggcttcctttgattcctgggattcttgagattgtaggcattggatacactgggtggtttgtatacaagaacatagttttcaaacccgacagggaagctttggtacggaaagtaaaagaaacatacaatgaaatactcgggagcaactgaaagtgttaggaaatgctgagatgctgttgacacgaaatagtcatatcttgctgcttcctattgaagatgtcatcatgcttcattttgtcgccataagcttctgaccatactttatcccaagtaatgtaatatgttctgaaaaaattgtatctttttatatatcttgatccacttttaagacaatctcatttcctcaattatatgtgtagtggttgactacaaggataacaaaacccaattgagttcattgagctgaattcaatgactttgaaagaatatttcatg

SEQ ID NO: 8352 - DNA, 543 bp, Glycine max
gatggtcttatgtggggtcacataggtagggcaggagagcttacattgccgatttcgtttcatttgtgaaaaagaggaacctgagagagagaatcagaggaagaagatgatctataggaagtggagtctccttaccggcccggtcgccattctcggcggcgtagtcgtcgccatcgccgccgcaaacgtcatcttcgtcaagaatgatcctttcctcaaaccagaggagaggaagtatgaaaatgaacctgctaccaagtaggagaaaagagacaacagaagtttgcgttttgatgtcttttaaaccctgatttatgagctctgtatactgttttgcaagacatgctctgggtagttaataagattgagattctgaatggagtctggactctggagcacgggcccttagtttagaactaaccttccaatgttctagaaaactggttcatatttcagagatccttatttttctcttctgtacaatgtcaactgcaaatgtttaatatgggttctaatcttccatctcttttcgttatccctata

SEQ ID NO: 8353 - DNA, 387 bp, Glycine max
ataaggaaggagaaaacagtgcactcattatttgttctaattctgtgggaaagagaagccattccccttctgtcacagacaagtttttcatttgtcaaatctgcactttgagtctgtgggagagagaagccactcccctccctaacgcactgttgctactgtatctctttcttccatccatccatccattacactaagaaaaggtaggcaagttttctgaagttcctccttgaaggattaaatcttgatgaaatcaatatatgttttctattgcatttttaatgagtcaagttattaaatttattttcttgccctttttatttattattttttgcctaaacatatcaaacttgaagcagagatggcaagaattggacaaaacagact

SEQ ID NO: 8354 - DNA, 754 bp, Glycine max
caatttcagttggagatagctgtgagtagtgagagggaggaagacatagacataaagaaggagaagtgaagtgatgaatgccccagatcgttacgagcgtttcgtcgtccctgaaggcaccaaaaaggtttcttatgagagggacacgaagatcatcaatgcggcgtccttcaccatcgagagagaggagcacactatcggcaacatcctccgcatgcagcttcacagagaccccaatgtcttgtttgccggatacaagcttcctcatcctcttcaatacaaaattattgtcaggatacacaccactagtcagtcttcgccaatgcaggcatataaccagtctattaatgatctggacagggaacttgatcatttaaagagtgcctttgaggcagagatgttgaagttttctagggactattgatttacggtcaagattgatggtgttgcattacaaaccctggcagatattgagatggcgaatcatttctgctaaatggaatttaaacaggatgcttttgagtgttttgggagatttgttaaatatggatgtgtcggaggaattttaacaattgtgatttgtgaacaattacgaagttaacaaaaatgctttaacaggagcaattgcatcatataatgctagttatgttagcaactattagtaaatatctgtcacatggatcttatatataatggtcttattgtagaattatttactgtgccaagtatacgccgttgagggcattgtctggtg

SEQ ID NO: 8355 - DNA, 437 bp, Glycine max
gattttcatttggagagacagagtagtgagtagtgagagggcggaagcagaagtgaagcgatgaatgccccagatcgttacgagcgtttcgtcgtccctgaaggcaccaaaaaggtttcttatgagagggacacgaagatcatcaatgcggcgtccttcaccatcgagagagaggagcacactatcgacaacatcctccgcatgcagctgcacagagaccccaatgtcttgtttgtcagatacaagcttcctctccctcttcaatacaaaattattgtcagggttagcgtcttttccttattactactactgctgccttctttcaatttcatggaatagttcaggtttttgttctaagctatttcgaccatatagttagttagggttaaagaataagacccaaatcctacttttatttggaataaatgtggattgca

SEQ ID NO: 8356 - DNA, 385 bp, Glycine max
ggacatgataataggtgtgtgcagtaacatttccatttcatttggagagacagagtagtgagtagtgagagggcgaagcgatgaatgccccagatcgttacgagcgtttcgtcgtccctgaaggcaccaaaaaggtttcttatgagagggacacgaagatcatctatgcggcgtccttcaccatcgagagagaggagcacactatcggcgacatcctccgcatgcagctgcacagagaccccaatgtcttgtttgccggatacaagcttcctcatcctcttctatacaaaattattgtcgggatacacaccacttgtcagtcttcgccaatgcaggcatattaccagtccgtgtttatgatctggacagggaacttgatcatttg

SEQ ID NO: 8357 - DNA, 252 bp, Glycine max
gagcacaccatcgacaacatcctccgcatgcagctgcacagagaccccaatgtcttgtttgtcggatacaagcttcctcatcctcttcaatacaaaattattgtcaggtgatattcttggtcgcacagttcacaagtttcaccaatatggaacttagaaaatagccaacggccatagagcaccaaaggaagcatgttgatgttgatggtttcttggtaagataacttgccgtcatacgggcaggacacattc

SEQ ID NO: 8358 - DNA, 382 bp, Glycine max
cttccaccggttggaaaaaaacaccgaaaggggctccctttctccttcaaaacttgaattaccttcaaccataccttggttttcaagcctctaaagggaagatactttggaataaccatgaatggcgaacatggaaccactccaacaatggtgtcaccaccttcacctcatagctcatgtgcgtccactgatcccagccaggaggacaacaacaacaacaacgattattacaaagatggtgacaacaacaacgacgatgataacaacaataataacgatgacaacgacaacaacaacaacgaccccaacaacaacaaccctgaagctccttccttggttctagtagggtgccctcactgccttatgtatctgatgatctctg

SEQ ID NO: 8359 - DNA, 307 bp, Glycine max
tgcttcttggcgtgatgggtgctccaatcgcccgtccacgtgtgcaccactgacccctttcctcacctcagcataaaagacatccccattattagtcccctcttgttgtttagagatcatatagagctaggttcagaaattgtttcatttctcttaattattaagttatgttgtctaagatcagtagatattatcattattatgtcatgttaagcattatgttagggaaaatgtgtgtgaatgagtattatcactttttttatcttgcaagagacttcttctgctcggtacatattgcagcattaca

SEQ ID NO: 8360 - DNA, 637 bp, Glycine max
tcggctcgagactgacttattgaccttaccttccacagtgtcagtgaacaacctatctctcacctacctacccactcaaatgcttgtattatcttcatttgtataaaaccaaagaccgacgcgacagaagggggtctccagctcatgagaagtgcatcatagttagaagcaaacccacccttttcatccaattttgattatagatggaaaaccagcccccatcatcaaaggcttctgaagtagatgccccccttcaatcacttggctttgagattcaagaattgtctccacaaagggtatctggccatctacctgttactcaaaagtgctgtcagccattcaaggtgttgcatggaggggtatcagcattggtggcagagtctctggcaagcataggagcacacatggctagtggataccaaagagtggctgggattcaactcagcatcaaccatttgaaaagtgctgtgcttggtgacttggtctatgctgaagccatccctttaaatgttggcaaaaccattcaggtatgggaggtgagaatatggaagcttgatccttctaacaaacaaaagataactctagtatcatcatcaagggttactctactgtgcaacatgcctgtcccagataatgc

SEQ ID NO: 8361 - DNA, 898 bp, Glycine max
  unsure (1)..(898): unsure at all n locations
tcaacatgcctgtaacctgacttctttgttgggtcatcaacagccaatgtgccancatctatcactgcagctccaggtttgatccaactgcccttgatcatcatcggctgtcctgctgctgatgacccaacaaagaagtcaggttacaggcttgttggacatgtagattttggggaagcatctaaagttgctggttggattactccagttcctggtggtgttggtccaatgacagtcacaatgttgctgaagaatactgtggagggagccaagcgctacattgagcaaaataattgatcttcctttaattcgaataaatgaaaggtatgtactatcagtttgaaattctttgagattcgggtctatccacagttttgtttctgctaaggtagatgaatgcatcctataaaatcacaaggatcggtttcaatgtgtaagcagaactggtccaatcgaaactatgtatttgccctttcactatctctgaagaagcatactcgatgtgggtactgagcatattctagattggatttagaccataagtagtccttgtagataagacacgcatgttctctgggagtacttatggagtggactgatctgcagtcacagtgtatgttctgttcttatgtaagactcatctctacaacagagtatacagatgtgcagtgatctgtagtacatatatatacaatacattaaaacagattcaataatacaacatatactcctggcgggcctggaccaacttagctatatagagattataatcgcctcattgacgtctcttacactatggactggaatatctcgtgattcaacttatgtcctgtcaccatctctctcccgttgtcgatatcgataagcctatcatctcctttcaaatatctcttcttat

SEQ ID NO: 8362 - DNA, 1380 bp, Glycine max
gtcataatcagagttcaggccactatttcacaatcgcaagtgataagagtaatagaacaacctctcagcccctctccgatcaaatggccaccgtaatcgacggcaaagccgttgcgcaaaccatccgatctgaaatcgccgacgaggtgcgccagctctctcaaaaatacggcaaggttccgggattagcggtggtgatagtagggaacagaaaagattcacagagctatgttggaatgaagagaaaggcatgcgctgaattgggaatcaaatccttcgatgtggaccttcccgaacaagtctcccaagctgaactaatcaaacaagttcaccagttgaatgctaaccctgacgtacatggtatattggttcagctcccgttgcctaagcacataaatgaagaggaagttctgactgaaatcagccttgagaaggatgtagatggttttcatcctttgaacattggcaagcttgcaatgaaaggcagagaccccctgttccttccctgcactcccaaggcatgtattgaactattacaacgaagtggtgtaagtataaagggaaagaaagcagttgtggttggcagaagcaacatagttggactaccagcttcattgctgcttttgaaagcagatgctacagttactattgttcattcacacacaagtcaaccggaaagtatcatacatgaagcagatattgttattgcagcagcaggacagccgatgatgatcaagggaaattggatcaaaccaggagctgcagtcatagatgttggcacaaatgctgttgatgacccaacaaagaagtcgggttacaggcttgttggagatgtagattttgaggaagcatctaaagttgctggttggattactcctgttcctggtggtgtaggtccaatgacagtcacaatgttgctgaagaatactttggatggagccaagcgctacattgaacaaaataattgatcttcctttaatttgaataaataaaaggtatgtactattagtttgaaattctttgagaatcggttttatccacacttttgtttctgtttaggtagatgaatgtattctacaaaatcacaaggatcgctttcgatggataagtagaactggtccaatcgaaactatgtatttgccctttccctatctccgaagaaacattctcgatgtgggtactgaccatattttagattggatttagagcatagctattccttggtggtaagaaacgcttgtagccagtgtaagatcagttctaatgtaagaatcagttcttaacattaaaatattgcttttctacaacaaagtataaaagtgtggagtaatatgtggaacacattttaaattctaaaaaaaaaaaaaaaaaactcgagac

SEQ ID NO: 8363 - DNA, 416 bp, Glycine max
ccctcgcgtccgcccacgcgtccgcccacgcgtccggcattttttgatctacgatggtgaaggggttgcacgggcagaacctccctgccgacgtggcgcaggtggttgatcagctggagcgccactgcttcgctcccgatggatctctcatctccaggcctctcttcaacgatctccagcttgccagagaggaaatgtgcagggaaagactgcgttacctggaagccatggctatatattctgaggctattgcaatggtggaagagtatcagcaagccatttctgtgtctaaccttggtggaatcagagatactggcaatctttatccacagcttgggttgaagacctctcctcaggtttatcagactctagagcatcaaatggttgttgctgaagcagctcaacgattgagacta

SEQ ID NO: 8364 - DNA, 423 bp, Glycine max
ggaaaaacccgggggacccaacccttccgaccggttgcaaaaaaacaacaaaaggtaaattgtaaatcatcttcaatttcttgatcatccgtagaatactggttgatagcacctcatctatgcaagtgaggagggtaaccatgtttcttgtagcaagtgtctaccatatgacctgatatgttacaataagtgcacatttttgtgcttctgcctctacctcttccaccagatgtatggcctccacgaactctgcttctgccacaagtaccattgttggtatccaattgagcgaaaactctacaatcatcaaattgaagaaccaatcgcctttcttgttgaatgaggatagaaaaaaatttgtctaaatcagggaaggggtccatcatcattatatttgacctaactgtagagtattgttcattg

SEQ ID NO: 8365 - DNA, 864 bp, Glycine max
  unsure (1)..(864): unsure at all n locations
gcactcacttgtttcattgaaggccctccattcacgttgcaaaggctttgtgagatcctattggatgcaaaaggcatttatccaaatctttcaaagcttgctttagctcttgaaaagaacttgttagttacttctacattgacaatctgcactgatccatacccacaagctacagaaaaagagccagatgaccaagagaaggcaagtgaaaagcagcagcagcagcaacaatctgatagtgcacaaaatggcattgagcctttggtgtctgacaatgacgaagtaatgcccgaggctgatgtaggtgatgacatgaccattgacatggaagcttttgaaggcgttaaatcatcagaaataaattccgagcctaatgctaataatgcataagcttcatggttgctgtgcatctttaattgcataaactctgatgagctcaaagactaggatgttttcacttgtggagctccaaatgctatgaggacggcgtggaccttggtcattgcagagtgctttattccctggtttggtaatcattggagctagacattcttagcatttaaaaacagaacagtgtttctaattgtatctcttggatgcaatgcttgtattggtagcatgaagttgagtatctcgctgtagatctgcttttaatttgtgctctaaattcactaacgtgttcatgaactttggcatccttgactatggtagtagctaccttgcatattggttggtttttggcaatgaagtttatcataatagtgcactcccaaaaaaaanaaaaaaaaaaaaaaaaaannaaaaaagcnngngccgctctnnagaggatnnccaagctnntacgtacgggcgtgacatgggacg

SEQ ID NO: 8366 - DNA, 738 bp, Glycine max
ggagagacttcactttctgctttgctttcgacaattccaaagtctccaactcaacccagctgcctacagccgctacaactaaaaaagccctttgctttctcttgcattgctcttttcaactcgtcacattggctcatttatcacccatcagatttagggtcccttctgccatactgcgcacattgaagatgacaacaacatcattttctggcttgcaatttgcaatgtcaagatcatgcattccttcatcacaaaagattgcagatgcaggggctgtggttcttggcggcaagtccaagattgggtcgtggaataaacttgcaagtgcatgtcatattgcatcagtgcaaccttttgggcggggcttcacttcatcgtccataaaatctgtcaaaagtgtcacaaaggctatgactgagtccagtgcacaaagtgcagtctcaggattgccaattaatctgaaaggtaaaagggcttttattgctggtgttgctgatgacaatggatatggatgggcaattgcaaaagctcttgctgcagcaggagctgagatccttgttggcacatgggtacctgccctgaatatttttgagtccagcctacggcgtggaaagtttgacatatcacgcatattaccagatggctcgatgatggagattaccaaagtttatccattggatgcagtttttgacaatcccgatgatgtgcctgaagatataaaaacaaacaagcgctatg

SEQ ID NO: 8367 - DNA, 377 bp, Glycine max
attaatagtacgtgtgagtttgtgctttgctttcgaccattcgcaagtcttagcaacctgcagccgctacaactaaaaaagccctttgctttcttttccactcctcacattggctcttttatcactatcagatttagggtcccttctgccatactgcacacgttgaagatggcagcaacatcattttctggcatgcaatttgcaatgtcaagatcatgcattcctgcatcacaaaagattgcagatgctggtgccgtggttcttggcggcaagtccaagattggatcgtggaataaacttgcaagtgcatgtcatattgcatcagtgcaacctttcaggcggggcttcacttcatcgtccataaaatctgttaaaag

SEQ ID NO: 8368 - DNA, 685 bp, Glycine max
acccactcatccgcccacgcgtccatacttctgctattaatctacagaatgggacacatcacaacaacaacaacaacaaaaaaagacaaaaactacttccttctctcctttgctgtgttttctttctcaaaaatgggtcgtacctatgttcttatgatggttgctgcattgttgttgagctccaccatggctcaatctccagcttcgtcgccggctttgtcccccacccacacgccggtggccactccacctaggagggcgttgtcgccgtctccgtcgtctgtgtcaccagcggcttcacccgccaccggaaattctcctccggcaccacctacttcttctccttcggaatcgccacttccatcagctgctactcccaacatctctccctcgaccatctcgactccgccatctgaaggaccagctgcaaacggtgccgttttcaacagagtttccggatctgctctgcttctcattttcgctgcggctatactcatataaaacattttttcttacattatcatctttattcattctattgttttgaactccagtacttttttcttcctggttggtctggtgtcgttgaggaggattcatttatttgattattttgtatattcaattattattcatatgattgatgcatacacatatataataataatctcttgattcaattatc

SEQ ID NO: 8369 - DNA, 577 bp, Glycine max
aggttcctttcttgcagctcataatatctaggcatttaaataaagatttagtgaacacaacaaccacaaagccccaatctacttaagctataaacagtggtttaggcatgaattggaggatccatggacggaaaaaaaatctgttaatcgtgtggtacgtggaaagattccttcttattagttatcaatcaaattcaagcatcaaacgcactcgctcatgtcgtcgacaaggaccaatgatataggttcctccagcggagtaacaagaaagaaaacatcaaacagtacatgtcattagtgtgtgttttggctttttcaacagaaaagttattgataagtgaatgaatactattggacaatgaatgagagattcttgtgtgttgcctaaactcaattgttagtgaagttagaaacattgttttgaaaatcgcactgatcaaactcattcaactggtttaatcgtgttttatcggtctgaattaaaaaagaaaactggtttaactgagcctaacgatcaatccagacaccccaaaaatcgtcttaattaaataaatttacttcttccatttctcttccc

SEQ ID NO: 8370 - DNA, 358 bp, Glycine max
ggaatggagagctcaacaacaataagaaggatatgaacttgttccggaggattaagaatggcttatcccgccataataacaatgaaggaggcaacagcagcagcagtgatagcgaaagtgatgatgagaagtgcccaaagacaaagaaaggaggaaactgcaagcaggacgcaactaagacaaagccagtttaactgacggaaagaacatcgccacaaagtgtgtttacgatttcatctgttcttgtacccaaatagttgggaaaaataaattccaatatttcacttggctgtgagtatcttatgataaataatatattttgaagtttacccacaaggaaatcaaggcgcctcccaac

SEQ ID NO: 8371 - DNA, 315 bp, Glycine max
ttaatctaaatatgacacgtgagttaaaacaaatcgaataagtgatatttaaatggagcaaggcatgtgtttaagaaatacagaacaaataaaaaaaaatctacatgtggacggaagaggatttgcatgtcactcgcgtgtcgaattcatagatgttaacttgtcctcattcgtacgtgtccttacaatcactttagcgttctctcatttatgaagttcattcaatccataacaatgtgtagatcttcatttatttttttgtcttaaaacgctttggttcatcacaagaaagggaccctcaataatctggaattc

SEQ ID NO: 8372 - DNA, 618 bp, Glycine max
cgcattctcgtcgtaggtttggtttcggagcgaggtttggtttggactttgaagagcaacacactaagcacttggcactcactggcacttgcttcgctttaccctccatcacccgccactacaaaactatacccccacttccttcttccaaactttatctctctctctctctctctctcaactcaactagttcttaacttgttacagaaagttctctctttttatgttctttctgcctccaaattaccactctcttcctatgctatgatacagatacaggaagaggatcaaaataccccaccataagacaaacccaaaggaatagcaacgtcaattatggtgggaggtttcaatggagaaggtgttgtgagagaaaaagaggaagaagaagaaaacaacaagtggccttcatggctgcagccacttctcaagacacgtttctttgttcaatgcaaagtccacgcggattcccacaagagtgaatgcaatatgtattgcttggactgtgtgaatggagccctttgctctgcatgtctctcttcccacaaagaacacagaataattcaggtgtccaaacttacattattaacagtgccaagattgtgttcttaaatgaaa

SEQ ID NO: 8373 - DNA, 469 bp, Glycine max
cctctctgcctagagagtagcatagcatattgagagaaacttcttttttctctatttcgtttctgcctcctccaaaccataacttagctgttatcataagaggatcaataaaccccccaccataagagaaatcaaacccaaaagtacatcaaccagagtcatggggggtggaggaggtgcaattggggtgagaggcctcgatgaagatgatgatgatgatgttggaaagaatgaagaagaaaacaagtggccaccatggcttgggccacttctccaaacaagcttctttgttcaatgcaaagtccatgcagattcccacaaaagtgaatgcaacatgtattgcttggactgtatgaatggagccctttgctctacctgtcttgcttctcacagagaacacagagctattcaggtaaaagcttagttactaataattaattaattctctttgggggatctatgcataact

SEQ ID NO: 8374 - DNA, 1186 bp, Glycine max
ctctctctcaactcaactagtttcaccacttattacagaaagttgctctttttgtttatcttcttctttctgcctccgaattaccactctcttgctttgctatcttacaggaagaggatcaaaataccccaccataagacaaacccaaaggaacagcaacgtcaattatggtgggaggtttcaatggagaaggtgttgtgagagaaaaagaggaagaagaagaaaacaacaagtggccttcatggctgcagccacttctcaagacacgtttctttgttcaatgcaaagtccacgcggattcccacaagagtgaatgcaatatgtattgcttggactgtgtgaatggagccctttgctctgcatgtctctcttcccacaaagaacacagaataattcagataaggaggtcttcgtaccatgatgtgataagggtgtctgagatacagaaatttctggacataacaggggtccaaacttacattattaacagtgccaagattgtgttcttgaatgaaaggcctcaacctaggcctggcaaaggagttaccaacacctgccaagtctgtgagcgcagctccttgattccttcaacttctgctctcttggttgtaagattgttggaacctccaaaaagttccggaagaagaaaatgttaggtgaggcagatgggtctgatggtgaagaatcagttaacggcataagaagcaatgcaagtgccagaaacaaaatccacagctttacaccctcaacaccaccaccaacagtggttaattacagaactgccaagagaagaaaaggaattcccacatagagctccaatgggtggagggcttattatagaatactaatgttgtatagtggttttctgtcacttaccaatcaatatttatgcatagcaaaaagatacggcagttgttgttaccacttccttaggtggcaccctcagaaataaaaaaatatgctccatattttatgtagttgcaatacctgtgccctgtcactgaggccggtgttgggaactactgctttatcttgtataggatgaaaaatgtgtcaaaaagcaagtaataatataacatagagtggggagtactttatgttggtatgtgatgctaaatgtaaatagtggcttgtagaaaggaattgtatagagcatcaaattagacaataaaaaaatattatggcc

SEQ ID NO: 8375 - DNA, 380 bp, Glycine max
cttccaagagagtagcatatcatagcatattgagaaaattttctttttctcttttttgtttctgcctgttatcataaagaggatcaataaccccctaccataagagaaatcaaacccaaaagtacatcaacaagaatcatggggggtggaggaggtgcaattggggtgagaggtcccaatgaagatgatgatgatattggaaagattgaagaagaaaacaagtggccaccatggcttaggccacttctccaaacaagcttttttgttcaatgcaaagtccatgcagattcccacaaaagtgaatgcaatatgtattgcttagattgtatgaatggagccctttgctctgcctgtcttgctttccacagagaacacagagc

SEQ ID NO: 8376 - DNA, 1356 bp, Glycine max
cttcccccacgcgtccgcccacgcgtccgcaaaaattacaacaccaatctcacccatttcaaaaaaaggccgttagtgttactattcgtaaaatggccactcttgttctttaccaattctttctcaaactcttgctcctaatttcagtctttcagctttcctttgctgctaggagactcaaccagctggttcaggaccagtcacagttactccattaccacaacggtcctcttctatacggcaaaatcgccgtgaacctaatctggtatggtcacttcaaaccatcccaaaaggccatcatcaccgatttcgttacctcactgtcatccccatcgtctcagagcagccagccatctgttgccacgtggtggaaaaccacggagaagtactaccacctgagtcccaagaacaagaaggctgcttcttctctttctctatcactgggcgatcagtttctcgacgagggtttctcgctggggaagtcactaaccagcaagaacctcgtcgagctggcatccaaagggggacagaggaacgccatcaacgttgttctgacatccgctgacgtggcagtcgaaggtttctgtatgagccgatgtgggacccacggctcctcctcttctgcatctcacgtgaagaagaacaacaacggcaagagctacaagttcgcttacatctgggtcggaaactccgaaacccaatgcccggggcaatgcgcgtggccattccaccaacccatttatgggccccagagcccacccttggttgctcccaacaacgatgtgggacttgacggaatggtcataaacctcgccagcctccttgccggaaccgccaccaaccccttcggaaacggctacttccagggtcccgcggaggctccgctcgaagccgcgtcggcgtgccctggggtttatgggaaaggggcttaccctggttatgctggggacttgctggttgactctaccactggtgctagctacaatgtaaagggggctaatgggaggaagtaccttgttcctgctctgtatgatccttctacgtcgtcttgctcaacgcccgtgtgatcagaagggttattttggtgatgccgatcgttctgttccatgctgctactacgatgatgttagaaaccacggattagggaggtgtacaaagcttctaataaacatttttgtagaattatttcatttatttgtttgtttatactatcttctggatatgtacgcggattaaggatgttatgtagtagaagcaaatgttcttccctttgctttttaatattaaaaaatttattattattactcttcaccgaaaaaaaaaaaaaaaaaaggggcggccgcggatcaagtgact

SEQ ID NO: 8377 - DNA, 503 bp, Glycine max
cggctcgagctctcttcctatccccttcatccacatcacaacactcattctcccctcgtttcaaaaaaagggccgttattgttgttacccatccaaaaaatggccggtcttgttgtttcttcccaatgctttctcaaactcttgcttgtagtttcagtctttcatgtttcctttgctgctaggaggttgaatgagctggttcaggaccagtctcagttgctacattaccacaatggtcctcttctatacggcaaaatcgccgtcaacctcatctggtatggtaacttcaaaccatcccaaaaggctatcatcaccgatttcgctacctcactgtcatccccagcgtctcagagcagccaaccctctgttgccacgtggtggaaaaccacggagaagtactaccacctgagtcccaggaaggcttctctctccctctctctcggcgatcagattctcgacgagacatactcgctggggaagtcactaaccggcaagaacctcgt

SEQ ID NO: 8378 - DNA, 633 bp, Glycine max
  unsure (1)..(633): unsure at all n locations
tcggaattcgnctcgagcccatccttcgttccatatttagggccgtaattgttgttaccatccaaaaaatggccggtcttgttgtttcttcccaatgctttctcaaactcttgcttgtagtttcagtctttcatgtttcctttgctgctaggaggttgaatgagctggttcaggaccagtctcagttgctacattaccacaatggtcctcttctatacggcaaaatcgccgtcaacctcatctggtatggtaacttcaaaccatcccaaaaggctatcatcaccgatttcgttacctcactgtcatccccagcgtctcagagcagccaaccctctgttgccacgtggtggaaaaccacggagaagtactaccacctgagtcccaggaaggcttctctctccctctctctcggcgatcagattctcgacgagacatactcgctggggaagtcactaaccggcaagaacctcgtccagctggcttccaaaggcggacagaggaactccatcaacgttgttctgacatccgctgatgtggcggtcgaaggtttctgtatgagccgatgtgggacccacggctcttccgcttctcatctgaagaagaacagcaagagctacaagttcgcctacatct

SEQ ID NO: 8379 - DNA, 434 bp, Glycine max
ctgggaacttgctggttgactctgccactggtgctagctacaatgtggagggggataatgggaggaagtaccttgttcctgctctgtatgatccttctacatcgtcttgctcaacgcccgtctgagaaggaggattattatggtgatgccgatcgttcagttctcactgctgctgctagcctgctactacgatgatgttagaaaccacggattagggagtgtacaaaacttctaataacccattttgtaggattatttcattgatttgtttgtttatatcatctggatatgtacgcggattaaggatcttatgtaagtcgaagcaactgttcttccgtttgcttttaaataatattgaaatattatcttcgctaaaaaaaaaaaaaaaaaaaaaaaaaaaaaaaaaaaaaaaagggggggcccccccttttttt

SEQ ID NO: 8380 - DNA, 323 bp, Glycine max
  unsure (1)..(323): unsure at all n locations
gatgtggctgtcgaaggtttctgnatgagccgatgtgggacccactgctcttccgcttcttatttgaagaagaacagcaagagctacatgttcgcctacatctgggtcggaaactccgataacccaatgcccggggcaatgcgcgtggccattccaccaacccatttatgggccccagtgcccaacctttgctattcccatcgtatttaattggctaatatgtatggtcataaacctcgctagcctccttgccggaaccgccaccaaaccattcggaaacggttacttccagggtaccgcggaagctccgctcgaaactgcgt

SEQ ID NO: 8381 - DNA, 648 bp, Glycine max
gatttacgttactcccaaatcgcaattggccaattccaccaaagctcctcacgctcacactcactcatttgcaaagaaagagagagaaatggcactgagggcagccgtgctccgccacgttcgtgtgccactccaagccgctccaaaactgcagccatggcgtgccatgtcatcacacggcgacgatcatctctccaaagaggaggtcgtcgaaagagtcctcgccgtcgtcaaagatttccccaaagtcgatccttccagggtgagtccagatgtacatttccagaaggatttgggtttggatagcttggacaatgtggaaattgtaatggcactagaagaggagttcaagctagagatcccagacaaggaagctgataaaattgactcttgtcatcttgctattgagtacatttctaaccatcccatggctggttaactaatgtgtcctttttcctatttggcttcatgttgaacttaaacacagtgcaaccttgaaccttccccttactttcactggatgtttctggaatctggtgttgttggtatgttttcctttttccatttaaattgagtaaaggggctggttgtttagaataatgtgaattgttcagagaagagtttgtcaatgaaaaactgggtttctgg

SEQ ID NO: 8382 - DNA, 922 bp, Glycine max
ctgaatctgtcaagaaacaaaatcagcactattgaaggccttagagaattaacacggctgcgggtacttgacttaagttataatcgcatctcaagaattggacaaggattatcaaattgtaccctagtcaaagagctatatcttgctggaaacaagataagtgatgttgaggggctacataggttattgaagctaacagttctggacctgagctttaacaagatcgcaacaacaaaagcattaggccagctggtggctaactacaactcacttcaggccctgaatctgcttggaaatccaattcaaagcaacatcagtgatgatcagctgcgcaaagcagtttgtggtcttcttccaaagcttgtttacctgaacaagcaatctatcaagactcaaaggggacgagaaatactcactgatagtgttgccaaagctgcacttggtaacagcagccggacctcctacagaagagcactaaagaaaggtggcggccatggagggtcaagttccagtgtgcatagaagcagtgctagtgtttcccagaaaagcaggaacaggtcaaggagccgaactaaacatcattagatgtctgtaaaaggtgcaattcatcagtatttctaagacttgataaaatggaggagtatttttcaaacttgtttttacccagtacttgcttcaacctgtaacccaccctgtggaataagaaggctttgttgtgtttgtttcaatttcaacctgttagttatcatgggtgtttgattatatgccataaaggagactgctctagtcattgatagtctcttggtttaagacttgatgtaatgcagtcttcatcgtctccaatattagtgtgtggagcttgatgtcttcatctggctttctcaaatttaaacaattttgcatgcaaaacaataattggcct

SEQ ID NO: 8383 - DNA, 869 bp, Glycine max
gacagtaacaaagactccttttccattttccttcctttgggttgtgttctgtgttattgggttggattgtgttgtgtgttccatacaactccaactagtcagagattcttgtctgggctacattgcactttgcaccccaaaaagtgaaaggaagagaggcataaacaccccaaaaaatggagagagctctcactaaagtcagcagcttgaaggtggggttggggagttcatggatctccaagaaggccaaggaggagttctctaacatctctgaagacatctctagtttctcaaataccgttgaagaaaaggcgaaatggatcttcaacaaattaaaaggtaagccacagaaaagcctaccggatctcctccgagattacaatttgccaccaggtctatttccacagaacataatctgttatgagtttgatgaaaccaagggcaagctgattgtctacttgccatcagcatgtgaggtcagcttcaaggactcctctgtgctgcggtacgcaacccgagtcaaaggggttctcacaaggggaaagctttcggcgatagatggaatgaaaacaaaggttcttgtgtgggttaaggtgacaaacgtggcagttgaaggttacaagtctgacaagttgtggtttactgctggtgttaaagaagtcaaggacaaaggatgcatatgatacacctcgtgatgctgtcagagtatcagaattctgagtttacaaaatgctggttattatgtcattactattattgatatggaatagatagtctacgttgttggaaatggtacacacaatagctgtacaagttaggatcctcttctccatatttatctattaatattggatgcattcctgttctgg

SEQ ID NO: 8384 - DNA, 353 bp, Glycine max
cttttccttcctttgggttgtgttttgtgttttgttttatgtgttttgtgttgggttggattggattggattgtgttgtgttgtgttgtgttgggttgtgtgttccatccaactccaactagtccgagatttttttctccttggctgcattgcactttgcaccccaaaaagtgaagggaagggaaaggaagagaggcctaaactaaacaccccaaaaaaatggagagagctctcactaaagttagcagcatgaaggtggggttggggagctcatggatcaccaagaaggccaaggaggagttctctaacatctctgaagacttctctactttctcaaataccgttgaagaaaa

SEQ ID NO: 8385 - DNA, 913 bp, Glycine max
cccacgcgtccggtttacttctcgcaatgatcctccaacattctccatggatgactttgaaggtaatctgctttttggatgttggaagatggaacttggttgttaggataatggttctgctgtaaattatcagcaatccctcgaggcagggaaattgttagagatagttccacaatggaaattgtacagaacttgaacacaaataaagaaggaatgaatttccaggagagacagactagctgcaggcatagtaccaaaggaatactcaattttggatagataaactttgatgtcaatccttagctcttggaaattcaaccatatcatcaagtcctcccttagctggggagagaaaatcgttctcaaatgttactaggcttgggtttgctgctgctcatgattctccatccttacaaattcaagaaactagtggtctgcataataacaacacaactgctgattcttctgtcacaacaggtttgagaaatggggagacacaatcatactccaatgctacatcaagagcagaatctaatataagctcgaatgcaccaaagacaaatgagttggggaagaagggaaagaaaccaaatcgagttcttctgtcgacagccggtggtaggcgttattgattacttggttgccgacccttacccttaccctagattatgtgggtgtcaaatgatacccaaccttctcccggctagtcccaagccaaactcttttggcagattatttcagtgtagagttattaacgttctatggattatatgtactttatgcgctcttaagtacttatagataagtagatatgtgtggagtgaataaatgtttttagcaataaacaagccaaaacagttggaagtttagtttattctttctgtggatctgtagaactgtgctaatttaatcc

SEQ ID NO: 8386 - DNA, 214 bp, Glycine max
cggcggcgacaccggcgttgacgttgtgagtccattcctttttttttttcttttcttttttttttgctttttgcaacaatgctcatagtctggattaaattagcacagttctacagatccacagagagaataaactcaacttccaactgttttggcttgtttatttcagtgtagagttattaacgttctatggattatatgtactttaataact

SEQ ID NO: 8387 - DNA, 1267 bp, Glycine max
gtgacatatttgacccctttttcagttcagtgtccaatttgtttggagtatcccctgtgtccgcagataacctcatgtggacatattttctgtttcccatgtattctacagtacttattgatgggtgaagaggatcacaaaggtgatagctggaaaaggtgtcctttgtgctttgtgatgatatctgccaaggatttatataccttgcacatcacaaatgtcaaacagtatcaagtacgagataatgctgagttcacctttttaacacggaaaaaggattcctttactctgtcacttaaaaataaacgagagacaaataccacatcaggtgtcgatggagatatctgtgatcccttttctaagttcactcttatatcagatgtagatctctcagtgaagcatgcaatatccgatctagatggttggctagccagagctgattcaggtcttgttgatgacctggagaagcttccttatgtttgtgctgcaatgcaacaattagaacagaggaagaggtattggagtgagcacaggtctcatgacagtgaaaaatcttctatgattattgattgtggacaccagataccatcaacagttgcaaattctatggatactgatgatgaaaactgttctaatggatcaataacttcttcttctgatttccttgatcaaaataaggttatgatgttggataagtcaactgccggagcctgttcggatcaaaacttggatgtggagaaagaattaatagagcaggaaatgaatttatcttcttcatatgaggagaaaaatgataatcaaaggcattcagaaggtgttattggagatgtgaaggaaaatagttcatacagtttctaccaggctgctgatggtcagcatctaattcttcatcctctgaacatgaagtgtttgcttcaccattatgggagctatgatatgcttcctcacagaataagtggaaggattctacagttggaaacagttactcagactgaagccatcaggaggcggtatcgatttcttagtcattttccattaaccacaacctttcagctttgtgaagttgatttgagtgagatgttgcctcctgaagcattggccccatttatagatgaaatcaagaagcgtgcaaatcagaggaagcaacttgcaaaaaaggaaaagaaggaaaaaataaaggctgaagctactacgtgctactctcttcccatatcattaagtcatcagtttacttctcgcgatgatcctccaacattctccatggatg

SEQ ID NO: 8388 - DNA, 428 bp, Glycine max
gttggaattatggtgattgaggaaggttaggcgaggaagggaaaaagaggacagaggttgcttgcgcaaatctagctaatctgggctttctgggacaaccagtagagaaagtaaaaggattgagattgagatttgagagaaagagaaagagaaagagaaagaagaggttaaacacacacaaaacagaagaagagaactctcccaccatgccatgcccaaaaccgtactacacaataaagcacaccaaccattcatttccttttgcccacatttactatcccacattatgtttccacagacaatcgcagtgccacagaaccaactaggcactccttcatgtccttagctagtttagttacctcacttctacctttcccccacaattattccctcccttaaacacatgcacccccttttcacccttttgc

SEQ ID NO: 8389 - DNA, 411 bp, Glycine max
gagaaaaaaggggttgagatttgagagaaagagaaagaggaggttaacacacacacacacacacacaaagcagaacaagagaagtatccccccataacaaaaccgtactacacaataaagcacaccaaccattcatttccttttgcccacatttactatcccacattatgtttcctcagacaatcgcagtgccacagaaccaactagccactccttcctgtacttagctacctcacttctaccttcttatttcttccacaacccctttttcctcccttcaacatatgcacccactttgtcttcatctctttaaacagcttctcctcattgtttaatttgtcactgatactgatggcaccactgatgggagggtgcttttggctttggtggcagctgaagcagcagtgccaa

SEQ ID NO: 8390 - DNA, 1053 bp, Glycine max
gacacattgctcctcacggcacgacttgttcaccgatcagagctgattttcgcggctgttaccggtcaccggagattctatccgaaatcgttttccgatgacgataaaaactgttaaagtcagtaacgtttccttgggagcaactgagcaagacattaaggagttcttttcattttctggtgatattgaatatgttgaactacggagccatgatgaacgatctcaaattgcttatattaccttcaaggattcacagggagctgagactgcactactgctttcgggagcaacaatagtcgatatgccagttacaatatctctggatccagattaccagcttccacctgctgccttagcgtcatctgtaagagaaactcaaactcctggtggtgctgactctgctttccggaaggcagaggatgtggtctccggcatgctagccaagggctttatcttagggaaagatgctgtcaacaaagcaaagacctttgacgagaagcaccagttatcctccacagcctcagcaaaagttgcgtctttcgatcagaaaattgggcttagcgagaaaataagtgctggtgctacagtagtgggtgatagagttcgagaagtggaccaaaagtttcaggtttcagagaagaccaaatcagcatttgcagctgcagaacagacagtgagtaatgctggttctgccataatgaagaatcgctatgtgcttaccggggcatcctgggtaactggcgcttttagtaaggtttctaaggcggctggggaagtaggacagaagacgaaagagaaagtagagggtgcagaagaacatcagaaacgaaaagtggaagatcaatatgcacaagtcctttatgagtccccgaaagcagcagaagcaagtgagcagtaatcttccaagcctgctcctgctcagggtttgatcctttggttggcttgttgtattgatagatatatacttcctcttaaactcccaaagtttttcaagatgattactgtgcccacctttgtttttatcctcaagtcctctacatttttgtggttagt

SEQ ID NO: 8391 - DNA, 571 bp, Glycine max
gctgtcaacaaagcaaagacctttgatgagaagcaccagttatcgtcgacagcctcagcaaaagttgcatctttcgatcagaaaattgggcttatcgagaaaataagtgctggtccacttctcgaactctatcactcactactgtagcaccagcacttgctgctgcagaacagacagtgagtaatgctggctctgccctaatgaagaatcgctatgtgcttactggggcatcctgggtaactggcgcttttagtaaggattctaaggcggctggggaagtaggacagaagacaaaagagaaagtggagagtgcagaagaacgacagaaacgaaaagtggaagatcaatatgcacaagtcctttctgagtccccaaaagcagcagaagcaagtgagcagaaatcttccaagcctgctcctgcccagggtttgatcctttgatttgcttcttgtattgataaatatacttcctcgtaccgacctttattttatccagatcgaaagtgaatgtaggactgatttactgttggacgtgcttgcaattatttattttgcttctataataccactat

SEQ ID NO: 8392 - DNA, 622 bp, Glycine max
ggattgcagcgtcactgttagttattgtatcctagaggaccctatcttctcccacccccttcctatattacataaccttgcatttcattgcatgcccttcttcttgttctgatcttttggggtgtgcgtgtgtgtgagttggttgtttgtttgtttgtttgttccttcatcaacaatgaagatatctgatgagaacagttctaaaccaatcaaccccacaagttttcaaggagggatagaatgtgtggggaacagaaagatggggcagaacagaagggctttgagcgtgatcaatcaggatctggtggcggaagggagaccttacccttgtgttgttaacaagagggcattggcagaaaaacacgatgtttgtgagaagaagcaggcggatccggggcatcgacccatcacaaggaggtttgctgcacaaattgctagcacacagaaaaatcgtgcagagggaaccaagaagtcaaacttggggaattcaaattcgaatggatttggagagcacatatttgtcgatgaagaacacaagtcaacaacggatgaccagccagtgccaatgtctttagagaagacagagccaatgcatagtgaatcagatcagatggaggaagtt

SEQ ID NO: 8393 - DNA, 737 bp, Glycine max
  unsure (1)..(737): unsure at all n locations
gaaatcaagagaattctagagaagattgtgcagccaagcaggaaagattggagtaccaggcttgatgatgctctctgggcacatcggactgcctacaaagcacccataggaatgtctccttatcgggttgtctttggaaaggcatgtcatcttccagtggaaatttagcacaaagcatactgggcagtgaagacctgcaacttctctatggatcaagttggcgaggaaaggaagttgcaactgagtgagttagatgaaatccgcctagaagcctacgagaatgccaagttctacaaagaaaagaccaagaagttccatgatagcatgatagttaagaaggacttcgtggttggacagaaagttttattgtataactctaggcttggactcatgagtggtaagttgaggtctaagtggattggtccttttgttgttactaatgtttttccttatggtacagttgagatcaaaagcgactccacaaacaagagcttcaaggtcaatggacaccggattaaagcattcctcataaatccctcctttagtggatgtagtggtggaggagacctccttacttcaccctacttctcttccgccatgacttagggagttttctttttctgtctccctctttacttttattgcacttgtccaaatttattgattgttctgattgctcttgatcttatgattatgctacattgaggacaatgtgttgtttaagtgtggnggggggg

SEQ ID NO: 8394 - DNA, 1229 bp, Glycine max
tttttgtgcacctagcatcccccttacttgtccaacactgaaggcatagggagagagagagttctcgaggaagaagaaaaagaggtgaaatatagagagtgaagaagaagaaatagagggttttggtgtttggtgttgaatcgtgaaaatgttcagaaaccagtacgacacggacgtgacgacatggagcccggcggggaggctgttccaggtggagtacgcgatggaggcggtgaagcagggctcggcggcgatagggctccgatccaagacccacgtggtcctcgcatgcgtcaacaaggctaactccgaactctcatcgcaccagaagaagatcttcaaggtcgacaatcacatcggcgtcgccatcgctggcctcaccgccgatggccgcgtcctctcccgctacatgagatccgaatgcatcaactataattacacctacgagtcgccgctccccgtcggcagactagtcgttcagctcgccgataaggctcaggtttgcacccagcggtcatggaaacgtccttatggagttggactcctggtagctggattagatgaatcaggagctcacctctattacaactgtcccagtggaaactattttgaatatcaggcttttgctattgggtctcgctctcaagctgcaaagacatatttggaacgcaggtttgagaattttgtgggctcttcacgagaagatctgatcaaagatgcacttattgcaactagggagtccttgcaaggtgaaaaactcaggagttctgtgtgcacaattgctgtggttggtgttggtgagccattccacattttggatcaggaaactgttcaacagttgattgatacttttgagattgtgagggaggaagaagctgctccagctgaagaagaagctcagccagcagccggacaggatgctcccacagatccaggtgctgctgctggtgctgcagatcaaggtggtggtggtgctgctgctgtagaccaaggtggttctcctatggacatttgataatttaaaattaagtactagaggtgttgaataccaatatttaaagacgagtaggtttcatgtgtcatgggacaagatatttctttgatggaatttttttccccccttattcctgtttgttttttcaattcatccatgcctgctcattgtaaacgattttatagctgtttgatgaacttgaatgcatgatttacaaaaattattgaaattcagg

SEQ ID NO: 8395 - DNA, 1794 bp, Glycine max
  unsure (1)..(1794): unsure at all n locations
tatcagnttggtttccttgttggactcaaagggcagtatagtgggagcaaggaggagaaatactttattcacaaccatttggcatttactgtcaagtaccataaagacatgctaactgaatctgctagaattgtgggctttgaggttacgccattcagtgttaaacatgaatatgaaggtaagtgtgatgaaaagacgactcgtttgacaacctgtgaccctcatgctaaacacacagttgtcaactccaacagtccccaagaggttgaagagaacaaggaaattatcttcacatatgatgttgatttccaggagagtgatgtgaagtgggcttcaagatgggatgcctatttgctgatgagtgatgatcaaattcactggttctcaattgttaactcattaatgattgttctcttcctttctggcatggtggcaatgattatgctgaggacactgtaccgtgacattgcaaagtacaatgagcttgagacccaagaagaagcccaagaggagactggttggaagcttgtccatggtgatgtatttaggccccccaacaactcagatttgctgtgtgtttatgttggaactggtgttcagtttttcggcatgatactagtaaccatgatatttgctgtccttgggttcctttctccttcaaaccgaggtgggctgatgacagccatgctcttgctttgggttttcatgggaatttttgctggttatgcctctgcccgcatatataaaatgttcaaaggaacagagtggaagagtattgccctcagaactgcaatcatgttccctgcaatcgtttctgccattttctttgtattaaatgctctcatatggggccaaaaatcatcaggagctgtgccatttggcacaatgtttgctctgatctttttatggtttgggatctcggttccacttgtttttgtgggtagctatgttggattcaagaagcctgcaattgagaatcctgtgaaaacgaacaagatcccaaggcagatccctgagcaggcatggtacatgaacccagtcttctcagttctgattggtggaatactcccatttggagctgttttcattgagcttttcttcatcctcacttcaatctggttgaatcagttttactacatcttcggcttcctcttcttggtcttcgtcatcctcatcgtcacttgtgctgaaatcaccattgtgctttgctacttccagttgtgcagtgaggattacttgtggtggtggcgatcatacctcacatctggctcttctgccctgtacctctttctttacgcaacattctacttcttcaccaagcttgaaatcacaaagttggtatctgggttactatactttggttacatgctcatagcatcctacgcctgctttgttgtaaccggaaccattggattttacgcgtgcttttggttcacaaggctcatctactcctcagtcaagattgattagttatagcaaccactggtttggattaatctactacacttctgaaaggatgaagaccggtttgtgtaaggattttgaaattcaggtactgtcatgttcggaatcagatgtaaccttattctatacaattttgaattgtgacgacactgttattcttttgtttcaatatcttttacttgcctgagttatcgaagtataggtttttaaggtgtaccctgcagactaacttgacagttgttacctgtgttactgtcgaataattacaagttggctccttatccaatgattttttattattaacggtgtaataaatatgatatttcaact

SEQ ID NO: 8396 - DNA, 743 bp, Glycine max
cccacgcgtccggattgatacttttgagattgtgagggaggaagaagctcacctctattacagctgtcccagtggaaactattttgaatatcaggcttttgctattgggtctcgctctcaagctgctaagacatatttggaacgcaggtttgagaatttcgtgggttcttcgagagaagatctgatcaaagatgcacttattgcaactagggagtccttgcaaggtgaaaaactcaggagttctgtgtgcacaattgctgtggttggagttggtgagcctttccacattttggatccagaaactgttcaacagttgattgatacttttgagattgtgagggaggaagaagccgctccagccgaagaagaagctcagccagcagccgaacaggatgctcccacagatcagggtgctgctgctgctgatcaaggtgctgctgctgctgtagaccaaggtggttctcctatggacatctaataatttaaaattaagtactagaggtgttgaataccgatatttaaagatgagtaggtttcatgtgtcatgggacaagatatctcttcaatggattttctttccttaaatctgtttgtttctgcaattcatccatgcctgatcattgtaaacgattttatagctgcttgatgaacttgaattcgtgatttacaatatttaattgaaattcaggctgaaaaaaatgttggacactctttagagactaatggttatacactcatagtgg

SEQ ID NO: 8397 - DNA, 459 bp, Glycine max
ctgggttactatactttggctacatgctcatagcatcctacgccttctttgtcgtaaccggaaccattggattttatgcgtgcttttggctcacaaggctcatctactcttcagtcaagattgattagttatagcaaccactggtttggattaaatctacctacactttctgaaaggatgaagaccggtttgtgttaggattccgaacatgacagtgcctgaatttcaaaatccttacacaaaccggcggctcgagggagctcacctctattacaactgtcccagtggaaactattttgaatatcaggcttttgctattgggtctcgctctcaagctgcaaagacatatttggaacgcaggtttgagaattttgtgggctcttcacgagaagatctgatcaagatgcacttattgcaactagggagtccttgcaaggtgaaaaactcaggagttctgtg

SEQ ID NO: 8398 - DNA, 436 bp, Glycine max
gagtctctgaatctgaaattgcaatgcttcacccggcggcactgatagcatcgtgtccttatccttatccttatcctgggcggcatgagttaccctcagcctcagcgtcagcgacagccagagtcgctgttccaatgccaaatctgagaggcaaagcggttgttggtgttggttccagaatgataaggtgcatggctaaccccagaagagttcaaatggtggccaagcaaattaggagagagctttctcatatgcttctcaccgataaagtcttgcagtatgctgttcttcccgaagcctccttaggagccgaccgttacctctcttctctcaccaccatcaccgacgtccaagtctccgccgacttgcaggttgttaaggtgtatgtttctgtttttggagatgaaagaggtaaagaagtcgccattgccggctt

SEQ ID NO: 8399 - DNA, 965 bp, Glycine max
ggaacatcaatacatactttagggctgcagtttcgtgctttcccgccgccgctacactgccaccgtcttccccgccgtctccgccagagatggcagaagaggattcaaagcctctgaactacatctccgaggtcattctcaagaagaggaagaacaccgaagcatgggctttaaggaaaaaagaacagttccagcaaaagaaataccaatccatcaagaagccggaggatttcatccacgagtatcgcaacaaggaagtggaccttataagaatgaagcggagggtgaagaggaaagtgcctgaagctaactccaacactctaataatcattcggattcaggggaaaaaggacatgcatccgaggacgaggaaggtgttgtacagcttggggttgaggagaagattcagtgctgtgtttgtgaagccaagtgagggaataatggccaagctgcagagggtggaaccatatgtcacctatggatatcctaatcttaaaagcataaaggagctaatttacaaaaaaggacatgcaaggatggaacagcgaaaagttcccttgactgataataacattattgagcaggaattaggaaagttcggtattgtatgcatagaagacatggttcatcagatttataatgctggtccacactttaaggaagttgttagatttatgtggccctttgagctcaacaagccagctgaaggattgaaaggatcaaaaacctcattcaaagaagatggagacacagggaacccgtgaggatctcatcaacgaactgatcaataaaatgaattagtggcttttgtagtatcaaaattttgatgattactatgttcgttggatgatcctaggtgcaatatctgatttttcaagaccccaatttattaccgagagaaacattgctacatgttcttgttatagtagagttttagtgtgtatttatctttacagtcttcattt

SEQ ID NO: 8400 - DNA, 330 bp, Glycine max
ggggctgcaggttcgggctttccccccccccctatactgccaccgtctccgccagcgatggcagaagatgattcaaagcctctgaactacatctccgaagtcatactcaagaagaggaaaagcaccgaagcatgggcgttaaggaaaaaagaacagttccagcaaaagaaattccaatccatcagaaagcccgaggatttcatccacgagtatcgcaacaaggaagtggaccttataagaatgaagcggagggtgaagaggaaagtgcctgaagctaactccaacactatgataatcattcggatacaggggaaaagagacacgcatcct

SEQ ID NO: 8401 - DNA, 320 bp, Glycine max
gcagtttcgtgctttcccgccgccgctacactgccaccgtcttccccgccgtctccgccaggttctctctcactccgcaaccagtctttccaactctctctctctctacgaaaccctaaacttgaaacctaccccactcatcgtgtgtgtgtgtgcagagatggcagaagaggattcaaagcctctgaactacatctccgaggtcattctcaagaagaggaagaacaccgaagcatgggctttaaggaaaaaagaacagttccagcaaaagaaataccaatccatcaagaagccggaggattttccacgagtatcgcaac

SEQ ID NO: 8402 - DNA, 191 bp, Glycine max
  unsure (1)..(191): unsure at all n locations
atatattttctgagtgaaacaaatttcctgtggatttgatattcggttcttatcattttatattacttgtacgacttggtacatttgccgattagcatcgcagaagagcgaacatatgtgcataaggtttcacaagagtatttggtaaaaattattaacaataaaaagaactcatattacatacaananaa

SEQ ID NO: 8403 - DNA, 354 bp, Glycine max
caacaaaggatgcagcattcgttgacttgggctctctcttctcttctcttctctctcaaaatcgtttctctgcattttcagctaaacctgagcacacccaactgagattttagcttcagattccgaggtaagaggagaaagaagagaactaagtgctacccagagttcgatttttgggttggtcaacaaggtcaagatgtttctgagcttgatgggtatcatgtagatcaagaggggtgcgtgtgtggattggggaagcaatttgtttatgaagttgaagaagcatggatagagtgacttcgtcttttatgggttccttttttgtttgggcaattttggtgcttgatttggtac

SEQ ID NO: 8404 - DNA, 846 bp, Glycine max
ggcagacaaagggagaagtaaaaaacacagagcaaccaccgatcaaagaagaaacaaccgcaacagatctccgtttctcgccaaacaaacacaaaatggctgccttcagcggcgacgaaaccgcacctttctttggcttcctcggagccgccgctgccctcgttttttcctgtatgggagcggcgtacggaaccgcgaagagcggcgtcggggttgcgtcgatgggcgtgatgaggccggagctggtgatgaaatcgatcgtgccggttgtgatggctggtgtgttgggtatctacggtttgatcattgcggttatcataagtacgggcattaaccctaaggccaaatcgtactatctttttgacggctacgcccacctctcttcaggtctcgcttgtggcctcgctggcctctccgctggcatggccatcggcatcgttggcgatgccggtgttagagcaaatgctcagcagccaaagctttttgttggaatgatactcatcctcatttttgctgaggcgttggcattatacggtctcattgttggcatcatcctctcttctcgtgctggccaatccagggctgactaataaattttcctgttggatgccacagattgtgaatgttactgtgaagtccgggtgggtaatgttagtacacagctgccgctttggcttgctcaagtgattctatttatgtttacattataaaattgaggctatccaggaagaaagtcagttgaactttccttagcccttcattatttttagttatatgctcaatccagcctagaatagagatctccataataagacagatgtatgttttgattccctttacctcccc

SEQ ID NO: 8405 - DNA, 859 bp, Glycine max
gagaggcaaagcaaataagcagtaatagatctgactctcattttcagaaagcaaaatgcctggtttcagcggcgatgaaactgctccgttcttcggcttcctgggcgcggcggccgccttagtattctcctgtatgggagcggcgtacggcacggccaagagcggtgtcggcgttgcttcgatgggcgtcatgagaccggagctggtcatgaaatccatcgttccggttgttatggccggagtgttgggaatctacggcttgatcatcgccgtcatcatcagcaccggcattaaccctaaagccaaatcctattacctcttcgacggctacgctcacctctcctccggcctctcttgcggccttgctggccctctccgctggcatggccattggcattgttggcgacgccggtgttagagcaaatgcccaacagccaaagctttttgttgggatgattctcattctcatctttgctgaggcgttggcattgtatggactcattgttggcatcatcctctcttcacgtgctggccaatccagagctgattagtataaaatttcctgttgcttgtagcgcactgaaccacggattggatggtgaatgtcgccggggaccaggtcctgttaagagtttagctttgtgatgctctgcatccgtcttatgataaaattgaggttatcctgaaataaagtgtctcaaacgatttattttccatttattgtatttaatttgagtccaaactagattagagatctctgtaataaaacatgtttgtgtttatttcaataacatttagtattgtgtcgtaaaaaaaaaaaaaaaaaaaaaaaaaagggcggccgctcgcgatctagaac

SEQ ID NO: 8406 - DNA, 1207 bp, Glycine max
gatcatttgcaccggagaatagaatagcccatggcttcttccaacaaaatgaagaccatcaagtcaacgttcctcgttttgtgcctcttagcctcgttcctctgtccaatcaaggctcacggaggaagttctcatgatggtgtatctgaaagcgaagatttgcattctcggggtctgatcgtggtgaaaatatggtgtttgatcatcttccttgtgagcactttcgctggcggggtttctccttacttctaccgttggaacgagacttttcttcttttggggacacagttcgctggtggggttttcttaggaccctctctgatgcatttcttgagtgattctgctgagaccttcggagaccttacttcaaaatcttacccttttgcttatatgctggcttcatctggataccttctcaccatgcttggtgactgtgttatcactattgttaccaggaatagcaacagggaagccaaagtggtggaactggaaggagggacaacgccccaagagcatgacctagccagagatcattgcgcagtggcggagacaacaaaccctgtattattgaagacttcttctttgggagacaccattctactcatccttgcactgtgtttccattcagtttttgagggcattgcagttggagttgcaggtactaaggcggacgcatggaggaacttgtggacaatatccttgcacaagatatttgctgctattgcaatgggaatagctttgctaaggatgttacctaagagaccctttgtaacaacagcagcatattctttggcctttgctgtctcaagccccattggcgtggggattggcattgccatagatgccacaacacaaggaagcaccgcagattggatgtttgctataacaatgggtattgcttgtggggtcttcatctatgttgccatcaatcatttaatttccaaaggcttcaaaccacagaggacaatgcgttacgacactcccttgtttaggtttgtcgccgtgctttctggtgttgctgttatagctgtagtcatgatctgggactgatcatcatgtttcaattcctgtttttctttgttcattaataattgttctacgaaattgtgcgtgtgtgataattatgatgaatgtaccattatatttcgctacaatattaaacgtttgtttactattttgaatgaaaatttatagtcattgttcctac

SEQ ID NO: 8407 - DNA, 570 bp, Glycine max
  unsure (1)..(570): unsure at all n locations
aaaagaaaaaacgaaatcaactattgacagcgggaataacgtattaacatcaacaggcctcgctttgagaaatcagacggcggagagaatgggtttatcactcttacggtgggttctgccgctgactctgttgctcacctgcgccctaggtttccaatcggacgagcttctcctcgacgacgaagagttcggcatcgaaggaggacgaacctcctttgattccgattcgcatccaccttccaccgcctccacctcgaggaagaggctttccgactcctcctccgattccaagatccagttccctctccaacacgctttcggcgactccgatttctccgacgccggcaacttctccgctcgcctcaagacttggagccacggcgcccagacgctgacgaagctgcggtttaagcgtgatcttttgactgacgttgagcagaggaaatttaaagagctgttgcgagaagatgatttctataggattagactgccgtccaatgttttgagtcctcccggccgggaatatattatttcttcagtgaaagcacgatgtcttccangggatggatt

SEQ ID NO: 8408 - DNA, 454 bp, Glycine max
ggaggaacttaatggtaccagagtagagtagtgcggaagaaaagaaaaacgaaatccctcgctttgagaaatgggtgtattactcttccggtgggttctgccactgactctgttgctcacttgcgcgttaggtttccaatcggacgagcttctcctcgacgaccaagagttcggcatcgagggaggacgagcctccttcgattccgattcgcacccatctcccacctccaccttgaggaagagcttttctgactcctcctccgactccaagatccacttccctctccaacacgctttcggcgactccgatttctccgacgccggcaacttctccgctcgccttaagacgtggagccacggcgcccagactctgacgaagctgctgtttaagcgcgatcctttgactgacgttgagcagaagaagtttcaagagctgttgcaacgagatgatttc

SEQ ID NO: 8409 - DNA, 789 bp, Glycine max
gtgacttgactctctttctcacacctccttttttccccgatgctaactctacaagcttcgtctcgtaaagaaaattcgaaagctcaatagagagaactcaattgaatcatcaaatgaggacagtgatttcgcgcttgatccattccacgccttccatttccaggctcaatgccacggtagtgtcaatcagcgggagaaatctctgcacagattctaacaaagttgatgggccattcaaagttgaagaagcagagactgtaaatgtgcctccactcccaacagaaaagttgcttgtgttgggagggaatgggtttgttggatcacacatttgtagagaagccttagaccgtgatttgtctgttgcgagtcttagcaggtctggtaggtcatccctgcatgattcctgggctaccaatgttgcttggtataaagggaatctcctttcaactgattcattgaaagaagctctgaatggggtcactgctgttatctcatgtgttggtggttttggctccaactcttacatgtacaaaattaatgggactgctaacatcaatgcaattagagcagcttcagatcaaggtgttaaaagatttgtctatatctctgcagctgactttggtgtagtagattacttactgcgggggtattatgaaggaaagagagcttctgaaacagagctcctgaccagattcccatatggaggagtaattctgaggccaggatttatttatggtactcgaagtgttggggatatgaagataccccttggtgtaattggatctccat

SEQ ID NO: 8410 - DNA, 491 bp, Glycine max
gttcctaaccctacaagcttcgtctcgtaaagaaaatgaggacagtgctttcgcgcttgatccattccacgccttccatttccaggatcaatgcagtgtcaatccgcgggagagatctcttctttccaaatgtctgctttaaagttgaagaagcagttaatgtgcctccacccccaacggaaaaggttgttctgtttggaggcgattggtttgttggatcacacttttttagagaagccctagaacgtggcatgtctgctgggagtcctagcaggtctggtaggtcatccctgcatgattcctgggctaggaattttgcttggtatcaaagggaatctcttttcaactgcttcattgagaaaacatctgattggggccactgctgtgatctcatttatgggtggttttggctccaacatcaaagctattagagcagcttcagatcaaggtgttaaaagatttgtctatatctctgctgctgaatgtggtgt

SEQ ID NO: 8411 - DNA, 388 bp, Glycine max
ccaaagctcaacagagaaaaatcaattgaactatcaattgaggacagtgacttgactctctctctctatccttttccgccgttcctaaccctacaagcttcgtctcgtaaagaaaattccaaagctcaacagagaaaatgaggacagtgctttcgcgcttgatccattccacgccttccatttccaggatcaatgccacggtagtgtcaatcagcgggagaaatctcttctttaaagttgaagaagcagagactgtaaatgtggctccacatctcttctttacatttgaagaaaatgggcctccacccccaacggaaaagttggttgtgtttggaggcaatcggtttgttgcaaaacacatttttagagaagcctagatcgtggcgag

SEQ ID NO: 8412 - DNA, 530 bp, Glycine max
  unsure (1)..(530): unsure at all n locations
ggctcatgtcacgcggctattagaataaagtcacttcccagttacttgactctctctctattcttttccgccattcctaaccctacaagctttgtctcgtaaagaaaattccaaagctcaacagagaaaatgaggacagtgctttcgcgcttgatccattccacgccttccatttccaggatcaatgccacggtagtgtcaatcagcgggagaaatctcttctttaaagttgaagaagcagagactgtaaatgtggctccacatctcttctttacatttgaagaaaatgggcctccacccccaacggaaaaggtcttctaccaacatcaaccgtatgtgaagcattttgtatatgcgttttctaacttataacttgtgttgaatgttattaaagttggttgtgtttggaggcaatcggtttgttgcaaaacacatttttagagaagccctagatcgtggcgagtctgctgggtgtcctaccaggtctggtaggtcatccctgcatgattcctgggctaggaatntttatt

SEQ ID NO: 8413 - DNA, 471 bp, Glycine max
agggtgaccgcacctctatgaggggtgaaccactcgggaagaggactgtggaatacgccacgcttggtgttgctactgcttttgtccctccaccctatcatcaccacaatgggtactttggtgctgccatgcccatggggacttacgttagggaagcgccaccaaatacagcctcctcccatcaccaccaccaccaccaccaccaccatgctcgtggaatctccaatgctcatgaaccaaatgctcgctccatataaaattatataattatgactaggattcagaacaagacttgatgatgattagcttaactctcagtaattggtgctagagtactactgttgttgaggatactttattttataattaagggctgggaagggagttagtatattcctaatcctaactatgtgcatctttaatttatgaaatcactttgttttaacctttgtaaaaaaaaaaatttttttt

SEQ ID NO: 8414 - DNA, 394 bp, Glycine max
gaggaggaggccgatcgatggcggcgactcggatttcgatttggatgtggaagatggggagttggagttcacggaaggggatgatgcctttgttggtttgaagtttgactagtgatgatgatgcagcagcaatgggtgatggaaattttactgcttttttttttgttgctaattctaggaggagtagcagcatatagggtggtagagtagtgtttttggatagtgttttttgcacagattatttgtggagaaacaactgaaaacaaagtataggtgttgatttggggttttgtcattttggtaaagaggcattaccttgttcatattttaccatttttgtaatgccccttttgatttgatcaccttcggaaattgaaaagaaaatatttggtag

SEQ ID NO: 8415 - DNA, 1513 bp, Glycine max
ttaaacaagaaccattggatactggatagagaaacttcaccttgtgcagttactcccaaactgcacaagatcctcttcccaaacaaagcctaggaatttgtgccgtcccagtaaatgttaataaccatgactcatgaatgagtccgcccacaatccaacagaacagaactagtaccatgttgctgtcacaagccaaactgcacaacaacaacaacatctccaatgccattaacatgattatgaagaagaagggtaataacaataacaacaatcattgttcacctgctatactttatcactacccttgccctgatggtgcttttgctgcccttgctgcacacctttactttaaggccacttcatcattctctcctcttttctttcccaacactgtcttcaaccccctcagtgctgaagatcttcctctgaatgaaattggtgatctttatctcttagattttgtggggcccgatggttttgttcaggaaatctccaccaaagttccaagggtgattgttttggaccatcacaaaactgctcttgagaggctaggcaatgaggcttcacttggtgagaatgtggttaaggttattgacatggagaggagtggggctactattgcttttgattacttcaaagataagatttttagtcctgatgttgcggttaagcacccctcaattctcgaagaattcgagcgtgtcagggaactttttctgtatattgaagatggggacctttggaggtggagactcccgaacagcaaagcttttagaagcggttggaaggattgggatattgaatttgatgccaggaaaaacccttccttgtttgatcagttgctttcactagacttggataatattattagtacaggcacggtgagcttatcggacaagcaaaaactaatcgatgattgtctcagaaagtcatatgaaattgcccttgggaatgctgaatttggttattgcctggctgtcaatgcggatactgctctttcagagttgagaagtgaattgggacatcaattagctactaaaagccagaaaatgaatttgaggggtattggtgctgttgtttataatgtaccagagcttgaaaatgatcaaaggctaaaaataagtctgaggagtgtggagaatgaagataccacgcctatctctcaggaatttggaggtggtggacatcgaaatgcgagctcttttatgttaacagcggatgaatttgaaaaatggaaggtgtgatccgatatttgcacttgacatggggagatgaaggagtatacaagatgtgtcgtgtgaaatgttagatagttctatcaattagtgtattatgcaactctcttaactattttttgggtacccatgtagtagttatttattctattaggtaaggcaaaataatgtttgaatagtccctccaatcatctagatatttatttggataatgttaagtcttgtccatgtaacattgtagcattagaaatcaattggtttcgaaattatttgaccaa

SEQ ID NO: 8416 - DNA, 447 bp, Glycine max
ttctcgagccgattcggctcagctgagttctttgaactcaaaccctaaaaaaaacgatgtatcgttttttgtcttccattcgccatggctgtggatcttccctcacatcacttctcgcgccgaaacccacccttccattcgacgccgccctacgatctcgccgtttacctcaaaacgacggtactcttcgaatccctctgctttcatttccgccgttttcgaaatggaaaacaaatttgaagtttagatggcgtcgtttcgatgtgtggatttactcgagactgtggaaatagaaaatcgtgtatgcttataattttttgacggcgtcgtttcgatgtgtggatggatagggattagaggcagtgtttactgttttcaaagagagaaaagagagagagagagagagagagagagagagagaggaaattatgacaaagtgaatgttcg

SEQ ID NO: 8417 - DNA, 446 bp, Glycine max
acgagctcgattcggctcgccctcgacccagtgtcagaatctgagttctttgaactcaaaccctaaaaaaaacgatgtatcgttttttgtcttccattcgccatggctgtggatcttccctcacatcacttctcgcgccgaaacccacccttccattcgacgccgccctacgatctcgccgtttacctcaaaacgacggacatgttagaggattttcaagctcgaattttgattggaggaatcttattgtgaacgagaatgtgaatgcagatgattctatgcaggatgcagagaacagaaactccgaaaagtggaataatatgaggctgaatatgaatgcagatgcaaaagctcctccaaattttgtgcagaatagagggaacataaactccagaagctggaacaatatgcgacagaatttgaatgctcctccaaattttatgggg

SEQ ID NO: 8418 - DNA, 856 bp, Glycine max
ggcagcaggagcaggatgtccatctctctacccgtttccatggcaaccacaatccattccttaccctattcacttctcaaactcaaaccaccctccctcaccccatctctatttcgccgcacgctctttcccaattcaactctcaacgccgcccctaaacgcaccgtttcgtccaccactttctcactgacgctcactaacggaacctgcaaaaccagacacgttgccgccaaatcatccgaagccgacaccggaaacacttccacctcgctaacccaaaccgtgtttggggtgcttcatttggcggtgtccctgggcctcattctcgcggtggacaagtttctgaagcaagcgtttgtggctgccgcgatcaagttcccgagcgcgttgtttgggatgttctgcatattctcggttctgattatcctcgactccaccgtgcccgccgccgccacggcgttcgtgagcttcttcgtgcccgcgtttatgttcatacagagatggctccctctgttctatgttccctctctcgtggtcttgccccttgccgccaaagatattcccgctgcctctggagccaaaattggcctcattttagttggaggatggctggctacactctgtgttgctggttacacggctatcgcagttagaaaagctgtgaaaacagaattggtagatgctgagcctatgggaaagcctgctccattttcttctcttgaagtgtggacttggactgctgtctctccttatatccatttgtatctgcattattttaccctacagcactgggtacaagtgccagaacatgccttccatttttgcttgcagccacagtgttaggctacatggttgg

SEQ ID NO: 8419 - DNA, 594 bp, Glycine max
  unsure (1)..(594): unsure at all n locations
gatcattgatattggcttaggcgctgcatctgcaaaatctcagcccaaacaaacatctctgtacctctctccctctttccctctctttcgcttatcaattttcgttttaatttctctacgactcgggtcgacctccgatcactttgggtctatcggcggggacttgggtcgaactcgcatgactcaatttactgcgaggtacggaatccgtgaattttcctgcgaggtaagattccgttgaaattttgctttggtccgagggggagggtggaattaggaggaattaggatcgatttggctccagatctgggaattagggtttagttttggttgcgggtgatgttaattttgggggagaggctttggtagatggaatccggcttgagatcgggtggttctggggttgtggtgaagagcagaaactcatctggttgtttaattgtgcgaaagaaaggggatgggttgggcgctactgcttccacctctcgcaagctctatgaatccaagaaaaggccaaacatcaacgtgntcatgagtgagtcnggatcaagcgaggggtcacgatgatcgcttgggagaaggcaatgacctgag

SEQ ID NO: 8420 - DNA, 458 bp, Glycine max
ggtgtgtttttctcaatccaaacaaacagtttctagtttctgggctatagtactagggtttcttcttctcttctcttcctccgctaacacatacagtagatgcgtttgcttctatattgttgatcatgaaccgtcacgaccaatttcagaaacctcaatctctctctaaaggaactacagatcatagtcagcatcagaacaaggaagatgtggtttctataaaagattgtatctcaccggacttgacatcatttgcgacctcctctggagatgttgctgctggtttcacaggtgtgcatgaatcagaagccctgtcttgttattcatcagtctcaacttctgttggcgtgcaaagcaaaactgtcaagggttctgtaattgccaaaaataatcctaaatcttctggtttaatgaagccaaacaagttaaagtctacacatagaaatgggattttaagc

SEQ ID NO: 8421 - DNA, 834 bp, Glycine max
gacggctttcaccattattttcctttctctctcactcgaaacaaaacaaaacaacacaaccggaaaaccaaaccacctctccctgctcccgccgctgttttccgccgctgtcgccgtcgttcccacctcaccgtggcggcgcgcgcgtctccgatgggaaagtacatgaagaaagcgaagccgaaaggagaactcgcgctcgtcgaatccaccaccagcaacaccaccacctcctacatgggggtccgaacccgcgccaaaaccctagcgcttcagaaatcgcacgcgcagcagcacgagctcgccgccacctccgactcctacctccagctccggagccgtcgcctccagaagcctccgattttggtccactctccgaagcgccctaagcacccgaaccctaaatccccaatccccgaacctcccaggctcggactcgcttcggagcgcgacgctaccctcaaccacaacaaggacaatactttgcatgagaatgccgagcctcaggaagcgtcgttcggggaaaatgttttggattttgaaggtagagagagaagcactagggaatccacaccttgcagtttgataagggactcggatactgtcaggactccgggttcaactaccaggcctacttgttcagctgaagcttatcgaagaacagagcatgcagctagaaggcaaatcccaacctcccgtgaaatggatgaattctttgctgaaattgaagaggctcagcaaaaaaaattcattgagaagtacaactttgatcctgtgaatgagaagccgctctcagggcgctatgaatgggaaaagttgaaaccctagaagggt

SEQ ID NO: 8422 - DNA, 1249 bp, Glycine max
cggacgcgtgggttcgaaggcagcaccgcacttgttctgctccgccgcgattgcaatcgtttccactcccgccgctgatgggtttctcaaaggaacagcttcttgcgcggttaaaggagcttcaggttccattttcccagtatgagcatcctgttgttttgaccgtcgacgctcaggctcaatatgttggacatttggggggtggcctcagcaagaatttgtttctcaaggacaagaaaagcaggttgtatattgtttctgctttagctggtaccaaagtagatctcaaagtgttatctcagcggcttggtttgggaaaaggtggtctcagaatggcacctgaggaggctttaggtgaagtacttcaggtacccttgggttgtgtcactccatttgcacttgtgaatgaatcagcacgagatgtttcactgctattggatcaagggttcaagtctcagaagcactgcttcttccatccactgtcgaatgacatgtctatatctctaaatgcatgtgatcttgacaagtttcttaaatcaattggaagaaatccatcatacgttgatttggagaccaatcctacagtggggaaagatcaaccccctgatctagctgcactagttccatctggttccatagttttacccgatcaaccccaaaaacaatcttcttcacaggttcctaaggatgcaaaccatgtttctgtggataatggagccaatacagtttcagctaaagttgtcaagccatcctctggtgggaaaaatacaaaggggacaccagcaaaaaatgttaattcatcaggctcctttgcagatgctgggcaattcgttgaagagatattgcaaaaaacatcacaattattgctttcagaggtcaaggacgaaaatataaagttacacggggagcagctcggtactgtgttatctgacaaattacagaaaaacctcaatgcagagttcaagagccttgctatgatatttaagaacacagcatatacggaagggttccatgctggtactcattacaggcccccgctcatgtgaagcacaggatgatttacgatttgctgccaggaaagtaaaagaggaaccaaaattttaactctagttgttcaatgtttagtttgtgataacacaccatgcattgtttgagcattcatatatattctgggaaatgtttgttatagaatagatgatttgaaacgatttgatcaatgaaaaaaagtcaacattaagtcggtcatttg

SEQ ID NO: 8423 - DNA, 346 bp, Glycine max
caaccacgaagcaccggatgataacctaagatttgccagaggtagtgattgttatgagaatcgcctttagaggaatttcccacctcaccgtgtgtaagaaacaccaaaataacaaaattgagagtggtataaataggacgaaaatgcctaagtataatctcttttggtattttacattatacttatatctatttcacacaccattcgtagctccagcaagtggaaccaacaaataagcattttgatggctgttaattttaaacaagtagcacacatattatcagggagcactgatatatcttgggaaattaaattgctaatttcagaggcaaggagccctggaacc

SEQ ID NO: 8424 - DNA, 1039 bp, Glycine max
ggagaatataaaaaattagcatagagaaagtggaatcaccaatcttgtaacggaactttttgataactagctgtgtgaagacgacaactgccacccattccaacacacagagaggctattagcaattacctttccttgtttgttccgtcttatactctctctagtctcttcgtgcgaacatcatataaaccacctcggattttgcttcctctgctgcgttttaacgcccatcacgcgtttctttgcttatacactaactaagatttcaaaccccccgcggccaactaactaagatctggttttgttctgattgattcgtgcattggactgtgaaacgcacgccaaaatgtggtggatgatgaacgagactggaggcaattactgttctaagaagagcgatgatttgtgcagcaatgtttgtgatcaggaatcaagtcaagtattgggcatgtcacgaattcgctgtattctgcgtggtttggatgtgaaaacctatatattcatgtttgctgttatcccaatgtgcgtctttggattctatatacacgggcagaagatctcctactttctgcgaccgctgtgggaaaaagcacccaagcctttcaatgtcatccctcattactataacgaaaacatcaccatggagaatctctgcagacttcatggctggggagtccgggagtaccctagacgtgtttatgatgccgtgttgtttagcaatgagttggaaatactaactttgcgctggagagaattgtacccttacataactgaatttgttgttcttgagtcaaattctaccttcactggattgcctaagcctctggttttcaatagcaatagggagcagttcaaatttgttgagccgcggttaacttatgggaccattggtgggagatttaagaaaggagaaaacccatttgttgaggaggcgtatcagcgtgtagcattggaccatctcctcaagatagctggtattactgatgatgacttattgattatgtctgatgtggatgagataccaagtgctcacactatt

SEQ ID NO: 8425 - DNA, 715 bp, Glycine max
cagagagaaagtggaatccccaatcttgtaacggaactttttttcttatcagttccatagctagctgtgtggagacgacaactgccacccattccaacatacagagaggctatttactaattactgttcctcgtgtgaacaaacatataaaccacctcggattttgcttcctctgctgtgttttaacgacaacgcgtttctttgcttatacactaagatttcaaacggcgattcgttttgcgactgtgtggtcgcgatctggttttgttttgattcatttgtacgttggactgtgaaacacacgccgaaatgtggtggatgatgggcgagactggaggcaattactgttgtaagaagagcgatgatttgtgcaccaatgtttgtggtcaggaatcaagtcaagtatcaggtatgtcacgaattcgctgcattctgcggggtttggatgtgaaaacctacatattcatgtttgctgttatcccaatgtgtgtctttggattctatatacatgggcagaagatctcctactttctgcggccactatgggaaaaagcacccaagcctttcaatgtcatccctcattactataacgaaaatgtcaccatggagaatctctgcaggcttcatggatggggagtccgggagtaccctcgacgtgtttatgatgctgtgttgtttagtaatgagctggaaatactaaccttgcgctggaaag

SEQ ID NO: 8426 - DNA, 1513 bp, Glycine max
attctttcatttgtggttatttgttgattccagcgtgctttgaaaatctttaggtgattgttggggttgaatgggagaagattgcggaacctggattccggagctgcattttgattggcaatctcctaatttgagctccttcgatgctgctgcaccctttggcgccaggaagcaaagtggtacttctgcagctatgaatccgggtgccaacgtggtcacaagaaacgcggcaatgccagcttatgcgtcctctgccttaccgcattcgcagttaggacattctggtgaacctcatggttggttttattgtttgcctcgctttcgccagggatttaccacgcctgctcaaaccttcaatgcagaggaaaaactccctgctggccatgccaatggtttaggggtggaagttgcgccgaatagggaatcgggtttccctcagaagcaattgctggttattgatcaaacgggtgatcaaacaactcttgtttatagttcaaggtttgggggtcccgttgattgtcatgtgtcctgggattcaaagctgcatggttctatcaatttgaacaatgggaatgaattgcttaatttaaggagagatgtgaatcatgtggttggacttggacctactttggatgataaagttcatgaaaatacaggaactgatgatgacattgaaagcgagatgcatgaggacacagaggaaatcaatgcattgctttactctgacagtgatggttattccactgaggatgatgatgatgatgaagttactagcacaggacattcacccagtacaatgaccacgcacgatgataaccaggaagaaccccataggagaaccgccgaagaagttgctagctccgtcggagaaacaaagaagcgaaagctattggacggtgcttatgatgatgacaacttgcagttcatggacactgctagttctctgaatgggaaaaaaagaccctttgaagtcgaagatgatgccgaatcaagatgctctagtggtggcaacagtagtagtagagggtcaggtggaatgggttccttgtcaggcaataaaaagatgagaaaggagaagattcaagatgttctgagcatcctgcaatgcatagttcctggtggaaaggacaaggacccaatcgagcttcttgatgaagccattcgttgcttgaaatcattgaaactcaaggccatagaacttggacttgatgctactatataagttgtggacaattggaaatcagcatcacctatcacttatttagtacgttatctttgtgttttggtttgtagaataaacaaggtatgagtgtgaaacgaatcctttgaagcccttgctcaattataaagttggaagaaaatagagaaatcaggtgggctttgagtaatggtagtagtttgtgtgtgaagaaagagggtgaggtatttcagcgtattatgccgcaataaaggactcaacaatgacggatcaaagaattgattgtttaccccatgtcttgggggttagaaaaac

SEQ ID NO: 8427 - DNA, 1034 bp, Glycine max
cgacacacaacacagtttccactttccactttgactgtaccaaagtcacgcttgctccctctctcaacggcttccctcttcttcctctctctctctctctctctggacacacacatccttggtgttgaacgggtttttgggtgaaggagtagtgttggtggcttcatcttttagtgaataaggatacagcagcatgcggtggtggcttactctctctgttgatgtataccgcaaagtgatttccttgaatctgtattgcaaagttattctgtaactcttaagtcccttttgatcaaaaaaccttttacaatcatctcactcatctcttccttgccttgaatcaatgggatccaatttttttgttgttgttccttgttatgtccgtcagatcagctgaagaaacccacccccagcttgtttcaacctcttcttttcaacttagcctctttaaacattttagttgtcattagtttctagccattttctccttaggtggcgtttgtagacaagtcaaattagtatcttagttttgtgtattgttcaatttgtcaaaaccggttttcactactggattgggagggttcagacttcagaatcattgtctctgggaacatagttgttcttccattttgaagggttggaaaagtagttatggtgtgccaagcagcgagtcaaaccagatttcgggcattgaaacacgagaatggatatgcagggagctccaccataatagttagggttatagcatgctttcaacctctcacagattgccaggctgaatacttccgtcatttgctcaagcctgttacgtaatagtttttttctttttgttcgtgttgggttaaagctggtggtttagttgttttccttgttggtgaaagagttaccaatagtaaaagatagcacttgtgtttgaaacgtttttcttcaggtgattgttggggtttaatgggagaagattgcagaacctggattccggagctgcattttaattggcaatctccaaatttgagctccttcaatgctacaccctt

SEQ ID NO: 8428 - DNA, 439 bp, Glycine max
tcggctcgactggcgatcggttattcggcttcagtcaaattcgctacccgttgttgcactgcatgtggtcagagtaataattgtcctaaggaaaagtgtggttcgtgcattttgaattgaagagggttgggaaaagtagttatggtgtgccaagcagcgagtcaaacgagatttcgggcattgaaacatgaaaatggaatcgccgggagctccaccattatagttaaagttatagcatgttttcaacctctccgagaatgccaggctgaatatttccgtcatttgctcaaacctgtcacgtaattgttttgccttgctccgtctcggtgggttcagccggttcttttatttgttttctttgttcgagaaacaaaataccttttgtaacaaatagctattgagttggaatcgttttttcttcaggtgattgttctgattg

SEQ ID NO: 8429 - DNA, 399 bp, Glycine max
aggcacccgagaatgtcccaatttataaaaatgaaaataaaagcttgaataataggaaacacattttatttcttcataaaattcaagtcaaacaatcatgacctaatttatctctaaaatagaacaaagacgcccctataccaagagggtagtggaccattcctacatctaagagggtccttcaagaccaccattattattattcctaaaagctaaaagtaacatcaacaaaaactgaaaatttctaacaagatactaaaatctagtacttcctcctctcattggagaccgttgtttgacaaagtgcatcgatcgcaagcctgttctctgggactctgcatccagtaggtccaagcattttctcattaacatgaatagaacattgctgcttgccaagac

SEQ ID NO: 8430 - DNA, 378 bp, Glycine max
gagacaagaatcttttgctgttttttctttcttttctcttcttctatattgcactattgcttatgcaaaacaattttacatatttcaggacggaaaagagagcgagtttcccttgatagatgagactagtgcaacacaacaacaaaacagtatcatcatggaagtgcatcatcttcaaggggttgttgttgataaaagcactgatttcttcccagttgaacaccctatggagccaccagatgaagatcgtcccgtgaaatgcccaatgcccgagtcttcggttatcaatgatgaaaggatgcatgaaaagagatttgcagaaagctcaaagaagagagtggagacaacccgggccgtggtgaatggagaatgaacacc

SEQ ID NO: 8431 - DNA, 376 bp, Glycine max
ggaggtaaaagtggaggagcgagttctggaggaagaggtcaaggtagtgccccgattttacgaggtgttcgtttctgaaatttgtggcacagcaagtgagcgatggggagagcttcaagggataagagggatatctattaccggaaagcaaaagaagaaggttggcgagctcgaagtgcgtttaaactccttcagatagacgaggaattcaacctttttgatggagtgaagcgtgttgtagatttatgtgctgccccaggtagctggagtcaggttttgagtcgtaaattgtatctcccagccaagcttgcacctgatgcaaaggatgaaaatcttcctcttattgtagctattgatttgcaaccaatggctccaa

SEQ ID NO: 8432 - DNA, 482 bp, Glycine max
  unsure (1)..(482): unsure at all n locations
ntccgcccacgcgtccgccaaaaccgaaaagaagaaaaacgctgaaatccccaaaatcgaaaagaagaaaaccaaaagcgctgaaatccctctaaccgatggcaaaacgaagagggatagagaaatcgccaaagaggagaacaagaagaagactaagaaacccaagctcagcaatggcacttcaaaacagcgagacgagggatccaaaaagggagtagcagaaggaaaaggagaagaggggaaaatgaacgtgtttccgatgaatcgcatcagaacgatgattaagggcgaagatcccgatatgcgtgtttctcaggaagcattgttggccatcaacaacgctgtggagaagttccttgagcaattctcgcaggaagcttatgctttttgtgttcgggaccgcaagaaatgcctcagctacgatcacctagcacatgttgtaagtaagcaaaggagatatgactttctctctgattttgttc

SEQ ID NO: 8433 - DNA, 826 bp, Glycine max
ggtcgagcacgcgtccacgacagaagggggatcatagagtaagtgagtgagagaaggagattctgatttgatctctcagatctgagcttaccgtcgccggaatccaactcaacctgggtcggattcttgggtatcatcgcatcgccattcgttttagcctctcaataagagattttagttcgcttcaaattcgaggtttgatttgaagttgaaagttggaatagcttaactgttgtgtaaaacaaccaacacacacgagcatgggaagccaagacaacaacgtagaattgtcatccaattcatttctagcttacaaatctgctaaggtgtttgttgctggtcaccggggtcttgttggctcggccattggtcgcaagctcacccaacttgggttcactaatctagtcttgcgctcccatgccgagcttgatctcactcgacaatctgatgttgaagccttctttgcttatgaaaaacctgaatttgtcattgtagctgcagccaaagttggtggcatccatgccaacaacacctaccctgccgatttcattgccatcaacctccaaatccagaccaatgtcattgattctgcttatcgcaacggtgctaagaaactattgtttttgggttcctcttgtatttaccccaaatatgcaccccaaccgattccggaagatgctttgcttactggacccgttagagccccaccattgaatggtatgccattgccaagattgctggggatcaaaatgtgccaggcttacagaattcagcataagtgggatgcaatttctggaatgcccaccaacttatatggaccatacga

SEQ ID NO: 8434 - DNA, 413 bp, Glycine max
gtgagagaaggagattctgatttgatctcgccttaatctctcacatctgagcttgccggcgtcggggtccaactcaatctgggtcggagtcttaggtatcaccgctccactattagtttaagcctctcaataaaaggtttttatttcgcttcaaattcgaggtttgatttgaagttggaatagcttaacttgttgtgtaaaacagccagcacacacaagcatgggaagccaagacaacaacgtagcattgtcatcaaattcatttttagcttacaaatctgctaaggtgtttgtcgctggccaccgaggtcttgttggctcggccatagttcgcaagctcactcaacttgggttcactaatctgggcttgcactcccatgccgagcttgatctcactcgacaatctgatgttg

SEQ ID NO: 8435 - DNA, 917 bp, Glycine max
gtcagcggttctgggttggagacagagagagagaagttttcagtttcagaaagaaagcaaaagcaatagcaatgggttggatcggtgagactgttgattccatcaaatctcttcagatccgccaggtcctcacccaggctgtgagcctaggcatgattgttacgtctgcactgataatatggaaggcattgatgtgcgttactggcagtgaatctcccgttgttgttgttctttctggaagcatggaacccggattcaagcggggagacatcttgttcttgcacatgagtaaagatcctattcgggcaggggagattgttgtgtttaatgttgatggacgtgagattccaattgttcatcgtgtaattaaggtacatgaaagggaagatactggggaggttgatgttctcacaaaaggagacaacaattatggggatgacaggctactgtatgctcacggtcaactttggctgcaaaggcaccacattatgggtagagccgtcgggttcttaccttacgtaggctgggtgaccatcattatgactgaaaagcctattatcaagtatattctcattggtgctttggggttgctcgtgataacttcgaaagattaaatgatgaatctgaagtcaaaactgcggtctaacctccgatggtagggtgagcagaatataatggtaagattaaatgatgaatctgaagtcattttgtaccatgcatagtatatgggggacactatgatgttaaggatttatgcaaaatagttgaattttggtatattcttacttcttcctactccttgatgagttggtatctgactgaaacccctcttcctttgcattttgagtgaaaccccccttcctttatattttaatttggtgcagtttaagattaagcatataaatcagctgttcctt

SEQ ID NO: 8436 - DNA, 470 bp, Glycine max
gacatttcagcgatgcatgctggtatagcagaagttgctgctgcaaaggctcgcatgtttgttaacaagccagatggaatggttagagaaaagagaggcccatatagtgatccacagcatccttacttttatgaagaagaggatgtgtggatggcacctggcttcattaaccagttttatgaagtccctgattactggaaagtatatgtgcatgaagttgatcaagaaagagaaatgtggttaaactctttttataaagctcctcttaggttacccatgccagctgagctagagcactggtggtcaaaagaggagaatcataagattcctgaatttgtccttattaacaaggaaccggagcctgatcctgaagatccttcaaagcttatatatactgaggatcctctcatcctccatacaccaactggaaatattatcaattatgtccaggatgagaaatatggaatacg

SEQ ID NO: 8437 - DNA, 476 bp, Glycine max
cttttatctcagccacctaaagctagcccccagatctaacgtctaatggtttttgttaactgtgtatggtataataccctataatcacagtcgtgaacaaaggtgaaaaaacaatgtctcactgtgccgcaaggtgtgccacaaggagtgccacgaggcttcttaacctaacgcgcgctctctccacggaggcgcgtgggcaaaagatcgagcgcatcgccacggagcttctcgacctcaacaggttcgagaggcacgatttcacggtcctctggcggctcaagatgggtctgcaccgctacggcgctcctgtggctggcatgacgatgccgtccgtcggggcggctgcccgggctgaggccggtgctgccgcagtcgcggagaagatggcatttgacttgaagttggagaagtatgatgctgctgccaagatcaagatcatcaaggaagtgaggtctttcaccgatttggggttg

SEQ ID NO: 8438 - DNA, 492 bp, Glycine max
agccgagacgaagacgacagaaggggaaaagtagagagaattagcagggtgttattggtgggtgtagaaagtagcaggaaatggctgtgatcccgtgtcactgttaccgtaccgtcggatcagacaaaccctacctctccggtcagagtctccgccgtcgcgctcctttccccgccgtctctgtttcatttcgacgccgaatatcatgcgtcgcctcttctgccatcgctcacaaagttgggctgaaagattttcttcacttagatgattttgataaggacactattctgaagatgctggaccgggcacttgaggtcaaggcattgctgaagtcaggggacaggtcatttcggccttttgaggggaagacaatggcaatgatatttacaaagccgtccatgagaacacgtgtttcgttcgagactggctttacattgttaggtggccatgctatatatttaggacccgatgacatccaaatgggcaagcgag

SEQ ID NO: 8439 - DNA, 775 bp, Glycine max
gaagcactatgttcatatattgacaaggatcgtccatttctgggcatttgtcttggacttcaactactttttgaatctagtgaggagaatggaccagtaaaaggtcttggcttaatacctggaactgttgggcgatttgactcatcaaatggttttagagtaccacatattggctggaatgctttacaaatcaccgaggactcgggaattttggatgatgttggaaatcaccatgtctattttgtgcactcttatcgtgccatgccttcagatgacaacaatgagtggatatcctccaactgtgactatggtgacaaatttatagcatctattagaagaggaaatgtgcatgcagttcaattccatccagagaagagtggacatgttggcctctctattttgggaagattcttgaatccgaagtcagacatggcaaagaagcctggggaaggcaaagcttcaaaacttgcaaaaagggtgattgcttgtctcgatgtgagaacaaatgataagggggaccttgttgtaaccaaaggagaccagtatgatgtaagagaacatacaaaagagaatgaggtaagaactcttggcaagccagttgatcttgctggacagtactataaagatggagctgatgaggtcagctttctaaatattactggatttcgcgacttccctcttggtgatttaccgatgctgcaggtattgcgatacacatcagaaaatgtttttgtacccttaacagttgggggaggaattagagatttcacagatt

SEQ ID NO: 8440 - DNA, 521 bp, Glycine max
ggaagcatagagcggcaaatgcaacacaggaagagaagaaaggaaaagcagcagaaagtgacaaaatcccagtaaagagtgacagtgccagctccctcatgccaaagtcttgtgcttttcacatccccattttcccatttccctttctgcttcctctttcgccaaatgggtctcccataacacaatcttcacctttttcttttttccccttccttccttcttcgcttctcggtggggcttcaagtttcaccataggatgttttctaggttgatacatcctcatgaagggcaggaagacatgcagggtggctccaatcacgctcacctcggagacccttgtcttgttttaacctccgatcccaaacctcgtcttcgttggaccgctgaccttcacgaacgctttgttgatgctgtcactcaacttgggggtgccagtaaagccactccaaaagcgataatgaggaccatgaatgtcaagggtttgacgctctatcatttgaagagtcatcttcagaagtaca

SEQ ID NO: 8441 - DNA, 285 bp, Glycine max
attcccctttctgcttcctctttctttcgccaaatgggtcatcatctccttctcccataacacaatcttcttcaccttttctttcttcttcgcttcccttcggtggggtttcaagtttcaccataggaataggatgttttctaggttgattcatccccatgaaggccaggaagacatgcagggtggttccaaccacgctcacctcggagacccttgtcttgttctcacctctgatcccaaacctcgtcttcgttggaccgctgaccttcacgaacgctttgttga

SEQ ID NO: 8442 - DNA, 537 bp, Glycine max
gattccagcaaagcgcaaagcattctccactacgattcgctcttccagaagcttccagaatcttccagatggcgcgtacaaagcaaactgctcgcaagtccaccggcggcaaggctccccggaagcagctggcgacgaaggccgctcggaagtctgctccggcgaccggcggagtgaagaagccgcacaggttcaggcctggaacagtggccctgagggagatcagaaagtaccagaagagcacggagcttctgatccgaaagcttccgtttcagcgtttggttcgtgaaatcgctcaggatttcaaaacggatctgaggtttcagagcagtcgccgtttcggcgctccaggaagccgctgaggcttacttggtgggtctctttgaagacactaacctttgtgccattcacgctaagagggttaccattatgcccaaggatattcaactcgccagaagaattagaggcgagagggcttagttaaataattcactttggtttggggtttaagtgtctttgttttaacgccttgtgtgt

SEQ ID NO: 8443 - DNA, 332 bp, Glycine max
tgaaagcccagttttgagagggtaatatttgagaattgagggaaccttgttagaacttagaagggacattttctgggcaaaggtggttaataatgttgataaggattgaggtaagttaatccatccaaagggtgagggagttaacaggaagagacaggacaaaggctgggaacaggcagggcacgaatggagctatcaacagaaaatggtaaagtgagaatgaaaggagagagagagagagagatctgttgtggctacgctcatgcactgcctcttccctggctctgtctctttcctattccaactccatttccctctctaattatttattt

SEQ ID NO: 8444 - DNA, 478 bp, Glycine max
ggctcaagagtgatctgaaagcccagttttgagagggtaatatttgagaattgagggaaccttgttagaacttagaagggacattttctgggcaaaggtggttaataatgttgataaggattgaggatacagattttgccacacttcaatatgcggttcagaagccttctgacaacggtgtgtgaagcaagaattatcaaccaaggttcctgcaagctatgtgacattttagattccaatgcacataaaatttatgtatataaagatggacactgaaatcaaatcaggcatttcatttagtcctttgtactgtatactagtagtatgttgctggccatcatttgttgaaaacttaaaatggttgaaattgttaaagggttgacaaatggtataaaaaaaaaaaataattaattaaaaaaaaataaaaataaaataaaaaaaaaaaaaagggcggtcggcctttttttttttttttttt

SEQ ID NO: 8445 - DNA, 395 bp, Glycine max
caagcacgattctagtcacaatatatcttttatgatggacaggatacagattttgccacactggaggatgcggttcataagccttctgacaacggtgtgtgaagcaagaattatcaaccaaggttcctgcaagctatgtgacattttagattccaatgcacataaaatttatgtatataaagatggacactgaaatcaaatcaggcatttcatttagtcctttgtactgtatactagtagtatgttgctggccatcatttgttgaaaacttaaaatgttagaaatagtaaaagggtgacaaattgtaataatgtatttatcaaacatttaatcagctcgtttgaattcacgatttgatgtggtatgagatgaactaattaatttttttttctaaa

SEQ ID NO: 8446 - DNA, 359 bp, Glycine max
  unsure (1)..(359): unsure at all n locations
ggaacttgtaaaataaaatttgcatcatatagagtcatatatagcttgcgctgcgcagttattttgaacctttttttaatatgtgtaattcatatatggggttggactagcttatgctataagataattattctgggggactgactgaactatttactttatggtaacgaagatattctcctggattattttaattggtttcatggtcaccctttctatcctcccctactttttcatctaatctaaagctggctcctgcttctgcttctgccattcttcttcattattctctgcactaatttaagagcatgatacacgatgcaggtccctataanggagggtttctcatgcatgtgact

SEQ ID NO: 8447 - DNA, 563 bp, Glycine max
gacctttcacctttgacatacaacagctgcagagtgaaacgatgccgtgcctcaacctctccaccaacgttaacctagacggcgtcgacacctcttccattctctccgaagccacctcaactgtcgccagcatcatcggcaaacccgaggcctatgtgatgattgtattgaaaggatcagtgcctatatctcatggtgggagtgagcagccagcagcttacggtgaattggtgtccattggtggtcttagccctgacgtgaacgagaaactcagtgctggcattgcttcaattctcgaaaacaagttgtctgtgccgaagtcgcgattctacttgaagttttatgacaccaagggttccaactttggatggaatggatctacattctgaattccgagttatcttggtaacgatgccatggatgtcggatgaactcgtgattctgttttagaactttttttatctgtaaaaagtactctgaatttcatatacccccttttgaggacattatgccatcgtaattggattatgttcaaggacaactgttggtcgtataaaaaaaaa

SEQ ID NO: 8448 - DNA, 397 bp, Glycine max
acctacattgtacattttttatgcaacaccaaaacacgaaaacaaacttccactgccgtaataaaaacattatctgccagcgagggtttttttaataaaaattgcgcaatgtcagctgaaaaatatcagtcgcggtgaataatatttttttgccgtgttgggctaatgttttcctggccgaataaatgggaacatgccagtttcggccgtaacaaaacgtcggttgagctcgcacaaaaaaacctagccgacctacattgttcattttttatgcatcaccaaaacaagaaaacttcctctgccgtaaaaaaaacattatctgccggcgagcgtttttaaataaaaattgcgcaacgtcggctgagaaatatcagtcgcggctatttcacgaccgatg

SEQ ID NO: 8449 - DNA, 380 bp, Glycine max
ggaaagcgcatttactagtgtttaccaactccctcacgcccccaaggccaagaaaagaaaacacacacttttttagccttccctctctctctctctttctcttctccattctccattttttttttcttcttatcacgcgtttgtgaccacaaccaagtacgaaagttgagatttttagcatacccatttccacacaatgtccaacaagtccccagttttccccatcccagacccccaacacttcagcgactatggatttgaccctcaaatcaactatttccaggtgttggaagaagccatgaagcacaagcgcgagacagcgagatccatagactccatccacttcaagctccagaagcccatatccaaggacgactcac

SEQ ID NO: 8450 - DNA, 1497 bp, Glycine max
gaatacaatttccattgctcatcatcattattattcgtgcagaaatttcccgaaggaggaggaggttctgatcttctttcttttttgtctggttccctttcttccttcaaccaatttcgagatccgaaaccggcatcagatccgatccgaaatgtacggattcgaagctctcaccttcaacatccacggcggcttcctagaggccatcgtccgcggccaccgcgccggcctcctcaccaccgccgattacaacaacctctgccaatgcgaaaccctcgacgacatcaagatgcacctctccgccaccgagtacggtccttacctccaaaacgagccttctccattgcataccacaacgattgtggagaagtgtactcttaagctggttgatgattacaagaacatgttatgccaagccacggaacccttgtcaacctttttagagtatatcacatatggtcacatgatagacaatgttgttttgattgttactggcaccttgcatgagagagatgttcaagaattactagaaaaatgccatccactcggcatgtttgacagtattgctactctggctgttgctcagaatatgcgggagctttacaggctggttcttgttgacactcctctggctccatacttctctgagtgcattacatcagaggacttggatgatatgaacattgaaataatgaggaacactctttacaaggcataccttgaagacttctatagattttgtcagaaacttggtggtgccacagctgagataatgtctgaccttctagcttttgaggctgatagaagggctgtgaatattaccataaatagcattggtactgagcttaccagagatgaccgtagaaaattgtactctaattttggtttgctatacccatatggtcatgaggaacttgctgtctgcgaggacattgatcaggttcgtgctgttatggaaaaatatcccccctatcaatctatttttgctaagctatcatatggagagagccagatgcttgacaaggcattctacgaggaggaggtgaaaaggctttgcttggcttttgagcaacagtttcattatgctgtgttcttcgcatatatgaggttaagggaacaggagatcaggaacttaatgtggatttcagaatgtgttgctcagaatcagaagtccagagttcatgacagtgttgtcttcatattttagttggatggctcgttatagtttgtatgttcgttgggacaatttgtatactttctgcattctccatctgagttgttgattggtagacactagacagacactgttcagaagattgagataaaaatgattaatcttatgctgataagatcttctgtaatatgaaaggaagatttttttagtcaaatttgattgaaatatgttcagttttaaagatgttaagattcaatttgtatgttgtgacttttgcagtaaatatttctatggaataaacttgctagctggatttacgtatc

SEQ ID NO: 8451 - DNA, 992 bp, Glycine max
cgtatttacaaatactatagtaatagtaatatgctttgatttcttctttattttattgaatggatcaaaatcaaaagttgattgttccaagacgcggctgcgtcggtctctctcggtttcaactgtgaactgtgagctggtaatggtttcataaatctcactgcatccatggcttcggagaagatttcctcgattctcttgttttctgctgtaattttgcttgtccgtgatgctccttctgccatagctggggacatagttcacgacgacgattcaactcccaaaaagcccggttgcgagaaccagttcgttctggtaaaagtgcaaacttgggtcaatggtgtcgaggatgttgaatttgttggtgtgggtgccagatttggcagagctattgtgtccaaagagaaaaatgcaaagcacacgcgccttattctttcagatcctcgggattgttgtattccgccaaagaataagattgtgggagatgtcatcatggtggatcgaggcaactgcacattcacaaaaaaagcaaatattgcacagaatgctaatgcttcggccatcctcatcataaataaccaaaaagaactgtacaagatggtttgcgaacctgatgaaactgatttgaacatacacatacctgctgtcatgcttccactagatgcaggtacaaggctggaaaaaatgctgacaactacttcatctgtgtctgtgcagctgtactcgccacttcgaccagctgttgacgtagcagaagtatttctttggatgatggcagttcttaccatattgtgtgcatcatattggtcagcttggacgacccgagaagcagctattgaacaggataagttgctaaaggatgcttcagatgaactcccaaacactaaatatgctagtgttagtggagttgtaaatatgaatgtgaaagctgcagtcctttttgttgtatttgcttcgtgtttcctgtttatgctttacaaactgatgtcgtc

SEQ ID NO: 8452 - DNA, 667 bp, Glycine max
cccaaaacaagcatggcagcaacagaaaaggggctttcaactgccttgaatcatggctatggaacggatatgggacaaaatccttcctttgcttcttcctcaaaattaccgtcttattacgtttgattggccttttgctggaactgtgaaggatcagagcctctatgaccctcacaagtattcctctgtggaagcttttgctgatgacttgatcactctgctgaatgagatggacctcaaagctgtcacttttgttggccactccatgtcgggcatcattggttgcattgcctctgtcaaaagacctcaactcttcaagacccttattctcgttggtgcttccccaaggtttctaaattcagatgattatgagggaggctttaacagctcagatattgagcaattgctctcaaacataggaaccaactatgaaaactttgcttctggcttcgcctcattaatagcggatccaactaatgaagacactgtggacaaatatgagaagtgcttgaagagaatgcaaggtgaagttgctctgtccttggccaagaccatattctattctgattggagagagatacttgacaaggtggagactccatgcactatcattcagaccaaaaaggatgcagctgtgccacacaacgtagcgctctacatgaaggcc

SEQ ID NO: 8453 - DNA, 407 bp, Glycine max
cccaaaacttgcttggctgcaactgaaaaggggcttgccacgtgccttgtatcatggctatgggacataatccttcctttgctcctccctcaatattaccgtcttattacgtgtgattggcctttggctggaactgtgaaggatcagaatctctatgaccctgtcaagtattcctctgtggaaggctttgctgatgacttgatcactctgctgaataaaatggacctcaaagctgccacttttgttggtcatctccatgtccggcatgattggctgcatggcttcttggtcaaaagccctcaactcttcaagaccctcattctcgttggtgcttccccaagttatcatcttattcttttatttcttaaacttttacttattagtttgttttgttacccttgctttga

SEQ ID NO: 8454 - DNA, 291 bp, Glycine max
gtagtctctcaagtcccaacctgcttcttattgaagtacccaaagcatgtctacaaccgaaaaggggctttcaagtgctttgaatgccagaatcgaagggtgcggcactgaaactatagtgtttgctcatggctatggaacggaccagtcgatatgggacaaaatacatcctttggttcttgctttaaattaccgtcttgttacgtttgattgggcttttgctggaactgtgaaggatcagagcctctatgaccctcacaagtattcctctgtggaagcttttgctgatga

SEQ ID NO: 8455 - DNA, 373 bp, Glycine max
gaagtctcatctaatctataccccgtctaaatctccgagtggttgacaccgatcgaagtagcagcacacagaaaatgggccctcgagaggtgtacgaggagaaactaaggaccggaaatctccaccacgattccaacatcaaccctggcctcggttccgctcgatgccctcgctgtctctctcccctcaaacctaaatttcaaagaaggcaattgaacaacaatcccgttctgcaagaagccaatggcgtccctgggttcgggattggtggtatgcttggttttgttcatggtttcaatacaggtttacctcctcttcaaaatggtctgaagggaccgaagtggcttccttttgttgttgggattcctccaat

SEQ ID NO: 8456 - DNA, 397 bp, Glycine max
gaagtctcatctaatctataccccgtctaaatctccgagtggttgacaccgatcgaagtagcagcacacagaaaatgggcactcgagaggtgtacgaagagaaactaaggaccggaaatctccaccacgatcccaccatcaaccctggcctcggttccgctcgatgccctcgctgtctctctctcctcaaccctaatttcgaaagaggcgagtggaccatcactcccgtcttgcacgacgccactgccgtcgctgggtcggggattggtggtatgcttggttttgttcatggtttcaatacaggtttacctcttcttcaaaatggtctgaagggaccgaagtggcttccttttgttgttgggattcctccattgttgatattctccggcctaagtgc

SEQ ID NO: 8457 - DNA, 489 bp, Glycine max
gaagtctcatctaatctataccccgtctaaatctccgagtggttgacaccgatcgaagtagcagcacacagaaaatgggcactcgagaggtgtacgaagagaaactaaaggaccggaaatccccaccacgatcccaccatcaaccctggcctccggtccgctccatgccctcgctgtctcctctcccctcaaccctaatttcgtctgtctctctctcctcaaccctaatttcgaaagaggcgagtggaccatcactcccgtcttgcacgacgccactgccgtcgctgggtcggggattggtggtatgcttggttttgttcatggtttcaatacaggtttacctcttcttcaaaatggtctgaagggaccgaagtggcttccttttgttgttgggattcctccattgttgatattctccggcctaagtgcagcatttggaggttatgtgcttccaaagttcactcaacttaccgtaacatcctactatgc

SEQ ID NO: 8458 - DNA, 704 bp, Glycine max
ctactgcactctctctctcctcctctgtgctcttgctcttctgtcacccaccgctcttttaattccacatgaaaccgttgaccgtttttcaactctcactaccttcataagggaacactccaattctccacctccacaacatacccttttgagttttgattctctctcctcacatagctaggtggtattgaatattgggagggtcaaagtttgtgaaggaacttgaagaagtaaatgcatggatcgaggggaccaaatgacatttcctggctctgcatcttactatatgcagagaggaatacctggtgctggaaaccaacctgtactgcacaattcacctaatattggaccgttgtctaacccgaatctaccgtgtcaatcaagcattgggggtggtggtaccattggatccacattacccttagagtcgtcgggaatttcagctccatgtgtcaatgtgagtgctccttctggggctgtgcctggggaaactgtcaaaagaaagagaggaaggcctagaaaatatgggcccgatggagctgtgtcgttggcattgactccgacaccggctagtcatcctggagccttggcacaaggccagaaacggggcagagggcgcccgcctgggtctgggaagaaacagcagttggcttctcttggtgaattgatgtctggttcagctgggatgggtttcactcctcata

SEQ ID NO: 8459 - DNA, 534 bp, Glycine max
agaaacagctggggaaagcgagggcaagttggaaatagacccacccaaaatcgcatccgaaattcctaacagaagagaaaaggaaagcatacattcacatttcacacacacacacatactactctctctctctctctctctctgatggattcgagggagtaaaagcaagaaagcaagcatttggatttggattgagatccgcaatggcaccgaacaacaacagaaccaagggatcccatttccctcttctcgctttcctctttctctgcctcctcgcgccccttctcttcttcttcttcgcatcgccccttcacgatcgaagtgataattcagctgtttcgattgaaaaggttgccaaattgaaagaatggcaggcactgcaggatcttaaatcgcttttttcgaaagaggttcttgatgttattgtgtccaatacaaatgatgtggggcctttgagtcttgagagtttcagaaaaaataatctgtctgcttcatggagagttgctggattaaggacttcaaatgctatgaatc

SEQ ID NO: 8460 - DNA, 582 bp, Glycine max
attctgagcaatttattcatttatttttgttacggtaaatagcgtttcgttaacttactcagtcctctatgacggtgtgcgtgcgcaaaccctaacctagttcttctatatcggcacctctatcccctgaaccctgttccatcttccaaccatggcgaaccaagacttcgaagagcgctcgcagcaaccgcaggagctagggtacgacccgaactttgtccccgactcggtaaaatcttttgtggttcacctgtaccgtcacatccgtgaaaagaacgtgtacgagatccaccagatgtacgagagctccttccagaccctctcggagcgtctcttcaaggataccccgtggccctccgtggacgccgtcgcgcactacgtcgacaacgaccacgtcttctgcctcctctaccgcgagatgtggttccgccacctctacgctcgtctcactccgacgctccgccagcgcatcgactcgtgggacaactactgcagcctcttccaggttgtcctccacggcgtcgtcaacatgcagctccccaaccagtggctatgggacatggtcgacgagttcgtctacca

SEQ ID NO: 8461 - DNA, 354 bp, Glycine max
agtgtagaatcggatctgaagctctttactaggattggaacaagcgaggaacgagtgaccacaagctccgcttaagcgctcgacatttagcttaaaacatgttcatcatgtggccgagcgaagcgcacctgcgtgaagcagcctagcatcactttagataggagcagaatggatgacttacaactgaaagttcttcggatcgatatatcgtacgacgtaatggagatcttgggctacgtccggtgggtcgcagaattccggacctaacgatgttcgattcgtcacatgaacgggagcggacgattccctcgtcgcgcccgttttcggggaatggctgcattcacaggcaagtga

SEQ ID NO: 8462 - DNA, 706 bp, Glycine max
gactaccagggctgcagcttcgaatgcattgcggcaacaaagatttgttcgagaagtcacaatacagtacaatctctgcaatgagccatggataaaatatagtataagcactgtcgcggacaagggtttaaaaaagccactctacacatctgctcgtttgaagaagggagaagttttgtatttggagacacatttgtccagatatgaactttgttttactggagagaagatggtcaaggttacaccagcaacccagttgcatgaccccgtcacagaaaagtctcaaaatcaccacccacattctacaaatggtgaaaaaaatgattgtgagaatgtcatgattgatgcattcaggtggtctcgttgtaagaagcctctgccacagaaactgatgcgtacaattggcatccctttgcctattgaacatatagagttactggaggaaaatttggactgggaagatgtgcaatggtcgcaaacaggtgtttggattgctggaaaggaatataccttggcacgagtgcatttcttgtcaatgaattaacttttttgttattttgggggatggaggagttagtttataaaacacttgtgtttttttaggcaagatggtgaaatgatatacttggaaagatgttgtctcatgtaacaaaaagataatttatgggggccttggaaaattggtctccaataaacaataaaatat

SEQ ID NO: 8463 - DNA, 405 bp, Glycine max
gggaggcatggattcgttaccacctgcaaaacggcgtcgtgagagcaaagacggcgagactgaagcttcaacgttgtcaccggttgtgatcttcgctcacggtgccggtgctccttcctcttctgattggatgcaaagatggaagaacatgataaaggaggcactgcgcgctgtcgatgttgtcacttttgactatccttacatgtctgcgaaaaagaaggccccttcctaaggcggaaaaactggtggagtttcactcaaattttgtcaaggaaactgcaactaagtaccctggtcatcccctgatacttgcaggcaaatcaatgggttcaagagttggctgcatggtgggctagcatgaaagacatttaatgtttctgctgtagtatgcttgggctacccaat

SEQ ID NO: 8464 - DNA, 2116 bp, Glycine max
gacacaacaaacacaaacacaatcgtcaattaaaacaacatcagtatcgaagctgcacaaattaatatccaacactctcaagctttccactttcaaactctgcccgctcaatttgctttatctttccgagatttatatacacttttattgaaactgttgggattcaagtctgaaacaaaatcttaagaagtttgcggcagctgatgccatcatcttttagtatggattcgcaacagctcttcagtttcgaattaccttacatgtcatctttacccaccgttccatcgcttcttggatccttgaaatatgacacaggaaactcacctaattcacccttctccacttattttgattctgacactctttcggcattgagtgacggccaggagcaatacagccctggagaaatcctctctggtgtcagcccctcttgtaactcttctctggaaaccaaccattatatgtatagatcagtctccactttggacagtttcccattatattctgataggaactctcttctacagactatgagttctaatcagaaaatccaacatgctttgctggagctagaaactgctctgatggcacctgatgacgatcaagttaacacaccgaatacattggccgagagcagcaggccaatggcatcaggccagagatccaggtcctggagcaatgagaaccatgtgtcacaatatactcaaactcagccatcatatgcaactgccaatatgcagtcaagtgaagttgtgcacgtagagaaacggcaaaagttgatggtagaagaagcaacgctgctagctttcccaccaaacaatttgaagcagttgctgattgcatgtgccaaagccctgtctgaaaacaacacgaatgattttgatcaattggtaggaagggctaaagatgctgtgtccatcaatggggagccaatccagcggcttggtgcttacatggtagaagggcttgttgcaaggacgcaagcatcggggaatagcatctatcatgcccttaggtgcaaagagcctgaaggtgatgagttgctcacttacatgcaactgctgttcgaaatctgcccctacttaaaatttggttacatggctgccaatggagccattgcgcaagcatgcagaaacgaggatcgcatacacatcatagacttccaaattgctcagggaactcaatggatgactcttcttcaagcgcttgccgcaagacctggcggtgctccccatgtgcggatcacagggattgatgatcctgtttccaaatatgctcgtggcgacggaccagaagttgttgggaaaaggttggccttgatgtctgagaaatttggcatcccagttgagtttcatggagttcctgtttttgctccaaatgtgacaagggaaatgcttgatatcaggccaggagaggccttggctgtgaattttcccttgcaactccatcacacagctgatgagagtgttcatgtgagcaacccaagggatggacttctgagattggtaaggtcactttctcccaaggtgaccacactggtggagcaggaatcaaacacaaacacaacccctttcttcaacaggttcattgaaaccttggattactacttggcaatctttgagtccattgatgtcaccctcccaagagatagcaaggagaggattaatgtggagcaacattgtctggccagggatattgtgaatatcattgcttgtgaaggcaaggaaagggttgagagacatgaactgttcggcaagtggaagtcgaggttaacgatggccggcttccgtcagtgtcctttgagttcttatgtgaattctgtcataagaagccttttgatgtgctattcagaacactatacactggtggagaaggatggagccatgttgttggggtggaaggacagaaatttgatatcagcttcagcatggcattgctaaaaacatagatagtaggaaatactgtgtagtggtaatagaaataccatgatgatgggaagccaaatgggatttgggagggtttaacatgtagctgattaaggtttatgttcattgccattgctctcatctcatgccctggtagtatattgattcttttataaaatgtcatttatgtt

SEQ ID NO: 8465 - DNA, 981 bp, Glycine max
tgattgtgttattatgaaaatactcatatgtgcttgtctatgttgtcattgcagagttatatatacttttattgaaattgttgcggttcaagtctgaactaaaacattaagtttgcggaggctggtgcttttctgatttgccagtcaaattattaaatcacttgttcacatagatcagctgatgccatcatcttagtatggattcacaacagctcttcagtttcggtggtgttactagtgcaggattaccttacatgtcttcttttcccactgttccatcgctacccaacagtctacttagatccttgaaatatgacacaggaaactcacctaattcacccttttccacttattttgattctgatactctttcagcattgagtgacggccaggagcaatacagcccaggagaaatcctctctggtgtcagctcttcactggaaaccaaccattatatgtataatagatcaatctccactttggacagtttcccattatattctgatcggaactctcttctacagaatgcgagttctaatcagaaaatccaacatgctttgctggagctagaaactgctttgatggccccggatgacgatcaagttaccacaccgaatacattggccgagagacacaggtcctggaacaatgagaaccatgtgtcacaacataatactcaagctcagccatcatatgctaccggcaataggcagtcaagtgaagttgtgcatgtagagaaacggcaaaagttgatggaagaagaagcaacactggaagctttcccaccaaacaatttgaagcaattgctgattgcatgtgccaaagccctgtctgaaaacaacatgaatgattttgatcaattggtaggaagggctaaagatgctgtgtccatcaatggggagccaatccagcggcttggtgcttacatggtagaagggcttgttgcaaggacgcaagcatcggggaatagcatctatcatg

SEQ ID NO: 8466 - DNA, 1034 bp, Glycine max
caggaaactccaactcatttgtttttacacctttctggctccattggctttcgccaaagtccatatccatctatatatatttgcacaattgttcaactatccttatctctctctctctctctctcaccactaagtttattagtattattatcactagctacctgctatcaaagcatcacaaatggcttctacagacaagcctggcggcgaccctgaatacagaacatcttcaactccagctcctgctggtgttgattactttaaatttgatgtcatcctaaggtttctattgtttgcagcatcactggtagctgttgtggtgatcgtcactgctaatcaaacagaggttattcgtgttccacagcctgtgccatggccagccaagttcagatactcaccagcctttgtttattttgtagctgcattgtccgttactggcctctacagtatcattacaacacttgcatcactctttgccagtaacaagccagccctcaaaaccaagttgctcctctactttatcttatgggatgcgctgatattggggataatagcctcagcaacaggcacagctgggggtgtagcatatttgggtttgaagggaaacagacacgtggtgggttggaataaaatttgccatgtttacgacaagttctgtaggcatgttggtgcctccatagcagtggctttgtttggaagcgttgtgacagtcttgctcatttggctttcagcttacagcattcatagccgagtccccaagtagatggaaggaacatggatcatgcattctgcatatttatgcatacatcttcatttattgtttataaagttagtgtgctcagtaattgttaagagtgtgtagatgacttaatgtgttgcttcagttgtgttgactgttttttgtaaatcagtgttttcccctccaaggacctaatttgtacttttttacatgacattcgtgccataaattgaaatttttaattatatatgttcccacaaaaataatattgaataccatgttattgatgcattaa

SEQ ID NO: 8467 - DNA, 445 bp, Glycine max
cccacgcgtccgagctgcacaaattaatatccaacactctcaagctttccactttcaaactctgctcgctcaatttgctttatctttccgaggtaatttcttttactttctttctgaactcaaataaatttctaatgaataccccatcctctcatatctctatgtatctgttttccctttctttgcattccatcttccaacgtcggtgcttgtctgaattaaacatatttctctgtatctgttttctgtctttttcttttttaatattcctgtttgtgttaattttcaatgtttcagagtcttgctttttcttcttcttttatcggatttttttaatagaaagattacatcatggatttttttaaaattataatctcattgatattgattgaacaatttttttgtttcataataatttggtttggatgtgatgtaacttgggttt

SEQ ID NO: 8468 - DNA, 479 bp, Glycine max
cccacgcgtccgaacccccaaaaacactctgacacaacaaacacaaacacaatcgtcaattaaaacaacaacaatatcgaagctgcacaaattaatatccaacactctcaagctttcgagtttcaaactctgggcgctgaatttggttcatttttctaagagttatatatacttttattgaaattgttgcggttcaagtctgaactaaaacattaagtttgcggaggctggtgcttttctgatttgccagtcaaattattaaatcacttgttcacatagatcagctgatgccatcatcttagtatggattcacaacagctcttcagtttcggtggtgttactagtgcaggattaccttacatgtcttcttttcccactgttccatcgctacccaacagtctacttagatccttgaaatatgacacaggaaactcacctaattcacccttttccacttattttgattctgatactctttc

SEQ ID NO: 8469 - DNA, 715 bp, Glycine max
cccacgcgtccgcttttgatgtgctattcagaacactatacactggtggagaaggatggagccatgttgttggggtggaaggacagaaatttgatatcagcttcagcatggcattgctaaaaacatagatagtaggaaatactgtgtagtggtaatagaaataccatgatgatgggaagccaaatggtatttgggagggtttaacatgtagctgattaacgttttcgttcggggcccgctgatattggggataatagcctcagcaacaggcacagctgggggtgtagcatatttgggtttgaagggaaacagccatgtggtgggttggaataaaatttgccatgtttacgataagttctgtaggcatgttggtgcctccatagcagtggctttgtttggaagcattggcacaagcctggctcatttggctttcagcatacagcattcatagccgagtccccaagcagatggaaggaacatggatcacgcattcacccatcttcatttattgcttataaagtgagcgtgctcagtaattcagtaattgttaagagtgtgtatatggtttaatgtagtgcttcagttgtgttaattattttttgtaaaacagtgttttcccctccaagtacatcagttgtattttattacatgacattggtgacataaattgaaatttttacttacccctgttcccccaaaaataatattggatacc

SEQ ID NO: 8470 - DNA, 560 bp, Glycine max
atggatttaaccccaagtccatatcaatctatatatatttgcagaatatcattgttttgttcaactatccttatctgttatatctcaccactaagtttattattatcaaaaccaaaagctagcaagctaccttgcaaagcaacacatggcttctacagacaagcatggcgacactgaatacagaacatcatcttcaactccagctcctgcgggtgttgattactttaaatttgatgttatcctaaggtttgtgttatttgcagcatcactggtagctgttgtggtgatcgtcactggtaatcaaacagaggttattcttgtgccacagcctgtgccatggccagccaagttcagatacacaccagcctttgtgtattttgtagctgcattgtccgttactggcctctacagtatcattacaacacttgcatcactctttgccagtaacaagccagccctcaaaaccaagttgctcctctactttatcttatgggatgcggtaattaatccaataaatcattctttttcaccatgctattcatcttctcttctcaaactaa

SEQ ID NO: 8471 - DNA, 396 bp, Glycine max
ggttctgagaattcgaatctaggatttgtttgagcgttcgcgaaggatcatggtggggttcagaaacagatacatggttatggaggtttttctgaaccctaatagggacaaaggtggggatgattctgttatagttacacagtttaatgtctccaaagctgtaagagacagcatattggtgaattttggggagtgtggtttggcttcgtcattgggatcgtttcaggttaagtacgtgaatccaatcactaatgtgtgtataattagggcttcaagggagcagtatcacagagtatgggccgccattacaggggtcacaaatattggaaactgcccggtcatgtttaacttgctgggaaatttttatcttgaagtataagggcttgtaaaaatgct

SEQ ID NO: 8472 - DNA, 488 bp, Glycine max
cccacgcgtccgcccacgcgttcggacgaagttgcatcttatctgcaacactccgtatccacttcgctggtaataagagaagagaagagagagagagagagagagagggcgtggagaatgttaagtctctcagttgcttctccttcttcttcaaccatttcctttctcccaaagccattcaatggcattcagctccgtcgctctgccacatgctccattccacccacgaaatgcagcgcttcggtgccagtggtgatgatgtctaaaaggacggaggaattgaaggaaattagacaaatgaccaccgaacaaattaacgaagaggttgtcgaccttaagggcgagcttgtcatgcttcgccttcagaaatcggctcgcaacgagttcaagtccagcgaattcggtcgcatgcgcaagaggattgctcgcatgcttactgtgaagcgggaaagagaaattgaggagggtatcaataagaggttgtccag

SEQ ID NO: 8473 - DNA, 420 bp, Glycine max
caacaacatcgccttcacggttcatttcacaactcggagttgctgttgttcatcattctcttctcttcactggcacttgatagatccctctctcgcagcttccattcgtaatccagattctctttgatcggatgcatcttctgggttttgaacctgttactcctcatcaacattatttgtagagggaaaggaggtgtcctttcagtttgaacagctttagattctcaaacaattaaggaaatcagttatggctccttctaggaaatctagaagtgtaaataagaggttttctactgttcgtgaggctgcatctagtaaagacaaaattacagagaatgctagcaaaaataggctgaagaagagaaaattggctgacatgttagggccacaatggaataaggaggagcttgagcctttcta

SEQ ID NO: 8474 - DNA, 587 bp, Glycine max
cccacgcgtccgcccactcttccgcttcctcttcctcttcctctgtgaatagggtttctgctttttttaacaacaatttcgaatcgattcgattgggtctctcaaagttttgattgcacagtttgcgaagatgcctcgtcccaaaagaaaagctgccccaccaatcacttcctctgatgttgattcttctcttcgcaccgaaccaaagaaatcaactacaaagcaatttgatcgaatagataacttatttgagtcatatgcaaataagtcattgggtttaattgacccagacgggattgaagcactttgtaaagatgtgcatgtggaccacacagatgttagaatgctcatacttgcttggaaattgaaagctgaaaaacaaggttatttttccaaggatgactggcgaacagggctcaaatgtttaggggctgacactcttccaaaattaagaaaggctattaatggactgaagaaagaggtgacggtaccagagtgctttgaggatttttattcctatgcatttcaatactgtttaacagaagaaaagcaaaggagtatagatattgagaccatctgtgagctgt

SEQ ID NO: 8475 - DNA, 503 bp, Glycine max
gggctactgtcaatagacaaaagggggaagatgaacttgattgacgtgtgttaatgcagagagagatatttcattgttgttcaaagtctttggtgcacttaaaagagaccagatacaagtgaaagtggatgatgaagtggaggagtatgagacaatagtggagtggggtacaactttctgtttcagattgagaatttcttctaagcttttaagtacatacatgtacatgcacagcacagcttttgcaatctgataggtagatgcccctttgggaaatagttgccgttgattgagaaaaggctgtagaccaatcctgttgttgaaggtaagtgcgactctaagcaagccttgatcgatagtagaaaacaatgaagaacttatgtgagaatggctctggtcctacccatttaacatcttatgctcttggatgctcatcatgggggacttcctctgaatctgatgtgcaacaatcatccatgttcaaaagtttgagcttgaaaatg

SEQ ID NO: 8476 - DNA, 281 bp, Glycine max
gatatgtttatataatttcaaagaccccatattcatgcgggtgctttgcatattatggttgctattaataattgcaacagcaatctggtaggtcgatgcccctttgggaaatagtcgccgttgattgagaaaaggctgtagaccaatcctgttgttgaaggttagtgccactcgaagcaagccttgatcgatagtagtaaacaatgaagaacttatgtgagaatggctcttgtcctacccatttaacatcttatgctcttggatgctcatcatgggggact

SEQ ID NO: 8477 - DNA, 307 bp, Glycine max
gagactcgcagaaaaggtctttcttttgatcaatggaggaaagaggagaatgctctgcttcagcttcagcttcagccaatccctcagatgaaatctgggccaagcttgttctgtcagatgagagatattcagatgtgcagataagttcagatgaaaaagtaatatcttcagagatatcagctacttctaatgaccaacatagctggtgcaaaatagtaaggaatcctgatctatgttcagccacaatggaaaacaaccgtcaaaacccaatacttggtgatggggtcaaggtacacagtgatgatac

SEQ ID NO: 8478 - DNA, 346 bp, Glycine max
aagttaatcgaagaagggtaaaatcagcaattctatctcctggatctgcatcatctgtccgtcaatctcctcgtttgaaggtcaggaaatgaagcggtgtgggggatgctcacctgctcggtaccttattttgatgagacatgctggttcatgtaaggaattaattgctaactaattgacatgtaaattaagacatacccaggttccagatgtctgaacctgtagataatagaccagaagatccctacattttttgtgtatggtccaggtgagatttgccgcgtagtttattttggttgttgccattgctgatatactggtattgttcaataaaacatcattcaat

SEQ ID NO: 8479 - DNA, 502 bp, Glycine max
gaatgcaaacccacccaccattttgtgcttctttctgtgtgcaagaaaggtaaaagctttcacacaccaagaaaagtagccatggctgcttgctcaagaacttctcttttgctccttttctttctctttggattctccgcagctaaggaactattggttggaggcaaaatagatgcttggaagattccatcttctgaatcagattccctcaatcaatgggctgaaaggtctcgtttcagagtcggcgatcatcttgtgtggaaatatgagaatgggaaggactcagtgttggaagtaacaagggaagattatgccaattgcagcacatccaagcccatcaaagagtacaatgatggaaacactaaggtgaagcttgaacatcctggtccattttacttcatcagtggatcaaaggggcactgtgagaaggggcaaaagttgattgtggtggtaatgtctccaaggcacacattcactgccattatttctccagcaccaacac

SEQ ID NO: 8480 - DNA, 276 bp, Glycine max
ctttgtgcttgtgtgtgcaagaaaggtaaaagctttcacacacccttttcacttctcaaaaaacaaaaggccatggctggttcctctgcttctcttttgttccttttccttctctttggattctcagcagctaaggagctattggttggaggcaaaatagatgcttggaagattccatcttctgaatcagataccctcaatcaatgggctgaaaggtctcgtttcagagtgggcgatcatctagtgtggaaatatgagatgggaaggactcagtgt

SEQ ID NO: 8481 - DNA, 566 bp, Glycine max
tacaaacaaacaaaaaaaattgtaaaaaagaataagcaaaacctcagtaaggcaaaaccccttggtactgtttgattcttgacgatgtccgccgccaggtgtttgctgcgctccgccgtctcccgagctgccggtgcggcaaatctggctgccggagctagaccgaggccggcacgatctccgtttcggctcccaaagcaaacctcaatctccaatcgcgttttcaggttaccggtggaagcgagcttctgcgtggaatcgatgcttccttatcacagtgctactgcttctgcattgctgaattcgatgctctctgtgtctcgccactcctatggttggacccctgaagggcaagagaaggctagatgaagatcaagcatcaaagatggtgtctcatggatttgtttcaaattttgggttttgaagctttgagaacttgacctctgtagattagggagagcatggaatttctaaattgattgtataatgagatactgaaaaccatacctcatgaaaactagtttggggctatggtgcaattcaatgctatttctaagtagttcccc

SEQ ID NO: 8482 - DNA, 398 bp, Glycine max
  unsure (1)..(398): unsure at all n locations
aggccccaactagttgggtcaagaggtaacccacgtcctaaccaagggtaggactgaccgtgtatacatgtttaaaagtatctctaccttaagacttctaacatggccgattctagatagagagcgcggtaaccctactctacaaaaagtggaaaatctcttcatagggtactgtagctgtacagccatagtaccatagggatggtgagagttcatcagagcccgaattgatataggttaaatatccttactcaaattacgaaccctgaacctctttgcgaattcggctgaaccttgatgggaaatctgagatttctgataggaaatagaaagcccccaaaaaaaaaaaaaaaaaaaaaaaaannaaacggcccgctctagaggatccaagcttacgt

SEQ ID NO: 8483 - DNA, 729 bp, Glycine max
ccctcgcgttctcccacgcgtccgcggacgcgtgggggagtcgttgcagagctgcgcgttgatctagaaaaatggcgaggataaaggtgtacgagttgaggaataagacgaaggcggagctactgaaccagctcaaggatctcaaggcggagctagccctgctccgcgtcgccaaggttaccggcggcgccccaaacaagctctccaaaattaaggtggtgaggctatcgatagcgcaggttttgacggttatttcccagaagcagaaagcggcgctgagagaggcttacaagaagaagaagtatttgccccttgacctccgtcccaagaagacccgcgccattcgcagacgccttaccaaacaccaggtgtctttgaagacggaacgtgagaagaagaaggagctgtactttccactaagaaagtatgcgatcaaagtttaggttagaattggtttcaagttgcattttttaggacagttacttgtattgaaattttaaggttttgatgcctgccgctggggcagcattccaattattagtaccagagttgtttcaatgcttgcattaagtttccaaggtctatctatgtgttaaacccagagttgtttcgagaaactatggttgctttcggcctttaactttatagcgattacctgttgaatgatcaatggccgtaacctttatgagttgtgatttatgcacatcacaacagtggatacccaaatcg

SEQ ID NO: 8484 - DNA, 316 bp, Glycine max
gaaaaatgggtaagacaaagacaaagacatttattttaaccaacattcaaaactgttccattttttttacgtgtgatctgaatgaattaaaattttgacgacactgtggcgaggatagaggtgtacgagctgaggaacaagacgaaggcggacctgctgaaccagctgaaggatctcaaggcggagcttgccctgctccgcgtcgccaaggtcaccggcggcgcccccaacaagctctccaaaatgtattgtagtgattattgttatgcgggaatcgcgttttgtaaacgaaatggcgtttgaatatatatatata

SEQ ID NO: 8485 - DNA, 806 bp, Glycine max
ggttcttttcatgcatgtgttgaatgcacatgctggtctccggtccggttagggcatttctgggaccttaaatcaccaatttctcacccaatcaattccaattaagctgagagtgtttctgatctatatgtgatgggtgctccgaagcagaaatggactgcagaagaggaacaagcacttaaagccggagttgtcaagcatggtgttggtaaatggcgcaccatactgaaggatccagagtttagtagtgtcttgtacctgcggtcaaatgtggatctcaaggataaatggagaaatctgagtgtgatggcaaatggatggagctctagggaaaaatctaggttatcagtcagaagggtgcatcaggtcccgagacaggatgagaactccatggctatcactcctgttgttccaagtgacgaagagattgttgatgttaagcctcttcaagtttctagagatattgtgcatattcctggtccaaagaggtctaatttaagtttggataagcttataatggaagcaatcactagcttgaaggagaatggtggttctaataagacagctattgcagcttttatagaggaccaatattgggcactgccaggcttaaaaagtatgttgtctgcaaaattaaagtttttgacagcaagtggaaaactgatcaaggtaaatcgcaagtatagaattgcacctatagcagcatattctgacagaagaagaaactcatccgtgttatatttggaagggaggcagaaagcctctatgaaaattgacagggatgagaccaacatccttactagatc

SEQ ID NO: 8486 - DNA, 355 bp, Glycine max
gaactacaacacaagagactgtaccttctttttgaagtctctgtgggttggggttttggagtgggagcaccaatggctttcttgatggcaattgtagtagtaggtgttgtcttggtgctctgtttttgctctgctctcttgaggtggaatgaagtaaggtacaggaagaaaggtttgcctcctggcacaatgggttggccactttttggggagacaactgagtttcttaagcagggtccaaacttcatgaaaacccagagagcaaggtatggcagttttttcaaatcccacatactgggttgtcctaccattgtttccatggattcagagcttaacagatacatcctaatgaatg

SEQ ID NO: 8487 - DNA, 409 bp, Glycine max
ggactgcaaatccctttcagctttctgggtgcggagaattttgtaagatggtagagtttcaaaggttgttggtgtgcatcaccacctgcattctatgttggatgcccaatggtgccactgccgccacagatccaaatgatgctgctgctgtgagatttttgtttcaaaatatgaactcaccaccccagctaggttggcctcctaatggtgatgatccatgtggacaatcttggaaaggcattacttgctctggcaatcgtgttacagagattaagttatctacatcttgggctaactggatcggtgccttacggattacatgtcctgacatctttgaatgacctagacatgagtagcaaccgtcttggtggaagcataccttaccaacttcctccatatttgcagcgct

SEQ ID NO: 8488 - DNA, 2090 bp, Glycine max
ggggaggattgaggtcttgggtattttggtattagtggctttccaaataacattgcaaaatgcagggcattttttatgttagcaacaattataactataattaggattgactgtatatgtacaaaatccaaaaaatattactccatccctcctgaagccgtcaccgattcatttctctacatatcaccaccaagggcttccaccagtcactcaaatgccctgtaaaatacagacactgatttacctggtctgcatgcacacgagcagattccagccagcattggggtatacaaaaaaagtgacgaccaaaaatgactgaagggcatggtgggaaaaaaaataagatgttacaatgccaaaatttgtactcatggatatgtacactctgactctgaaatgaatctggaacattagccattaagccttgctaaaaagagactcagattgtactcctctgtatactgtgattggtcccatagctcctccaatccccccagtattgatttcaatcccttcccactgcctactaatttagcgtctccatcagagttgttctctggactcttcacaacagatgcgcccttcttggaggtttctgctgacgcaaacaaatcaagcaactgatctgtattcattgttttcatgctagcattttcagaattaatgacagcattagccactgacactttgaacctttgtagactcataactttctcttccagagtaccacgcattattagccgatggacattaacaacttttttctgacctaacctgtgtgctctatccatagcctgatggtctcgcatcggattccagtcatgctccacaaaaacaagggtatctgcagatgtcaggttcaaaccaagcccaccgacatgtgttgtaagcagcaagacatcaatggtagggtctgaattgaaagctttgacaatttcaaaacgcttttctggctcaactgatccatccaaccgcaaatatgtgacacttttcatgtgtgtgtgaaacaaatctctttcaattatatccaggaaagccttatgttgagcgaatatcaagaccctatgctgcccaacgttaaccgcaccctcagaaccagaattgtcaactccaattccacattcttcaagaatctcatgaagagcaactaattttggggagtgatagagtttgtgaagttctgaaataacatcagagccagcaggaaacagttctgagaggatagtagaaagtgaatctggaatcttctcaccaatgacaagcaatggatgactacagagttttagcaagtattggagcgcctggaatacatgtgaagatgctttagtagaattgctacttccttctgctgcagcagactcattcgttgttacaacagatgacatttcttgtttagcacgagaaccagaaaattgttcataaagtttaaattgtacagggctcaaatcacagtatctgtcttgaattattttctcgggcagatcagacaagacttcatcctttgtcctacgaaggaggaaaggcattacctgcttatgcaatgcctccatagcaagtgctcctgcttcagcatccctagcagaacattttggatctcttgcagctaaaagtggttttccatatgtggcttggaactgtctctcagttccaagaaatccaggcatcagaaaatcaaaaagggaccacaaatccatgatgttattctgtataggtgtaccactcaatatcaagcggtgttgggctttcaactgttttacagcaagtgtaactttagacttggcattcttgattatatgcccttcatctaagatgcagtgattccacaacagctgtcctagaaaatcaatatctttacggacaacgtcatatgacgttatgatgacattatgcttgcaaaaatgatcccgaagaagcattcgctcctgagcagaaccaacatattgaagactagagataacagaaacatcaatatacttctctatctcaaaggcccagtgcccaactagagttgatgggcaaataattaaagatggcagaagatcctcattcccaattgaagttcgatgctcagctatatcagaggccacaat

SEQ ID NO: 8489 - DNA, 576 bp, Glycine max
  unsure (1)..(576): unsure at all n locations
ggaaacacgagtcttgagcacacttcgaggaaagggatcgccggcggcaccctccgaagacggagatacacccactcactcaccaccactttcccagaaaataaccaccgcctacaatttctcggaatttattttgcgttttggtgcctttgttgttcggattttcaggtgagggagctcgtgtcgtgtgtcgtttagggttaaaaatggggtttaagtgggtgcactgatgtcattgttgtggcttgtgattcgtcaacttgcagaaatcgaggcaatggctgcatctaagaaactgataacaagagaagagtgggagaagaagcttagtgatgtgaagattagaaaagaagacatgaataagttggtaatgaatttccttgtcaccgaaggctatgtcgaagctgctgagaaatttcgaatggagtctggaactgaaccagacatagatcttgcaacaataacagatcgcatggctgtaagaagcagtcanagtggtatgtgagatgcatgaaaaggatgactaatcgaatctgacacaatccatatttcattcacacacatgtaactatcgat

SEQ ID NO: 8490 - DNA, 370 bp, Glycine max
caaatatctgtatatcacattgaaacagaactctagaagcaacttggaagacagggatcgccggcggcaccctccgaagacggagatacacccactcacaaccactttcccggaaaataaccaccgaccacaatttcttggaatttattttgcggtgaattcactttctgcctttaattttttcatcccctcgcgtgcggattttgttttccccttccgccgatagggttttgatgattttaattttgttgatttggaaggatgtggaaacttaaaatgcgactgctttttgattttttttaaattgttgatgctgacctacgacctgcagttttggtgcctttgttgttcggattttcaggtgagggag

SEQ ID NO: 8491 - DNA, 254 bp, Glycine max
aaagggatcgccggcggcaccctccgaagacggagatacacccactcactcaccaccactttcccagaaaataaccaccgcctacaatttctcggaatttattttgcggtgagggagctcgtgtcgtgtgtcgtttagggttaaaaatggggtttaagtgggtgcactgatgtcattgttgtggcttgtgattcgtcaacttgcagaaatcgaggcaatggctgcatctaagaaactgataacaagagaagagt

SEQ ID NO: 8492 - DNA, 724 bp, Glycine max
cgacattcaatcacacacacatgcccctatcttccttagctacctagattattcacttcaattcctcacaagcaacaccgtttcttgctccaatggcagctttgtatctcccaataagcatgttggcactcattgttgttgtttctcttggtttgtggagtggtgttcaaggtgcaccacaagtgccatgctacttcatttttggtgattctttggttgataatgggaacaacaaccagctccagtctttggctagggctgattacttgccttatgggattgacttccctggtggaccttctggaaggttttccaatgggaaaaccactgttgatgcaattgctgaacttttgggattcgatgattacatacctccatatgctgatgctagtggcgatgctatcctcaaaggagtcaattatgcatctgctgctgctggaattagagaggaaactgggcagcaactgggagggcgcattagttttagggggcaagtgcaaaattaccaaaacacagtgtctcaagtggtaaatttactgggaaatgaggactcagctgcaaattacttgagcaagtgcatatactcaattgggttgggtagcaatgattacctcaacaactacttcatgcctcaattctattccagcagcaggcagtactcaccagatgagtatgctgatgttcttattcaagcatatactgaacaactaaaaactgtgtataa

SEQ ID NO: 8493 - DNA, 393 bp, Glycine max
gagagagaaattgaaattgaaactgaaacgaaacagcgtcttcgctgccctgctgcttctgctgagtcgtgcgtggatctacctttgaaccctaaacttattcctgattgctgatctcagttagaaatctgtggatatggcgacggggaagtcatctcgctccagaagcgcagtgtccagtgccaaggacaacggtcctaagctcgaagaaggtctcaatcccttcaagtctgataaattcgatgccgagtcctatgtccagtccaattgctccctcaacgataaggaaattaagcaattgtgcacatatttggtggacttgaagaaagcgtctgctgaggagatgcgtcgaagtgtctatgctaactatgcagctttcatacgaacatctaa

SEQ ID NO: 8494 - DNA, 368 bp, Glycine max
tgtggggcagtgtaggtaccaggagctgagaaggaggcaggttaagattgagactgagacgtgggaagaggcggcgaaggagtatagggtccttttgatggacatgtgtgagcataagctggcacccaatttgccgtacatgaagtcgctctttctcggctggttcgagcctctgagggatgccattgtcaaggaacaggagatgtatggtgaagggaagaataggacggcctatgcgccatactttgtttcagttgccggctgacaagatggctgttatcgcaatgcataagttgatggggctgttgatgacaggaacagaacatgccaccgttggcactgccagcgttgtgcaggctgcgtgtggc

SEQ ID NO: 8495 - DNA, 305 bp, Glycine max
tttcctgttttcattttcattgaaaatgttttcagaaatccaaccaaacacattttcatcactattttctgttttcagtgaaaatgaaaacagaaaacaaccaaatcaaacatcccctatttaatctaagtgaaagtggattgggcttgaatttcttagatgagatctcaagtttgaattttgggatgataaactttacttaaggtgattaaacaagttttataacaaagattagttattaataaaatcaatagatacttcataccgaaaaaaaatagaggtaaaaataaaaaaaaagcggccgc

SEQ ID NO: 8496 - DNA, 480 bp, Glycine max
ggtaccttagtttgcataaaaggatttgaaaatcttgtctgtctcactctcaaaggaatttatgcaacaagacagcgacacaaagttcccacttccagatctacttctgttctgtcagtcaccacagatagtttaactccactcacctctcaccgcaaccttaacttactatgtacctttcttcttcttttctttgtgtaaagtttaaaacttgaagcaaaaccaattgccccatttgccatttggtggtaataatcgatcgatggagttcactgaatcttacaagcaaacgggtccctgttgtttctctcccgacgctcgcttcattgccgttgctgttgattatcgtctcgtcattcgggagaccgtttctttcaaggttgtgcagttgttttcatgcttagacaagattagctatattgaatgggcccttgattctgaatatattctttgtggtctctacaaaaagccaatgataca

SEQ ID NO: 8497 - DNA, 554 bp, Glycine max
agggagcaactcgagaggaatactatatggtagcaacaggaaattctttggcacttaatcgagatattcaggaggaacagactgttccagcccgataccgtcacgaatttcttacgattgcatgggaacaggttcatcttcgacgtctttttcccttccaatatgttttctacttggagcttctctgattccttttattgaacattgtgatgccaatcgagctttaatgagttctaatatccaacgtccagcagttccgctttcgcagtccgaaaaatgcattgttcgaactggattggaacgccaagtagctttacattcaggggtttccgctcatagccggtcacgagggatacatcattcataccactacttgacaggatatttttatttggtaatggagatactctaagcattccattaactatatatcaacgttccaacaaaaatacttgtatgcatcaaaaaccccaggttcgccgaggtaaatgtataaaaaagggacaaattttagcggatggtgctgctacagttgacggcgaactcgctttggg

SEQ ID NO: 8498 - DNA, 670 bp, Glycine max
  unsure (1)..(670): unsure at all n locations
agaaaaaaggagtaggaagccatggaaaaggaaaacgaagagatggaaaggaaaaggagagaggaagagttgatccatgagagggaatgggaggagggaatgaactgcaggaggctggaatggaagaagagggttgacgagatgctgagccagcaccgagcagaaatgggccagatgcagactcgttttcttcacgagcagcaaaatcttactaaccaattgcttggtatattctcgcagtggcctgcccaacccgctggcctatctgatcacactagtgctagcaaccattatctttcacatatgatgcaaaatttgcatcatgtgaatggaattgttcacggtgacgctagggttgagggagataatcaagaagatcaattcattgttgatgggatgatgtatctctgccattttgtgtatctgctggggaagtccaggaatatttctgttacaagtggcaaaaagtgcacataattgttgaatgcattcttaattgtactttcttcaattaggtattgttgtatactattataatattttagtgtaactaatcaatataaataatgttttttttccttgttttcgtccgttctgaaatttaaacctcaaaaactgagtgtaaaggtcacttattttgtccnnnnnnnnnnnnnnnnnnnnnnnnnnn

SEQ ID NO: 8499 - DNA, 436 bp, Glycine max
cgcgtgaagcctttttcttctttttctgtcacagtcctcctcccaatccccaactcacccctcctctcgtcgaaactctccgaccccatctccgaattcgcctccggcatcgtaccatgtaacgcctcgccggtacagttcagtttctttcctcccctaaccctaatcttcgcgttttctaattttcgcgcagttctctctgtaacacatccgcgattcgcttcttcttccgtacatggctcaaccagacactctcactatcactcccaccagttctaaggatgaaagggaatccttgaagaatgacactccaattgacaacaatgcttgtaataattctacagatgaaagggaatccttgaagaatgacactccaattgacaacaatgcttgtaataattctacagatgaaagggaatccttggagaatgacact

SEQ ID NO: 8500 - DNA, 538 bp, Glycine max
cccacgcgtccgcccacgcgtccgcccacgcgtccgcccacgcgtccgcccacgcgtccgccctagcggcaagaagaagagaaaagagagagaagggtaaggtaaccctagagtggtgaatcgaatctgcaaagatggaagctgtttctcgaagaagaggtggaggcattttcgaaagcctctacaaggtcgttatgcgtcgcaactctgtctacgttaccttcgtcatcgctggcgccttcctcggagaacgggctgtagattatggagtccacaagctctgggaggctaataatgttgggaaacgatatgaagacattcctgtgctagggcaaaggcagtcagaatagtgaccagcttgttagccattttgaagttttattattttcatgaaaatttgaagtgattaagagctggaagcagtttccatttctacaataaataccatatgcttgtctctttcaggcttaactcttatgcgtggtttcatttactggcccttggaaatattaaatattgaaccattgcagaatctgta

SEQ ID NO: 8501 - DNA, 376 bp, Glycine max
gacgtcagacgcacgcgtacgtaagctcggaatacggctcgaggttggcgtaggttgaagaagaagaagagagagagagagagagagagagagagagagagagagagagagagagagagagaagggtaaggtaaccctagagtggtgaatcgaattcgaaacgatggaaagtgtttctcgaagaagaggtggacgcattttcgaaagcctctacaaggtcgttatgcgtcgcaactctgtctatgttacctttgtcatcgctggcgccttccttggagaacgggctgtggattagggagtccacaagctctgggacgcagatcctgttgggaaacgatatgaagacattcctgtgctagggcaaggggcgtcagaa

SEQ ID NO: 8502 - DNA, 313 bp, Glycine max
  unsure (1)..(313): unsure at all n locations
ggcaaaggccgtcagaatagtgaccagcttgttagccattttgaagttttattattttcataaagatttgaagtgattaagagctggaagcagtttccatttttacaataaataccatatgcttgtgcgtggtttcattgactggccattggaaatattaaacattgaaccattgcagaattctgtattttttttgaaacgatttatccagaatcattggttatgcaagtcgcagactttctagtttgcctatggatgtttaaacagggaaaatcagtaatgctcattaatttcatttagcattcaactnnnn

SEQ ID NO: 8503 - DNA, 355 bp, Glycine max
gcatagaattctttcaccaaagctaggtctatgctcccatcgaccaaattggtgaggcgtttatggaaattatgcctctccaattcagccttaaattcatctagctcaaaatgatatatctctactttcctctctagtaaaatatttctcccctgaacattatctgtgtatctagtccaagaatctaaggaagagaatctccttgtgttatactgcactgtgggtcttgaaccaatacttttacgtttcctagaaaccatttgcaaataaagaaaccaaatagttgatcagggcccaatttattaaaaatcaaaactgaaaaagacactggccgcctagctggcctttacaataa

SEQ ID NO: 8504 - DNA, 963 bp, Glycine max
ccttggcaactgcactgtacaaactagttgcagagcggggtccatggagttctttgtctagatgggctctagagtcatacttaaaaggtgatattggcaaggcatttatgttgtattcaagaatggctgagatgggctatgaggtcgcacaaagtaatgctgcttggattcttgacaaatatggggaacgtagcatgtgcatgggtgaatctggattttgcactgatgcagaaaggcatcagcgggcacattctctgtggtggcaagcttctgagcagggtaatgaacatgctgctttactcattggagatgcgtattactatggtcggggtactgccagggattatgagcgagctgctgaagcttatatgcatgctaaatcacaatcgaatgcacaagccatgttcaatcttggatacatgcatgagcatggccaaggacttccatttgaccttcatctagccaagcgttactatgatgaagctctagaccatgatcctgcagccaagttgccggtcacgctggctctttcaagcctgtgggttcgtaagaactatgctgacagtttcatggtacaggtaattgattcattgcctgaactgtatcctaaattagaagcttgggtggagaatgtgcttttggaggagggaaatgctacaattctgaccctctttgtatgcctcttaactgtgctgtatctacgtgagaggcaacgaaggcaagctgccgttgcagctggagaggtggctcagccaaatcgcccaaatgagcttggtgcacccatgtagctataggccaaattgtaccataggaacttatagctaacagtggaaataagtgcatttgtagatattcatttgtaaggtaggaacacgactttcaaaccagttcattgaacctccaaaatgagagcaagttgtaagattttgtcttttgttcgaaatttatgaagaaatttcacta

SEQ ID NO: 8505 - DNA, 1403 bp, Glycine max
gcagccaatattaaaggggatgttgactctgattgcttggattatgaaattttgtgggaggacctgacaatgggagaaccaattgggcaaggttcttgtggaactgtatatcatgctcagtggtatggatcggatgttgctgtcaaggttttctcaaagcatgaatacacagatgatacaatactgtccttcaaacaagaggtgtctgtcatgaaaagacttcgtcatccaaacattattctctttatgggggctgtgacttcacctcaacatctatgcattgtaacagagtttctcccacgagaaacacatccaaaattgattggagacggcgagttcatatggccttagatgttgcacgaggtgtaaattatcttcatcattgcaacccacctatcatccatcgagatttgaagtcttcaaatattctagttgataagaattggactgtgaaggtcggtgattttggtctttcacgtcttaaacatgaaacatatctcactactaagacaggaaaggggacgcctcaatggatggcaccagaagttcttcgtaatgaactgtcagatgagaagtctgatgtttacagctttggggtgatattgtgggaaattgcaactgaaaagataccttgggataatctcaactcaatgcaggtgattggagctgtaggattcatgaatcaacggctagagattccaaaaaatgttgatccacggtgggcttctataattgagagctgctggcatagtgatccagcttgccggccaacgttccccgaactgcttgacaagcttaaagagctgcaaaaacagtatgtcattcagttccaggctgcccgatccactgccaaggaaagcacccaaaaggagtcctagacaaccttggagctattttttctgtcacctgtgcctgtggctgtggctgatgcttgatgatttttttgcatatattttaccaaagctgctggagtagatgagttagtaccaagtacaaacagctggtcttggaaccatgtagagtagctgatcctggagtcctccaacatttgctaaggtattatgaagaacgaagaagggagatggactgataaaacttaaaagagaggtggggattgccaaacttttgatagtgattggattagtcatcttatttttctctagtggcattttaaagtttcttcaattgattggtggtgttgtgtttggagtcttgtcaatcggatcgatcaccacccgcattgtacttttctatgcaaatgtttgcgccactatttaaaagttgtacagaaggtagcgaaaagaaagggaaaaaaattcgtttgactacatagattagaatcacaaagtcagtgtggttctgtaatttcagttaatgttggatctttatcattatccacttga

SEQ ID NO: 8506 - DNA, 466 bp, Glycine max
gtgacttcacctcaacgtctatgcattgtgacagagtttctcccccgtggaagcttgtgccgcttgttacacagaaacacatctaaacttgactggagacggcgagttcatatggccttggatattgcacgaggtgtaaattatcttcatcattgtaacccacctatcatccacagagatttgaagtcatcaaatcttctagttgataagaactggactgtgaaggttggtgattttggtctttcacgtcttaagcatgaaacatatctcacaactaagacaggaaggggcacgcctcaatggatggcaccggaagttcttcgtaatgaaccctctgatgagaaatctgacgtttacagctttggagtaatattatgggaaattgcaactgaaaagataccttgggataatctcaactcaatgcaggtattgctttcatctgtagatgaacctttgaaaatatata

SEQ ID NO: 8507 - DNA, 558 bp, Glycine max
  unsure (1)..(558): unsure at all n locations
cccacgcgtccgcccacgcgtccgcccacgcgtccgcccacgcgttcgcccacgcgtccgcatcaaccgactctgacccttggattggagtgtcgcttcgtttgggcgccaaaggcgtttctagtcacacagaagaaaaagacttactcaagaagcttcgagaaaatgtctggaaaagcgaagaggagagatgacgacggtgcttccgacgccgactctgaaggccacgcgccgcccaagaagtccctcaagaaggattccgatgacgatcccgactctattaccgtttgcgagatttcgaagaacaggagggttgccgtgaggaactggaaaggcagcattatggttgacattcgcgagttttacgtcaaagatggcaagcaattgcctggcagaaaaggtatctctttgaccatggatcagtggaatgtgcttcgtaatcatgttgaagaaattgacaaggcaattaatgagaattctagngaagtgggcattctagtcaattttatagtttactatggtagcatgttatatactctttttggattacttaaagta

SEQ ID NO: 8508 - DNA, 449 bp, Glycine max
agaacaactgtccgtatgttggaaagtttgatacgcctagctcaagcccatgcaaggttgatgttcagaaatgaggtgactcgactagatgccatcacggctattttatgcatagaatcctccatgactacctcagctattgtggattgcattgggaatgctctgcattccaattttactgacaaccctgatcaggaatatgcgaggcaagaaagattgatcctagaaaaattgggatcaatagacgacatttgatgaatagcatggaggagtgaacgcagagaaaggaaaacaagatggaagagtcatgttgtatcatgaactggtttgttttgcttggctttgctattttttagtacaatgaaattgattgctttagcaatgaagggggcaatattttttgtttctaaatgatacaaatgtctttcctttgtttcttgtgtactttt

SEQ ID NO: 8509 - DNA, 593 bp, Glycine max
agcaaagcaaagaagtgaagagagagagagatcattctagagacagagagaaattagcttcagtagatattagtggtgggtatgtgtgtgtgtgggtttgggtttcaagagaggagacatgcttaacttgaacccaacacttcaagtacttgcttcttcatacccttaccagatcccaaaggtcttgatctaattttaagtgattcttctgatgaccatattgaaggttacatgaagccatttctctttttaaatcttcccaacaccgagttcaattcttcacaagttgattgtaatcactcaatggctcattcttcttatccctacggcgatccaatttttgcttatggaccacaagctattagtcatccccaaatgatacccccgatgctgggactagcatccaccagagtggctttgccacttgatcttgcagaagatggaccaatttatgtcaatgcaaaacaataccatggtatactgagaaggcgtcagtcacgagcaaaacttgaggctcagaacaaacttatcaaaaatcgtaagccatatcttcacgagtcttggcaccggcatgctttgaatagggttagggg

SEQ ID NO: 8510 - DNA, 278 bp, Glycine max
caacaatcaaaagcaaagaagtgaagagagagagaaagagatcattctagagacagagagaaaaattagcttcagtagatattagtggtgggtttgggtttcaagagaggagacatgcctaacttgaacccaacacttcgagtacttgcttcttcatacccttaccagatcccaaaggttacatgaagccatttctctttttgaatcttcccaacaccgagttcaattcttcacaagttgactgtaatcactcaatggctcattcttcttatccctac

SEQ ID NO: 8511 - DNA, 280 bp, Glycine max
tcaactactctcagcatcaatcacaaaaccctgattagctgattccctaatgagttggaattaaatggtcatacttcagatttattttatgtacgagcatgtgtgatgtctcaaatgaaatacagatttgatatttttttaaaagaggtgtattccgaaaattagatagcaaattatctagacgaatgtcctaacccacaaagtccaattgattaaataacagtataagttaacaataacattaattaaatgagttttatagaaaagaaagagtgaacac

SEQ ID NO: 8512 - DNA, 511 bp, Glycine max
aaagcagtcatcaaagaaactctgagattacatcccgcaactcccgtattgattccaagggaatcaatgcaagacaccaaagtgatgggttatgacattgcagctggcacacaagtactagttaacgcgtgggcgatttcggtggatccttcatattgggatcagcctctggagtttcaaccagagagacacttgaacagttcaattgatatcaaaggacatgattttcaatttatcccttttggagctggaaggagggggtgtcctggaatagcatttgccatgcttctgaatgagttggtccttgcaaacattgtgcaccaatttgattgggcagttcctggtggacttttgggggaaaaggcattggatttgtctgaaactactggattgtctgttcacaaaaaattaccacttatggcacttgcttcacctcataatctggcacaaaattaactagtggatcagttatgtggtctgatcataatctttctgttatctatcaattatg

SEQ ID NO: 8513 - DNA, 414 bp, Glycine max
ggtcaacaacagtgttcccataggagataataaaaatcctctcatcattctgcctcagcctcattgcatcccacaaactataggatcctcacattgctagcaccatgatcaagaccttgaatccttacccaaatccagcaaaaactgctgagatcatgtcgaggtaccggccaatagcaccaaagcctgaaacctctccaaactccatgagtgagggcccttcttcctcttctctctcccagaagatcaagccatctccttaccttaggaatttatggccacagcttcaagccagacccaccaggaccagaaagagaggtaaagctcctttgacactaccctcttcctccctcaagagacacaagacaacacatcatcatgtcctaagattttgtcccccttgtcatcatgttg

SEQ ID NO: 8514 - DNA, 435 bp, Glycine max
ccgggattgagaagtaagatggaggttgttatgcgccgtaagtaatttgtttgttggattggaattgagaaaacagcaacaaggggaaatgggagatagagaagaacaaggcgagggtgctggctcctccttggaattggaagctcctattccagagacccaaaaagaaatcccaatttcagatggcatcgcattcaacaatcagagcgcgattttccaagccatcgaggttgtggaacgagactcgttggccatcgctcagagtttcacttctctcttcgcttccctccgattggccctctccgaatccacatccacctctctccatcacatgcagtgcttcaccgatgccaccggtcgccttcaggaatctgtgcttgatgcagctaccaaagggaatcgctatataaattcctgtctcagatagaatgagga

SEQ ID NO: 8515 - DNA, 700 bp, Glycine max
ggccgtccccaaaatcccttcttctctctctcaattagggtttgcgttttcacactctctcccacacactcctctctctctcgcgtttcaatgcctgccaaatccgtctccaaattccaaacagtgccaagccgttctattttcaagcgaattcggcgttcggttcagttcatatcacttcttccccttattttactatagggctcctcccatggcgccgagccgcagaaggggcgtcagtaaggcggcagccgcggccgccgcttgccgccagttccaagtccgcgatcttgtgcgtgccaaagtaaaggggttccctgcatggcctgccacggtaagtgagccggagaagtggggctactcttctgatcgcaagaaagtgcatgttcacttctttggaacccaacaaatagctttctgcaatcctgctgatgtggaagcatttactgaggagaaaaaacagtctattcttggaaaacatcatgggaagggtgctgaatttggtcgtgctgttaaggagataattgaagtttttgagaaattaaaaaaagagactcagcttgatgaaactggctctggtggtgatgttgctaatgcagatgtttcaaatcctgttaactcatctgccaagtatcagacgaatgctcctgagttggcacacacattaccaatgaattctttaaattctattatcaacaaa

SEQ ID NO: 8516 - DNA, 521 bp, Glycine max
tcgtgagtttccttttttgttatcttgtaaccgaccaaacaacaaaaaaacaactgagtcttgttcacactgattctgttacatggaatgagcatatattgtttgtgttcctagaaaacttagaccttgaattgttggtttgcttcttataaggctcgtagttgacgcctttaggaatctctcaaggatgggtttctcagcggcagcttcgttgggtacctatgttgtgctgagagacactcatgaaacaagaatcaagtgccaatttttgtgcagaaaagaacagaatagtagaattggtttcaagttttcaaagcacagggccattcaaagtgcaattttttttagcaagcatgagttcactgatttggatgagaggaacagctcagatggggttaaagaagacattaacaaatgttatgaactcataaacagattagggagaggagttgtgtatctgggttcttcaaggatggcacctagccattcacattatgtgcaagcacaagagctggctaaag

SEQ ID NO: 8517 - DNA, 434 bp, Glycine max
gattcctcaaaatctaacctctctcattagctaacatctcaccaaaacagagtactgtgttgagtttttgttcttctttttctttgagttatttccctatatatacacacactcacatctctgtctctgtgcaaccaacagcctctgcttcttaattctcatcacttatgcctcattcttattaaggggtttttgttcatgaaagaattgaatatgccgggaattgttacaaacggggttcaagatgaaggggggagtaatgagatgaatggggaccaggattcaccttttaaggaacccttgaatctggttaagtccccgaggggtggttctgtgagtcccggaagaggccagggtgatgatggtgctaatttgggggtggggggtggggtgagccctccattgaacagctttatagaatgtgtgtgatatgc

SEQ ID NO: 8518 - DNA, 418 bp, Glycine max
aatctcgtaatcgaagccagtgaaagatcgcacacttattcttcctctctatccctgtcctgtttaccgtttgtttctgcggaaaatgggaggtgaagaaaatgtaaagcatcttgaagattgttctgtttccaatgcattgggcacttgggtattctcagttgcaggagctttgctggctattccagtggggataaagcgcaaatctctggcaccccttgtattttttggcaccactggtactatgttggatattattatgggaattagtgcttgcgaaagggaacatgcacagcgccaaatgaagctacttgaagcgcaaaatgctgctgccgagactcctttgggtgaaacagaaattgattcataaactgctatgttgaagttgtcagcattgtcaaatttaattggtcatgat

SEQ ID NO: 8519 - DNA, 382 bp, Glycine max
gattgtgattggttgtagtgttatgttactgttactaaaggaaagaagaaaaagggaggaagtggatgacgagtgcacacgtgggagccatgtctagttctacatgcttcccttcacttcctcgacttcttcgaccttctttcaccaaaaccaaatcatcacctaagttcagcatgagcatgagcaaggatccggttcgtgagtggattctttctgatgggaaagctatggagataaccaaaattagccctgttggtgggggttgtatcaatcttgctagtcgctacgacaccgatgctggttcactcgttgttaaaacaaacaggagtattggaccatccatgtttgaagctgaggctcttggtttaggagctatgtatga

SEQ ID NO: 8520 - DNA, 1078 bp, Glycine max
tccaggagacgacagaaggggaaaattctaattaaaaaaaaaaacaaaaataatttatattttcttaaagaacaaaatgtttgttatgcttaatatctttaatttggtctgtatttgtattcactccgtcctttattcaagtagttttttctcggcgaaattgcccgaagcctacgctttcttgaatccaattgtggatattatgccagtaatacccttactcttttttcttttagcttttgtttggcaagctgctgtaagttttcgatgatatctgtaatttgagtaatgtcttaaaaaaaaattaagaatttatcagaaaactaaaattggatgattttattaatttaaaagatcaaataattcacactgtaagacttatttgatcttttaaattgttaaaatgtacgaataagtcttacagtgtgaattatcgattccaatattgaaatttttggatatatacgaaaaaatacggaccatctcatcatctacgttttgccaattgagaaatcctaatcctattattcgatttgaacccatcaccaatagaatacctagattatagatatgaaagaatatttttggtaaaagtaattattgataatttgtaataaaagactcgactcttactacaaatccattttcgaaacttatcttatatatctcctcacaaaaatttaattttttagaaacttagtattaaaagaaacaaaatttgttgtaatataagagaatctattctctttctttgtcgttttttaattatcttggggattttataatgcttactctaaaactatttgtttacacggtagtgatattcttcgtttctcttttcatcttcggattcctatctaacgatccaggacgtaatccagggcgtgaagaataagaaaaaggtggattctgtgtttttcttgcttgtgctggattttaaaatatttttaggattttctttattttaacatctttaactagtaaataaaaaaaaatcaaacaaacaaggaaaacaaagaagttcaacaaaaaatatcaaattatcaacggaaagagagggattcgaaccctcggtgcc

SEQ ID NO: 8521 - DNA, 445 bp, Glycine max
cagaagacgacagaaggggaattttctaattaaaaaaaaaaacaaaaataatttatattttcttaaagaacaaaatgtttgttatgcttaatatctttaatttggtctgtatttgtattcactccgtcctttattcaagtagttttttctcggcgaaattgcccgaagcctacgctttcttgaatccaattgtggatattatgccagtaatacccttactcttttttcttttagcttttgtttggcaagctgctgtaagttttcgatgatatctgtaatttgagtaatgtcttaaaaaaaaattaagaatttatcagaaaactaaaattcgaacattttaacaatttaaaagatcaaataagtcttacagtgtgaattatcgattccaatattgaaatttttggatatttacgaaaaaatacggaccatctcatcatctacgttt

SEQ ID NO: 8522 - DNA, 1147 bp, Glycine max
gaccctgcggtgtcgtccccgccagtgccgcgcacacagcatcagtgagccaagaacatgaagtaacgcgacaacatcagctgcctggaaacacctttccggctttccttcgcaaccctggcccccctgggtcctggcgggcataaattgacttgagaatggaatacgtcagcccaaaaggacttcgcttggatggccgccgaccaatggaaatgcgacaaattcgtgcagagattggtgctgtatccaaagcagatggttctgccatttttgagatgggtaataccaaagttattgctgctgtttatggccctagagaggtgcaaaataggagccaacaaataagtagccatgctctggttcggtgtgagtacagcatggctaattttagcactggagatcgcatgaggacacctaagtgcgacaggagatcaactgaaatttctctggttattcgacaaactatggaagcttgtatactgacacatttattgcctcgttcccagatagatatttatgtccaagttctccaagcagatggaggaactagatctgcttgtataaatgctgcaactttggcccttgccgatgctgggattcctatgcgtgatcttgtaacttcctgtagtgctggataccttaatagcacccctctgcttgatttgaactatgtagaagacagtgctggaggtcctgatgtaactctaggaattcttccgaagctggataaagtgacacttcttcagatggattctaaactaccaattgacattttggaaaatgttatgcaactggcaattgaaggctgcaaagcaatagctaactatattcgagaagttttactggagaacacaaagcaacttgagtatcgacgaggtgtataattttagagcagaagtaatatttcctatttgcatcatgacgcgatgattattattgtcgttggtcttgtttttccagatttataggttcattctttcagcatttgtgcatttctcattttggattagaattctcctgcatttacctgtaaacaattttgttttttgcatacggtgttgactaaagggaagtgaggggagaggttctaactttgtgcatgtttgaatttcacttgtgagagagttcccccgtttttttcctccct

SEQ ID NO: 8523 - DNA, 490 bp, Glycine max
ggaagttgttgccgcgattttttttgccgcaaaacgcagccgcgacagcaaacccgcactgcaccaataattctcgtcgcacctgcaccctgcgaatattgactactcagtagctagctcttgctgccatagaggatggaatacgtcagcccagaaggacttcgcttggatggtcgccgaccaatggagatgcgacaaattcgtgcagagattggtgctgtatccaaagcagatggttctgccattttcgagatgggtaataccaaagtcattgctgctgtttatggccctagagaggtgcaaaataggaatcaacaaataagtagccatgctctggtagcttttttcttttaagttataatacattgagtgtatttttagtgtatttatatgcattgtaatgataacttaattgctgattatctgctttgtgtgtctgtaggttcggtgtgagtacagcatggctaattttagcactggagatcgcatg

SEQ ID NO: 8524 - DNA, 354 bp, Glycine max
gacaccacacacacacactgtctatgaagccgaaaaatcggttctcccatcgatgaatccccgtggataagatcaagcactaaaatttgttcttttttataatattactgccccaaagaagttacctttcaattctttccccttccctatatataatcctttcataaccccttcaaactaccacccctgcagtttttgagttaccttgcatgcctaaagaaaccactcgttctttagagcacttttcattttcctctcttctttaactctcagaggatttttttcgctaatatccaagcttcaagatcatggatgttgcgcatttcattttcgggatatttgggaatgtttctg

SEQ ID NO: 8525 - DNA, 504 bp, Glycine max
gatatatatatatatatatgtgtgtgtgtgtgtgtgtgtgtcaaactctatttttgtttcattcatacaaatacaaattaataaaaacaacaggttctttgctccttgtggctctcatcaggctctgatcacacttcgatggcaaagtttggattatctccactcttggtgctttccatattgttgctgatcatgagtggtggtgcagtgagaggccaaagagaaatggtgcctgccttgttcatatttggtgactctctcattgacaatggcaacaacaacaaccttccttcctttgctaaggccaactattacccttatggcatcgacttcaatggaggccctaactggccccttccctaatggctacactatggttgatgaaatagctgaactgcttggacttcccttgattcctgcatacacagaagcctcagggaatcaagtgcttcatggagtaaactatgcttcagctgctgctggaatccttgatgccactggcag

SEQ ID NO: 8526 - DNA, 585 bp, Glycine max
cgctcgagccgcaaaacaattaaaattcaccgtcaccgattgattattctcatcgccgcgctcttgaaagcttgaaccgagatacgattttctttttaaagcgtttaggcgaattcagcgagagttgcggctgggaatggacggtgacggcgaggagttgacggcgcaggagaccgctttgtatgaccgtcaaattagggtttggggagctgatgctcaaagaagattaagcaaatctcatgtcttagtctatggaatgaaaggaactgtagctgagttttgcaagaatattgttctggctggagtaggtagtctgactttagtagatgaccgggctgccacggaggaaatgctttcctccaactttctcatccctcccgatgagaatgtgtatagtggaaagacccttgcagaactttgttgtaattcacttaaagacttcaaccctatggttcgtgtttccattgagagaggtgttttgtcgagttttgatgttgaattcttcagcaaattcgatgttgttgtcgtcagttgttgctcgctttcagcaaaaaactggctaatgacaaatgcagaaagctatca

SEQ ID NO: 8527 - DNA, 496 bp, Glycine max
ggaaaattgaaagtgaacgtttccgatggtgtcgtggaacgagttgcggctgggaatggacggtgacggcgaggagttgacggcgcaggagaccgctttgtatgaccgtcaaattagggtttggggagctgatgctcaaagaagattaagcaaatctcatgtcttagtctatggaatgaaaggaactgtagctgaggtaatcctagaacttgtctctctctggtatctcaaatttgactttggcaaacaaaaaagagtaaaaaaatgggttccccccccccaatatgttgttgtaataatgtgtgaggaatttgagtttcctgctgttggttagttttgcaagaatattgttctggctggagtaggtagtctgactttagtagatgaccgggctgccacggacgaaatgctttcctccaactttctcatccctcccgatgagaatgtgtatagtggaaagacccttgcagaactttgttgtaattcacttaaagac

SEQ ID NO: 8528 - DNA, 379 bp, Glycine max
gatacagggtggtctgcagtattgacagagtctacagtacattgttagctttaatgatgagaacgttgcggctgggaatggacggtgacggcgaggagttgacggcgcaggagaccgcgttgtatgaccgtcaaattagggtttggggagctgatgctcaaagaagattaagcatatctcatgtcttagtctatggactgaaaggaactgtagctgagttttgcaagaatattgttctggctggagtaggtactctgacttgagtagatgaccgggctgccacggaggaaatgctttcctccaactttctcatccctcccgatgacaatgtgtatactgggaagaccctgcagaactttgttgtaattcacttaaagac

SEQ ID NO: 8529 - DNA, 947 bp, Glycine max
cccacgcgtccgcccacgggttcgatcgttgttgttctaaagcactcatccacacattctccgtcgccacgacaacaatggctccaaagaaaggtgcgaaaggtggagttgtagcagcaaagaagaaggttcaggagaaggtaacgaaccctttgttcgagaagcgtccgaagcagttcgggatcggaggcgcgctgccgccgaagcgggacctgacgcggttcgtgaagtggccgaagaacgtccaaatccaacgcaagaagcgcatcctcaagcagaggctcaaggtccctcctgcactcaaccagttcaccaaaaccctagacaagaatctcgccacgaatctatttaagatgctgctcaagtacaggccggaggacaaggcggagaagaaggagcggctcttgaagagggctcaggctgaggccgatgggaagcctgttgaggccaagaagcctattgttgtcaaatacggtctcaaccatgttacttaccttattgagcagaacaaggcacaactggttgtgattgctcacgacgtggacccaattgagctggtggtctggcttccagcattgtgcaggaagatggaaattccatactgcattgtcaagggcaaagcacgcttgggaacgattgtccacaagaaaactgcttcagttttgtgcttgacaactgtcaagaatgaagacaagatggagttcagtagaatcctagaagctattaaggccaacttcaatgacaagtacgatgaatacagaaagaagtggggtggtggaatcatgggttcgaagtcccaagccaagaccagggccaaggagaagctccttgccaaggaagcagcccaaagaatgaactagattaagttgcttttacattatttaggttggcatttttctatatcttatatgggagcatatacaagttaaaatgtgagggtttacttc

SEQ ID NO: 8530 - DNA, 378 bp, Glycine max
cgacagaagggggagagagaaaggctctttggcttgtattgaaaggtaagcaattgaaggttagaggccgaaagagagtggaataacagactagtcttaggaactccctagtgaaggtgaaacttgctctaagtgaagcaaaatcacttgcttgtgaagaagctcacaaaatctcttgcaagttaagtttgtaggctctgaccttgtttttgggaattgcaagctaagctggtttagttagtagctagcccttctcgcccttcttatatatattccacaattcaacaatcaatcatcatgcctaattgcctcttgttgtgaagggagaaagaagattctcatcatcatcacattcatcattttaggttttgaaaaacc

SEQ ID NO: 8531 - DNA, 591 bp, Glycine max
ggcgattaacacgtactagtacatagcatacctcaccaaaacccagcgtttcacattatcttcttttttatttctccaatgggacaagcaccgtccacgccggtttcttcgacggacctgagtcaccgggatattttcaccaccgacgaatccatcggccgcgactacaccgccgacatccccgacgagtgcctcgccggaatcttccagtttctaagctccgtcgaccggaaaacctgctccgccgtgtgtcggcggtggctgcgcgtggacggcgagaaccgccagcgcctctccctgaacgcgaaggcgagcctggttgacttcgttccgtcgctcttctcgcggtttgactcggtcacgaagctcgccctgcggtgcgaccgcaagtccacgagcgtaaacgacgacgctttggtcctgatctcgctgcggtgcaggaatctggtgcggctgaagctgcgcgggtgcagggaagtcacggagctcggaatggccggcgtcgcgaagaactgcacgaatctgaagaagctctcgtgcggttcgtgcgcgttcggcgcaaacggcgtttacgctttcgttaacaactcc

SEQ ID NO: 8532 - DNA, 314 bp, Glycine max
gacgacagaggcatgaggatgaggaggaggacaagttcactgtagcattgctcgactgtgttgttgtgtttgtgtgtacctatgttaaaataacagcaacaacaactaagactgaaaccagagctccataataagtgaggcgtcgtgttttttcttgtgtctagttccccgagacaaagggttaaaggaggttgaacttgggggttgagactcgaaacgggcggcggttctgtctttaacacagatgggggggagttagaagttttctggcgctttctgaggggctatttttagcgggttgaagttgaagctgt

SEQ ID NO: 8533 - DNA, 661 bp, Glycine max
tttgtcccagattagggttttagggacacaaagtagcagagcagagtaaccagctaggtagggttttctctttctcacgttcctcttcgcagcgcctcagtagcttcgcattagcaatggcgagaatcaaggtgtacgagctgaggtacaagacaaaagcagagcttctgaaccaactgaaggatctcaaagcagaactcgctctcctccgcgtcgccaaggtcaccggcggagccccaaacaagctttccaaaatcaaagtggttaggctttcgatagcgcaggtgctgacggtgatttcccagaagcaaaaggcagcgttgagggaagcttacaagaagaagaaataccttcctttggatctgcgtcccaaggagaccagagccatccgaaggcgcttaactaagcaccaggcttcattgaagacacagcgtgagaagaagaaggaattgtattttccactgcgaaaatatgcaattaaaagtgtaatgttagatcccaatacggatgataattttggcgtttgttagttgacacagttttgatgccgttttgtcctagttttcttttaatcatcatgaaacttttattaaatgttaactggttttactctcgcctttgttttttcgtcatatatgaaaattttcaatttttgcatgcc

SEQ ID NO: 8534 - DNA, 805 bp, Glycine max
ttttgtcccagattagggttttagggacacaaagtagcagagcagagtaaccagctaggtagggttttctctttctcacgttcctcttcgcagcgccacagtagcttcgcattagcaatgggtacatacgattaagcttctaactctgcagacgtttctactacgttgtgatttccttcaatggcgttacgatttcattcattcattttttcaaattttgtttgttgaaatgcaaaagcgagaatcaaggtgtacgagctgaggtacaagacaaaagcagagcttctgaaccaacttaaggatctcaaagcagaactcgctctcctccgcgtcgctaaggtcaccggcggagccccaaacaagctttccaaaatcaaagtggttcggctttcgatagcgcgggtgctgacagtgatttcccagaagcaaaaggcagcgttgagggaagcttacaagaagaagaaataccttcctttggatctgcgtcccaagaagaccagagccatcagaaggcgcttaactaagcaccaggcttcattgaagacacagcgtgagaagaagaaggaattgtattttccaatgcgaaaatatgcaattaaagtgtaatgttagaaccaaatatgatgataattttggcgtcactttctatttggtatttgacatacaatttttttctggccattcagttttgatgccgtttcttcctagttttcttttaatcatcatgaaacttttattaaatgttcgctggtgttactctggctttttttttttagtcatacatgaaaattttcaatttcttgct

SEQ ID NO: 8535 - DNA, 662 bp, Glycine max
gactcctcaacgctttctcatcgctgatcaaacttcaaaccctagctaggatttcaaggtacacttaacgatggcttcaaaacgcattactaaggagttgaaggatctgcagcaggaccctcctgtttcctgcagtgctggccctgttggtgatgacatgtttcattggcaagctacaattatgggtccaactgacagtccttatgctggtggtgtattcctggtgaccattcacttcccaccagattatccatttaagccaccaaaggtttccttccgaaccaaggtatttcaccctaacataaacagcaatggaagtatctgtctggacattctgaaagagcagtggagtcctgcccttacagtttccaaggtgctactttcaatttgctccctgctgacagatcccaacccggatgatcctttggtgcctgatattgctcacatgtacaagactgacagagacaagtacgagagcactgcccgttcttggactcagaaatacgccatgagttcgaagaaaatatctttattgttctggtgacagcttatgtgcgcaaaacaagttggatggggatatgtcagtatataatatacatatacaagtagttctgctttgatactttataataattaaaaccgtggattttttttttcgaaaa

SEQ ID NO: 8536 - DNA, 1477 bp, Glycine max
tacggctgcgagaagacgacagaaggggagagaaatgggtggaatccccattgagcgcaccgaaagcaaagtgtctctctaacctctgcaaaagtccaaggttgcacggttttaactgcttaggtttttgtcttcaaaattaaaactgtgcaactttggttgcaaagtcataggggttaagttgtgtttgcatgaaagtgggcttgagataattgtgcctcttgtatgatggaatccctttggaagcttttgtatttgctggagcctgcgcctgtcacacttatcactacagctgtggctgtgacatttggtgctgcttttcgagctctaaactatgggaaagaaatggagcgtaatcgggacttctctgaagcatcgattacattggataggtctcaggcattgatgatcccagtgatgagctcttttagcttgcttttgatgttctacttgttctcatctgtctcacagcttctcactgcattcactgctgttgcttccgcatcctctcttttcttctgcttgtctccttatgctgcctatttgaaggcacagtttggtttagcggatccatttgtttcacgctgttgctcgaaatctttcacacgtctccaagcaatactattgttagtgtgctctttcacggtggctgcttggcttgtttctggtcattggatactgaacaatttgttaggcatatctatatgcgtcgcgtttgtaagccatgtgcgtctcccaaacatcaaaattcgtgcaatgctccttctttgtctattcgtgtatgacattttttgggttttcttctctgaaagattttttggtgcaaatgtcatggtatcggtggcaacacaacaagcatcaaatcctgtgcacaccgttgccaatagtatcggtcttcctgggttgcaactgataactaagaaattagagttgcctgtaaagattgtttttcctagaaatttgttgggtggtgttgttcctggagagaatgcgacagacttcatgatgcttggtttaggagacatggctatcccaggcatgctactggctttagtcctctgctttgattatcgcaagagcagggatacagtaaatctcttagagttacattcctcaaaggggcacaaatacatatggtatgcgctacccgggtatgccattggcctggtaactgctttggctgctggtgtcttgactcactcacctcaacctgcacttctttatctggtgccttctactttgggacctgtagttgtgatctcttggatgaaaagggaactacttgagttgtgggaaggaaacaccccaaatctcaatgataaagatcgcgaaatagaagtttagtctagtgacaggtggtttatagccaaacagaaagctgtaaatttactgagaatctttaatcgtcagactcatcaagaaaatttacattaaaaaaaaaaaaaataaaaaaaaaatagaatatgtgtgaaaaata

SEQ ID NO: 8537 - DNA, 581 bp, Glycine max
ggcccgcccatttactttggatatatctaagcccgcaacccttaccgtaaaaccctagcaatactaatagcaaaaactcattcgcgatctcgttctgtacgtgcagccgcagcaagtgatcgaagcgaaaagagagaaattcatcgtcgcagtaatcatgggtaaggttcatggatcacttgcacgtgctggtaaggttagagggcaaaccccgaaggtggccaagcaggataagaagaagaagccacgtggccgcgcccacaagaggatgcagtacaatcgccgattcgtcaccgccgtggtgggattcggcaagaagaggggacccaactcgtctgagaagtgaggccgaggcttgaggaatatgttgctactctatttgatttatctttgttgttttttatttatttttaatttgtatgttttgattgtgttctgtgaacggtttttgttagctttatatcaaacttgaaattttgcatacaatatctaactatctaagttcattgctcctttcaactgggaaaggatttggtataaaaaaaaaacaaccttaccttattcaaaactcattattatcc

SEQ ID NO: 8538 - DNA, 486 bp, Glycine max
gagcccgcagccctaatcctaaaccctagcaatactaatagtagaacttattcgcgatctcgttctgttctgtacctgcacccagccgcagcagcaagtgatcgaagcgaaaagagagtaatcagcagagaaattcatcgtcgtagttatgggtaaagttcacggatcacttgcacgtgccggtaaggttagaggccaaaccccaaaagtggccaagcaggataagaagaagaagccacgtggccgcgctcacaagaggatgcagtataatcgccgattcgtcaccgccgtggtgggattcggcaagaagaggggacctaactcgtctgagaagtgaggctgaggcttaaagaatatgtcactactctatatttgatttatctttcttgtctttaatttgtatgttttgattgtgttctgtgaacgggttttgttagctttaatatcaaactagaaattttgaatacaattctaattctatgtcta

SEQ ID NO: 8539 - DNA, 475 bp, Glycine max
ctttatacgaagccactccacagagagaaccaagcccgaaaaagctgagaactttggcacaaaaccaacaagcccaccttcaaatcaccccatattccccattcccatgcagagattccatctgggtctccctcattcaccaccaatggacaccagcacacccttccaagaccttccagaagcatctccaaagcccttcttcaagaaaaccacactcacttccttcatcatgtcttcaacaccttccttcaaggaagacacctactacatctcccacctcaaatcctccgagaaaaaagccctccaagacctcaagaacaaactccaatcttcttattcttccaccccttccatgtggggcgttcctttactcaacaacaacaacgccgacaacgccgacgtcatcctcctcaagttcctccgagcccgtgacttcagggtccacgacgccctctccatgctcctcaagtgcctc

SEQ ID NO: 8540 - DNA, 503 bp, Glycine max
gaacacacacaaactctctatcattttgcttttgtgccttctctaacataaaccaagcatgagtaagatcacggtcctgttcttcactgttctgttcctctgcggcagtgatcacccactccacgcgccctcaaccagcttttcacaaggaatcttgtggtgtcggcactccatcaggatgctgaggggggggatgaaagctgtgaagcgatggggggagaggagtgtttgataaggaggacacttactgcacacatccattatatttatacgcagaagcataataacccttgaaagaattttctcccttcttgttttgatggttgatagtagtattgtactatattaggttctggtagctagtttatttggccaaagctcgagatgctctctttctttgcttttatgcttgtatttagcactatatttatatcattatgttatgaaatttaaactatcatggaaatacttgtttacttgatagtagtgcgatcagtcatcat

SEQ ID NO: 8541 - DNA, 600 bp, Glycine max
gacgaaaaagaaaaacaacgttttcttcttctgctatctatctatctagggctcaattccgattccgattccgattcatactcataaccctttcaatgctttattgaactaacgaggttttcttcacgcaccttgttttctctgcattgtttcgaattccatggaggagtcttcgtacaccggtcttcccactagccacttgctcggttcagttcctgctgtcataactgaagaaaataatgccacgaaacatgtggccaccggtgcaaatatgcaaacattccctcccaacaatggaggagacagaggaccaggacatcaaactcttggcagtcctactgaagcttttgaacaacagccagcaaacaactggaggggaatctttagcatgtcatcatattcagagtatttcaatgtagacacagatgttgtcttaatcagattgataagttccttgaatccagttgctgcagactttttcagcaagatagatgctaaccctgatttatatgggcttatatggatctcaacaacattggtttttgtgcttgcctcacttggaaatctggccacgttccttatgcaaaaacatgcagataa

SEQ ID NO: 8542 - DNA, 800 bp, Glycine max
actcgagccgctcgagccgctcgagcggctcaggtcaatgacagtagagtgttgcttggaggtgggtggcctgagatggtgatggcaaaagaagttgatgcgttggctaagaaaactcctggaaagaagtctcttgctattgaggcattctcccgtgcactcttggctattccaacgatcattgctgataatgctggtttggacagtgctgagttgatttctcagctccgtgcagagcatcagaaggagggctgtactgctggaattgatgttatttctggctctgttggagacatggctgaacggggaatatctgaagcattcaaagtcaagcaagctgtattgctatcttcaacagaggcagctgagatgatccttagagttgatgaaatcatcacgtgtgctccgaggaggagagaagaccgaatgtaaaatatcctgagggtccaactttggatgattggggtgccagcattttttggcgtaatatgagtgctgtgatattttgatatggtggttgtaattggaagaaacttggttgtaatgctaaaaatttgttaggtaaattttgatttgttttggaacccagtcgcacgccagtggattggggtgggtggcggagaaattttacttagaaccatttgttcctgccctgcaattagagttaattatgtctacttgaatttaaagacattatcttttacttcattcttgaatgaagatatctttcgagatttttcgttaatttgcgtctttaaagattctttcattctttaacaaataatttagaaactgtactc

SEQ ID NO: 8543 - DNA, 453 bp, Glycine max
ggagagagagtagtacatcggaagactcagtgagtttactgtttctctgactttgatgcatgcaggttgaagagtggaagacggtgaaaactaaaaataataaaattaaataaaattcagagtaaatgaaaaaaagaagaatgtgaagagagtgatgtagtgagtagtgagtgtaaacaaggtttggtctttgctgctgatgttcatcactgcaaggtttccgcatttgggtttctctccgattgaaaaaacaaggaaatgatgatttcatccttttaagaggaatgtgacactaggataatgctgaagaagggaaaaggatcatatttggaagatttgtaatcctatggctgattcttcttccaatttctctttaccttgtgatgcattaagcctaagacaaaagagtttctcaattttccataccggtggttctaggttggggggtggtgc

SEQ ID NO: 8544 - DNA, 602 bp, Glycine max
acgacagaaggggatcgaataaaaaaatagaagaaaaattgcgacgatcgagcaaggtggagaaacagggatcagtgtagaggaagagcatcggtgtgctgagaactgaggacaatgtctgctgaatcgccaagttctgctcgcaaagtggttgttcatctcagagccaccggcgatgctcctatcctcaagcaatccagattcaagatagcaggaactgataaattcgctaaagtgatagactttcttcgccgacagctccacagggaaacattgaattttggttttgatggcaaactggtggtcaactacgcttgttctatggcatggggctaaccctgaatgatggctgcaggttacaaaagctccatattgtgaatacattgtttcctttcagaaattcgggacttgcatataatcacagtacacgatttcttttgaacttgaagattctcaccggatggaagtgcggtaagacatttaaagcaaactggagtcacccgtttgggtgtgttcgtgtgatagttatggatgattatggtttgtgctgcttgttaaaatgctaatccttcagtaattcatcatgacatttttaaaaatat

SEQ ID NO: 8545 - DNA, 407 bp, Glycine max
ggtggaaaaacagggattattatttttgtagacctgagaactgaggacaatgtctgctgaatcgccaagttctgctcgtaaagtggttgttcatctcagagccaccggcgatgctcctattctcaagcaatccaaattcaagatagcaggaactgataaattcgctaaagtgatagactttcttcgccgacagctccacagggaaacattgtttgtatacatcaatagtgctttttcaccaaaccctgatgaattggtcattgatttgtttaataattttggctttgatggcaaactggtggtcacactacgcttgttctatggcatggggctaaccctgaatgatggctgcaggttacaaaagctccatattgtgaagacattgtttccgttcagaaattcgggac

SEQ ID NO: 8546 - DNA, 435 bp, Glycine max
gggtctctctctctttatctcactgcgactcactctagtgagagaaagaagaagcgaagaaaaaaaacacacacacacaaacacaagcacagttgaaaatggctctgcttaccctctcttcgctgcaatgaagaaacgtttgtttttcttctccgaagaagaaaaatggctctcggcgacgatgcgcagcaccactctccctcgttcctcgatgcccttctctgcgaagagcgagaaaccttcgaggaagactttgatgagaacggttatgagcgtgagaccgaaaacaacgaaccctctgtgataaagtcgcaatctttgcccttggttttgcacgacaatgacctgttctgggaagacgacgagctcgtgtcgttaatcgcgaaagagggagagacccatttgcgttctttttctgatggggccctggaaggg

SEQ ID NO: 8547 - DNA, 285 bp, Glycine max
cctcgagccgaatcggctcgagctgcgattcactctagtgagagacagaagagaaggaaacacacgcagagttgaaaatggctctgcgcaccctctcttcgctgcaatgaagaaacgtttttcttttcttctccgaagaagaaaaatggctctcggcgacgatgcgcagaccactctcactctccctcgttcctcgattcccttctctgcgaagagcgagaaacgttcgaggaagactttgacgcgaacggtgacgagtgcgagaccgaaaacaacgacccctct

SEQ ID NO: 8548 - DNA, 1075 bp, Glycine max
ggcgcgtccgattaattgtaatactcattcaccaattgagtatataatttgattttattttttctaaaaaggaaggaaagaaaaaggtgctggagtggtaatgtacagtacgtgagggaacctaaatatccctagtttcgcttcccactgatataaagttgggccaaatgcaagtggggatctgagaggagaggtgcggcgatggcttttgcagttacgcccaagataataacggtgtcattcgataagcaaaaccaaaggaggagtttcgaaggattgtttgggaaaaggtatcgggtaagggtgaagcgaagtcaagatcattcagtgaagtgtggtattgagcgaagcagcagcgatggaaagaaagggggcggaggaggaggcgtgtcaaattcgaactacgtggtgccgctggacaacatggcgaactcatcctgcataacacgtcctttagccgagatactcagggacctcaataaaagaatcccggatactatcgtcaaacatgatcgcttcatcccctggtatcatgccaacaggatgctcagcttctacgccccaggttggtgtggcgagatacgtgatgtcattttctccgacaatggctccgtaactgtcgtataccgtcttactgtacggggatctgatggagaggcatatcgtgagtcaactgggacgatatcacccagtgatggctccattggcgatccagtttctgctgctgaggaaattgctttctgcaaatcttgtgcccggtttggtcttggcctgtatttgtatcatgaagatcaaatgtctaatttttaagcttctaaatttttgttttggttggatgtgatattgtattgtttcttctcgttgatgtgaatagaagtagacaataggtggctgttaggtacttttcataaagcactgtcaagtatggtggaaaacttgaagccatatctttgtttttatgagtatccgatgcttatgtgtattcaagtttcttttattgctcaggtacatttaagttttgttttatggtggcctaaagccttcaattaataaatgaacaattattattattatt

SEQ ID NO: 8549 - DNA, 531 bp, Glycine max
cttagtgggtttatagcttttgatgttcctcctccaaaggggccaatgtgatttttggcatagttttcatgagggcatatcaccccgtctttgtctacggaaatttaacaattggtttttcccaaactgtctaaataggccttctggaggattttctttgaaaaaattttaagggggttgtaaaaaaactgttaaaacaattggagctgggattccctttatggaatcccgaatggatttttccctttaaaacggaaaagtattcccctggaacttggaagtgttgtgttgtgggctttttaaaaaaaaaaacccttgttttccctttttttttttaaaaaaaaaaaaaaaaaaaaaaaaaaaaaaaaaaaaaaaaaaaaaaaaaaaaactcgagactaggtccctctaaacccccatgtgatgatgcatgtattgtagaaattgcaaagagttatggccttttctgttgtattaaaaactacttgtgtatccaatttcaaacttactaagttatagaaatcttctcaaaa

SEQ ID NO: 8550 - DNA, 587 bp, Glycine max
tctcgagcgaatcgcactaagaataataaaaaatttgaaatctgtgcgcatgcttatgaaataaactgcaggcgtaacaaaagttgcgtagccatactctgattcattagtgaagaaaaatggcaaccatcatcgccggcatcccaactacatcgatcactcgcgcaggtcttgtgctcaaacgacctgttggagcctcgtcctctaccgttcttggattgccagcaatggctaaggcagggaaagtgaggtgctccatggaggaaaagccttcaagcagctcaaatatagggatgggggcatccttgttagcagctgcagttgccgcaaccatgtcaagcccagccatggctttggtggatgagagactcagcactgaaggaaccgggcttccctttgggcttagcaacaaccttcttggttggatcctgtttggtgtcttcggtcttatatgggctctctactttgtctacgcttccacccttgaagaggatgaagagtctggattgtccctctaaacccccaagtggcgatgcatgcattgtagaaattgcaaagaattatctctttttctgttgtattaaaaa

SEQ ID NO: 8551 - DNA, 465 bp, Glycine max
cccacgcgtccgcccacgcgtccgcggacgcgtgggtggcccacgcgtccgcccacgcgtgggacgcgaggagacgacagaagggggcgcatgcatatgaaataaactgcaaccgtgacaaaagttgcgtagcaatagcatactcttactctgattcgttagtgaagaaaaatggcaacaatcatcgccggcaccccaactacatcaatcactcgcacaggtcatgtgctcaaacgacctgttggggcctcatcctctaccgttcttggattgccagcaatggccaaggcggggagagtgaggtgctccatggaggaaaagccttcaagcagctcaaacctagggatgggggcatccttgttagcagctgcagctgccgcaaccatgtcaagcccagcagccatggctttggttgatgagagactcagcactgaaggaactgggcttccctttgggcttagcaac

SEQ ID NO: 8552 - DNA, 819 bp, Glycine max
ggaatataaggttatgatgccagaaaagaaaagaaagaacacttgggacgggatttttaaatccaaggcagatagatctgtagactgaagttaattgtccaaaattcgccagttagtcactgagttcatccattcatccttcgcttattcctcttgtttgggtcatggcaatttgttcctcactttcatcgtcatcgtcatcgtcttcttcttctacatcgtcctttggttcctcgagcaccgcgaaggcgtggatcatccatggcattgtggccggagtggcgattgctgcggcggtgggtgcacgcgcttacatgactcgattcagcaagtttcggagccgggtcgtgggcatcatacccgcccgattcgcttcctcgcgcttccagggaaagcctctcgttcaaatccttggcaagcccatgatccagagaacatgggaaagggcaaagctggcagctacattggatcatattgttgtggcaactgatgatgaaaagattgctgattgctgtcgacaatttggagctgatgttataatgacatcagaatcttgcagaaatggtactgagcgctgcaatgaagccctacagaagcttgggaaaaaatatgatattgttgtcaacattcagggtgatgagccacttattgaacctgagataatagatggtgttgtgaaagctttgcaggcagctcctgatgcagtgttcagcactgcagtcacatctttaaagcctgaagatgcacactgatccaaatagagtgaaatgtgtggtagataatcgtggttatgccatttatttttcacgaggattaatc

SEQ ID NO: 8553 - DNA, 564 bp, Glycine max
  unsure (1)..(564): unsure at all n locations
gactcacgacgccagactactcatctactcattttcattttctaagtactttgctctttctcacattcaaatgcaaagcccgccaccctttttcttccttgatgtagcaaaattcaaatcccactttagattgttcccaattcccatcgccttttctatttggaaactatggctttatcattggaagtttgagattccaacacccccatttcacttttcctttgtttggttttaaaaatttagttttttttcttcttttcttctcactttgcttgtttcccttttgtttcctagatcattcaaaacatgaagaagctctcatcaacttcttctcatgcatccccatcttctttatccaccacaagtttggacccaactatgtgcacctccaaaagcaccacttcagggtgtctcactgctatcttgcgcaaaattctttgctctgatggccttccaagggaccaaattagagaacttgattcatcanatgctatgttgagtggcaaagatcaaaacttgaagggctagcagaatactgagatcgatactactactactactact

SEQ ID NO: 8554 - DNA, 987 bp, Glycine max
gagctatgacgtcgcttgcacccgtccgtaagctcggatttcggctcgaggacccacgtgccggttcttcaatcttctagagagagagagagagagagagagagagatggcgttgaatcctcaactgtttccaaatggaatgcccgttcctttcgtgaacgagatgtttgtgttggccagagacggcgtcgaattcgaggtcgataagattcctgcctctggcaatcatgggggtaatctcaaaacaaagggaatcgtgtatttgtcgaatattcggatggtcttcgttgctaaaagtccagttggacacttcactgcttttgatatgcctttgctttacatccatggtgaaaagtttaaccagccaatatttcactgcaacaatctctctggacatgttgaacctgtggtcccaaatgaccaacacagagctctttactcaacacactcatttaagatcttattcaaagagggaggctgtggaaccttcattccccttttcttcaatttgattacttcagtgaggcagtataatcaacacactaatatgcagacacaaacttatgtggatcctttgcaggcatctcagactccggttgatgagatgatgagacatgcgtatgttgatcctaatgatccgacaaaaatatttctgcaacaacccacttctgattctcagcttaggcgtcgaacatatcagccacaggcagatggaggccatgtctgagtctgaaatttcactctcctcactttcatcgtactatgtttatatgggaattgtgcattaatacatcaaaataaacaaaaatcttatgagactgtttggatctatgtttatagaatttattttagatcaatgtgattatataaaatttgattatgaagtaatgtaattttttttttgtttggataagagattgaagtgatttttacgacaatgttggttggattttttgttgacattgaagcttcttataaaagtcatga

SEQ ID NO: 8555 - DNA, 431 bp, Glycine max
ccgcccacgtgccggttcttcaatcttctagagagagagagagagagagagagagagatggcgttgaatcctcaactgtttccaaatggaatgcccgttcctttcgtgaacgagatgtttgtgttggccagagacggcgtcgaattcgaggtcgataagattcctgcctctgggtcagttaccaatttttttcccctcttctttctataggattgattctgttcaatttttcaacgaaaaaaaagagagaagaaaaagaatatttggggttgttattcatacgatagcagagacaattgttggttaatttcaagatagcgagaagttgaaaagaaattattagagcaacaaacaaacatgtgattataaaaagattgatataaaactaacaataacttgagactctactttttatatgcttatatatatgc

SEQ ID NO: 8556 - DNA, 399 bp, Glycine max
ggaggtgaagtctggaaagaccagcgtgcaggttcttcaatcttctagagagagaaagttaaagattgaaatttggatcggagagagagagagagatggcgttgaatcctcaattgtttcctaatggaatgcccgttcctttcgtgaacgagatgtttgtgttggccagagacggcgtcgaattcgaggtcgataagattcctgcctctggaaatcatgggggtcatctcaaaacaaagggaatcgtgtatttgtcaaatattcggatggtcttcgttgctaaaagttcagttggacacttcactgcttttgatatgcctttgctttacatccatggtgaaaaatttaaccagcctatatttcactgcaacaatctttctggacatgttgagcctgtat

SEQ ID NO: 8557 - DNA, 1079 bp, Glycine max
  unsure (1)..(1079): unsure at all n locations
cggacgcgtgggcttaattctcacccccctcactccttcaaacaacacccttttttatttctttctcctctgtttctctctctctgctgtgcattctggtggcatcacagagagagacacagttgagtgagccaccaccttctccaattcatctactttctctccaattcttcaaaagggttgtctccaattcttcaaaagggtgaaactttgaaggagtaaagatggttggtgctataaaagcagcgattggagacgcagtgttgactttcatgtgggtgttctgttcctctgtgttgggaattgcttctgggtacataaccaatgcccttaaccttcaacacatcacctacaatgggttcccttacgcttcttttcttgtcaccaccaccctcgtttttgttcttgtttttcttttcaccatcatcggcaatgttcttggtggggccagcttcaacccaaccggcaccgcttccttctacgctgttggtcttggttcggatacgctcttctcaatggcgcttcggttccctgcgcaggcagctggtgctgcgggtggtgcaatggcaattatggaagtgattcctgcgaagtacaggcacatgattggggggccttctttgaaagtggatttgcacaccggggctgtcgctgaaggggtgttgacctttgtgattacctttgctgttctcctcatcttcctcaggggccctcgtagtgacttgttgaagacttggttactggccacggcaactgtagttttggtcatggttggatctgcctacactgggcctgccatgaatcctgctaatgcttttggctgggcatacttaaacaactggcacaacacatgggaccaattctatgtatactggatttgtcccttcaccggagcaatattggctgctttggctgtttcgtgctgtctttcctccaccaccaccaccagaagtaaaacagaagaaagcatgaagagggatagtggatttggttcttcatgtcaattgttaaacaccatgctactgcattaggaaccccccccctttttttttactttatatactntcttcttcattctc

SEQ ID NO: 8558 - DNA, 444 bp, Glycine max
tgattaggtgagtcatcactccgattctcttcacacctaagatccattctttcttaattctcacctccctcactcgttcattcgaacaaaaccctttttagtttttttcctcctctgtttctctctctgctctgcattttggtggcatcatcagagatagagacttgagtgtgagagccacaacttctccaattcttcaaaagggtgaaactttgaaggaaaagaaatggttggtgctataaaagcagcgattggagacgcggtgttgactttcatgtgggtgttctgttcctctgtgttgggaattgcttcagggtacataaccaatgcacttaaccttcaacacataacctacaacgggttcccttacccttcttttcttgtcaccaccaccctcgtttttgttctcgtttttcttttcaccgtcattggcaatgttcttgg

SEQ ID NO: 8559 - DNA, 634 bp, Glycine max
agctagcaaagaagacccttggatagatacaaagatgttttttttaagggccaatttgtttacttcagttacatactatcaaagttagagaacgaaggaacttttgtactttctctggggtgtgtgtgtgtgcctgtctcacaccacaaacactgaaagtacaatcttcttgtggttacaaaaactctgaaaaacacacacacacacacacttcttatgcctatggctggtgagcaaggtgatagattctcctccattaccataccccttctcgatgatgaaaaattgcaccaagtgaatggttcagatgaggctttggtggccaaaacttgtgatctacacacacctcatgtggataacacctcctttttcaagacctgcttccacctcattaatgccctctcaggagttggtattatttccatgccttatgcactggcatctgggggatggttaagcatatcactactatttgtgattgccattgcttgctgttatactggtatgttggtcaaaagatgcatggatatggaccctgacatcaagaattttcctgacataggtcaacgtgcatttggagacaaggggaggataatagtatcaattgccatgaattctgagctcttcctagttg

SEQ ID NO: 8560 - DNA, 706 bp, Glycine max
ccaatattgttgttgagcatgagcgtttcaattattggtaatttcaattttgcccccgaaaaaggagtggttatcgaacaaaacgaagcctccaaaacgctttggtttcttcaccaccaccacccctctcctctttctctctctttctaaaaaccagaaacaacaaacacaaaccgaaaaggcgaaaggggttttccgagtgagatctagggtttccatcgattcggagagaggatattgatagaacgacctcaacgagcaaggtcaggaggtggagtactagaacatggattcggtgccttcgaattcgcatggaaacctcgatgagcagatttctcagctcatgcagtgcaaacccttgtccgagcaagaggtaagggtcttgtgtgataaggcaaaagagattttgatggaagagagcaatgttgttcccgaaaccgcttcatctcgctccgttttattcctttcgttattaagaaatgcgatgcgcggatcgggaaaatctcttgttatttgtcatcggttttggctttttgctccaactgcttctcgcgcatcgatccgtggcttgttgtatcgaaaattgaatcagttcctcttttttgtgaaatctggtttctctcggaattggaatggcgactggagtgcgcgtttgttcgaatattccgttagatttgcggaattcgtggtaagggtcttgtgtgat

SEQ ID NO: 8561 - DNA, 867 bp, Glycine max
ttgtttttcaccaccaccaccctagtttctctctctctctttctaaaaaccagaaacaacaaacacaaaccgaaaaggcgaaaggggttttccgagtgagatctagggtttccatcgattcggagagaggatattgatcgaacgacctcagcgagcaaggacaggaggtggagtactagatcatggattcggtgccttcgaattcgcatggaaacctcgatgagcagatttctcagctcatgcagtgcaaacccttgtccgagcaagaggtaagggtcttgtgtgataaggcaaaagagattttgatggaagagagcaatgtccagcctgtgaaaagtcctgttacaatttgtggtgatattcatgggcaattccatgatcttgcagagctttttcgcattggagggaagtgtccagatacaaattacttgtttatgggagattatgttgatcgtggctattattctgttgaaactgttacgcttttggttgcccttaaagtgcgttatcgtcagcgtattactattctgaggggaaatcatgaaagtcgccagattactcaagtttatgggttttatgatgagtgcctgcggaagtatggtagtgctaatgtttggaagatctttaccgatttgtttgactactttccgttgacagcattggttagtatactattacataatttttggaaaggattgtgggatattttgttagattgtcatttttctcaggtccaaggtagtttgttcaattcaatgatcctgggcacccttattatgctggcttgcatttaagattacaccatggtggaattggctgctatcgctgtgctgtattgtggaatctgttggagcagatgaccctatt

SEQ ID NO: 8562 - DNA, 431 bp, Glycine max
cggctcgagaaaaaaacgaaatgtaagcgcatccaaacgcggccatgctgagaacccgaactataataccttctcctccaccatcactcgccctgagtaagaggctgccgtcaccgtcaccgtcaccatcaccgttaccgttactgtcaccgtccgttatcctctccgaacccgtgaaaccctcgttccaccggtttcctctgttctcgaatcctcacactcttcgaaccatgacgctctccaagtgtttctctcactccgggcccaaacccgaatccgagcccgaaccggaacccgattcacctcacactctcgttgtggtttcattcggcaagttcgcggatttccccgaccacgccctcttgcgaaataccttgaagcaactgtgccaacgcctggtggaattattcttgcaccggaagggatcaatg

SEQ ID NO: 8563 - DNA, 1168 bp, Glycine max
cccacgcgtccgcccacgcgtccgaaatacttcccttacccccccctctctctctctcggaaaacaaacgaacaaacaaatatgcaagtggcggcagaactccaacgcgcccatcaccaccaccaaaggcacaaacaagacactcccatgtgccgccaaatccagctcactatctccgatcacaccaccgccggagacgacgacggcgaggatctcttcattccgcccctcaacttcgccatggttgataatggcattttccgctccggcttccccgaacccgccaacttctccttcctccaaaccctcggcctccgttccatcatatatctgtgtcctgagccgtatccggaggccaacatggagttcctcaagtcaaatgggatcaagctttttcagtttgggattgagggtcataaggagccttttgtgaacatcccagaggacacaatccgtgaagcactagaagttgttcttgatgtcaggaaccacccagttataattcactgtaagcggggaaagcaccgaacaggttgcttggtaggatgctatagaaaattgcaaaaatggtgcttgtcatccgtctttgatgaataccaacgctttgcagccgccaaagcaagagtttcagatcagaggttcgtagagttgtttgatatttccagcatgaaacatttgcccatacccttttcatgtttgaagaggtaacataccaagctatgctgagttgggtttacttgctttagtttgtgaaagtgaagccaaggttcttcctttgaataaataggaaaaggtgatgaactccttcaatgcattgcagcggcaaaggaataattcttctcccattctcaaaataagacaagaaaattctaggaatagtagagcattacctgtatttgtatgtgttaaaattctgccctatatttcccttctctccctacaattggcccttagtgtacctcaccaccttttgtcctattttctttctctttgtttttatgtttttctttgctgctctcccattcatcaacaatgagtgtagatatgtcttgattttttctcgaggctcagagaaattcaagaaggctacaaaaatgacttgtttgtctacccaaaatcttggtgggtagtaaagcagaggaacttataaaattttatttgctagatt

SEQ ID NO: 8564 - DNA, 329 bp, Glycine max
gacttcatttcactcacccctttaactgccatccattctttctctcttgaggggcaggggtaccacctcaaagaatatcctctttgatccctttctctgtttccttttctttatcattattatataataacaccctctaaatacttcctttacccctctttctctctctcatcttaaacacaaacaactatactactacttcaaactttgacatccaactgtgcggcacaactccatcgcacccatcaccgcctccaaaggcacacgcaccatcacgacaccacccccatctgccgccaaatccagctcactatcttcgatcacaccgt

SEQ ID NO: 8565 - DNA, 426 bp, Glycine max
ggtgacagtgaagagatggaaggcatagtacacaggacagttgaagtgaatggcataaaaatgcatgttgctgagaaaggtgaaggtcccgtggtcttgttcctccacggcttcccggagctctggtactcctggcgccaccagattctggctctcagcaacctcggctaccgcgccgtggctccagatctccgcggctacggagacaccgaggcaccagcttcaatcagcagctacaccatcctccacttagtttctgacatcgtcgcgctcattcactcacttgctgtggattaagtcttcctcgtagcccatgattggggggctgtcataggttggtacctctgcttgtttcgccccgacagaatcaaggcctatgtttgtctcagtgtccctttcatgcctagaaaccctaaagtcaagccc

SEQ ID NO: 8566 - DNA, 380 bp, Glycine max
gaatgcataacactggaagccaaaatcaattgtatttcttgtttgtttttgtttaacgctgttgcgattcactcttcttcttctctttagggtttttgtctgttctctgaatctcacactatgaatccgcttccttttcaatctgcaccgccgccccctcctccatggtttccgatattaccctccgaaccaccaaattcaacctccttttgggacaacagaaatgtctgcgatcgcctcagagaattgcaacacactctccatctcgcaaagtcaatgcagaaggagttagagatgttgaagatgataaaagatggtaaagggtctttagaagatgtaaaagatgcttcaaacgaaccttgtccttctggttttgtaaa

SEQ ID NO: 8567 - DNA, 575 bp, Glycine max
cttggaccacaaaatagcgtttcaagattcttggtaacacacaacggaacttgtgattaaacggtgcgttttagtaagaggaaggtcctcttcaatcctgtctttttcatcgtggatctgcgctagggctccgtaatcagacacctttttcctcttacttcatttaacctcacaacaatcaagttttgaatggcaactgtgagaagtctgaagatcaagacaagtacctgcaaacgtatagtgaaggagctgcattcttatgagaaggaagttgagagagaagctgccaaaacagctgatatgacggaaaaaggagctgacccccatgatctcaagcaacaggaaaatgtgttggcagagtctaggatgatgattcctgactgccgcaagcgccttgaggccgctttggcagacttgaaaggaatattggctgagttggaggagtcagatgagaaggccagtcttgagattgatgaagctaagaacaccattgtagaagttgaaaaagtatttgaaacaacagaagattaacaaggttgtttgctttctgatcttgaaggaggatattggacctg

SEQ ID NO: 8568 - DNA, 378 bp, Glycine max
ggtgttgctttagaatctgggtgctgcggctgaagatctcgattagccgaaaattgcaagaacggcttcaggctcttgcgatcaacaaacgcagcgttttgatctcagatttgagggggagagaatggcaacaacagtgagaagtctgaagataaagacaagtacgtgcaaacgtatagtgaaggagctgcattcttatgagaaggaagttgagagagaagctgccaaaacagctgatatgaaggaaaaaggagccgatccctatgatctcaagcaacaggaaaatgtcttggctgagtctaggatgatgattcctgactgccgcaagcgccttgaggccgctttggcagacttgacaggattattggctgagttgga

SEQ ID NO: 8569 - DNA, 1083 bp, Glycine max
  unsure (1)..(1083): unsure at all n locations
aggaaaaagggttgagtagtagtgttgaggacaaggtgagttgtgttggggacaaggtggttgttgtggaaaaagtgagtagtgttgaggataaacaagtggtttcgaaaacgattgagcaagggaaaagggtggtggaacctgtggaggaagaaaaaactgtcacaatcactaggagtgtgaagttggtgtttggtgaggatataaggtgggcagagttacccgtgaattgtagtgtgaagctggtgagggatatagctagggatcggtatccaggtttgaagggtgctcttgtcaagtataaggataaagagggtgatttggttacaatcactgctactgatgaactgcggctagctgaaaaatctgctcctgagaaggcatcgtttaggcttcatattaccgaggtcagtccagatcaagaaccttcttatgatggaaatggaacaaccaatggggatgaagtgcgaaggggcgatggaaaaccgagtgatggtgctgagaatggagatatggaagaaggaaaagattaagatgtggtgaaaaggatggttactgtggaggactggcttcttcaatttgcaaggatgttcaagaaccatgtanggtttgagtctgattcttatctagatactcatgagtatgcaatgaaactgtatgaagaagcaatagaggattcagtggcaagcaatgatgctcaagaactttttagaatggctgcggataaatttcaagagatggctgctttggctttgcttaattggggtagtgttcagatgtccctggcaaggaaccaaggtttctttttggaggatggggcaagagagtcttccttggagcatataaaagctgcatatgaattggcacaaaaggagtatgagaaagcagaaatgagatatgaagaagccttgaaaatcaaacctgacttctatgaagggtatcttgctcttgggcatcagcagtttgagcaagcaaggctgtgctggtgttatgcaatggcatgcaagaaggacttagaagctggcttttctgatgaggttcttaaactttataacaaggcagaggacagcatggagaaaggca

SEQ ID NO: 8570 - DNA, 960 bp, Glycine max
actttaacgccattgcacccttccttaagctcggaattcggttcgaggcacgaggaacgatgttcttgaatccgtgcttcaatctacaccttcttctagatggcgtgatttggtgttcttccagaacggaatgatggagccgtggcttgagagcaaaggtttggaagatgcaaaccaggtgttggcttattttgctgtctctaaaattggagaaagccctattgatggtaggactgataccaatcctgaaggactcactgctgcatatggcaagtgggcttctgttgtagctgctagattaaatgctggaggcctctcttgcaaggttcttgacaaggaggcgtttcaaaagcagatgttggagaagcttatatggatttgttccgctatgcttgttggagcacggcatggaggggtttctgtaggtgtcgtggaaaaggaattccgcactgaattgtccagccttataacagaactggcatcagcagcagcaagtgaaaaggggttaaaatttgaagaagccatggaagagcgcttgtgtgcatattctcgagctgtagcccactttcccacggcagttaaagagttcaaatggagaaatggttggttttgttctctctctgagaaggctaatgcccaaggcaagccagacccatgccctttgcattcccaatggctaaaagagttgagaattgtatgaagcttgaactctagtgtgtgtgtgtgatgtgtgcaaggttaccagcttgtaagagttatgtagacttagggtgtgtttgacctattcaactctccccttccttttattttttattttattgctttggaatgtgtaaaacctccgtccagtcatgctgaaacgggtttccaaacacacacttagccactaacaagtgatatagtttcctgagtgtaagtttaatttagttaataaagttcaaatttcatttccttcccagg

SEQ ID NO: 8571 - DNA, 478 bp, Glycine max
gttccgttatgcttgttggagcacgtcatggaggggtttcagtaggtgtcgtggacaaggaattccgcactgaattgtccagccttataacagaactggcatcagcagcatcaagtgaaaaggggttaacatttgaagaggccatggaagagcgcttatgtgcatattcccgagccgtagcccactttcccacggcagttaaggagttcaaatggagaaatggttggttttattctctctctgagaaggctacggctcaaggcaagccagacccatgccctttgcattcccaatggctaaaagagttgagaattgtatgaagcttaagtcttcaaccctagtgtgtggtgtgtgatgtgtggagtgttgtaattttaatgtttattttaaaagaatttcccattaccattaaaaaaattaattaaaaaatataataaattattgataactaaaaaaaaaaaaaaagggcggccgccga

SEQ ID NO: 8572 - DNA, 459 bp, Glycine max
gatcgacaaacacagctcaacaactgtgtctgcccaaaagtcatgttgatgttcttcttcttctccttgttcgcctccacttttcactgaacacttattactcactccttcatggccacttcgctctctttctccatttctcccaaaaccactgccacaacctcagccttccgattcaaagtctccgccatggctaccaccatcgccgccccttctaccaaggtggctcccgccgtcattgtcggcggcggaagagtgggtagggccttgcaggacatgggcaccggtcaagacctcctcgttcgccgaggagagtccgtacctcccaattttgagggtcccatttttgtgtgcacaaggaacgatgatcttgaatccgtgcttcaatctacaccttcttctagatggcgtgattcggtgttcttccagaacggaatgatggagccgtgccttgagagc

SEQ ID NO: 8573 - DNA, 401 bp, Glycine max
ggactctcgacaaactcagctctactgttgtgtctgcccaaacaaacacgctagtaaaatgaaccatgttgatgttgttcgccgccactgaacactgaacactgattactcactccttcatggccacttcgctgctatctttctccatttcgcccacaacctcagccttcagattcaaagcctccgccatggctaccaccatcgccgcccctgctaccaaggtggctcccgccgtcattgtcggcggcggaagagtgggcagggccttgcaggacatgggcaccggccaagacctcctcgttcgccgaggagagtccgtaccactcaatttcgagggccccatttttgtgtgcacgaggaacgatgatcttgaatctgtgcttcaatctacaccttcttct

SEQ ID NO: 8574 - DNA, 842 bp, Glycine max
cccgagccgaatcgatatctttcatcgcctacggcaacgcttcatttgaatcaacactccttcctcttcctctctctcgtccattttagttcaactttgaataattctccttcgtatcaagtcttcctcatcttcaccacctttttgtaagtggatatttatgtgtctaagaacataaactaaaaaaccaaggcgagtgaaagaaaaaaaatgtcaggtgtgtctctagcagtgtctggtccaccagcagcaacagtggctgaagcagcaggtacaaagcctaaacgaagaacagaacaggcaccaatgggtggcatgatgggttcactgcgcgtgatagaacttcagctggtggccttcatcttggtgttctcagcaagtggcctcgtcccactccttgatctagtgttccctgcattcgcctctgcatacatcttggcactttcacaattcgcatttccatcggcgtcttcgtcggggactgagatcttcaaagggagcagattgttccgaatgtatgttgtttttggcaccaccgtggggctgttcttgccgctggcttacgtgcttggtgggtttgcaagaagggatgagcatgcagtgcgttctgccaccccgcacttgttcttgctatcgtttcagatactcactgagaacattattggtggtttgtctctgttttcgccacccgtgagggcgttggtgccaatcatctacacaattcggaggatctttgtggatattgattggattcatgatgtctggctcaacaagactttgcctgtcaatgccaaatttcaggacttggcatggtattggttcggaaagggtctggcagtggc

SEQ ID NO: 8575 - DNA, 642 bp, Glycine max
gatatctttcatcgcctacggcaacgcttcatttgaatcaacactccttcctcttcctctctctcgtccattttagttgtaagactaagatctcatcttagattccattttgtctcttcattgcccccaaaataactttattttctctgaattattgcctacagcaactttgaataattctccttcgtatcaagtcttcctcatcttcaccacctttttgtaagtggatatttatgtgtctaagaacataaactaaaaaaccaaggcgagtgaaagaaaaaaaatgtcaggtgtgtctctagcagtgtctggtccaccagcagcaacagtggctgaagcagcaggtacaaagcctaaacgaagaacagaacaggcaccaatgggtggcatgatgggttcacttcgcgtgatagagcttcagcttgtcgctttcatcttggtgttctcagcaagtggccttgtcccactccttgacctagtgttccctgcacttgcctctgcatacatcttggcactctcgctattcgcatttccatcgtcatcttcttcttcaacgcgttcgttacacgactcggggactgagatcttcaaagggggcagattgttccgaatgtatgtcgttgttgggatcactgtgggact

SEQ ID NO: 8576 - DNA, 410 bp, Glycine max
cacatatcgatatcttttgcttcgtctctttcatcgcctacgcttcatttgaatcaacactccttcctcttcctctttctcgtccattttagttcaatctttgaattctcctccttatcaagtcttcctcatcttccccacctttttgaaattttggtgtctaagaacataacctaaaagctcaaggtgagtgaaaagaagatgtcaggtgtgtctctagcagtgtctcatccaccggcatcagtgggagaacaaaacgtgcctcaagcaggcacaaagcctaaaccgcgaacagaacaggcaccaattggtggcatgatgggttcacttcgcgtgatagagcttcagcttggcgctttcatcttggtgttctcagcaagtggccttgtcccactccttgacctagtgtt

SEQ ID NO: 8577 - DNA, 478 bp, Glycine max
  unsure (1)..(478): unsure at all n locations
tatcccgcaccacatgttgaactattgtggcngggtgaacaaacggtgcatgttattatcttaaccagatagggctttgatgaaacaaatgtttcgtatcagaactataacaccctgcttctctgtaaaaccttaaatggcatcttcctatctccacgcaactcatttccaatctatccaaatttgcaagccatcatcatgtctgcctccacactccaatgctcagaccacatcaattccatttcctactactcattatctgtacaaccactgcaacagctccctcatcccccttagttccactgttcccctcaaagcattatccacttccatccattcctcactttcttcccctaagccacctatcacaaaggaggatgccatacttcaggccaaaacatccctttcagcaaccttagagaagcccctaaacaataccaaactaataggcaaattcaagaaactaaggcaacccaag

SEQ ID NO: 8578 - DNA, 397 bp, Glycine max
gacgacagaagggtcatatctaataaactcattttttattattaaatttataattttactcatgaatgtttttcactatgtctaaggatccttctgctccaaaagcaaaagctcaggccatcaccgagtaatgctcatcagcacccgttgtcttcaacttcataattttgttaaatcgccaacaatttgaattggtaaataagaaagagtttaatgtcatataaaataattttatattattatttaatgataaattatcatttgaattattttaaaatttaataaatttatcctacattataaattgtaatcaaatacaaaatgtgtaaacaaatttacactactttatgtgaaaagcttgatcaagattggaagtccggaaacaagatagagctag

SEQ ID NO: 8579 - DNA, 610 bp, Glycine max
ggagtgaacacacacctacgaacaaacccaaccccgaatggcacagaagcagcacctccttctggatctatcccaaatctcaatctccaaaccctagaacattcaactctcccccgttccctttcaaaaaccttccctttccactcttccgccgcgattcgatctccgggctgccttcctttccgcgatttcgatctgaaactcgaggttgcggaattcggaaattgacattgaagtgttcaattggcactgtcaatgccattggtgtggtttgtgaagaatttttctgtggttttttgataccggaaaaacacaatgtcttgggcaggccctgaggatatttacctttctacttcacttgccagctattcttgacaagaaacttcttgtattgctgagagatggtagaaagctcatgggaacacttcgctctttagatcaatttgctaatgcagttcttgagggtgcttgtgagagggttattgttggtgatctatactgtgacatccctttaggtctttatgtgatccggggggaaaatgttgttctaattggtgagctggacttggagagggaggaacttcccgaacatatgacacgtgtttctact

SEQ ID NO: 8580 - DNA, 306 bp, Glycine max
ccaaacccaaaccccggatggcacagaagcagcacctccttctggatctatcccaaatctcaatctccaaaccctagaacgaacattcaagtttccccctttcccctttctcctttccctttcaaaaacactccctttccactcttccgctgcgattggatctcttgggtgtcttcctttccgcgatttcgatctgcaacttgagggttgtggaattcggaatttcacattgaagtcttcaattggcgctgtcaatgccattggtgtggttagtgaagaatttttctgtggtcatttgataccgat

SEQ ID NO: 8581 - DNA, 888 bp, Glycine max
caaaaggacaacagaaggggttgtgttgtgtctcgcttctcttcccaaactctcttcttcccttccaaagacccttttgaagtaatcgatggagtttcagtctctttccagattctaccttcttctttccttaaccattctcttccttgcaccctttcacgctcaagctaaaattaaagtcacttactgcgataagaaggcagactatcctgtgaaggtgtctggagttgaaatatcaccagaccctgtggagagtggcaagcctgctacctttaagatctcggctacttctagtaaagctatttatggtggagaagttgtaattggagtttcatacgttggggtgcctgtccatactgaaagaattgatctctgtcatgaagtatcctgtcctgttgccaatggcaattttctgatttctcacacccaaacattgccttcgattactccaccgggaccctactctctgaagatgacactgaagaatgatcgggacgaggtgttaacttgcattaagtttaattttaaaattgtttttggatcttttgtgtctgatatgtaaagtgtcctttgcatgcctgatctggggaacttttttgctttgttgtgaagtgttttattgtattttgcactgtatatcacctttcaattcaagagtcgtatcgtataaggccaatattctctaatgtcagagtcattagactcacgatgttgtataaggtccatgactgaatttctctttctgtatttgcatagtgcaatccatagttctgaattgcggtcgcggctgctatgatgcagattgcggcatgaaattattatatgattgccccgaatgcaaaaaagagttctccagttattttaattattgatatatcttttgtttgc

SEQ ID NO: 8582 - DNA, 622 bp, Glycine max
gatcttgagtaagtaatatctcccactcattcacttactttgacattcacattcagaacacaagcagaatgcagagaggcacgccggtgagaaagccacacaccaacacctccgatctcctcacttggtcggaaactcctccgccggattccgccgccgccgccaccactcgctctggccagccttccgatagaatcagtaaggttctccacggcggccagctcaccgacgaagaagctcagacgctagccaagagcaaaccatgctcagggtataaaatgaaagaaatgactggaagtggtatatttgctgccaatggggaagattctgcatcagaagccaattctgcaaatttgaataacagaacaagcatacgcatgtgtcagcaagcgatgaatggaattagtcagatatcattcagcactgacgaaagcatttctcctaaaaaacctacctcaatacctgaggtagcaaagcagcgtgaactgagtgggactatgcaaagtgattcggacacaaagagtaagaagcaaatatcaaatgccaagaccaaggagctcagtggaaatgacatatttggccctcctcctgaaatcgtgccacgttcagtggcagctgcacg

SEQ ID NO: 8583 - DNA, 388 bp, Glycine max
gatacccttctctcttatttctctttcaattttcaccttactcattgtttctcccaccttacctctttgtccctctgcttctcgctgtgaaacttcattatctttctctttctttatttactaataccacttcacctcactttgctttcattctccataccctatcaaactccactttccttttttcctctctttgtctctctctttctacctcacatcacacattctcatcctctttttatatccttcccctccaaagctgagagagccacaacacaaccaaaaccctatattattcacttggtcaaacactctttcacttgacaaacaaacacttcgtgtagctacaatggaagcgtattactacaagaggcaacatgttccagca

SEQ ID NO: 8584 - DNA, 564 bp, Glycine max
cctcgagccgaatcggctcgagcagcattagaccatgaatctattctttccaaacctcactcactccctcttctctcacaatgccatctgtggccactttacagaacagttagttaatgatgtcatcttttgttgttcttcatggcctgcatggctctcttctccgctcccagttcctaggccaagacaccctcactcatctctaccctcgtaacaaggcttccaccattcataacaagccaacaacagcacaaccacgtgccaaatttgacatgctgcaagtcttgggaggaagaggactatgcaatggagaagcaggtcttaaacaagagctgaagagggaacttggtgttgatgagaaggcaccagcatcagcaacaagtgacaaagagcaagagttagaggaggaatcatcaacaacacagtccttggcaagtgttgctgcagaagatggttttgagaaggaactgatggggttaactggggggtttccggggggtgagaagggtttgaaaaagttcattcaggaaaaccctcctccctaaaaccaagtcaagggagcaa

SEQ ID NO: 8585 - DNA, 377 bp, Glycine max
tctcactctctctctctcctcagtctgacccaaatggaacatctctagagagagaaactaagggttggatttttttggttcagttgccaccacagcctctgactgtctagagggacattggctccccacggatgtgcccagagcaagattgttgcacctactgtaagcacaaatcaaatgccatccctaaaaatgaagagcaaagtaagcgtgagctgtttaacagaaacaaaggatcttcgtgtgtgtccgaaatcaaaaataatttccaaaagcccgtgttctaaaatcatgatttctacacaaaaggctgaaatagacaccactgttcaaaattgcctagatgtttcctcaaggacgcagcccaaagacattgc

SEQ ID NO: 8586 - DNA, 662 bp, Glycine max
gaataatagtcccttttctgaaattctcctaactctctctctctctcaacaatggctcgtacttttgttcttatgttggttgctgctgctgcattgttgttgagctccacgatggctcaatctccagcttcttcgccggctttatcaccgaccaacacgccggtggccactccaccgaggagggcgttgtctccgtctcctgttcctgctgcggtgccaccgtcgtcttctcctccggctccacctacttcttctccttcggagcccccaattgcagctgctactccgaacatccctccctcgaccatctcgactccaccatctgaagcaccaggaccagctgcaaacggtgccgttttcaacagagttggcggatctgctctcattctaatcatcgcttcggccatgctcgtatagaacaaattctgtgggattattcatgaatacttgagttttttgaactccagtacttttttttcctggtgtcgttgaagacgattcatttattttaattattttatttatttattcattcatatgattgatgcatacacacatatgtataatctctttgcgattataacatatatgatagatgtgcattagcatttgtcatttgtaactatttaattaattaattaattgctcgtattttaataagg

SEQ ID NO: 8587 - DNA, 394 bp, Glycine max
gggtggtcccccactaatattcacaaatttggtccttctattttgtaaaattgtgcaatgttggtcctccagaccataattggacgttgaggttaacaagtgatgttgattgccacgtgtcatgttctgattggatatcaactccatgaaagatgaaataaattattgttttcattgatcaatcaaaacatgacacgtggcagtcatcattcaataagaacgtgacacgtgacagtcgacatcacttgttaacgattaacgtccaattgtgacctaggggatcaacattgcacaattttactatataaggagaccaaatttgtgaattaaattacttgaggaccaaattcgaaactggagataaactgaggaaccaaaaatacaattttgccaa

SEQ ID NO: 8588 - DNA, 307 bp, Glycine max
gaaggcaacaaactgaaccagagccaatccttttcttctcccttgttttgaacaccctctgtggatacccttttgttaaagccaattgttttctcagatttgaggacaaggaggtggtgggggaggagataatacagggagaaaaacataatagagagaacaataaaagcacaaacgtgaggctcttgttgaaaacacacaattagatataccagttgtcaatttgtcatatctgaaatttctcaagttgtgtttgtttgtcgtacaattgtaagttcagctgcatccttatattttggttcacata

SEQ ID NO: 8589 - DNA, 406 bp, Glycine max
ggagtaagcaggcggcatggcattctcagcggtctggcgactagcgaatcttgggcgacacttggatttgagtgaatcagtgaacaaggctgcgccagttgggtcaatcaagttgaaggtagcttcagaggtttctgaagcattatcactgggtcgtgctgttgttgctcttgaatctaccattatttcgcatgggatgccatatccccaaaatttggaaactgcaaaagaggtggaacgtattgtaagagagaacggtgcagttcctgcaaccattgcaattttagatggcacgccttgtgtaggcctaagtgtagaagaacttgaaaggctagctattttgggaaccagagctcagaagacagctcgaagggacatcgcacatgttgtagcttgcggtggaaat

SEQ ID NO: 8590 - DNA, 694 bp, Glycine max
gatgagtgttacgtccgtcgaaaggtacgaaatctattctctaatttctctgctttgattttatacatcataattttgattgatatgcgaagcagcggccgagtttgcatcaacggtgggaaggcttcaaaggggagagaatggacggtgataaacccatcttcagcgtgaggagagcgtccatcataggacggtcgcgtgcgagtttgacggtggagatgtacgataaccccggtgaggagtaccagatcgaggggtgcttctcgcagcgttgctgcacggttttcaatgtgacgaaggagtcggtggctgagattagtcgtaaagtggaccccaccaccagcgtcgtgcttgggaaggaggtgttctccctttgtgttaagcctggttttgatgcgggcttttgccatggggtttgtgctcgtcctcgatcagatcagcggtgaggattacgttgatgatcgtgcctccacggagcctgcggtgcaccccgccacagaagattagaagggaatagagtgcatttccagctctctctgccatgaatgtagtttacaaatctttggggtttgggttgtccctcatcaagggaacctctgccccttcttttctggctcatcctcatgccctttgaaagaatcaacttttcaattcccaatgcgactgtgcctctgtcttcattaacttgtgatgt

SEQ ID NO: 8591 - DNA, 611 bp, Glycine max
gtggatatcatctttgtagatattttttctccccacgtttgcgatagagataacccacccatgcatgcttccatttccatgtaccccacattatgaattattaattaattggtgccataaattgcatatcgtggatgcaagaataataagcaccccacatcatgagcacactttgtatggcggaaaatatgaaggaggtggaagttgaagatggatatgtcttgaaagaagagatccatctcacggtgctaaaaacctctctgttcttcgcgggcgatggcttcagcgtctacgattgcaaaggtcaactcgtgttcagagttgactcttatggacccgacactcgcgacatagacgaactcgttctcatggatcctaacggacgttgcctcctcaccgttcgtcgaaagcggccgagtttgcatcaacggtgggaaggtttcaaaggggagagaatggacggtgataaacccatcttcagcgtgaggagagcgtcgatcataggacggtcgcgtgcgagtttgacggtggagatgtacgataaccccggtgaggagtaccagatcgaggggtgcttctcgcagcgttgctgcacggttttcaatgtgacg

SEQ ID NO: 8592 - DNA, 903 bp, Glycine max
attttgcttcagtcgtgacggttgtcagatgggggcggtctgtatatgcaaatattcagaaatttatccagtttcagcttacagtaaatgtggccgctctagtgattaatgttgttgctgcagtttcgtctggtgatgttccattaaatgcagtgcagcttctttgggtgaatcttatcatggatactctgggagcgctggccctggcaactgaaccaccaactgatcacctcatggatcgaactccagtgggtcgaagagaacctctcataacaaatattatgtggaggaatttgctgatacaggcaatgtaccaagtgtctgtcttgcttgtactcaatttccgaggcataagcatactgggtctgagccatgacagaaaagcccatgcaatcaaagtgaagaatactttgatattcaatgcatttgttctctgtcaaatctttaatgaatttaatgctcgaaagccagatgaattcaacatattcaaaggagtcacaagaaactacctctttatgggtatcattggattaacggttgtgcttcagattgtcatcattgaatttcttggcaagtttacaacaacagtgaggcttaattggaagcagtggctcatctctgtcgttattggattgattggttggcctcttgctgtgattgggaaattgataccggtgccaacaactcccatcaacaacgttttttcaaaatttcgaatttctagaaagaaggaacctgaggaatctcaatagtaaattggcgttgtgctgtttcaaacaatctcattctgctgtttcttttgttccctgactgtcagcatatactggaatggatactctgcatacgaacacgtttatctttctactgatctaactttaccttaacttgtctatttgtagagaa

SEQ ID NO: 8593 - DNA, 932 bp, Glycine max
gattactcgaaactatttttgagccactagggtacgtgttcgataatactgtggtttctgttcttccagactaaggtaaacgaaagtgcgcaatgcatgcaagcagcaaaatgggtgaaaaatataaaccttggatcatctttcttcatctactagtaatcacgtgttcctgcaatagaagctgcagagccaggggattgattgaaacagaagacaaattcttcaaagcaacctcaaatgatcatcatgaaacagaacatgcacatgctcactctcacgtggatcacatagatccttctgtgatggtgtttttcaccatcgaagatttgaaggttgggaaaacaatgcctattcattttcccaagagggaccctgcaacatcccctaagttgtggccaagagaagaagcagattcacttcctttctcactgaacaaactcccaaaccttctcaaaatcttctctgtatctcaaaactctcccaaagccaaggccatggaagatacccttagggaatgtgagaccaaacccatcaaaggagaggtaaaattctgtgccacctctttagaatccatgcttgacttcactcaaagcattcttggcttcacatctgatctaaaagttttgtccacctctcaccaaaccaaatcaagtgtcactttccaaaactacactatgttagaaaacatcatagaaatcccagcttccaagatggtggcttgccataccatgccttacccttatactgttttttactgccacagccaagaaagtgagaacaagatttatagggtcccacttgctggtgaaaatggggatagggtggatgctatggttgtttgtcacatggatacatcacaatgggggcatggtcatgtttcatgtcaagttctgaaggtcaaaccgggaaccacttctgtgtgccactttttc

SEQ ID NO: 8594 - DNA, 345 bp, Glycine max
  unsure (1)..(345): unsure at all n locations
cgtgttcctgcaatagaagctgcagagccaggggattactagtagatgaagaaagatgatccaaggtttatatttcttcatctactagtaatcacgtgttcctgcaatagaagctgcagagccaggggattgattgaaacagaagacaaattcttcaaagcaacctcaaatgatcatacatgaaacagaacatgcacatgctcactctcacgtggatcacatagatccttctgtgatggtgtttttcaccatcgaagatttgaaggttgggaaaacaatgcctattcattttcccaagagggaccctgcaacatcncctaagttgtggccaagagaagaagcaga

SEQ ID NO: 8595 - DNA, 485 bp, Glycine max
gttccctcttcgtagccgcaattgctcttccttcgcgaagaagaggtaacagcatctgacaccagcgccagttaccgttttccacgcgctttcttccttctcgaaacgccgtcgtttggctaccacacatatatttagcatcactgcttcgaaccttctttttctcaccgacgcagtttccggttttaaggaagcatgggaaaggttcaggtgagtgacaaggaagaattctctcaaatggagaacaacgatttcagtgattcgcagttagttcatcacttcagaggtgtgcttgttgcagtgacaacgggtgatcgagagaattacgatgagctcgttggttatttgcacccgaagaagcatcttaatcctgatgaggttgctatacttgtgacgactttgaaggcgctttctggagcagtgtcctatatagattctgttcatcatgaatccctgctctttgcctgttcgagaatgagactctg

SEQ ID NO: 8596 - DNA, 411 bp, Glycine max
actcttccttcgcgaagaagaggtaacagcatccgacaccagcgccagttaccgttttccgcgcgcttccttccttctcgaaacgccgtcgttttgctaccacacctatatttagcatactccttcgaacctcctttttctcaccgacgcagcttccggtttttgcttagggttttaagagagcatgggaagggttcaggtgaataacaaggaagaattttctcaaatggagaacgatgatttcagtgattcacagttagttcgtcacttcagaggcgtgcttgtgcagtaacaactggtgatcgagagaattacgacgagctcgtcggttatttgcacccgaagaagaatcttaatcctgatgaggttgctatacttgtgacgactttgaaggcgctttctggagcagtg

SEQ ID NO: 8597 - DNA, 514 bp, Glycine max
caactctttacttagttacttaattaattataagcccccttatttttcgaaatgagaaagagactcttctcacacttcaattaattaatttactttacttttctttcctttgtttcaaagctagccatccattctttcagggccttgttggcttccttttgatttctctgcttttcaatacacaacacaaaagctctcttttttttcaaacactcttcgagaaaaatcagatgggtgaagagcaccacaaccatccaccgccaccggttcaggcacctccggcaggtccaccaccgccaaatctagcactttctagaggccccgtttggcatccagctgaacaactctcgcagcttcactattgcatccactcaaatccttcatggccggtggcaattctactgggttttcagcactacattgtgatgcttggaacaacggttctgattgcaaccacactggttcctgcaatgggtggggaccatggtgacaaggctcgtgtgattcagtcatt

SEQ ID NO: 8598 - DNA, 653 bp, Glycine max
tcttaactggttaggttattaaagggcccgagccagcttaactcttaggggaggagaaaaacccttagccgccagcattcgttgaactcattcttcttcaactcaacagagcaagggttcgcactcgcagattcttgagcaagaataatggggaagaaaagaaaacacagtgagactactcaagctgtagcacaacccaaaaaggaagaggctgctccagagagaccggctaggacccttttggggtggaaggataagaatcaagttgaggatgattcaccaatatttaggaacaaagagaagctattggtcacttgctctaggcgcatcaattacaggtaccggcatttgatgttgaatttggtcacacttttgcctcattgtaagaaggataacaaagttgaatcaaaggaaactaaaggagccaccctcaacgagcttgttgagctaaaaaattgttcctcttgtttattttttgagtgcaggaagcataaagatctttatctctggatggcaaaatgccccaatggcccatctgtaaagtttctagttagtgccgttcacacaatggaggaattgaagctaacgggaaatcacctacaaggttcgcgtccaattttgacattttcaacaaatttttgaaaaagatgcac

SEQ ID NO: 8599 - DNA, 466 bp, Glycine max
cgatctctcgctcgcagcagcgaggaatcaaatcggaaattcagactctcactcttcccttctctcctctccttagcttccactcattgtacacaaaattctgcagagacagagagaaaagtgttgaacatggcaggaagagaagttcgtgaatacaccaacctcagcgaccccaaagataagaaatggggcaaggggaaagataagattgacgatgaagacattactttccaacgcatggttgcaaagatgcaagaggttgctggggagcgcggaggttaccttcatggacgaggcgccttggacagtgatgatctactttatctcaaggagcaaatggaagccgaggaggatgcagagcgcctcctgcgtcgcactgaaaaacgggcatttgctgcatttaagagagctgcaagtttagcagattcttcacccacctcagtacctctggcatttcgggttgagc

SEQ ID NO: 8600 - DNA, 557 bp, Glycine max
gaaggggttccagcattaagaaatggatagaatttagacaactaagaaagaaaaagaagaaacaaaggccaaggcgttgctgaatcgcgactatgatcattccctactttgtcccttgttctgtgttcttcatgtgaccgtcggttagttttgttttttagatttaaatgtgatctatgtacccttaggggtcccccttgttattatgtgcacatcccatcttccccatctatcatcggcgatctccctttttctttgtaaagttcaatcttaaccgatcactagtgttgtaaagttgtctttaaagagattgacagttaataagcaacaccaagatataagcaactcacaactaacttctttttatcaaatatcacttgagatcgtttcaaggtccaacgccttaaacaactttttgttcgcaattaaaataaatctttcaaaaacataaaatcaatttaacacacaaacttgcagacttaaaaaattacgtaggtttgaatttttcatcgcacctgatgatacataggagtaagggcaacacccatgtcgccccc

SEQ ID NO: 8601 - DNA, 608 bp, Glycine max
gagattatctttatccttttagcctttgggtacccctctgtgtggcagtgcatcttcatctgaagtgggaagctaaactcaagggtcaaaaagagcacaggttagtcatgacatcttcattctcaacgcagttggtgcaaagtcagaacctacctcctcgttttcatcgccatgtccaggggaattttagccaagatgtgtcaaaggtttcaatgacacatgtggtccgtagcagtaccaaatcacagcttggttacggtaaaacgttggcatcaagatctcactatgctgccagattttcagtctcacgacaatctgaagcaaaatcaatcacatataggagaatgacatgtactaatgctaaggaaaatgttctacagctgcaagccaaagtgacgaacaagtgcttctttgatgtagaaattgggggtgaacctgctggcagagttgttttcggcctatttggagaagatgttcctaaaacagttgaaaatttccgggctttatgtacaggagagaaaggatatggctacaaagggtcctacttccatcgtataatacaaaaattcatggttcagggaggggacttcactgaaggaaatggaact

SEQ ID NO: 8602 - DNA, 471 bp, Glycine max
ggtagcgctagtttgtatgttcctgcaattgcaattttcaagttgctgacgttttgaggagaatccaaagagcaaaagcaaaggcaaaaatgatgctaaagagactgttactgctactaaaacccataactgtattttcaccaccttcccacaccaaccctcagatcttacagttcttggagaataggagaaaggtgcaccatgatgcaataaacttttgtcaagccattctgcaaaaaaagtcaattgaatggaaagctgtgcaccgtaacaatttgtcacagcccatcaatgatgttgacctagttgttacacttggtggcgatggaactcttctgcaggccagccatttaatggatgacaaaattcctgttcttggagtgaattctgaccctacacaaattgatgaggtggaagagttcggcagtgaatttgatgctcgcagaagcacgggccatctttgtgctgcta

SEQ ID NO: 8603 - DNA, 434 bp, Glycine max
ggacgaagaagaaaatgatggctacaaccgcgcctgtgcggtggcaaccaccaaacattaggtttaggattgagccgaagagagcgatgagagtgaaagcctttggtaagggaggcagggatatggatagggtttggagtgaggcgtggcgaagtgctaacgatgggtttgagcggttcgtcttcgaagcgaagaagactgcggagcgcatcgaccggcgctattccctttcgcggcgtctctcctccgtggcaagggcggccgcagaccgagcccgcgagattgatcgtgagtttgagattggacaacgttaccgcactttgagcatcgatttccaaaggaaactggcccaagtacaggaagcagctcaaggactttcttgatagtccgcttggaaaagagcttgctacactgctgttcatcttgttagcact

SEQ ID NO: 8604 - DNA, 567 bp, Glycine max
  unsure (1)..(567): unsure at all n locations
attaatttctttgccagaaggatcttttgcaacgaagcagtcatcatcaatggtgaagatgtacttcttcttagacaacaagaatccgaaacagcgacaagcagagtctttgaaggagatgcagtgtgccttggggccaagaacgcggttgatgtcgttgcggttatagagttcataatcaaacccttcaggaaccttgataaccttcgaaggatcaccgtcctgcactattatcaaatgataaccctcgaagaagggcctccacatccccaagaagtccaggttacgtatcgtgggaatcactatgtccacctcctccttcagaatcggcgttgctgctgctgtgcttcccgatgacgaagacatcgttccttcctcttcctcggatcgtaggttttgctgagaaagacaacgttgttgttgttcttgttgctgctgctttcgagcttcgaggagcacgaggatggtgctgtgtntgttactactttgtctgcattggagtggggggcttatgtagtagttcaaactctcgggatttggcacgtgccgaaagcgtgtatgtgtgag

SEQ ID NO: 8605 - DNA, 452 bp, Glycine max
ctgccaaaagaccactgaaaggggttcctaatcgtttccctgaaaaaaccctaaaaccagaaaacactccaaactgaaaaattccatctttctctttcaacgttcctcaaatcaatagcgcattctaagcttcgcgagcaataatttcgattgctttcccaacatgaccgcttccaacaagaaaaaccacaaagagaaaccaattcgccgcaaggaagaaaaaccggaagaaccggaagtgccgaaatacagagatcgagctaaagagcgtagagaggatcagaatcctgattatgaacaaactgagcttggatttcatgcagttgctccacctggtactgtggatattcggtcatctgatgcgcacaagttatctattgagaagagcaaataccttggaggtgatgtggaacacacacatttggtcaaaggtttggattatgcattgctga

SEQ ID NO: 8606 - DNA, 658 bp, Glycine max
gttttatcagaagcatgcgaaaagggtgtggtggaaaatgcttcatggaaaactgaaactcagaataccgaagaccatcccgaccaatctcttgctacaacaccattaccgctttccagatcattgcttccattatccttttcatcaaagggtaagccaccaagatcttttgttactaccatctccagttctggattgtttgtgagccaaaagcttgggaaatcaaatgctccgcggtctcaacatcaacccaaatgtgtaaagcctttgcaaactgttccagatgatgactctcctgtcacctgcatcaaaacttcttctcccaacggcaagaggatctcctctcctaattgtgacgtgggatcatcacctactactcgcagaggtgggaggaagttgatattacaatctatctcttcatttccttctctcacccctcaccattagaatgaagatcttcttcttcggcttaagttagcctacccccacccctcttcccttggttcacgttttcagtttgttgcagttggagctgtatgcttagggtgaatgtacatgattgagtttcgttttactttcgtaatatgtttgttccgttcatttcataatgtacaacttcagttcagttgtataatatctatcttaactgatggttatc

SEQ ID NO: 8607 - DNA, 756 bp, Glycine max
gtattaaactttgaaataaataaataaataaacgggaattaagcttcccttttaataaaaaaattacacagaaaagtatgaaatgactaattaatttttggccaaactaaatgtatccttcaccgaaaataatcttggtcaagccaaactattatgaatagcaaatacaaagtcattgtttaatttaaaaactgtgacacaatgaaatagtcgaatttgattgagtcaagcatggtgatacagattgcaaaaggccatagtcaagctcagcaacaagtgtggccttgtattcaacaattgtacagtagcttcaagtttgaacacttcactatgactgcgagtgagacagaacaattcattcaaatacaacaacaatgattcacattacaaccacaaccatgtgagtaaattccacaacaagccagagcaactcaattcgattcatcgcattatcaatcaattaattacactacgcgctttcttcaatttcattgttagagcaacagcaacaaaatatgccttcaaacgaaaagaggatcaaaattatatatatgcttgtatttgaaatcaagaatctgaattactacaggaatactaagtatatgattggaacctaataattaatttgcctctctgttcatttcaatacaagtgtcaacgtgcactttatattacataataattgatcgatataaaataaaataaaaaagctatataaaattaaaatgttatactgacgctaaaataaaaggagta

SEQ ID NO: 8608 - DNA, 511 bp, Glycine max
gagagtggcactccactgttactaaataaaggtttcaactttgaggataaacctcaccagttccctggttgaaacgaagcgaaatttccacctgcatcatcttcaaacctgcgcttcttttgaaccgatttgtgctgttttgttagtgaagcacatcgagtgcaaactgtcgaacaggcatggcaagcctgttgacaacatcagccatcacctattctcctctcaacaatggttccaaggatttcagaaagtcagggaattcttctaaaggaaggtgttgcataaaagcaatggggatagagaaatccttggaggaattgtacaatgtgaaggtggaaagaaaagtgtctcctgagaaactagctgagcttggagtttcaaaatggtcggtgtggaagactgggaaaagcaagttgccctgggactggcaggtagaccaactggtgtacattgaagaaggggaagtgagagttgtgcctgaagggagcaaccgtttcatgcaatttgtggc

SEQ ID NO: 8609 - DNA, 858 bp, Glycine max
ggctctaaataatagaaaagtactgtgggatcatcgaggagcgagggaacccaaggccaaatgcctcaactcaaccctctcactctcacgctctcatactcattcgctcactcgctcaccctctagggttttttggaatcagaaaacgaaatagggttttagcggaacgatcatggcaccagctagggttttcggggcaatcgccggcagagcgttcatggcggcggcggcgaagagcgcggcgaagaagaaacccgctccgtccagcggagccgctgcgaaagccgctgtgaagaagacggccgcgcctaggaccaccaactccggcatacagaaggtggttccggtgtcttccgagctcggagacttcctcggcgctcctcaagtgtcgcgaaccgacgccgtcaagaaagtctgggcctacatcaagctgcagaatcttcagaatccagcaaataagaaggagatcttttgtgatgaaaagctgaagaccatttttgaggggaaagataaggttgggttcacagagattgctaaattgctgtctagccattttgtgaaatctggctgatattcacagctttgatggtactgttaatgattataacttgttctagtacattaaataggtcattttgtcttcaagtacgtggtctgtgaccaaaccggtaagagacatggaaatttgtggtatcagacttagggttttttgaaagtggtgttattttgtcaaaaaagaagaaagtggtgttatttgctccactgtcttgtttcacattcctagggttttagtatatatggatgatatttccaagcctgtgttcatcatcaccatggttattcagctattcatgattt

SEQ ID NO: 8610 - DNA, 376 bp, Glycine max
  unsure (1)..(376): unsure at all n locations
tcacaatgaggatacaaaagctccctcttctgatttaaagttgaggaaaattgctggcagaatcgaaccataaaatcttagccatcactgagtgatctcttttccccagttatcttttgcctctttctgatttttcgatccctaaatttcactttagtttttttcttagtctaattatatttgtgaatgtgtttttagttgtgttctatttgaatgtgttgaggtcagtgatgaattcaatttgcctacattggctgagtatctggtttttattagattatgatgtgtcncaacagtctgaggcctctgagtctgtgtattccattttgtaatacanaaatgtaattttaattttgtatcgcgtaggattgaatct

SEQ ID NO: 8611 - DNA, 440 bp, Glycine max
agggaaccacacaccacatcggagcaattaaggtccgtagattccgttaacctcctcccaaatttcacatttgcgggtccaatccccgtttccgaacgctcgaaaaggtggaatggcatccccgaccgaagttatcgacgtcgacgccgaaaacgctcctactcctactccacctcctcttcctccaccgcaagatccgaaatcgaatcgcgccaagaccatcatgcggaagccgaagaaggttccctcgttgctgcaaaacctaaagagctacgaggagaagcaagcccacgtcgagaccctcgagaaggagctcgacgcgctgttccgctactaccaagaagtcatggctcagaaagtgcgtgtcgagctgagccagtgcggtggttcgcgaaatgttgtcgtcgcggcgctgatggaggagagcgaccttccactgt

SEQ ID NO: 8612 - DNA, 359 bp, Glycine max
gctctgaatggaacagttacagtcagaccccttccaattggatcatcagtcagtggaaaggtagagaagcaatgtgctcatttctttggtgtgacaataaatgagcagcaagctgagtcaggcattgtagtaagagttacttcaactgcacaaagcagatttaagttgctcgactttgaacaccgatgccaatggaggctatggtttggcattgcaggaagacagtgagaagactggcaaggtgacatctgcaggaatgtatttcttacatttccaagtgtatagaagggatccaccggtaaaggcttaaccaatggcaaaggatccggaaggggccttttttaaaaaattggaaggtc

SEQ ID NO: 8613 - DNA, 398 bp, Glycine max
ggagttggaataccaattttggcgctctctctgtatttctcttccttctctttcatttcccctctcttgttggttcaaaattatactctctctaagttttaaccttatgaatatggatatgtgccaaaatgtatcagtttccggtgagtgccaacaagtgcaggtttttgccccttcttgctcaagcagccttgatgacctcttctctgctcagaacacggaagtggatgttgagttggagtggctttcagagtttgttgaagactgtttttcaagccctccaagctgtgtcttggtacctattggtgtcaagactacaagcacaagcaccaacctttcttcaggcacattgaagagaccccaacaacaaaatgagtcacctttgcaaaactttgctg

SEQ ID NO: 8614 - DNA, 653 bp, Glycine max
cccacgcgttcgcccacgcgtccagcttaccttacctgaagatggcttcggtgtcctttgccgtgggacttttaccttacgcttcagttcgatttcccgtattgagcaacgccaactcactgaaactcagttcctcagctagcatctctactccaattcttcagcaaaagctctgctctcttctttcccccctccctctaagccctcgccctcgccctctcaccattgtatccgctaagggctacaaaatgaaaacccacaaggcatctgcaaagcggtttagggtgaccggacgaggcaaaatagtgcgtaggagagctggcaagcagcatttgctcgtcaagaagaataccaagcgcaaatcccgactctccaaaatgcacgcggtcagcaggagcgactatgacaacgtaattggagccttgccatatctgaaagtaaacagaaatgctacatagatgttctgtttgaaaaactgagtcataagcctagctgggtttagtctagtgatttgtgacgtctcaaatctgctttcaaatgtttacagttagtttttgctaattgagatatcagtacctcaagataatggtacaccttcctgtatcatgtaacattggtatttattgacattattgtattgcaatttgtttgcc

SEQ ID NO: 8615 - DNA, 550 bp, Glycine max
gactcagctttatccataaagcacaatttttttgcttcaacgggccttaccttacctgaagatggcttcggtgtcctttgccgtgggattattaccttgctcttcttcttcttgctatacccgcgtctcttatggttcagttcgatttcccgtattgaacaacgccaactcactgaaactcagctcctcagctaacatctccagtccaattcttcaccaaaagctttgcactgttccttctccccttgctctaaggcctcgccctctcaccattgtatccgctaagggctacaaaatgaaaacccacaaggcatctgcaaagcggtttagggtgacggggcgaggcaagatagtgcgtaggagagctggcaagcagcatttgctcgttaagaagaataccaagcgcaaatcccgactctccaaaatgcacgcggtcagctggagcgactatgacaacgtaattggagccttgccatttctgtttactttcagatatggcaaggctccaattacgttgtcatatctgaaagtaaacagaaatgctacatag

SEQ ID NO: 8616 - DNA, 429 bp, Glycine max
gagaggattggatttaaaaaagaaaagacaaaaaccgcattgagtggggcctgccctaaaatggcccttacagagcttctctatcaagagctgctagttggtggttgaggagtaataggttccgcataagctacatttcgtgggggaggcacctatccagtacttccgaactcgtctttcatctacagacattgggtcgctaaagccaatagttcggtgtccgggcaacagccaagccactcatctttggttgcagcttcggcggaagcctatgctttcagttcagttccattccttggttctccggttgattgccctgcccgcgtcacaccttaaaaagctttggaacggcagtttcacttacttctcacggacattggaccttcttcaaactggcctttgaactttagcaaagagtctattggatag

SEQ ID NO: 8617 - DNA, 338 bp, Glycine max
ggaacaaaaacttcctttgacagacgaaacgctgcgttgagagtagtggcgcccaaattctgcactgaaccgaactctctgttcgttcgcgttgcgctctctccgaaggattcgtttcaattcgaaaactctctgaagtgttctgatggatgtggagtggtctgattcacggtacgatggtagaaatgataaggaggattccccggtgagggagcaatatgacaatgatggggcggagaaatctagcaagcatagcggcaaggacaggaagaaggagcaccgtcgggaacatccaaaggatgcttcaaaagaaagaagggaacggaagaaggaagata

SEQ ID NO: 8618 - DNA, 362 bp, Glycine max
gactcgagcgctcgaccgctcagactctcctcactcgctcgacctagttagaactgtgctagggttttacgaaaccaccgaagttgcagaaagaagaaaagaaaaaatggtggctgacaggagcaagaagccgaaggtctccgacaagggcgaaaacctcgatgaaatcgacggagaactcgtcctctccatcgagaagttgcaggagatccaagacgagcttgaaaagatcaacgaggaagccagtgacaaagttctggaaatagagcagaagtacaatgagatacggaagcccgtttatgataagcgcaatgatattatcaaggctattcccgatttctggttaactgcttttttgagtc

SEQ ID NO: 8619 - DNA, 490 bp, Glycine max
gaaaacaagtcgtacacgttgaaacggagttctaaatttccggcgagttttcctctctcgaatctgcgacaccgacgaatctcactcaccggaatttcgcattcagaaaatggctttaggtggaacagctcccccaagaggaagtgcagcggctactgcaagcatgaggagaaggagaacaaccggtggtgcggcctctggaggagcagctggaactatgctccaattttacacagatgatgcccctggactcaagatctccccaaatgtggttcttgtaatgagcattggcttcatagcatttgttgccatccttcatgtgatgggcaagctgtactttgtgcgtagggaggcttagagaatagatcaagatgttaggtccaattttttggattttcaatacacctctgttatgaaatttagatttttttgttgctggaaccaacccttcctttgctttttgtcttttggtactgctattttttaagtt

SEQ ID NO: 8620 - DNA, 422 bp, Glycine max
aggatgtgaacaggtgctcgctgatgccactattaagagagtgaagggagcgagtaacagaatcacgcttcaaatcatctgcattcatttttcttctctctacttcttctgcgtcatcttagggttttggtttgtgctcctctcactgattttctggagatggcttctttcgggccaaatggaactgaaaatgaggattcgttgcctcccccacctcccgttgtaccatcagatgttgtacctgttaaagctgagccggagaagaaaaaggcttcaaggtttccaatagccaggcgtggccttgcttcaaaagggacgaagctgcaacttctcaccaatcactacagagtgaacgttgcaaacactgatgggcatttttatcagtatagtgttgctcttttttatgatgatggacgacctgt

SEQ ID NO: 8621 - DNA, 167 bp, Glycine max
aacatcaaacatgaatcatcaattcatggcagcaattaaagtgttttggggtatttacatctcatccatgaacttataaacataaacataagatcataaaatctacccatggcacattttcattcatgcaaaggaagaaaaagagagaactcacatcctttaacctc

SEQ ID NO: 8622 - DNA, 437 bp, Glycine max
gatcctctgcaacggcaacagactaagttgtttctctctctagccctagggtttcgttctctactaccgttctttcatcagatcgctgccgtttctggcgtcattccgataattcggcggcatgaagctaacagtgaagactttgaaagggagccatttcgaaatcagggttcaaccctccgatactgttatggctgtcaagaagaatattgaagatgtacaaggaaaagataattacccatgtggacagcaattgttgattcacaatggcaaggttttgaaagatgaaactacattagtagagaataaagtctctgaagatggctttcttgttgttatgcttagtaagagtaaaacatcaggttctgctgcagcttcatctgttcagcctgccagtaatcctcctacgactgtatcaacgtcaaattccacccctc

SEQ ID NO: 8623 - DNA, 304 bp, Glycine max
aggattctgatgtggcacacaatgcaactttctcctatacatatgacgatcaggcatggagagcagaatttggagcaatatatcaggagcattactaattgactgttggtattattagcatttgataaatttccttttggatcaaactccaaacaatttgtctggcatatcctacttgggtcaaagggcatcccttaatgccattattctttttgtgtatttctagaaattcattatatttttttcgttgctgtgataatccaacagttgttatgaaaaaaaacaaacaaaatcaaaactaaaa

SEQ ID NO: 8624 - DNA, 423 bp, Glycine max
gttagtgtgtacttcccaagacgacatagaaaagtgttataatcgctctgtcctcgctgtctctgtctttgaccgaagccaaagaagaggaagaaaccttagcagctttcggcgctcttcttttatctctgattttttttttttttttctctttcccttccaattttttctcatatcatattcatctctgtgcctctatgacagactagtacttgttgttttttgtacccattattacccacacacccccaaatacaaattaaattccaatccattattttaatgttattgttactagtattggtattattaccttaaactaaacagaaataagttgctattgtttttaatgttgttgtgattactactagtatttttttatatatatactggagtgatgtatcttcctagtttctactctct

SEQ ID NO: 8625 - DNA, 533 bp, Glycine max
cacgaaaccatcgtttttaaacgcggctttctactgccacgtcttctctcgctccttaaccttaaaccctaaccctctgctcctcgtttccccgtttcggaaacccgaaacgtttcgcctcgcttcacccgtttcgtgcttatcctcctcctcaatggcggtgcctccgtcttcgctggagaagcaattcgatgactttagggttcagctggaagaatctggaaccttgcgcgaacgaattcgaagcgtcgtttcggagattgagtcctccactaggctcatctatgccacacttcttctcgttcaccagtctcgtcccactcccgagcttttagagaaggccaagtctcatgttaatgtgttaaagaagcagtataagcaacttgctgaagttgttggaggatgccctgggcaatactataggtaccatggtgattggaagagtgagacacagtctgtagtttcagatgcttacatttatgcactggcttgaaacaggaagccttctcgagcacaaagaggctgaggaaaaa

SEQ ID NO: 8626 - DNA, 781 bp, Glycine max
atttgcttggtaaacgcaacagcgatagaactctagacatagaatagtaaacggtgttacgcttcgatagattaaacgaacacagagcgagcgaaagtagaatctgaaaaacaatggcggcgaagctagacacccacgccgtggcttccgatctgatcgacttcctcaacgcttctccaacggctttccacgccgtcgacgaggcaaagaggcgtttgcgtagcgcggggtaccaccaactctctgagagggaagtgtgggaactgcaaccgggcaacaagtacttcttcaccagaaatcactccaccatcgtcgccttcgccatcggcaaaaagtacgttgctggaaatggattctacataattggggctcacacggatagtccttgtctcaaactcaagcctgtcaccaaggttgttaaggctgggattttggaggttggtgtccaaacctatggaggtggtctgtggcacacatggtttgatcgagacttgactgtggcggggagggtcattgtgcgggaagagaatgctggttctgtttcgtactcacatcgccttgttagaattgaggaacctataatgcgaataccgactttggcaattcacttggacaagactgttaatgatggattcaaatttaacaacgagaatcaccttattcccatcttggcaacatcgctgaagggtgagctcaataaagtgtcctctgaaaatggtcctgttgaaagtggaaatcagaccgatggaaagaaagcaaatgataaaacaggcaccagcaa

SEQ ID NO: 8627 - DNA, 567 bp, Glycine max
  unsure (1)..(567): unsure at all n locations
agggcactatcgtcatatcgaggaaagtcttagggtttcgcctcacaaggtggcatatataatagcccacctacatcttccccgaaattctgttccgcagaaaaccttagcccaaccggatcttcacgattaggagatggctaagtcgaagaaccacaccgctcacaaccagtcctacaaggcccacaagaatggcatcaaaaagccaaagaggcaccgccacacttccaccaaagggatggatccaaagtttctgaggaaccaaaggtacgcgaggaagcataacaagaagagcggtgaaacagccacggaagaagagtaaagtgtcactctcaaatggggctattaggatttgatttgctattcaagtcccatatgttttgtgtcaaatctatatttagtagtatagtcattttgatgagttaatttaatccagagagaatgcagtacttactcttatagcatcgttgctggtttttgtttgttaaagacccttcaaattttatcgatggattattattcagttgtttaaaaaaaanaanaananaaaaaaaaaaaaagcggccg

SEQ ID NO: 8628 - DNA, 434 bp, Glycine max
gaatcgcacctaggcctccgtcacagccacggtaccgcacgctcgctgcctttctcactcacccacgcgagcgcgcgtcctctcacccacatcattgcaccgccatcccagatgccgccgtgcacttgctgtcgtgcccacactgagattcgcacgtcctctgacccacatcatcgtgtcgccgctgtcgagcccacactaccattgcacacgctgccgcgcacttgccgtcatgcccacgccagctgtttcgtaatttttatttttttttatcttttgtctgcctcttttttatttgatatgatattttgacattcaggtttacgggttttgttggttggatgaaaaagtaaacactaaactttgaagtttagaatattttgattatgaataactggtgactggttgatgaggttttcttgagatgagattcc

SEQ ID NO: 8629 - DNA, 1027 bp, Glycine max
aaactcgctcagatctacacgtctctgctgattcatccttttcttctgcagagcaaagaaccaaccaacacttgtttcttcagccatggccagtcaacctgaatcatctgacgcaaagggcacaaaaagggattttagcaccgccatattagagcgtaagaaggctccgaatcggctcgtggttgatgaagctgtcaacgacgacaactctgttgtcgcgcttcatcctgataccatggagaaacttcaactttttcgtggtgacaccatcttgatcaaggggaaaaaaagaaaggatacaatatgtatcgcacttgctgatgagacatgcgaggaaccaaaaataagaatgaacaaggttgtaagaaacaaccttagggttaggcttggagatgttgtttcagtgcatcagtgtcctgatgtcaaatatggaaagcgagtccacattcttcctgtggatgatactattgaaggagtaacaggaaacctctttgatgcctacttaaaaccttatttcctagaggcatatcgaccagtgaggaagggtgacctcttccttgtgagaggggggatgagaagtgttgaattcaaggttattgaaactgacccttctgagtactgtgttgtcgctccagacacagagatcttctgtgaaggagagcctgttaaaagggaagatgagaatagattagacgaggttggatatgatgatgttggtggtgtaagacagcaaatggcacagattcgggaattagtggaatgccatgaggagaccacagttattcaagtctattggtgttaagccaccaaaaggaattctgctgtacggacccccagggtctggtaagactttaattgctcgggcagttgcaaatgaaactggtgccttctttttctgcatcaatggcactgagatcatgtcacagctggctggtgaaagtgaaagcaatctgaggaaggcatttgaggacgcagagacaaatgcgccatccattatcttcattgatgagatagattcaatagctcc

SEQ ID NO: 8630 - DNA, 413 bp, Glycine max
ggatgcttgaggagaaccggaggaaggttgaagaagctcagagaagggaagctttagagcagcaaagaagggaggaagaacgatataaagagctggaagagatgcaaagacagaaggaagaagccatgcgaaaaaagaaacaggaggaggagcaagaacgtctaaaccaaataaagttgttgggtaaaaacaaatcccgaccaaaattgtcatttgcttttggatccaaatgaccattggcttgggcaacctgtgtctatttatttagtctaaagtgtgtttgggcttaattccctatttgtgtctgtaatttgaggaaaatcaggaaattatacacagcctcctcaactataatgtgacagcgttgttaccgttttcagtttgcattagatttcattgtttatcattgccac

SEQ ID NO: 8631 - DNA, 460 bp, Glycine max
tggggaacgccattgaactttgaatcattattcactcgtttcagtcaaacctttatctctctctttctttcttcaaattcaacttgcaattccaattcctggggagttggttccattttccgacgaaccatctcaaatccaccgccacataatgtaactgtatgcgaatgcgaatgtgaacgcggtttcgatttagatccagattcatggggatttgctttagcattgaagaccaaaaccacctttccatctccgattccaacgcgaagcctaaacctgcagtaggtcatgaatctggcgctccattggcttccatgaacatcaaagatctccgcgaaggtgctggatacagcaatgtggatatttttacctacgaggagcttaggctcgcgacgaagcactttcggcccgatttcatcttgggagaaggaggcttcggagttgtatataaaggcgtcat

SEQ ID NO: 8632 - DNA, 484 bp, Glycine max
gcgttttgtttggagaagatgtgctgatggagaggggatggaggacattgaggatttgctgattggaagtgcaactccaccgggctttcgtttgccattagcagcggctgttggcgtggggacaaagcggaatcaactctcttcttcttcgctttcgccttcacctgcaatccctggcactcagactatcttcataaagacctttggctgctctcataaccagagtgacagtgaatatatggctggtcagctttctgcttttggctattcattgagcgatgatcctgaccatgcagatctctggctcatcaacacttgcacggtcaaatccccaagtcaatctgctatggataccatcatatcgaaaggaaaatcttcaaataaaccactagttgttgctggttgtgtccctcaaggaagtcgggatttgaaagagctcgaaggaatcagcatagttgggagtccagcaaaatcgatcgtgttg

SEQ ID NO: 8633 - DNA, 374 bp, Glycine max
gacaacaagaaattatcatcctagcacaagtttaataagagttatgacaaagaaagagatgaaagttattagagttgtgattatgatcctgattatgtttgacttctcacaagctaattacaatccttcatctatgcaaattgggtcaaattatggatctgatggacgattcgcttgtcaaatcaaatgtcagaaaaaatgtcaaaaatatctattacttccaccaggtggtattttttatataatatgttatcattcatgttttcggaaatggtgataaatgcccatcgatgttgctcaagattgtgtcactagttgtgtcctgaccaagccaattgacgtcaacattgatgttcgtggtcctacagatgaca

SEQ ID NO: 8634 - DNA, 751 bp, Glycine max
ttcgttacagttggtgaaagaggcattgtacgcatatggaattccaaaggtgcaggttgcatctttgagcaaaaaacttcagatgttacagccggcatggatgaggatggctcacgtaagggtttcacttctgctgttatgcttgcctcagatcaaggattgctttgtgtaactgcagatcagcagtttctgttttactctctggacttcactgaacagttgttgcaattaaatctaaccaaaagacttgtgggatataatgaagagattgtagatatgaagtttattggggatgatgaaaaattccttgctcttgctacaaatcttgaacagattcgggtttatgacctttcatctatgtcatgttcgtatgtcttatctggtcacactgaaattgttctatgccttgactcctgtgtatcaagttctgggaaaccactgattgttactggaagtaaagacaacagtgttaggttatgggaaccagaaagtgcaaactgcattggagttggtattggtcacatgggagctgttggagccattgccttttcaaaaagaaagcaagatttctttgttagtggcagtagtgatcatactcttaaggtgtggagtatggatggcctctcagacaatatgacaatgccaattaatttaaaagcaaaagctgttgttgcagctcatgataaagatataaattccgtagctgttgctccaaatgatagtttagtatgtagtggttctcaggatcgta

SEQ ID NO: 8635 - DNA, 176 bp, Glycine max
aaatcagcttttccccatccggtttgttctcatcttcagtctcatcatgcttccctgtttccatctccgattgtggttcaggcgaattctgattcttcgttgacgaaggcaccgtggattccggacgccctcgcccccgctacgagtttgcatattattattgtcattcatgaacc

SEQ ID NO: 8636 - DNA, 854 bp, Glycine max
gaaaaacaagagattttgaatttgaaatactcccgctcccgtctccacatatttgcgaaccctctttctttgtgagagaccccctatcagagaatccagaaggcgaagaagaagaaacgacagagcaagaaggaaatggcgaccaacattgggatcatggatgcggcttacttcgtcggcagatctgagattctttcttggatcaactcaactctgcaactcaatctctccaaagtcgaagaggcttgttccggcgccgttcattgtcagcttctcgatgccgctcatccagggatcgtgcctatgcacaaggtcaatttcgacgccaagagcgagtacgagatgattcagaactacaaggtccttcaagatgtcttcaacaaactcaaaatcaccaagcacatcgaggtcagcaagctggtgaaaggaaggccactggataacctcgagttcatgcaatggatgaaacgatactgcgattctgtcgattccggccttcagtacaattataatcctctggagaggagagaggtttgcaaaggaggaagagaaacgagcaagaaatctgcaaactcccaagcctcaaccaagggttctactgcacagagacctcattcttctcataatgctcgaagaaatgaggtttctaatgcaaaccctacaaatcaagctgcaaaggttgcgagagcagcaccttctgctggaaaccctgctcctgtgtatgaagaaaatataacagagttgaagttgtccattgatagccttgagaacgaacgagatttttacttcgcaaagctgaaagatattgagatactgtgccaaaactctgagatagaacactcaccgattgttgc

SEQ ID NO: 8637 - DNA, 240 bp, Glycine max
ataaccaaaatggtgtataaacacctaaaatcataagcaagcaaaaaaatgaacatctatacagaccaatgacctttttaggtaaaaataaatttcatgtttgaaacaaaccggtgtgaagtctgaaaaaaattattgtgaataagcttctcgggtccttcaagcttaataagatcgtgttcaaatgaaacacataaatgcaacctagtgaagccttataccaaaaaagggcctatatcc

SEQ ID NO: 8638 - DNA, 1423 bp, Glycine max
atgactcttccttcattgtcctctgtattcttcttcttcttctcttactctctctgtaacaacaccaccatcaacaaccctttcaagccggcctaaaccccattacccaaaatctgttttttttttttattttttttcctgcaacactctttattggatcatcttgtatttcattcctcctttacaatttcctttcaaaaaaaattttaaaaaatattaaaaagtgctcttttttgtgaattttgacccatttggccaccgacagatttcgatcttctccgtgccaaagttgtaatcttttcgacttttggcgaggtgggtcgatccgatttcgctcgaatgattgttggtttgatctgaaaaaggaaaaggaaaaaaaaattgggttatttcggattcaagattttgtccttttttgaaatggtctatttccatagctcaatctctctctgcaagtccgttgatcaatcatcttccatggcgaattcaatatgttctgctgatttcggttcgaaatcgaggcaaatcaatcaccttcagaagaatcggagaacccctagttcatcatcatcatcatcatcatcatcgaattcccttcagattccaccctgtgatcgatctcgatcggcaatggttgatgttgtgatgttcattgctgttgtttgtgcctgtggctttttgttcttcccttatgtagagtttttggtgacaaagtgttacgaggttattaagggtgttgtgtttttgattaaggaggaggtttctgtggcaccttggatctatatttccatagggttgagtgttgtgtttgctgcattggccacgtgggctgtggtggcttgcaccactaggaagtgtgggaatcccagttgcaagggtctgaggaaggctgctgagtttgacattcagttggagactgaggattgtgtgaagaatttggcttctgcgtcgtcgaatgtagcgaaagatggtggtggtggaacgaagaaggggctctttgaattgcctcgtgatcaccatagggagctggaggctgagctcaagaagatggcaccaccaaatggaagggctgtgctcgtgctccgggcgaggtgtggatgttctgttggtaggttagaggttccgggaccaaggaagcatcttcgaaagatcaacaagaagtagcagctatcctgtccgagccgagtaggacaagggacaggagaggacacccttttgagttattggatggaattaaggaaagggatggtaattggatcaaatagaaaatttgtacttcttgccctatgttcattgatctagtaggaaattagaatgtctttgaataagccccttggcaataagttgtaaggaactatgggccacacacagtttagttggttatacctggaaatataaaaaaagaacatttttattttaattt

SEQ ID NO: 8639 - DNA, 483 bp, Glycine max
gtgaatgatgactcttccttcattgtcctctctattcttcttcttcttccctaactctctctgcaataacaacaccatcaacaaccccttcaagccggcctaaaccccattacccaaaactttttcttttttctttccttcaacactctctattggatcatcacatattcaatttcattctcttcaaaaattccccttcaaaaaaatttaaaattaaaaaaaagtgctctttttgtgaattttgagccatttgccaccgacagatttcgatcttctccgtgccaaagttgtaatcttttcgaattttggcgaggtgggtcgatctgatttcgctcgaataattgcgggttcgattttgatctgaaaaaggaaaagagaaaaaaagattgggttatttctgattcaagattttgtccttttttgaaatggtctatttccatagctcaatctctctctgcaagttcgttgatcaatcatctttca

SEQ ID NO: 8640 - DNA, 725 bp, Glycine max
ggttcgtaaacgcaggggaatcgagtgcgtgagggtttgcagtgtgcagtgtgcagtgtgcagtgcacttggatgcatcaataacccccgattcaatttgggaccaagatcctggttcgcgatgaagaggtcatttccatgggaaaatcaaattgatgtctcttcttcttcttctccaaactcccttcgtcctaaccccctaactatccctaactcccccatagataccaagtcccaagatgcactcatcaggcgggcagaaatgtatcaggattacatgaagcagatcccaatcccaaatcatcgaggcactatgatcccatttacctcatggatgggattaggcagatccatgaagcagatatacggacagcctctgcattacctcaccaatattctcctcaagcaatgggatcagttgagaattggcagtgaggatgaatacaagcctttggacaacatagttcatccacacaaagctgaggccaccatctggctcattgaagaaatccatcggcaaacatcatcgcattttcatcttgctagtctgtggaaggtggacccaatgtacaatggttttgttgattccattttcccaacattagagcacacatcatgaaaatgaagccatttagttttgaggctttgtgctgtatcctgcaaatagtttcggttatgttgtccttttcgtaaagcaaaaatggaacgacttccttgatacttcc

SEQ ID NO: 8641 - DNA, 423 bp, Glycine max
gaaacctatcttagtgaggaagaagagatgatgatgatggaagagtcagaaatggaaatagagtcacaggtgttcgttgctcacgagattgacttggattacgagttcgacgcagttcgattcttcgatttcggtgcacaagaaactcccgctcaagctcgccaagccgaactctggtttcattccgcccggcagctatcctccttctccttttgtggcgaagttagcggcgagagaggaccacgttagggaatgcgcaaccaccgttcacgctgccaattctaatgttccgtccgggattggattttctcgcaccgtttttcaccatgacggttcataaagagggggtgggagtgggaacatttctgccttgctgagtggtgttccgcgggatgttaatatgcaactgttacacgtaacctc

SEQ ID NO: 8642 - DNA, 509 bp, Glycine max
  unsure (1)..(509): unsure at all n locations
acaggaatgcttaatttctcttatgctcttcagagtcggcttcattctgtgattcctccctccttttgtcttcgcttggttcaagttgttacagtgttaaatttgagggacatgaagaagtaagaaagggcagcgggtgttggtggctcatataaaacggccaacaacaatgcgtaatttcttttctgctcttcagagtcggcttcattttgtggttgctccctccttttctcttcgcttggcaagtaaatgatgaatgagcgagcgcatagtgcagtgaatttaagaggaaacaacgtcttagggttttagcattgctgttcttgagttgtgttgagtctggagagagatgaataattgtacggcgaagagacgtgagaatgcgaggagcagcagagaggaagatcaactgatagtgactgcattgggcgctggaaatgaagtgggtcgttcatgcgtctacatgtnctacaaaggcaagacggtcttgttcgattgtggaatacacc

SEQ ID NO: 8643 - DNA, 593 bp, Glycine max
  unsure (1)..(593): unsure at all n locations
ggtgtattaggtttttttgcttcttctcatttgctaatagagagggacatgaagaagtaagatagggcatggggtgttggtggcacatataaaacggccaaaagcaatgcttaatttctcttatgctcgccagagtcggcttcattctgtgattcctccctccttttctcttcgcttggttcaagttgttacagtgttaaatttgaggggagtcatatttcttggttctgaaggccaccgttatggctgtacatacagaattccctcttattacttactcacaagagattgtagatggacagcctatttttgtctcttcaaactgtcttcctatcaaggctttgaaatttgaacctgcaggtcattctttccattctgctgcacttaaacttcttggtgttcaggaagataacaatgatgctgatgataaaaaagtggttgatgataaggaacaaacatatctcccatctgattaggctaatgggatttcttccctaagcaacattgagaagaaggagaaaccatggagtnaagaagagattgatctattgaggaaaggaatgcagaaatatcccaaaggaacctcgcggaga

SEQ ID NO: 8644 - DNA, 526 bp, Glycine max
  unsure (1)..(526): unsure at all n locations
cccacgcgtccgctttgcatgtcacttgatattgagcagctgaggagtctctgtgagaacatggaangcagacagatgttattagaacaagcaaaagttttgagatatgcactgagttctaagaaagaagaggtggttgatgagaaaactaatcaacaaaatgccaatggttccatcaaggctaatggcagtccttccctaagcaacattgagaagaaggagaaaccctggagtaaagaagagattgatctattgaggaaaggaatgcagaaatatcccaaaggaacctcgcggagatgggaggttatttcagaatacattggtactggaagatctgttgaagaaatcatgaaggcaactaaaactgtactccttcagaaacctgattcgtcaaaagcttttgacacatttcttgagaaaaggaaacctggtgcacaatcaattgagtctccattgacaaccagagaagaattaggagtgccagctcctgcctcctctacaaataatgcagaagactctcagaaca

SEQ ID NO: 8645 - DNA, 594 bp, Glycine max
gttctgtaacctctgttaccacttacgcattacgcttgttaccctatttgtagaaggctggttgtcgcggctgctatttttctcatttaaatttgaataaataaaacatgtcaacaataaacgaggaccatatcgtcgacgaatcgaactgttcagaaaccaaactagtcgaagaggaagaggaagacttacagaagcttctagtccctgacttgcagaatcttcctctcactcctgcttccgccgttgaaaccaactttgccatttacttcgccctagatttcatgaagccagctcacgatcagtacgtttaccgccacgccaatggcttgtgtgtgattgggttggctccttcccacattgctttcaatgatgaaggtggaatcacagccgttgatttcaatgttggaaagtctgatcgcagcgggataaaagtcactggaaagcggaagaagaacgcacaacactttgagtccaatacggctctgtgtaaaatttctaccaaaaatgatacttatattgtgagatgttgcgtcaaaggcttccttttagaaatcaatcaacaactaatcaagcatccagaactgcttaatg

SEQ ID NO: 8646 - DNA, 689 bp, Glycine max
acgagcgaagatacagtgtctgtgatagagtaatttttggtcacaggccaagtgactttgatcccagttttagatggggttataggcctagtgactattccagggcaagtgactactcaagaccaagtgactactcaagatggggttcatctgatgatgataatggccttggggattcaccaagtacagtcttattttcaccaatgtcttgtggtggtggtggtggtgctggacccgcctttaatgaagatggatatgccatgccaggacactcaaggtactgccttgttgcaagtaagcaaatggtggggatatatcttaccatatgggtgagaagtgaactcaaggatcatgttcaaaatatgaaagtgtcttgtgttggcagaggattgatgggctatcttggaaataagggatccatctcaattagtatgtctgtgcacgaaactagcttttgctttatctgtagccatttaacctcaggacagaaagaaggtgatgaactaagaagaaattctgatgtgatggagattcttaagaagacaaggtttcctcgtgttcaaggtgtggacaatgagaagtctccacagacaatccttgagcatgatcgaatcatatggcttggagatttgaattaccggattgcactctcctaccgatctgctaaagcactcgttgagatgcaaact

SEQ ID NO: 8647 - DNA, 544 bp, Glycine max
  unsure (1)..(544): unsure at all n locations
ataataatanaataatcaaaatatctcgaaaaataataataaaataatcaaaatatctttgaataaaataataaaaaaaatcaatcggacgtttttctttgaaagtttccttgaatgaattgattaataaccaaagtgaaactaagactaaaatcgactcacagatcaagttttgtccgcgaaaaatcactaaaaaccgttttaaggtccaacgccttaaacggtcctctttgcttttatcggttaacatggaccgttcaaaagcataaaatcaacatgtgactttaccgcttttgcaagaactacgtaggtctgagttcctcatcgcaattgaggatacgtaggagcaaaagccccgcttttgtcgaccaccccaagagatcgctaatggtccaaatgccttaacgtttctctcctttcaaaaaaacaaagagatcgttaatggtccaacgccttaacgtttctctcctttcaaaatcaaaagaccgtttaatggtccaacaccttaaatgaccttttggtcaaataaaaaacatattttgcc

SEQ ID NO: 8648 - DNA, 623 bp, Glycine max
gggagcagcttccatggaggcatagacggagatgcagtcatgaacaggacaaagttcagattcttcttctgagcaaaattttggggcagcaactaactaaatcctcaaaacagtgcaatctagtgaagattgttgggtcagttatggcagcgttgatttccaaaaggatcctacgttgttcttctgggtccttgcattcactaggacgatgttactttgattcacctgggtttgcctctatttataaaccacgtgatgtatgcggcggtttatctggggagagaatgttttctgcagatcgttctttggtcgggtccatggtccggcagttttctacttctattttaactcccggagatgatgatagtgcatttccgtctgatttattgtccaaaaagattctggcaacatccgagcgtactattgggctttgccaggatcttttaattccagtaaccaactttcataatgaagacaagggctatatggttttacctggatatgtttttgatttacctattcggaaggacattattcatcgtgttgttacgtggcagcttgcaaaacgacaacaggggactcactcaacaaagactatcagtgaggtcaatgggactgggaga

SEQ ID NO: 8649 - DNA, 446 bp, Glycine max
gatggaggcatagacggagacgcagtcatgaacaggacagagttcagattcttattcagagcaaaatttggggcagcaaggaactaaatcctctatcagcattagtttacctctgcgttctgtctctggtgcaatccagtatagattgttgggtcagttatggcagcgttgatttccaaaagaatcctacgttgttcttcttggtcattgcattcactaggacgatgttactttgattcacctagtgctgggtttgcctctatttataaaccacgtgatgtatgcaacagtttatctggggagagaatgtttcctgcagatcgttctttggtcaggtctatggtccgacagttttctacttctattttaactcctggagctgatgatagtgcatttccatctgatttattgtccaaaaagactctggcaacatctgagcgtactat

SEQ ID NO: 8650 - DNA, 388 bp, Glycine max
  unsure (1)..(388): unsure at all n locations
ggtagaacggtagaagccactttggctacagagttggtgttgtgtcttgcgaaagaggaaaaacgtagaaagaagcaagcaaggaagcgtgctagctgggtttgtttctgttgtgaattgcgatccttaaacctttctctctcactcactcaatcaaattcaaatggacattgatttcaaagaataccagttgcgctgcgagcttcgcggccacgaagacgacgttcgcggaatatgcgtgtgcggcagcaagggtatagcgacttcgtcaagggaccggaccgttaggttgtggtctttggacgacaaccgcaggttcgcgagttccaagattcttttgggccacaagcttcgtgggtcncttggcatggattcctccgaattcgga

SEQ ID NO: 8651 - DNA, 487 bp, Glycine max
gaacacaatacattcatccttgtgtttccgttcccgccattgcaaagggaaaaaaatggcttctgcgccatcgagaaccctaacggactttttccaacccgcttcgaagcgcttgaagcccactctccccgcatcatgcaaatccgacgacgccaatgcttccacgctctccgtcgatcagaagttgcgcatggaatacaacaagctcctcgccaagtccaagaggaatctcaaactctgcgtcgagagggtctccaaaagcaaaggtttaggcgccgaatcaggtttaggtggcgtgaagctggaagagctgctggtggaagaaacgtggttggaagctctacctggtgaactccaaaaaccctatgccctcactctctccaaattcgttgaaagtgagatttcgggcggagacggcgtcattttccctccgacgcacttgattttcaacgctcttaactccacgccttttcatacagtgaaagct

SEQ ID NO: 8652 - DNA, 384 bp, Glycine max
  unsure (1)..(384): unsure at all n locations
gaactcagttagactttgttccaagagaaagaccaatcaaagcatcatgactaaagttgtgtgtgcacttcttcttatttttgtcatggcttttgtgactcaagttgcttatggtggcggcgaaggatcacttacgccccaagaatgtccgggggcttgcgattatcgttgttcaaaggctgatcggactaagaaggcgtgcctgaacttctgtaacatgtgctgtgcgaaatgtctgtgcgttccatcaggaacctatggtcacaaggaagaatgtccatgttataacaattggaaaacaaagagaggaacacccaagtgcccctaattcaacttcattattgatattcatcaataaaatgtgtantcctgtggcgtgctatg

SEQ ID NO: 8653 - DNA, 562 bp, Glycine max
gaaccaaaaacaatggccacttgttcactcatttccacactcttcccttctccttcttcttcttctttttcactctctcgttcttcctcaaacaccaccaaaccaaccaccattcacctctccaaatccctccatctccaaactcccatcctcttcctccttcgccccccaaacccaaaaccgacacttccaataatacccctcttccccaaactcaccattcccaactcccttctccttctctgcacctccctcgctctctccttcactctcctcctctcccccgccgactccgccgccgcctttgttgtcacctccccaaggaagctccagtccgatgaactcgccaccgtccgcctcttccaagagaacactccctccgttgtctacataaccaaccttgctgtcaagcaggatgcgtttacattggacgtgttggaggttcctcaggggtcaggatctggctttgtttgggataaggagggtcatattgtgaccaattatcacgttatccgtggtgcctctgatctcaaggtcactcttgctgaccagtcaacttacg

SEQ ID NO: 8654 - DNA, 979 bp, Glycine max
cttcccttcacatacataaaagcctcgttccatagcaaatatagccccaacaaaacaaacacaactttgcccccttgtaaaacttcttattgtgatgtctaaaagcgaagacttgaagcttttgggaggctggttcagcccatttgccctgagggtgcagattgcccttaacctcaagggtctagaatatgaggttgttgaagagaccttgaatcccaaaagtgacctgcttcttaagtccaaccctgtgcacaagaaaatcccagttttcttccatggagataaagtcatttgtgaatctgcaatcatagttgagtacattgatgaggcttggactaatgttccctccatccttccacaaaatgcttatgatcgtgctaatgctcgattttggtttgcctacattgatgagaagtggtttacgtccttgagaagtgttctagtggctgaagatgatgaggcaaagaagccacactttgagcaagcagaagaagggcttgagaggttggaagaagtgttcaacaagtacagtgaagggaaggcctatttcggaggagatagcattggattcattgacattggttttggaagcttcttgagttggatgagagtcatagaggagatgagtggaagaaaattgcttgatgaaaagaagcaccctggtttgacccaatgggctgaaacgtttgctgctgatcctgctgtgaagggcattcttccagagactgataagcttgttgagtttgccaagattcttcagctaaaatggactgctgcagcagctgcagctgcaaagtaaatggaatcaaattaattgcgagagtattttcaaaattgttgtccaagttgtttttatctcaggctatgttgttgcaactttatttatttaaaagttattttaaatttaaaatgtaaaatattaacaccgcttaagtaacctagctgaaaaattttgagttattataaatcaattgacttg

SEQ ID NO: 8655 - DNA, 433 bp, Glycine max
attgctccgtgtttgacctgttatagtgaatagaaatggctaaaaacgagttgaggcttttgggtgcttggttcagtccatatgccctgagggtgcagattgcccttaacctcaagggtctagattatgaggttgttgaagagaccttgaatcccaaaagtgatctgcttcttaagtccaaccctgtgcacaagaaaatcccagttctactccatggagataaagtcatatgtgaatctgcaatcatagtagagtacatagatgaggtttggtccaaaatgctctctccatccttccacaaaatgcttatgaccgagctaatgcccgattttggggttcttacatcgatgacaagtggtatacgtccataaggaatactattttggctgaagcggctgatcaagatgatgaggcaaagaagccacactttgtg

SEQ ID NO: 8656 - DNA, 276 bp, Glycine max
ataaaacgcctcatttcctgttaagtaacacagtgcattttgaactctgttatagtgaacagtgatggctgaaagcgagcttgaggcttttgggtgcttggttcagtccatttgccctgagggtgcagattgcccttaacctcaagggtctggattatgaggttgttgaagagactttgaatcccaaaagtgaattgcttcttaagtccaaccctgtgcacaagaaaatcccagttttcttccatggagataaagtcatatgtgaatctgcaatca

SEQ ID NO: 8657 - DNA, 769 bp, Glycine max
caaattcagcacatcacatggtagctgctgccagttcctaattcctaatttatttgccttgcactctaccaaccaactagaaagaagatttttatttggtgaatggctcgcctaatatcttcaaaccccatcgccctccacagatttcaaccatgccttccaatttctcgtcacttctccgcaaatcctcgccgccgccgtcccaccaacacccgcaaattacagaccttagcgtgccaaacaaaccccaaccttgatcaaaaggatacccctaccacggatgaagaaaaacttgtggtcgagcccagcacgagtacaacaacaagttctcttcctcaattgccgaccaaaaacatcaacaacaaaatcgcacttgtttctaccttagcggccttggggcttttcttatctgccaggttggatttcggtgtttccctcaaggatctctctgccaatgcaatgccttacgaagaggctctctccaatgggaagcccactgtggtggagttttatgcagattggtgtgaggtatgccgggaattagctcctgacgtctacaaagtagagcagcaattcaaggatcgagttaattttgtgatgttgaatgttgataacacaaagtgggagcaagagcttgacgagtttggcgtggagggtattccacactttgcattcctggataaagaaggaaatgaggagggcaatgtggtcggtaggctaccaagacagtacttgcttgaaaatgtggatgcccttgctcgtggagaag

SEQ ID NO: 8658 - DNA, 316 bp, Glycine max
aagcgtccgttcggctccagaatacttacatgaagggtacgtctctcataagacgccacaagggtcttcacataattttgcatatgggagcttggaaattaaatgatacagtttgttctatactgcttgcctaaattagagtactacacgggctcgtttactagttattcctgattcaaaaaagattaatgactgtttttttattagcaaataatacaaagaaagacattagggaatgccattgttgaagcttcgaataaaaacgctattgattccccaaagttggtggttgtcaatataggcacacacacacaat

SEQ ID NO: 8659 - DNA, 629 bp, Glycine max
ccgcccggaatacccgggccgacccacgcgtgcgaccacacgtccgaaggtgtctttcttttctttctaacaagcaccgcctccactaatggctatgagatcgtgggtgagtcgaggatccgtgactcgtttgatggactcagcaaatcgaggggctttcagtcgcttcttcagcgacaagggtcgcgttctcagcgaggaggaacaggccaaagaaaacgtctacatccagaaatgggagagggagaggttggagaaacagaagcaacaggctgagaagaccaaggcagacaagggcaaagatgctgctgctgataagaaacctgaaggttctcaaaagggctgagtttatccttcacacaacccggcaaggtcactttgtgggaaataagcatgatggagaataaaacacattgacccttagtgaactttggtctttgtatagattgtgtttcttgtttatttgtagtttcttgacggatgaaaccaggccattgcatccaccaaacttggtacgtttattatgaacttgtcatgtaatcccttccagtaaatgttcacttttgtgagttgtcggtgccaaaactaatcgtatgttgcgcgtaaggaaaaaatgggaaagttaatat

SEQ ID NO: 8660 - DNA, 464 bp, Glycine max
gtttatccgggttggagtttgagaccgaggaatatataaatggaaagttctagatagggcctgggattgtttctgtgttttctaacaagcaatggctatgagatcgtgggtgagtcgaggaggatccatgactcgtttgatggactcaacaaatcgaggggctttgagtcggttcttgagcgacaagggtcgcattctcagcgaggaggaacaggccaaagagaatgtctacatccagaaatgggagagggagaggttggagaaacagaagcaactgtctgagaaggccaaggctctcacggacaaagatgcttctgctgctgctcataagaaacctgaaggtgctcaaaaggactgagtttatctttcacacaacccgtcaaggccactttgtgggaaataagcatggagaataaaacacattgaccctgagtgaactttggtctttgtatagattgtgtttc

SEQ ID NO: 8661 - DNA, 473 bp, Glycine max
  unsure (1)..(473): unsure at all n locations
gttcggtgttgggaggaggatttgcccagcgtggacaatggggattttgcatataaatatgctgctggctaagatggtgcatgctttccactggctgcccaatcccaactctccacccgacccgactgagaccttcgctttcactgttgtcatgaacaaccctctcaagccacttattgtgccacgatccatttaacttatacttatagtgctccttctctgcaaactaaggaatatatcggcttctaaaataacatatgagcacaaggctttttttggaagattgctgattgcagtttgttgccatcgaattccaaccttcgtttatcgcataagatattgcacaattttattgtaatggagcggaactccttccaatgtgcgtctcgtccggtctatattagtgaaggtgggatctaaaaacctaccccctttttttttccttttttnnnnaaaaaaaaaaaaaaaanaaa

SEQ ID NO: 8662 - DNA, 297 bp, Glycine max
ccatttattgggaatattcttccgctttgatagccttccttcgtctgcctatgccttgagtttcaacacttgagtggagaatatgaaactgttgagttggaaattgatgctctgttgttggatcatgtgacacaggcttagtgattcactcttgctcttccgataaaattgttattttctccacataaggcacgagatcatcaactgtccatgtattcctcccttgtggagacaccatgtactgtaatgtctccgtaacttcaccctgcaattattagggtgagcaaattaatggcc

SEQ ID NO: 8663 - DNA, 1060 bp, Glycine max
attctcagtctcagtctcagtctcagtctctacacacacctcagaagaacagaacagaaccaccacataacagtgcttttcaaaggcggtttgagcaatggcgttcttaaataaaattggaaatctgctcaagaattctgctgtcaagcacatcaatcaggatttttcggcgtctaccccttcacttttccaagcaattagatccatgtcatctgcaaagcttttcgtcggaggtatttcttacagcactgatgatatgagtttgcgagagtcttttgctcgctatggagaagtaattgatgtcaaggttattatggatcgtgaaactggcaggtcaagaggttttggctttgtaacttttgcaacaagtgaggatgcatcttctgccattcagggcatggatggccaggatcttcatggtcggaggatacgggtgaattatgctacagaaaggtcacgtccagggtttggtggtgatggtggatataggggcagtggtggcagcgatggctacaataggggtggaaactatggaggtggatataacagtggcagcgatggctacaataggggtggaaactatggaagtggcaattataatgttacaagcagctatagtgatggcaatgctgaaactagttacactagtggtgctaatgctggtaattaccaattcaatgaaaattctggtggagtttttggctcagctagcggtgaattcagcagcaaccaaaatgacgcaacaggtgcagacaatgatgaattcattgagccacttgaagacaatgtgagggagaacaatgatggacctactgactacgctcagaaccgctgatgagaattttcaccttgcctagagcaagttacttcttctggagtttatgataaacaaatgtgtttccaatttctttttccaccctcttgattttcatatgttcattggcttgaacttgatagtttgtctgctcaacgactgatgtaaaataagatttttctaggagttgaactccatttataatgattttagttttcaaccattcaacacctggaataataaaaa

SEQ ID NO: 8664 - DNA, 619 bp, Glycine max
gtttttgctacctcgatgcagtgagaaggttgaaagagattcaggaatcatctctttcactacccgtctgctggtaccaacctcacgtattggttgccttattggtaaaggggggtctatcataactgagatgaggaggcttacaaaagctaacattcgcattatttcgaaggaaaatcttcctaagattgcatctgaagatgatgaaatggtgcagatttcaggagaccttgatattgccaaggatgctctagtgcatgtacttacgcggttgagagcaaatctttttgatagggagggtgctctctcttcattccttccagttctgccatatctccctgtttcagcagatggatcagatggcctaaactatgatggtagagatggtaaaagacatggacgtggacattcatattcaagtgggtatggaggctcaagtgatttagcagctggtgacatttatggaagctatggtggttctcagcttggaagcaacagtgcttatggggcttatggaagttattctttgggacggtctagtactgctgggttgtcgagtcagagtggtgtttctaggaggagagaccatgcttactagacataatggtctatgcagctg

SEQ ID NO: 8665 - DNA, 909 bp, Glycine max
ccaggttctgcatttaaagtagagtctcattcttattctcattctcagtctcagcctcagcatgctagttttagtcatggcattaacataggttcctctcctgatggtggaggtggaggaccttcttctggtgagcctgtgaagaagaaaagagggaggcctaggaagtatggccctgatggatctgtttcattgatgctctctcccatgtctgccactgctagttccacgccgggatcaggcacttcttcggagaaacggcccagagggcgcccacctggaagtggaaggaagcaacagcttgccactctaggtgaatggatgaacagttctgcaggactggctttttcacctcatgttatcaccgttggagttgacgaggacattgtagcaaagttattgtcatttgcacggcagagaccaagggctgtgtgcatcttaacaggaactgggacaatttcttcagtcactctgcgccagcctgcttctactagcatcggtgtcacttatgagggccgatttcaaatattatgcttgtctggttcttacttggttgctgaagaaggtggacctcacaatagaacgggtggcatgagtgtttccctttctagtcctgatggtcatatcattggtggtggtgttactaggcttgttgctgcaagcccagtgcaggtggtagcatgcagtttcgtatatgggggctccaagccaaagactaaacaagtgaccactactactacaaaagataccagttcagagcctcagagtagtgataagttagcttctccaggcagtgttcctccgcctaatcaaaactacacctcttctcctgccccaggcatttggcctgcatcatcaaggccagtagaggtgaaaagtgcacatgcacacactggtattgacttgacg

SEQ ID NO: 8666 - DNA, 378 bp, Glycine max
gagagactttggtctcatgaacctgcagtgactagaacctgcttctttgcctcctttcaagaagggtttacactacagttagtttgtagtgtagtgtgtgtgataatagtaacttcacttcaaggacattatccacttgaggtttgtttgtaactgataagcagtaattgaaaacatgaagaacgtttctggcttctttgttttgctcttggtacttggagcaactctgtcgttccttaacttcttaagtcccacttgtgcctcatggttttctgatttgattgctaccaactgtggtgataaagctacactgattgcactaagcaggaaacttaacgaaagtgacagtagtactattaaaagcagatctaacaataa

SEQ ID NO: 8667 - DNA, 382 bp, Glycine max
gactgcaaacagagtcaacaacaacacacacaaacacaacgtcatgaaatcgccgcagcacaaaaacaaaacaccaaaatcccgatcagatcctcaacaacaacaaaaatccaattccctggccgtcaccgttttccgaaatgcacccgattattattcctgcgacccccttattccgttaagcacgtgcctccccgcctcgggcacgtgcgccgccagaatgcgcctactgccgcatgcagatcaggctctcagtctccgccgctccccccgcttcaattctgctccggccgccgtggatggcggcaatgcgggctccagaaagcggaagcggtcgccggaaacggcggcgacggcagcggaggaggagacatctcggaga

SEQ ID NO: 8668 - DNA, 637 bp, Glycine max
aggctggtcatggcccaatataaagggatgcttagtttgtaataggcagcagagaaaaataatagagtttccttcttcacgttcttgcttcttgggagggtcctagacctcaaatgctaggaaacattgagctgattttcagttcataacatgtaacaaccttaataacttctttgacatatatgcgttccttcaaataattatacttaaagtaccaaactattaactcaatcaccggtggcttctcttctcttccacaatgccttgctatctcatcatcacttcatgatttggatctacaactgaacaagcttcatggaactttgccaagtacctttgcaaaggactgttggctcatagcataatgcatcaatctaatcagaaacccaatacaaatctttgaatctaattaaaaaaattataaatctcttgaaccccacaaatatgtccacgttttgtaatagtttaatttaaattcccttccccagacacaataaaaaaacacacattctcagctgtgtttcaccttttttttttaaggccctcaccatggttttcagtacccactccggtaaggttgatttgaaaaaaataatatataaaccggttccctccctaagaactgattttttaatgc

SEQ ID NO: 8669 - DNA, 426 bp, Glycine max
gggataaggacctatatgttaggccataactagcctgcactttgaaatctatttcagtttgaattttgaaagtgagtgtggcgtaccgtgtacgtatctgcagaaagtgaatgaatggtaatgggggaagaagggtgcaaggtatgtgttacaggaggcagtggttacattggttcctggctcatcaagaagctactggccaagggctacacagttcatgcaactctcagagacttgaagaatgagtcaaaggttggcctcttaaagagccttccacaatcagaaggaaaactggtgctgtttgaagctgatatttacaacccaaatgattttgaccttgcaattgaaggctgcaagtttgtgtttcatgttgctactcccatgatccatgaacctggctcccagtacaaggatactagtgaagcg

SEQ ID NO: 8670 - DNA, 407 bp, Glycine max
ggatcaccacagagaagatgcttctgattctcagaaattaacatgaagggcatggtggatttgaagtaaataaattcagctgtgtcgtgattgatgagtttggaagcatttgcattgacatttggttgttgctctcgagagccagttctgaagtacacgagagtgtacgtgtgtgatagagagtgtcaagtttgaagattaagctacgaaggcttggcttgttgtcttagtaactaattcttaaagaaacagtggagaacaacaatgatagctctttacaagatcaggtcttttgaatatttagcaagttaagttttgcttgagctttgttgatcatcaattcaattctactagaccagtccacccaaatttgaaatcatggtggaaagctactcaagctagtaaag

SEQ ID NO: 8671 - DNA, 363 bp, Glycine max
gatcaccactttcattttgagcgtgtcgtgtctgtttctgagttatggcacagaagacgtttctgattctcagaaattaacatgaagggcatggttttgaagtaaataaatccagctgtgtcttgattgatgagtttggaagcattgcatttacattttgcagtgttggtgggtagttgttgctctctatagccatttctgaagtacactatagtgtgtatgtgtgtgtgtgatagagtgtcgagtttgaagattaagctacaaaggtttgtcctgttgtcttagttgctcattcttaaagaaacagtggggaacaacagtgatagctcttgacaggatcaagtctttgaagatttagcaact

SEQ ID NO: 8672 - DNA, 255 bp, Glycine max
tgccgttacacgccaattccctcactttcatcaatagctattctcatcaactatggtttagcttgtcttttcttattcacatcgaaatttaatatatggtttggaatttccaaaagggcattaaaggatcacttgctaaagtaaggaaaagaaagactcgtggggcatctttagctttgttgatcatcaattcaattctactagaccagtccacccaaatttgaaatcatggtggaagctactcaagctagtaaa

SEQ ID NO: 8673 - DNA, 483 bp, Glycine max
gattttcgtcgtgagtggtgacgtgccctagccccatatctagtctccctctctcaatctcacatctctcgtcgccaccgccgcgccgcacggaggcacccacggaaccaatctagccatcagttgaaacagtgagcttacaaaaaatggcaactgcacctgcacaaattcctacaagctttggccatgagttgagggcttgtcttcgttgccgccttgtcaaaacctatgatcagttcagagagtcaggctgtgagaactgctcattctttaagatggaagaagatcacgagcgtgttgttgattgcactactcccaattttaatgggatcatttcagttatggatccaaatcggagttgggctgcccgttggttgcgcattggaaagtttgttcctggtgtttatactcttgctgtctcagaggctcttcctgaagagatgcaggctatatgtgaagacgagcgtgtgcagtatatccctc

SEQ ID NO: 8674 - DNA, 1179 bp, Glycine max
aaaaaaggtgatgagttgaaagaaatagaagaggatacgaaagatgatcatatatctgagaatgataaaatggatgaagacactgaggttaaggaaacaattgaaggtaaacaagaaaatgaaaaagtggaagctgagaaaccagaagtagatgctatggaagtagagagtggcattccgcagaaggaggggagtgataaaaaggagaaaaaagatgtggcgatggaggaggaggatgaagatgagggtaaggataatattgataagtcaaaagaagaagagaaggcagaagatagtaagggtgagaaaggatcaaaaaaacgtgggagagggaatatcaatggggagaaagtgaaagaaaaaagaaaggaaccgaagaaaacagagccaaggactcctactattgatcgccctgtgcgggaaaggaagtcagtggagaggttggtagcatcaattgataaagatgcaaccaaagaatttcacattgaaaagggtcgtggtacacctttaaaagatataccaaatgtggcatttaagttatctagaaggaagactgaagataccttcaaattgctccatacaattctctttgggaaggagagggaaggcagttgagatcaagagtaatatatcaaggttttctggttttgtgtggcgtgacaatgaggaaaagcaaatgattaaagtaaaagaaaaacttgacaagtgtaataaagagaagttactggaattctgtgatgtgcttgacataacaattaacaaggcaacaacgaggaaggaagatattattgctaagcttatagactttttagttgcccctcatgcaaccacaactgtgttacttgcagaaaaagacaagcccagtaagggaacaaagcgcaaacgtgttgtaaaacagggttcatcaagatctgggacaacttcaagacgttctgtgaaggtaatatctctcctttaactgccagaatgtgaaatataatttgtgtatttcaaagttaagtcatgtagaatatcagtcttgcattgttttgactatgctagtttatctcacttttgcttgtttatgctctctgcattgcaagctatcacaaaattgttcttgtcctagtgaatgactagttgttcttatcccatgtcagtaacggtgcatttgattcactaaataatagcggagaggac

SEQ ID NO: 8675 - DNA, 944 bp, Glycine max
gtgtaataaagagaagttactggaattctgtgatgtgcttgacataacaattaacaaggcaacatcaaggaaggaagatattattgctgagcttatagattttttagttgcccctcatgcaaccacaactgtgttacttgcggaaaaagacaagcccagtaagggaacaaagcgcaagcgtgttgtaaaacggggttcatcaagatctgcaacaacttcaagacgttctgtgaagagtcagaagaaaaatgaagattcttcagtagtgcggagaaagagtacaagtgacacagaagatgagtcagaggaagacgagaaagatgaagaaaatgaggaggaaaatgaaaatggtgttcctgacaaatctgaggatgaaacaccagagaaatctgaaagtgaagacaaaagtgattctgggagtgaatctgaagatacgaaagaaaagaaaaaacctaaaacatcatccacaaagaaagaatctgctaagaaaagtaaaattgagaaaattacagttgcaactaaatctcgctcaccacataaaagaacacctaagaagtcatcatccaacctctcaaagtctgatgatgacagtgatgaaagtccaaatccaaaggtcttttcaaggaagaagaaaaatgagaaaggaggaaagcagaagattgatgatagtgatgaaagtccaaatccaaaggtattttcaaggaagaagaaaaatgagaaaggaggaaagaagaagattgatgatgatagtgatgaaagtccaaatccaaaggtcttttcaagaaaaaaaaaggagaaaggaggaaagcagaagaggtcaacaccaacaaagtctgcctccaaagagagaactgaaaaggtcactaaaggaaaaggaaagaagaaagagaagtccagcctcagtgataatcagttacgtgatgcaatctgtgaaattcttaaag

SEQ ID NO: 8676 - DNA, 342 bp, Glycine max
tttctcgatttcgaaatatatcaaaaccttgggtagaaaaaaaaagtggtatgctgtgtttccaagattggatttcatattcgaatgaacctcgtaatcgtaagaaagtgggttttttaactacgggtctagcaaacgaaaaattgagataggatccaatccaataagatctccccctttcaaaatcggacgtgaaggtttcctttcatccggctcaagtagttataacaaataaaaaaaacaaagggttttcactttcaaaatctataaaaaaactctaatctaaaagaaaaaggtttactctttactcaattcatcaataaataccaatcaacatttcat

SEQ ID NO: 8677 - DNA, 379 bp, Glycine max
gaaaacaagaagcaataacactcaaaaactcctctcttttcctctcctcacatttctccccgaacctctccccacattactgcactgtgaggtgtctgaaatagaatagcttcttctgtttcatttgttactatatcacccaccagcaccagcctttgtgctagctctttgattcctttttactcttttttcgtttttttttcctgttctttccctttcccctctgctcgatgatgaatggaaggaacgttgacacaaacaggttccccttcactccttcccagtggcaagagcttgaacaccaagccctcatctacaaatacatggcttcaggtatttccatcccccctgacctttctcttaacatcaaaggaacaac

SEQ ID NO: 8678 - DNA, 329 bp, Glycine max
gatacttcattcattttatcgctcgcagctgaaaagaaactcaactctactctgcaactcattcctaggatttctacacctcgacgaatcctaggtacttcagaaattttgaatgaatggagatgacaatgtcagcagcaacttgttccaacatgactagattcagtggcattctccggacaacatgtgtatcatcatctcccaagaggaagcatgcaaaaggaatcttgagaaattttaccatatgtgcctcaccatttatatcttcagttgaccctataattgttaattccccttcctttcaagttttggcttccaattttcgcttg

SEQ ID NO: 8679 - DNA, 556 bp, Glycine max
  unsure (1)..(556): unsure at all n locations
gattcgatcaaatactcagaactgttcggtttttctggaaatttttcttctctcagccatctctctctctctctgcgtccatggagttttggggtgttgaggtgaaaagtggagaatctctcaaggttgatccgggagatgacaagattatccacctttcaaatgcatgcctgggggatgtcactaaggataaagaaggtctaccagtagccctgtatgtcaagtttggtaaccaaaagcttgtacttggaacgctttcttctgaagcttttcctcagatatcttatgatttggtatttgagaaggaatttgagctatcccataactggaaacatggaagtgtcttctttaccggatttaaagctcaatctcagtcagagtctgataatgatgaagattctgatgattttgatgaagatattccagttagtgctgccaatggctaacctgcgattgaggtgacgaatggcatcaaacctgatgcaaatgaagctaaacagaagaagatagcanatggtgaagatgaagattcatccgaatctgaatctgatgatga

SEQ ID NO: 8680 - DNA, 594 bp, Glycine max
caacactttaggtaaacctaagagggtttaacctcgtttccttaatccattctttgctccctcgaactgttgtttggtctcttctctcttatccatggcatcaacgtttctcaccctaccaactcccttcctacacaaaaccaatgccatcagtttctctaacaagagaccctcatttttgcagaggagctctctgaagattcatgcaattaccaaaaaatgggaacccacaaaggttgtgcctcaggctgatagagttcttattcgtttggaggagctttcagataaaacagttggtggagttttgctgcctaaatcagctgttaaatttgagcgctatcttgtgggagaaatcctaactgttggtgctgaagctggagaactaaaggctggaacaaaggtactattcactgacatgaatgcttatgaggtggatttggggactgatgcaaaacactgcttctgtaaagcaagtgacttattggccgttgtggagtaaggttttggccactggacgagacaaaacgggagccatcctttttatggtatatctttgataagtgtattttagtagaataaaccatttttttcatt

SEQ ID NO: 8681 - DNA, 618 bp, Glycine max
gagtctcgtgtggtgtcataacttctgcatgctctctattaagaagtgtattcaatgaaattagtttttatacaaagttgtaaagctaactaactaactaattttgtgaagcaacaatgtggaagataactgtacagtgccaacagcttccaacaggcccaccattttgattgggtaaagggatggccttattgaacactatggacaagcaacatgagtgctagcacctgaatcaacaagccagcaatcacgaaggagattaaaggaggaggcagacataatcataccattagaatcaccatgattctgatggggaacagtgacatttgaagtttgaccctgtaggagactcatcaactggttgtactgctgtgctgtaagttgaaattgtgatggagaatcctggctcatggaactcaaagagacttgattcactgacctagaagaaacttgattggctgaattagaagaaggcttgttcttcttgtaatttggtggataaccattttgtttataaacattgtgctttagtgtgaccctgaattccacaatgagcacaaataggatgatccttttgtccacctttattcttggaatcaaaaccatttttcacccccc

SEQ ID NO: 8682 - DNA, 1049 bp, Glycine max
cgaaagccctcaaagcataatctcactcgtattagcgttgctgagtgagagaaagagaaatggcaacaagcgaagaagtggttgcggcggcgcggaggagccgcgccggaggcagggttgaagcacaaactggagagaaaatggacgttttggtgcgacaaccaatccaaacccaagcaaggcgctgcttggggaacctctcttcgcaaggtctacaccttcgacaccgttgaagagttctggtgtttgtatgatcaggtattcaagcccagcaagttgcaaatcaatgccgattttcacttgttcaagactgggattgaccctaaatgggaagatccagagtgcgccaatggaggaaagtggtctatcaccagcaacagcggcaggaaggctaaccttgataacatgtggcttgaaactatgatggctttgattggggaacaatttgaggatgctgaggacatatgtggtgtggttgctagtgtgcgccagtggcaggacaaactttcgttgtggacaaagacagcagcaaatgaagctgcccagatgagcattggaaggaagtggaaggaaatcattgatgttaacgacaagataacatacaactttcatgatgattctagaagcaaaggagcaacaaagggtcggtacaccgtataaacaccgcaggagcatcttcttgcacttgtgctgggctgctggcaaggctgtaatatttgatatctttatcatgtgccatatgtactaagaacatgctactactttggtggggggttagttttatttttgttcactcaccccacttttgggtgttgatactatcatactcttctcatttttgaaatggtctgtcaaatttttcttcagagttcattggtagtttttttgtttgtcacattctaaaagctttaaattttgaatatgtcgacacaagtttagcacgagtttgatgagttatttgtacaatcataactgtgattgaacctacattgttctgttgagtgtatgaccctgagctaaaattaagatgaactcaagcttcaactaac

SEQ ID NO: 8683 - DNA, 959 bp, Glycine max
ggttggaaaaagaaggaacatcagcagcagcaacaacaacaacaacagttctagtagtagcgttcttgggttggatgtgaaggtgcaacagagccctgaagcattattccataataggatgatgatgttggcgcatcataatcatcaccaccgtccattgtcatcaccctttgataataatggtgatggcgatggtcccacgacttacatgtcttttactaatcatataaaccttgttagtggtgcttcttctgttcttggtcctgctattgatgctggctgtggtgctgctcctcctgcacctgtaagaactttgcagccttttgacatttcttcttatacttcttctcccaccaccactaccacatccttcaacttcaaacccccttcagcaggtgtgatggcggcttcgttggggtttcccttcacaagtgcacaatggagggagcttgaaaggcaggctatgatatacaagtacatgatggcttcagttcctgttccacctgatctcctcactcctacttcactcacatcctcttctcgctcttcctgcatggatggtggtttcaatctgaggttggcaaatagcactgaccctgagccaggtaggtgcagaagaacagatggaaaaaaatggagatgttcaagagacgtggctcctaaccacaagtactgcgagcgccatatgcatagaggccgtccccgttcaagaaagcctgtggaagttaacaccaacaccacccccactcccaccagcgtcaacaataacaaccaccaaatcaaaaaggctcgccatgagtgtaataataatccttttgctacacctgacgttactgcggctatttccaaccccacatccagaaaaaatggatcttctccccattttcttgggtctactaccactcagccataccttgattcttccctctcccttgataactttggtctaaaagctgcta

SEQ ID NO: 8684 - DNA, 1631 bp, Glycine max
cgcagcgtacgccacgaatcaaatccaattgaaatcaaaaataaaaaggaaaaaagaaaaagtaaagacctctcaacacatggctgcttcaatcccatttacaggtatcaactcctcaagggtgcttcccattcctagagaaccacaccacccattttcccatttgctctcaaacatgtcaaagtttgcatctttgagaaccccttcttcttcttctgcttcttcttcttcttcttctgtgtcttgctctctcaccaaagacccttactctgttgtgccattggaggaacatagcaaaatggataatgggtcggttctgcttcagagacccgattcgtttgggaggtttggcaagtttggagggaagtatgtccctgagactctgatgcatgctctcactgagcttgaggctgctttttattccctctctgctgatgaacagtttcagaacgaactagctgggattctgacagattatgttggacggtagagtcctctctattatgctgaaaggttgacggagcattacacgaggcctaatggtgaagggcctcacatttatctgaagagggaagatctcaatcacaccggggctcacaaaattaacaatgctgttgctcaagctttgcttgctaagaggttgggcaaaaaacgcattattgctgaaactggagcgggtcagcatggagttgccactgctactgtatgtgctcgatttggtttagaatgcattatttatatgggcgcacaggatatggaaaggcaggctctcaatgttttcagaatgcgtcttcttggtgctgaggtgagacccgtccattctgggactgctacactgaaggatgcgacatcagaggctataagggactgggtaactaatgtggagacaactcattatattttgggttctgttgctgggccgcatccatatccaatgatggtaagagagtttcatgctgtgattggcaaggagaccagaaagcaagctttggaaaagtggggagggaaaccagatattctgattgcatgtgttggtggaggttcaaacgccatgggacttttcaatgaatttgttgatgacaaagatgttaggctaattggcgtggaggctgctggatttggcctggacagtggcaagcacgcggcaacgttaacgaagggagaagttggggttttacatggagctatgagctacctgctgcaggatgatgatggacaaatagttgagcctcactcaattagtgcaggcttggactaccctggtgtgggtccggaacataactttttgaaagatttagggcgtgctgaatatcatagcatcacagatgaagaagcattggaagcttttaagagagtttcgcgacttgaaggcataattccagctctggaaacatctcatgcgttggcatatctagagaaagtgtgtccaacccttcctaatggagccaaggttgtggttaacttcagtggccggggtgataaggatgttcaaactgctatcaagtgcttgaagctttgaaagggttgtcatgaacttgtgtggagctgtggattggctgctgactgagctttattttcatacttatgagacataattaatacaatttatcattagaccaagttaaataatc

SEQ ID NO: 8685 - DNA, 295 bp, Glycine max
gtctcaactcctcaagggtgcttcccattcccaaagagccataccacccattttcccatttcccctcaagcatgccaatctttgcgtcttatgagaatcccttcttcttctgtgtcttgctctctcacaagagactcgtcctctgttgtgccattggaggaacatgacaaaatgggtaatgggtcggttctgcttcagagacccgattcgtttgggaggtttggcaagtttggagggaagtatgtccctgagactctgatgcatgctctctctcagcttgaggctgccttttatt

SEQ ID NO: 8686 - DNA, 654 bp, Glycine max
ggggaggtgcagttgctgcagagtgaggcgttcgattaacgtttggcgatcacagaagagaagggaatggagttttctcaagatgattttgatcggttactgttattcgaacacacgcgaaagactgctgaagcaaactacgcagagaatcctcaagacgctgataatctgaccaggtgggggggagctttgatcgagttgtcgtcattccaagctcctagggatgccaaggcgatgattgatgatgccctttcgaagctggaggagtctttgctgatcaatccaactaagcatgacactctttggtgcttgggaaatgcaaacacgtcttatgcttttctaatccctgatataactgaggcaaagggttattttgacaaggcacttgagtatttccagaaagctgcggaggaggatcccgagaatgacctctatagaaagtccttgcaagttgccgtgaaggccccagaactacacatggagatccataaaaatgggcttggtctgatgagtaatgcgggatcctctgctacttcaaagaaaaggaatctaaaaggcagaagagcaatgactttaagtatgacatatttggatggactattcttgcagtgggcatagtagcatgggtgggaatggccaaatctaacattcccc

SEQ ID NO: 8687 - DNA, 314 bp, Glycine max
tagggagattggagatagattactcaatactactgcggaggaagagaagtttgtattctagtcttgtgataaaatgtttggcattttaggcacactagagaggctgcaagtccccttaattttgccattttttattttccattttgtttaacggtagcagaaaaagaatatcacgatgtataaactttggaatagagatgagtgcagtgctgaaatcttagataatattttgtttgagacagttgaattaatcaattgctattttttatgaatgagtgaagggtggcgagagggtgggacgaggcggccgctct

SEQ ID NO: 8688 - DNA, 611 bp, Glycine max
aggagggagcggagccacatgattgggagatcccttgatccgtatttcttatttgtttccattttttcctgttacatatcatcttatttttgtttgactaagggactaacgtttgtttcgttttgattgacttttgttttgtacatacatatcgtttgagttgttacgtcagtacttgtttcgttgttttcaatagtgtttgtagaaattccggaatcgcgtagaatttttttttttcatttaggaacgtcgttctaaaaataaaatgaaccaaaatcatgataaaaagagagaagtgtagtgaataaaatttttgcgtatataaagaaaaaggaaaatgtgcatagaagggtttttataaaaaaatatgtgtagaaagattcttgtgtgtgtgaacaacgagtgtatataaagaaacttttgtatgaaccataagtgtgcgttggagaaaaacgaaaaagatctttgaatgtaaatagggtttgaccgtgtgacatgaagagagagagttccaatgcatatacaaaaagagtttgttatgtacaagagtgtagatatacaaagaaaatttcttcataccggaccataggtgtataattttgtgaatatcc

SEQ ID NO: 8689 - DNA, 499 bp, Glycine max
gtggttacggtggtggtggaagaggcggtggaggcggtgcttgctacaactgtggtgaatcgggacatctggctagggattgcagtgcgaggcggtggtggggacaggtacggaggaggtggtggtggtggcagatatggaggcggcggtggcgggaggtacggtggtggtggaggcggcggcggcggcggaggaagctgctacagctgtggagagtctgggcattttgccagagattgcccatcaagtgctcgttgaatttactgttagggttgtttatgttttgcggattgttttaagtttttactttaatatgtcttagggattttaatggtttctgtccaaactatgggttcttatgagtagatgtgtgggatttttcttttttggttatttaaatgaagggtttctgtgttatcgttacaatctgcaaactaaaatctgtttgaacttacattttgctataatgaattggatgattgttatcggtttctgtggt

SEQ ID NO: 8690 - DNA, 801 bp, Glycine max
gagggaaaataaatatctgaacaacataatctatattctttccctgggggcctcagaatccttaacagaacaagttgcagggatggcctccactctctctatatcctcttcatccacccttgttgatgccaagcctccaactccaagacaatgcgtcacccttcccactcttccccctccaccttttcactctcagactcgtccttggaagaccactgctttctgtcgtaggcttgctcgcaattttatggcaatggccaccacaagagaggcagccgcagcagaagttgccgccacaactgacctctctattgccgagacgccagagattgtgaagactattcaagaagcttgggacaaagttgaagataaatatgcagtgagttcactggccgttgctggtgtggttgcattggtgggctcagctgggatgatctcagcaattgataggcttcctttaattcctggggttcttgaggtcgtaggcattggctacagtgggtggtttgcttacaagaacctatttttcaagcctgacagggaagcttttctacgaaaggtaaaggaaacatatagcgaaatacttggaagcagctaaaacagtgaggaattgctgcttagattctgttcacacaaaagagatctctgtcttgcagcattttgttaaagatgcaaacctcgcttcattttgtcgcaataagcttcctgaccatactttatcccatgtgatgtaatctagcctgataataaatgtaactcttttaataatcaatctacttcaagaagatttcatttcttcaa

SEQ ID NO: 8691 - DNA, 600 bp, Glycine max
  unsure (1)..(600): unsure at all n locations
cgtacgctgccagaaaacaacaaaaggggggggccccaaaacccttaacacgagtgaaagtacaagttgcagggatggcctcaacctcctcctccacactctctatatcctcttcatccacccttgttgatgccaaggctccaagtccaagacaatccccacaatgtgtctcccctccacctgttcactctccttggaagaccactgctttctgtatgtcaattcagttattacaactcctttgtcttataactcaacttcattatacactatggtttgattctttcaggtcgcaggattgcaagcaatgttatggcaatggctaccaccagagacgcacccgcagcagaagttgccacgaccgagctctctgttgccgagacgccagagattgtgaagactattcaagaagcttgggacaaagttgaagacaaatatgcagtgagttcacttgccgtagccggtgtggttgcattggttggctcagctggcatgatctcagcaattgataggcttcctttaattcctggggttcttgaggtcgtangcattggctacagtgggtggtttgcttacaagaaccctattttcaagcctgac

SEQ ID NO: 8692 - DNA, 423 bp, Glycine max
taatcttaacacgagtgaaagtacaagttgcagggatggcctcaacctcctcctccacactctctatatcctcttcatccacccttgttgatgccaaggctccaagtccaagacaatccccacaatgtgtctcccctccacctgttcactctccttggaagaccactgctttctgtcgcaggattgcaagcaatgttatggcaatggctaccaccagagaggcacccgcagcagaagttgccacgaccgagctctctgttgccgagacgccagagattgtgaagactattcaagaagcttgggacaaagttgaagacaaatatgcagtgagttcacttgccgtagccggtgtggttgcattggttggctcagctggcatgatctcagcaattgataagctttctttaattcctggggttcttg

SEQ ID NO: 8693 - DNA, 520 bp, Glycine max
gattgccaaagtaatcattagtgcagtataatggtggaggttggagtggtgtggagcagcctctggagtctggccatcaatgcagacctgtagctgagtttgtcatgtagcagggattgtggcttctaattgcagccactatggttgacagggaaattcccttcgttacccctgtttttgtgtgagggctgaaactactttttgggacataggcgttgggcactagattcagtggttctctatctcgaggatgaacacaagaaataccgaagagcagcacacctgtttccaccaaattgttatcaaggaaaaagaacgttttctggtagtgcggtgagtcgaacatcgacaagcaaggcaacatcattctccaggacgacgccgtcgaacagaggtgcctcgctcttatcctcttgtcacgtcgattgctctattctagctacctagctagttagttagggtttctttaatgctggcttttaatcaaattacactgattgcttctatatgtttttcttgc

SEQ ID NO: 8694 - DNA, 415 bp, Glycine max
tggaacccttggtttggtaggcacaaattatggttgcatgaacatggcaggtttcgcggcaaacatcggcttcaacatctcgtcccactttccctgtcgcgttttttcaattcaccggagtatttggaagtttcagattgtctgcttgaagagaagagagtatagttcttctgttcctattaggtacatttccagcacatcctgcagggtgaaaatacttgatactgcactgccagtgaaaagccttggatattgtagctgtcctgatgttaatgtgctcaagataaatggtggaaaagatgtgcaggcaacaattgcacattgtgaaatttctcaagacccgaatgaaatttgccctgaacttattatttgatgacagtgaacaagattcttttgatcaaatggaagaggttgg

SEQ ID NO: 8695 - DNA, 553 bp, Glycine max
taattagtccttttgggccgttgtgcaaacgaaagtgaagaaagagttgcagttgcagtagagaaagagttgttgttacaatacaattaacttacatcccaatagagacagcactataatgttgcttttggggggttgggttggggtttccattttgaagaaacaacaaaagttctttatcctgaaactgcatgaggagccacagttggtgttgatgataagcaagagtgctacctggagacaaacactcacgtacaattgcatgtcatgcatggtttattgtgaacagtgtcaatccatgaagaagaaccatctgcccaatattaatgaaggatgagaaaaacactactctctgttcagatttattccctcccatagcctacaccggtcaaaatgcagcatgaccctatcctctttcattcctctccaccttaccttcactccatcttaactcttaagtaaagattatagaataatcccaactcagattaaataagtcatgtatgttttggccaaaaaaaaaaaaaaaaaaaaaaaaaaagcgcccgctcta

SEQ ID NO: 8696 - DNA, 362 bp, Glycine max
ggaggtcatcttgttggtccattcgtgcggtaacggaaggagacaataagcgtctccgtcgcttaaattgccgagaacttcattacccattatctgttacagttctacgctctcgctccaaaccccacttcagatttggtttactggaaggaaagtgcttgaaggacccaatctacacgagagatgcaatggcaataaacacacacatgttagcttcaatgtgttattattgctgccactgtgattaatgagtaagtcactgtgtcacaggatatagagctgttttcttccagtgcatctttggtttgagatttatgtagttttctctgaaaagtgattactagtttccctcaaacaataat

SEQ ID NO: 8697 - DNA, 461 bp, Glycine max
tggccccaggacgtcgctgagttcagttgcagaccttcacatggcaaaatcattcttcacttagttaggaaccgaaccatggctataacgttcggtttagtgactcctaactccaacactttgtgtctcactctcaccacaccacccctcatcgccaatcatcgtactactaatgttgtgttctctggtcaaagtgtcttcagctatggacacactaatctttcttattcacaccaaagggcttcttcctttgccactattgtctgttctgctgctaataaaccatcctcttcttctgaaattagctctacagccaagataaggagcgaggttctctctccctttcgttcagttaggatgttcttttatattgcttttgttgcaagtggtgctcttgggggattcatagcaaccacacaactaattggtgcactggctaactcatcaagagcatctgaagt

SEQ ID NO: 8698 - DNA, 485 bp, Glycine max
gttaaatggcccattataaagccttctaatttgcactttgtctctctctttccgttcccttgatgtaatggctttatgccgattcgcttacttttcttctcctccttcctctccatttttcgtttcccgaaatacccttcgaaacacgttaaattctctttgctgccactctcattcgcaacgatggaagctcctccagaaggttatcgcaggaacgttggtatctgtctcatgagcaatcacaaaaagattttcgcggcttcgaggctcgacattcccaattcttggcaaatgcctcagggtggtattgatgaaggtgaggatccaagaaatgcagccatcagggagttaagagaagagacaggagttaattctgcagaagtgattgctgaggtaccatattggttaacttatgacttcccaccaaaagtaagggagaaattaaatattcagtggggatctgattggaagggtcaggcacagaa

SEQ ID NO: 8699 - DNA, 519 bp, Glycine max
cttctatctttcgctctccccctctgtgtttctgacagtgttactgtgtgtgttttccgcggaaaatcaaaatgggtatcattgaaaagatcaaagaaattgaagccgagatggctcggacccagaaaaacaaagccacagagtatcatctcgggcagctcaaggctaaaatagcaaaactgaggacacaattattggagcctccaaaaggttctagtggaggtggagaaggatttgaagttacaaaatttggtcatggacgtgttgcactgattggatttccaagtgtggggaagtctactcttttgacaatgttaacgggcacacattctgaagctgcatcttatgagtttactactttgacctgtattcctgggattatacactataatgatactaaaattcagttactcgatcttcctggaattattgaaggtgcatctgaaggcaagggacgtggaagacaggttattgctgttgctaaatcttcagacatagtattgatggttcttgatgctt

SEQ ID NO: 8700 - DNA, 733 bp, Glycine max
gaccaccctcctaaccaatcaaaattcatgcatacccgtcacactcactctctactcattttccctcaacttagcaaacaagttaggttctctctctctctcaccaaaaacgcttcagatgaccctcaattgaaccaagagcactcatatcctcttctgaaacacacaaattcgttaaccaccaagtaggaaggaagagtcactctaaaatctttgcactagttttgtgttgtgcttgcaaggcttggaagcttacataatcttaaccacctcttcctctaattttcatgtagcagtgaaatctatggtcagcaggtctttttggtgaacgcaaccctggaaaccatggatcatactacgggtaaagagatgacactatctcgaggataagtgcacttggaggtgatggatacacgatgtgattagaggcgtagataacttccttgggtatattggttaattatgctcaaacacctactgacttatgcttgggtgtagtttccaaattggcttgggtgttagagattactactctaagtccaagacctttatctctcaatgtatttgttatgggtaggcctaggcttcagacttttatttctatattcaaccatcagattccattatatgcgccttgactcactcatgcccttggatgtatttaacactttcaaaactcagtatgcttgtgtatttatgcactctttacatgtatttcagcagttttaagtcg

SEQ ID NO: 8701 - DNA, 915 bp, Glycine max
cgtggaggtctcatgactgctatggttctgttgtgggtttttatgggcttatttgctggctactcctcagcacgtttgtacaagatgttcaagggcacagaatggaaaaggaacaccttgaaaactgcatttatgttcccaggcattctttttgctgtcttctttgtgctgaatgctttaatctggggggagcagtcctccggggcagtcccttttggaacaatgtttgctctagtctgcttatggtttggtatatcagtacccttggtctttgttggcagttacttgggttttaaaaagccagcaattgaagacccagtgaagactaataaaattcctaggcaggtacctgagcaggcgtggtatatgaaacccgtcttctcaattcttattggaggcattcttccatttggtgcagtgttcatcgagctcttctttatcctgacatcaatatggctgaaccagttctattacatctttggcttccttttcatagtgtttgtgatcctattaatcacctgtgccgagattaccattgtgctttgctacttccaattgtgcagtgaggattacaattggtggtggagatcttacctcactgctgggtcctctgcgctgtaccttttcctctactcaattttctacttctttaccaagttggagatttcaaagctggtctcgggcatcctttactttggatacatgataattgtttcatatgccttctttgtgttgacgggaactatcggcttctatgcatgcttctggtttgttcgcaagatctactcgtcggtgaagattgactgatttcaggcatcaatcatataatatgaccgatgagtacaaccggaaactgatactgagatgactcaaccaaatactgccgggaagttacctttcccccaactctgaaaa

SEQ ID NO: 8702 - DNA, 520 bp, Glycine max
gaagaaagtagaaaggatttggattcgaggcttgctaggtgaagtcaacaaagaaagaaaaaaagctttctccgagaaagcttctgttcacgtcagggtccggggtaggcttcttcattgagattgggttggtgttcagtgtgaatgcatttccagtgagataagagaaaaggaacgaggggaagaagcgacttatattaagaaatattaatatacttaatttaatattaatgttcgggtacccccctccggctcgtagttgagaagagctttcgtttaggaaagggctaaatgggtgcgatccctctcgttgagagtcaagggtctcctggagtagaaggcacatcctggatctattaagccggcaagggttcagcattggctttcacgaccgcaaaggggccatctctcagtcggagtagataagatagatatacttaatttaatatcttttattatatattttaatataataaagaaaatcgtgaataaaagagcgtgacgagaaaaaaataacaac

SEQ ID NO: 8703 - DNA, 411 bp, Glycine max
  unsure (1)..(411): unsure at all n locations
cgaacttcgaagctccaaacagctttttaaccattttcgcttcttctcttcttctctcgcattaccactatgcattaagttaaccatttctagggttagggttttcgcttctcggaaaattcgaaatggaagaagattttgggtacagaaggaaggccaagatagcactcgtcgcaatcatggtactcgcctccgtcgccgtgtttgcgctgctcgttgccttcgcctactactgccacatcctcaacaaggtctcgaatcgtcgcaaaagcctcaaaaaagttgaagatgccaaccttaacgagaaaagtgactttgcaaatctgcaagttgttgctgagaaaggacttcaggtgtttactttcaagcagctgcattctgcaacggngggattcagcangtcaaatgtca

SEQ ID NO: 8704 - DNA, 142 bp, Glycine max
  unsure (1)..(142): unsure at all n locations
agacgacagaaggggactctctatgcaatgaacaaagcaactgaagttgttgctttttagcttcaacaatttctcagtccaaccaaccgcatcagtcaaatccagcgccatatctcagccttcactctcacaaaacttgcna

SEQ ID NO: 8705 - DNA, 519 bp, Glycine max
ctcgagcgtctggttggaattgtatggaatggagggttagctaagaagaaaataggagagggttagtttttaggggctgcggaaaaaagatagtgagtggtggccaatgggagcggagaggttttcccacgaccatgctcccttgattctgggtctccagccatccgccctggtcgacaacgttgccaccgtcgattggtccttgctccatcgcattcccggcgagcgcggtggctccatccctgtccaaattgaagaactggaatccatactgagagaggttaaatccaaatcccacgatgacatcaaaactctcgctggtggcagcgttgccaacacaattcgcggtctcagtcgcggttttggaatttccaccggaattattggagcttatggagatgaccaccaaggccagctttttctcaccaacatgaccttcaactctgtcgacctctcaagactccgtcaaaagaaaggacacactgcacagcgtgtttgcttggtagatgacatgggtac

SEQ ID NO: 8706 - DNA, 828 bp, Glycine max
cggctcgagggcgaggtagtagtagtaacttgctgaagggacaaagcagatatataaaatatttctggtaaataaaaattgatagacagttttggttccgcatataaagcttctctggcgcttgggcttagcataacccttacctttggtatagagaagaagaatagagagtgatggagtgcgtattcggattggtgggtaatgggtttgcgatcgtggtggctgattcatcggcggtgcacagcatcctcgtccacaagtccaacgaggacaagatcatgctcctcgattcccacaaactcattgccgctagcggcgagcccggagacagggttcagttcacagagtacattcagaagaacgtcgccttgtatcagttccgtaacggcatccctcttaccaccgccgccgccgccaatttcacgcgtggcgaactcgccactgctctccgcaagaacccatactctgtgaacatccttcttgctggctatgacaaagagacaggccctgaactgtactatattgactacattgcaacgcttcacaagcttgaaaagggggcttttggttatggctcctatttttcactctcaatgatggacagacactaccatagtggaatgtcagttgaagaagcaattgatctcgttgataagtgcattatggaaatcagatccaggcttgttgttgcgccgcccaactttgttattaaaatcgtggacaaggatggtgcaagagagtacgcatggcgtgagtcagtcaaggatactcctgttccttcagcttgagtaactctttccctaattttcgttggacttctttctttct

SEQ ID NO: 8707 - DNA, 566 bp, Glycine max
tatcaaactcattctgtcttttcttctatttttatttctatccaatcatccatggccgaggaaccccaaaaaccagcctccgctgaagaagtggtcgctgttcctgcggagaacccaccatctgaagccgaagctgaaaacatcgaagcagagaaggcccagagtggtgtagaagacaagatttcccagtcggtttcgttcaaggaggagaccaacgtggttggcgacctccccgaggcgcagaagaaagcccttgatgagctcaagaagcttgttcaagaagcgctcaacaaccatgagctaactgctcccaagccagaaccagagaagaagaaaacggaactcaaagcactggagaagaaggaggaagaagtctctgaagagaagaaggaagttgaagtgacggaagagaagaaggaagcagaagtgacggaggagaagaaggaagcagaagtgacggaggagaagaaggaagttgaagtggcggaagagaagaaggaagttgaagggacggaggagaagaaggaagttgaagtggcggaagagaagaaggaaacagaagtgat

SEQ ID NO: 8708 - DNA, 674 bp, Glycine max
  unsure (1)..(674): unsure at all n locations
ggtgaatctgctggcacgacagactggtttctaaaacaacaaccatagccaatcagtgtttggtctctttttcttttagacccaccctttctcttctcttccctttcaacttcaactcaacaacccttcccttctcaaactcattcttgcctttctttttgttcatacttttatttttattgctacttactttttatttctatccaatcatccatggccgaggaaccccaaaaaccagcctccgctgaagaagtggtgcctgttcctgcggacacgccaccaactacccaatctgaagctgaagctgaagttgaagcaaatgcagaaagcatcgaagaagtggtggcggaagcagagaaggcccagagtggtgtagaagacaagatttcccaatctgaagctgaagctgaagctgaagttgaagcaaatgcaaaaagcatcgaagaagtggtggcggaagcagagaaggcccagagtggtgcagaagacaagatttcccaatcggtttcgttacagggaggagcccaacgtggttcgcgccctccccgaggcgcagaggaaaccccttgatgagctcaagagcgcttgctcaagaagcgctcaacacacatgatctatcttctcccaccacagccacagaggtaggagacggcggctctcaanncactggagaa

SEQ ID NO: 8709 - DNA, 383 bp, Glycine max
gatttttatttctatccaatcatccatggccgaggaaccccaaaaaccagcctccgctgaagaagtggtcgctgttcctgcggagaacccaccatctgaagccgaagctgaaaacatcgaagcagagaaggcccagagtggtgtagaagacaagatttcccagtcggtttcgttcaaggaggagaccaacgtggttggcgacctccccgaggcgcagaagaaagcccttgatgagctcaagaagcttgttcaagaagcgctcaacaaccatgagctaactgctcccaagccagaaccggagaagaagaaaccagcagcagagaagaaggaggaagttgaagtgacagaagggaagaaggaagctgaagtcatagaagaagaag

SEQ ID NO: 8710 - DNA, 653 bp, Glycine max
tttctccctgccttgtttcagttctttctttggtcactcactgctctctaacctagttccacatttttccactcaccaagtctctatctttcatctcatatttctcttcattcacatcacttctctgatctgtctcttcactctctttgacccagatcaaattttttaccttttgttcttctctctttctctccgttaatgctttgcttcaaaccattctcagaaaaaccaatgcttccatctgggtctaccctctttctggatttttgttatctgattttgtaaaatgggttgttttttatatgcagaaatttgattcaatataggagatttcttacagagaaattttagtacattttgacaacaagggcttttggcaatgggcagaggcagaggaaaagggaagaagcaatctgttattgctgaggatcctggaagtggtgaagaggataaagtcccagcttatagaagaaggggaagaccagtgaagccactaacagatgaaattgaagaagtggaagtaactgaaataattgagaaagacgaggagaatgtgaaaggcaatggttctacggatgatttgaaaactcaggctatcacagttaataaaagaaaaaggaagagatctacacaggttaaagagaagatagatc

SEQ ID NO: 8711 - DNA, 519 bp, Glycine max
taaattatatggacgaacataatttttaaataacatttaaaaaaatactaaaaattattaaaaatattatttatcaaataattaaacaaacattttaactcataaaaaaagaaaaaatgaattgaaataatttgtccagcatattcattatcgaaaaagttagtgttcatgggactactctatttaatttggcatatctttagcatgtataaaacggcactctaaaagtaaatcatataaaatgattgaaaaaatttatttcacatgcttcgtttatgatccttaagcagggctgttaaaagaactgagagaattggactcaaccaaacggtccaaaccataaataatcagatattttaaaattgataagaaaaatatgagtaaattggactttttcttataaaaaaaattaagagtaaaatacattcatctgccctaaatttaagccttattacacttatatcccttccaaaatttatcttacacaaactctcctaacttttataactctattacaaa

SEQ ID NO: 8712 - DNA, 477 bp, Glycine max
gtacgaatcatgtcaaaaatattcagaagcatgtttggagctgtgccgtgagatgaacatcatggcaattgatctgtggtctgcactccagaaaaggggtgactggagagatgtttgcttcacggatggaattcatcttacttctgaggggagcaatatagtggcaaaagaggtcttgaaggtcatcaaagaagcagactgggaaccttgcctgcactggaggtcaatgccaactgaatatggagaagattcaccttatgatcctgttggccctgatgggaagacaagtttaaatatctccaactggaccttccttgaaaccaaggaatgggactagagttatgtgtatttgaaaactatagacatgccccattacatagaatcctaagcaataaataatcacaaaataacaggaatttagaactgtggctaaaggaaaatatatctgcatcatttttcactggtttttcaacccac

SEQ ID NO: 8713 - DNA, 117 bp, Glycine max
aatctaaattgattcaaccccatgtcctgcgtgaagattcgcaatacttcatctgtgtatcattcacatacgtccatgcttttcattggttgcattgctcattgcattctttccgcc

SEQ ID NO: 8714 - DNA, 564 bp, Glycine max
cacggaaacagtccgtgagttgcaaccctagcttttccttttccgttcgtatcgattgaagaattaggatccaatagatggcattttgggggacgcgggtgatggagattgtgaagaagcatgattctggaggactagtttggaagagaataaaactcacaaccacccgaaaagccaacgctaagaagcgtcttctccgcgtttggcagaatgaagctgtcctgaaggcatgtgttgctcaagttccatctgccaccaccactaccgccaccaccgccgccaccaccagtaccagtaccagtacctagctaagttcatggccatctcaatttaaatacattacttgcaggtgaaactttgtaagaatcagcttctggaattatattaatttgtaatgtgattttttgggctatttttaagactgaaaattttaaattcaatagaaattaggtcatgctcttcaacgagtgactcacgggtttgattgattgatacttcgtgttttttaatattgggtcatagtataagttcgaccaatcctatcaatctaaatgtattctcatc

SEQ ID NO: 8715 - DNA, 455 bp, Glycine max
agaagacttcacaaccctagctagcagtccctcagcattgtgtgcccacaaagcagctccttttcctgttccgttgagagaagatgggattttgggggacgcgggtgatggagattgtgaagaagcatgattctggagggctggtttggaagagaatcaagctcaccaccacccgaaaagccaatgctaagaagcgtcttcttcgggtttggcagaatgaagctgtcctcaaagcctgttctgccactcccaacgaacctcaacctacaccagtggctacaccagtggctagttaagttcaagcccacccatctcaatttcattacttttcttttcccttcccttcacaaatattgtcactactattagggcataatttacataattaaagattatctggaggaagcaaacaagcataacctccctcgagccgtcgagccgaatcggctcgagaa

SEQ ID NO: 8716 - DNA, 1277 bp, Glycine max
gagttcacattaagggatcgtcttctgcagaaatttgcgccatcgtcgagagaagcgtgagagacttctcgtttatgatgagagctaagatagtttagttgtcaagtcataaatcagtatcatcactttaaatttcattagaagctgtcaaaatgtcacggaagggtttgatggagcaagacctgagtaagttggatgtaacaaagttgcatccactttctccagaagtcatatctcggcaggctactattaatatcggcactataggtcacgtggcccatggcaagtcaacagttgtgaaagcaatatcaggtgtccagactgtgcgtttcaaaaatgagttggagcgtaacattacaatcaagcttggctatgcaaatgcaaaaatatacaagtgtgaagatgaacgatgtccaaggcctatgtgctacaaggcttatggaagtggaaaggaagatagtcctatgtgtgacgtgccagggtttgaaaacagcaagatgaaattgctaaggcatgtttcatttgtggattgtccgggacatgatattcttatggctacaatgcttaatggagcagcaatcatggatggagcgttgctactcatagctgctaatgaaagctgcccacaaccacaaacatctgagcatttagctgctgtagaaatcatgcgtctacagcacataataatccttcagaacaaggtagacttgattcaagaaaatgtcgcaatcaatcagcatgaggcaatttcaaagtttatacaaggaactgttgctgatggtgcaccagtagtacctatttcagcacagttgaagtataatattgatgttgtgtgcgaatatattgtgaagaagatcccaatccctgaaaggaactttgtttctccacctaacatgattgttattcggtcatttgatgtcaataaacctggttatgaggttgatgaaattaaaggaggtgtagctggtggaagcattctgaggggtgttttgaaggtcaatcaattcattgaagttcgtcctggcattgttgttaaagacgagagtggaaatatcagatgcacgcccatatactcaagaatagtttcattgtacgctgaacaaaatgagcttcaatttgctgtgcctggaggcctaattggtgttgggacaacaatggatcccactttgacacgcgctgatagggtggtaggttcaagttttgggagacgttggatcactacctgcggtttttgttgaacttgaggtaaactttttcctgcttcggcggctccttgg

SEQ ID NO: 8717 - DNA, 366 bp, Glycine max
attccaagtagacgcagcgaatcacgttttgttcgagcttcctccattctcaattttcagaatcgatttcgaagagctgcttcgtctttgctccaccaaaattcttcaccgttgtagttgtactcagccactcggagacaccgctaatcgatagtttagttggcaagtcataaattagtttcatctcttaagatttcattggaagcagtcaaaatgtcacggaagggtttgatggaacaagacctgagtaagttggatgtgacaaagttgcatccactttctccagaagtcatatctcggcaggctactattaatattggcactataggtcatgtggcacatggcaagtcgacagttgtgaaagca

SEQ ID NO: 8718 - DNA, 876 bp, Glycine max
tttcgcgtccgcccaccgtccgcccacgcgtgcgcccacgcgtccggaaaggacaggtcttagaacccttcttttcttcccgtgtgcgtcaaagcgaagcaacgcgacacgatggtgttctacttcaaagcgcgccccgaagccggcgatttcaccatcttcatgggccttgacaagtacgagaacgaggaactcatcaaatacggttttcccgaagacatctggttccatgtcgataaaatgtcttcagcccatgtctatgtcaggttgcacaaaggccagactctcgatgacctgagtgaggctttactggaagattgtgctcagcttgtcaaagcaaattcaattcaaggaaataaagtgaacaatgttgatgttgtttacacaccctggtctaatttaaagaaaactgcttcaatggatgttgggcaagttggttttcacaactcaaaaatggttcgaactgtaagagttgagaagaggataaatgagattgttaacaggctaaacaagacaaaagtggaaaggaaacctgatttgaaagctgagcgagaagcagttaatgcagctgagagagctgagagaaaacaacaactgagagaaaaaaaacgtcgggaggaattgggaaggcttgaaaaggagaaacaaacagagcttaggagctacaagggtttgatggttgcagaaaatatgacatccaacaaacaaattgcatcgcgaagcaaatcattacaggaactggaggaggatttcatggaatcatttattgggttatggacagatgactggtggtcaacttactacctggcagatttatgtttttgattaaccaaccctactttggattttgaagctgcattatcttggttggttgag

SEQ ID NO: 8719 - DNA, 497 bp, Glycine max
cttgtacacgccacaaaggtgtagggaaggttccgtgattatgattttcgcagcgattcggatagcgaaagcaatcccccacccctaattttgatttgtgtcgaggaaaggacaggtcttggaaccctaaccgcacctctctctttcttcccgtgtgcgtcaaagcgaagcaacgcgacacgatggtgttctacttcaaagcgcgccccgaagccggcgatttcaccatcttcatgggccttgacaagtacgagaacgaggaactcatcaaatacggttttcccgaagacatctggttccatgtcgataaaatgtcttcagcccatgtctatgtcaggttgcacaaaggccagaccatcgatgacatgagtgtagggtttactggaagactgtgctcagcttgtcaaagcaaattcaattcaaggaaataaagtgaacaatgtcgatgttgtttacacaccctggtctaatttaaagaaaactgcttcaatggatgc

SEQ ID NO: 8720 - DNA, 414 bp, Glycine max
cggataacgaaagcaattttgatttgtgtcgaggaaaggacaggtcttagaacccttcttttcttcctcgtgtgcgtgaaaacgaagcaacgccacacgatggtgttctacttcaaagcgcgccctgaagccggcgatttcaccatcttcatgggcctcgacaagttcgagaacgaggaactcatcaaatacggttgtcccgaagacatctggttccatgttgataaaatgtcttcagcccatgtctatgtcaggctgcacaaaggccagactctcgatgacctgagtgaggctttactggaagattgtgctcagcttgtcaaagcaaattcaatttcagggaattaagtgaacaatgttgaagttgtttacactccctggtctaaattaaagaaaactgcttcaatggatgtt

SEQ ID NO: 8721 - DNA, 787 bp, Glycine max
ctcgagccgagccgttggttgctttcacttcttcctctctgcttcttcttcttccttgccctctctcgctattgagcttttctttttaacacggaatatgagtgacacaaaagggttttgaggctttctatcactctaaagctcttagctcattcacctcttgggtggtgtggtctattatgtaaattaccatttgtgcaattttttctcagatctatccaacttctcttttttatcctttattctgtttgcaaatcgccatcatcaccatttgatttgcaagaccataatttttctgctttggttttcccctcttccacatcatttttcaattttttttcctctgggtgttttcttcctgagaaaattttgttctttttggctaccctccaagcagatcctacttgggaaaagtaaaattttcagttttttttttatcagtaccctcttttcagaccttaccctcatgttctagatttgaagatattgtcattacctcactcttatttgtgccaagatctgctccccctttttcttcttttagatcttggtctgttccatgatgtagtagtacttcaaagttgagagctttacctttctggggttttgttttatttatttttcatcctcccctttggagtatgaaaattttcctggaaaattggggagtttggatcactgagtgagagaaaagaagagagaaaaaaaagatgatgaattatttccccgacgaggtaatagagcacatatttgactatgtggtgtcacacagtgacagaaatgcttt

SEQ ID NO: 8722 - DNA, 1039 bp, Glycine max
cccacgcgtccgattcaagaaactccttatttaatgacatcttgtctctcggatcattcttgagtaccttatcgttaataatagcacgcactcttttcattctttctctgttctcatttcatcttctacacgcgtttctaatcattattagactcgatctcaacgatgaaggcaacactgctttgtccttgttcttctgctcctctgattctcgacacgcatagcaaccgaacctcggcaacgagacacgcttccaccgttgtttgttgttcgtcgaggaatcaaccctacatcccgaagctcgagccttttagccgaaccaaatttgaaagggccgttaaggaccctcctttgatcgaaaaatccgagagagagatcttagattattgttcaacgcttgaaggagaccaatcctatagctgctggcaggcttattttgagctgaaagatcttgaaaaagagtccccaaaagcagacatagagaggctgattctggagactggtggtgtaaaatccctaataggatgcttgcatgggatttcaatcatgcacaaactaaagaagggtgacatgaatctgagcaaggatgtgaaatcagaagaaggtgagagaatgtgtcccatacctgatggattgccaaaatctgctgatgaacttagggaagaggagcaagcaagaatgcctgattcaccatacactaagcttcttaggaccatgggcaggcaccctgcatggtactctcctgcccctgaccatgaaacagattgatgaatgatgattcccatacatactaagctcaaagggaatgaatatattctctttgagggaacaagtaataacatagtggagtagctataatacccccatgtgaatggaatgagtgtatattttgggctttttctacaaatgtaactagtaattactttgcataactcctaatgttatatatgtttcagggagtgataagttaaattgggggacaatatactttcatcaatgtgaatgaaaaatttcacaacttatactggtacaaaaaaaa

SEQ ID NO: 8723 - DNA, 622 bp, Glycine max
ctacttactaatcatattgtctttatttttctgatatgttatacagttataaaatatgaaaataaatctataacaacaacatcatcctgatccagttcgagaaactccttatttaatgatatcttgtcttgtctctcggatcattcttcagtacccttacccttaatagcacgcactctctgttctcatctcctctttgttgtagaagaagaacacacccgtttctaatcattattagacttgatctcaacgatgaaggcaacactgcttcgtccttgttctggtcctctgattctcgacacacatagcaaccgaacctcgtcaacgatgagacacgcttccaccgttgtttgttgctcatcgaagaaccaaccctacatcccgaagctcgagccttttagccgaaccaagtttgaaagggccgttaaagaccctcctttaatcgaaaaatctgagaaagagatcttagattattgttcaacgcttgaaggagaccaatcatatagctgctggcaggcttattttgagctgaaagatcttgaaaaagagtccccaagagcagacatagagaggctgattctggagactggtggtgtaaaatccctaataggatgcttgcatg

SEQ ID NO: 8724 - DNA, 421 bp, Glycine max
tcgagcttgcactcttttcattctttctctgttctcatttcatcttctacacgcgtttctaatcattattagactcgatctcaacgatgaaggcaacactgctttgtccttgggcttctgctcctctgattctcgacacgcatagcaaccgaacctcggcaacgagacacgcttccaccgttgtttgttgttcgtcgaggaatcaaccctacatcccgaagctcgagccttttagccgaaccaaatttgaaagggccgttaaggaccctcctttgatcgaaaaatccgagagagagatcttaggtacatccttttcttttctttttttcttccaaatttctcaactttataacgaattcaaagaccccttttgggtaattttatttggggtatcgatttcagtttattaactccttttgat

SEQ ID NO: 8725 - DNA, 403 bp, Glycine max
gacagtgattcattttttcgaaaaccaaatccctaattttctctctcttcaatggcgccgcagaaactcaacgattacgaacggaagcgactcgagaacattcgccgcaacgatgaaatgatggctgccctcaaactccactccaaagccacccaactctccaacttcaagcgtagtcaaagggttggaaccaaatcctacaacatgaaatcggaaaagaaacccaaaaccgaaaccccaattgtgattaggcgctccctccgaacaagaggtattccgccagattccaaaggtcttgtcggagattccgtgggccccaccactcccactaaaactaaaccttccgttgttaatttgggtcctatttccatggctgatgctcgtgaaagcgctcactctgata

SEQ ID NO: 8726 - DNA, 450 bp, Glycine max
ccgattgcttcatagaaatgtgtaaaaaatagaatcgctcttaaaagccgagtactctaccattgagttagcaaccccaatacaatttagaaaataacgtgggtgtatatatccaatcgcaataaaaacaataaaatgaaaagattgaattgtctaataaaatatcagacattcaaaaaaatagaaaaactcaaaatgttgaagtcgaattgattctcaacatacaaatgaacagataaaacaaaaaaaaaatttctaaaaaaaaatggtataccacctctttatctactatgttatacattattatatataattattatatataattgaattacttaccttttaatcaaaaaagaatttattggttgtatctcagaaaatccaatgaacctaccatttgatgaagtaataaagcctatttcacgtgagtaaattgatcaatttactcac

SEQ ID NO: 8727 - DNA, 406 bp, Glycine max
gcagaatccggctccggctcgagatttgtgtgggagacagtggggagcgtttcgtccgaagatgcttcagaccacatgagcaaccgttgtgggagttatagtctcagtgctgatgtcagcgagtcggagagctgcagcagcttctccgcccgccgcttcgacgccgagggagcttccagttcagccaacctctcaccgcgccccgtcgctgctcactttaacttcccgccggcgcaggtcttgcttcccgtcattggcggcaaagacgtcttcgtttgggatcacaagcgtgatctcgatttgtctggtactctttctctcgccttccgttttgctgatatcttttaactgagaatgttatgttgaatttgaagagcaattacattttttcttttttgcagaagtg

SEQ ID NO: 8728 - DNA, 459 bp, Glycine max
ctcgagccgaatcggctcgagagagaaggttaccaattaacccacactttaccaattattcactcactcactcactcactcactgttgcagcaacgccattgtgtgaaatcaatgttttgagatttgttgggaacaatggggagcgtttcgtccgaagatggttccgaccgttgtgggagttatagcctcagtgctgatgtcagcgagtccgagagctgcagcagcttctccgcacgccgcttcgacgccgagggagcttccagttcagccaacctctcaccgcgccccgtcgctgctcactttaacttcccgccggcgcaggtcttgcttcccgtcattggcggcaaagacgtcttcgtttgggatcacaagcgtgatctcgatttgtctgaagtggaaatgatgaaggagaggttcgctaagctgcttctgggagaggatatgtctggtggtggaaa

SEQ ID NO: 8729 - DNA, 418 bp, Glycine max
ggaagagaggatactgcagcagcaggaggaagttgacactcctgagaaggagactggaagagattgagttgcacctgcgttcaaagcaagggtgtaaagaggaaaatgagtcaaaagatgtggagtcaagtgggtttatgaggaggctattgcgtgtttacaaaagtgaggatgatcctggaatggcgaagtcaatggatttggacatggatgatcaagaaccccttggccgcgaggtaaacatcgttggtggagttatgtgcaggagtgattacaatgttaaacaggactcttcaaatcaacctggtccgaatgctttgactggtgtaaaagaagatgctcatgttttttcaccaaactttggccaaagggcgtggcttaatacaatatattaagaaaaaagaaaaaggaaaaaggg

SEQ ID NO: 8730 - DNA, 1024 bp, Glycine max
gactttcacaccaccttcttcttcttcttaagggttcccattcaatttatatttctttcacttcatggaaacgtaaaactcttctctctcttcatctttctctgttcctcacaattcactaccccctacaaatatattcaaggtcccatttttctcatctgggtcatcaacttaatcatctctctcttgttctctatccaattaattgcttttccctctgagtttctctccaccttgttgttgttgcaacttgatttcatggttgcaaaatgaagtgtttcttctttaaggagaagagcaaatccgccccggaactgcacaagaagaaaacccccgccgtgaaccgcgccgcaaactccaccggctcagtgtcttcaccgaagagcgtgaaggacttgtacagagagaaagagcacagcttcagagtcttcactttgcaggagctgagagatgccaccaacggcttcaataggatgctcaagcttggagaagggggtttcgggagtgtctataaaggatccattacgcaacctgatggacaaggtggtgatccaattccagttgcaatcaaaaggctcaacactcgtggcttccagggtcataaagaatggcttgctgaggttcaatttctcggcattgttaatcacccaaatttggttaaacttttgggatactgctccgtggatgcagaaagaggaatccaacggctgttagtgtacgagttcatgcccaacacgagcttggaggatcaccttttcaacaaaaacttaccaaccctgccttggaaaacaagattggagatcatgcttggtgctgctcaaggactagcttatctacatgaaggactggaaattcaggtgatctaccgagattttaaatcttcaaatgttctattagatgcggacttccacccaaagctctcagattttggtctggctagagaaggaccacaaggtgatcagactcatgtatccactgcggtagttggaacacagggttatgctgcagagtacattgaaacggg

SEQ ID NO: 8731 - DNA, 408 bp, Glycine max
cctcgcgtccgcccacgcgtccgcccacgcgtgcgcaaggttccatttttctcatctgggtcatcatcaactctttcttgttctctaaccaattatttaattgccttttccctgctgttgttgcaactaattgattttcatggttacaagatgaagtgtttcttcttcaaggagaagtgcaaatccgccccggaactgcacaagaagaaaacccccgccgtgaaccgcgccgcaaactccaccggctccgtgtcttcgcccaagagcgtgaaggacttgtacagagagaaagagcacagctttagagtcttcactttgcaggaactgagagatgccaccaacggcttcaataggatgctcaagcttggagaagggggtttcgggagtgtctataaaggatccattacg

SEQ ID NO: 8732 - DNA, 901 bp, Glycine max
  unsure (1)..(901): unsure at all n locations
ctttttcttattggcatgagcctgtctctctatcctgtgtaatctgacgctgtgggtccaattgtccaaatattactgatctaataattgttttttccagagtgacattagttttcaacatgaagcttttttttaaaagtgagaagctttcgcttgttttggtgttccagttccacttagagccatgacagacatctccaagtcccttctctttacctttaccatcatcatcagctttggcttgtgcattctttatgcatctgcagaactccagagattatcacactcttccaaacatgatggtgctcttagcttcttggtgcttggtgactggggaagaagaggcgcttacaaccaatcacaagtttctttccagatgggaaaggttggagagaagcttgatatcgactttgtagtttccactggagacaacttctatgacaatggactaactagtgaccatgacaacgcgtttcaagagtcattcactcaaatttacacagcaaaaagcttgcaaaagcagtggtacagcgtgttaggcaaccacgactataggggtgatgcagaggcccaattgagcccggtccttagagaaattgatagcagatggctttgcttaaggtcctttattgtagattcagagctggttgagattntctttgtagacaccactccttttgttgacgagtacttcactgaaccaccggaacacaagtatgattggcggggcattggcccacaaaaatcttatatttctaacttactcaaggacctagaattggcactgaggggatcaacagcaaaatggaggattgttgttggtcaccatgccattagaagtgttgggcatcatggtgatactcaagaactcataaatcggcttctccctatccttcaggca

SEQ ID NO: 8733 - DNA, 681 bp, Glycine max
  unsure (1)..(681): unsure at all n locations
ntcgacggtgggaaaagaccaccaaaggggggattaaggaaggaggccctccaaaaaatgctaaagctttgttggacatgaggttttatgttgttgtgttttggtaatttcaattcaagcagcacaacgcaaaggtaaaaacagagagagagagagagtgtcccattcccatcccccacacaaaaggtggtggaaaaaaagttctttttgtacacactgcgatgatggcgatgatgatgcctgcaatctccaacacaaacacaaacacaaacacaaacaccatttcctcctcctcctcctcctcttcttctctctcttttatcactccctctacttcttatttctcagccagccatggtttgcttcttgttctccacctcactagaaggaacccatgaatatgaaagttgttgtcgagcatggagaacgagaagaagtgcggttgctgggctgtcctcaaacgcggcgttagaggtgcgtgcaaaccttcagcttccagagactctcctaacactatccctcgaactagtctcgtttatgatgcagcaaccgagacaagatacttgaatgctagcaatagagaactatgccctccaaatgaagctcgattatcttctgataatcctgatcccccatctcaggagaataaggttccttgccagctccttcaatttacatttc

SEQ ID NO: 8734 - DNA, 423 bp, Glycine max
  unsure (1)..(423): unsure at all n locations
tgtaggccttagatctcattggtgcaaaatccaaagcagtgttttgtgagaagcaaggatttcttgcttttgcttgaacgctggtttgaaggctctataacataaaaacaaatatgtatatcgttgggggttgtatgacgttttctttgaaccagatagcaagctggttgtagataaaataaatggttcaaatgatgttgtatttgaattagacagcttagttagtgagtgtggtcacttattgattgtcaatcaaatctttcatgtgagtttccttaggaaagcaaattaataatattgtgcatgttcttgctagggtgacactatattgtcctagtctccatgtttttcagcaaaatcctcactgtattgctcagttggtcattaataaaaatgatataaacttgtttttgtgnaanaaaa

SEQ ID NO: 8735 - DNA, 908 bp, Glycine max
taccctcttgtccctctctctcttctttcttctctcaccttttcctctctcaatttcctttcccttttgaaattatgatataagagaacaaaaactcccccttaaacagataaggtatatataagccacccttcagagcaatttgtccatcttcttcaatttattagcagaagatgtggtgcattagattaccttagtctttgtcctagtgtcttccacaacaacttggtccaacgtttccaaatattcacataagagaagaacaatagttctctccctagaaactcatgatatgctagataagccatccttaggagcaatatatccgtcctcttcaatttattagcagaaggtgtgttgcgtattagaccatagtctttttgtcattgttgtttcccaacaacgcagtttagcctttgagagcatcagcaatcacatggtgatcagaatatcattcagcaattgaagatcagtggcatcaggcataggctagcaagcaatgatatggctttcttcccagcaaatttcatgctacaaacacctcaccaagatgaccatcaacctccaccttcactcaactcaattataacttcatgtgcacctcaagagtaccatggtggaggagcatcctttcttggcaagagatctatgtcattttcagggattgagcttggagaagaagctaatgctcgaggaagatttgtctgatgatggatcacaggctggagagaagaaaaggaggcttaacatggaacaagtgaagacccttgagaagagctttgagttgggaaacaagcttgaacctgagaggaaaatgcagttggcaagggctcttggcttgcaacctagacaaattgctatatggttccagaacaggagggctaggtggaagaccaagcagttggaga

SEQ ID NO: 8736 - DNA, 543 bp, Glycine max
  unsure (1)..(543): unsure at all n locations
taggtagagatggttgccaaatctgtgatactgtttataatcaggtggagtatatattaaatatgattaaatatggcaccagcattgattccttatcaagatgggatctttcttttgcactgtttccggtgacagcttaagaaatactgcctagtccttacaccacttattttctgtggaaacacttataggaaaccaagtaaaaaaataaaataaattgagtttttttcacacaagctaattagctaaagtcaattcacatacttcaattttatagaaattcttttaatttaacttatatccgaaagttaaggtatataaattaattttagtttatgaaaaagcttaatctattttatcttcttcttttattatcttgtaaatatttatgaaaagtttatctaaaccctgngtcaacaaaacctattcctcggacctgaatttcttttccgacgttgtgacaaattattaacccttggaaagaaaaatgacagcatagttagtggtgtgaaaatgatccttatttgttctcttgttggaaaa

SEQ ID NO: 8737 - DNA, 409 bp, Glycine max
aagcctgatagcacgcagagactaacgtcgtctcctgcgcccttcgtcaatcgcggccgacaagcccgttgacacgcagagatttacgtcatcttctgcgctcacaagatctgtcatactgacttttgagtcgcgctgacgggcggaaatatccgagtggttatccgtataaacattcttttgctatctgtaagacagaacgcttgatagcatgcagagactgacatcgtcttctgcaccttttgttcccccggggacaacaagttatttgcatgtggagatgttatggtcacccgcgactctcgtcaaccgagaggaacgaaattagtggcctaacctttactcccttttatctccaataaaagacaagtaaagaggggtaactgtcaatacctaatttcgtccgggg

SEQ ID NO: 8738 - DNA, 588 bp, Glycine max
  unsure (1)..(588): unsure at all n locations
ggggaagagagaaagttagttacggctggtggcatttttcatttgaaagcgcagctgcagatagaggaaatggaaaagggtggccaaatcggaagcagcggcctcactgcgtcgctgtgcaaaagctgcattgcttctccatagcttgaattccccaatctcccaaaatcagtggaagagggaaatccatgacctgaaaattgaattgctgaaggagcgtttcatgaggaagaagatgaagctctgcgctatcacggagttgttcgttcagctcctcttgttgctctccgtttgtaacttcgtccttctctaatttctttgatattttcctctgcgttacgacttcagagagtgctcttcctccatgctctgttctacttccgtttacgcagctttaaactgctttagctcgttgatgaccgtaaacgaatcattagtcgtaaaatcaagcgttttcgttttttctcaaaatcacggcatttgtacatgtcaatggaccaaggctttgaattgaaacgggtttgccaaaaaaaaaaaaaaaaaaaaaaaannnagccgcccgctcagaggatccaagcttacgtacgc

SEQ ID NO: 8739 - DNA, 549 bp, Glycine max
ggaaccaaatttaaaataatcccttgcgaaaaagcaaaaccctaaaccctcgcttgccctgttctggttcctcctccgatctgatctcatcgtcaatggcttccgcgtgcagcagaatcgcgcagcgaacatcaatttcgtccatcagatcatccatcaaatccaacattcgcgcttcttcttcggtctccaaaccagcttcctcctcttctcctcttcgccaatccttattgaccaggatttcggcggagctgagatgcgcgcagtcgatgttgccgctgcacagcgcggtggcggcggcgagaatgacgtcgcgcctgagcgtgacttccagaagctgccgagcgctttctcagggcacatagttaattgggaatttgcgggaccagccaatttatggcctactgcttcattatcaagtatgaaaaaattagtgttcatttaacataatataatttcttcaacgatattagaatagagcttcctttgcttgtgtcttaaaaacaaactcttgtggtggtttctgcagttatttgaagtctgaatgga

SEQ ID NO: 8740 - DNA, 381 bp, Glycine max
attgcatggtgaagccagaagggattctcagcattgcaaagagtgagaaggatgtgcgagtcgatggcagaggagacgacaacaaggatatcagatatgaacgggatagccataatgattcaaaaggtgacattaagacagacaaggatggctatggtatggtaagcagcagcagccacctgagttggaaagaatcaaaagagtataggggtaagagattttctgatgcccctggtgggagtttggattcctggcatacatcacgtggcaatacacctactgaagttggaaaggacagttcaatggcagaagaaagggactatttggaaacacatgaggctgttggagaagacaaaattgattctaaaagtgaagatagaa

SEQ ID NO: 8741 - DNA, 823 bp, Glycine max
gggtattttaaccaagtaagttggaatgcccttttagtctcggaatccatcgatccaaaaccctaattgaagttgtcttgtctgcgttctcaaacgttgttgcttgctgctgctgcatagttgatcgaaagcatgacaacatcattgtccagcatccttttcaagggaattgcagctcgttctttcaccgcccctctaactaggtcctgttatcatggaatgagatactttgctactgtatcaaatgatcctgacacacatgatgacttcaagccagctaataaacttgagaattccaacatttctttggctgatgttattgagcaggatgtcaaggataatcctgttatggtttacatgaaaggtgtgcctgattttccacagtgtggatttagttctcttgcagttagagtgttacaacaatatgatgttccttttagtgctagaaacattttggaggatcctgaactgaaaaatgctgtaaaagctttcagtaactggccaacatttccacaagttttcattaagggagagtttatcggtggatcagatattgttcttaatatgcatcagacgggtgatttgaaggaaaagcttaaagatattacgtccaagcagtaaaaggacgagtaatgtgatgaaattcaaagagagtgaggtagtttagacaaacttatttgatgtaatctgtttctgtagctgaaagatgtccttatgtaacttctttgaactagattttctggatggtattaagttattcggcaaataaaaaattgtacttttaagttattcctttctataaaataagatgttttttttgtgt

SEQ ID NO: 8742 - DNA, 372 bp, Glycine max
attcacatcacttgataacaattctgtaagttacaatcatcattatataatgctcttgcagatgttcctattagtgctagaaacattttggatgatcctgaccttaaaaatgctgtaaaagccttcaggtaacttcatgcttgttgatcttattagtatctgcttcctaaaaaaacattagtcatctacaattgtagttaatagttgactaagaattttgatggatgatagtttattattgtggtttgatagaaatagaagccatcttgggcctatgttaggtagttggaattggctcagaataagcactggaattagaaattaaatttcaattgccaacaggctaagacttacggcatcaaattcctcccc

SEQ ID NO: 8743 - DNA, 298 bp, Glycine max
cttgcaaccacgctcagagcgacaagttcagtgttgggatcattcgggtttttgttactcggttcattcgaatggcgacatccttgtcaaacgtgttcttgaagggaatcgcagctcgttctctcagcagacccttaaatgggttgttttattgcacaagatactcgactactgtgtcaaatgattctgacacgcatgatgacttcaagccagctaataagcttgagggattctggcatttctttgtcaaatgttattgagcaggatgtcaaggataatcctgttatggtttacatga

SEQ ID NO: 8744 - DNA, 1530 bp, Glycine max
attccttcgtctgcaaccctagctttccgttgtttgcaaatctatggctggtgaatctgataaacccgaaaacaccctctcttgtgctaactgtggcaaacctgcgaatcttcagtgtccaaaatgtatggaattgaagcttcctcgagaaggtgctgccttctgctctcaggattgtttcaagtcttcatggagctcgcacaaatcagtgcatctgaaggcaaaactatccccacctggcacacaaaattcagactcacttgatgaaggttggttatattgtttgaagagagggcaggctcgaacgccaaagcttcctcactttgattggacaggaccactgcagccatatcccatttctagtaaacggattgtcccagatcaaattgataaacctgattgggctggtgatggaacacccaaaattgagcccaatagtagtctacagcataccattgaggtcaaaactccagatcaaatagagagaatgagggaaacttgtcggattgcaagggaggtgttggatgcagctgctcggattattcagcctggtgtgacgactgatgagattgacagagttgttcatgaggcaactattgctgcaggaggatatccatcgcctctcaattaccatttcttccctaaatcttgctgcacgtcagttaatgaagtaatctgtcatggaattcctgatgcaaggaagcttgaggatggtgacattgtaaatgttgatgtcactgtgtactataaaggtgttcatggtgatctcaatgaaacatactttgtgggaaatgttgatgaagagtctctccaactagtaaaatgcacatatgagtgcctggagaaggcaatatccattgttaaacctgggatacgattccgtgagattggtgaagtcattaatcgtcatgcttcaatgtctggattctcggtggtaaaatcttattgtggtcatggaattggagagctcttccattgtgcaccaaacattcctcattattcaagaaataaagcagttggtgtgatgaaggctggacagacctttacaattgaaccaatgatcaatgccggtgtctggcgtgatcgaatgtggcctgatggatggactgctgttacagcggatggtaaacgaagtgctcaatttgagcacactcttttggtgacagagactggtgttgaagttttaacagggcggttgcagacatcacccaatgtttttccttggtctaggttcataattgggtgaatcatggagacagatgctggcagtgtctaaataccatacaattattagacgacatttcattgatctacttctctggttgcctcctttgggtatcatgtttgtaagttatacaaaaaacagaagcaaattcaattgagtttaggtgaaaagtatgcttaatgatatgtttgtgtaattgaagaaaatttaagaattttgtccttcgttctttgtatggcttatgttggccaagtcaataatgtttgagcgaagttttgaacactggcttaatcattaatttagtt

SEQ ID NO: 8745 - DNA, 1246 bp, Glycine max
gattccttttcctttctatctctctctcttcttatatttccacattccacgtgaaccttctagaactataatagaaagaaaccttccattccatggctccgccgctcgaacacaacggcgtttccacgagcggtgactctcagagatccattcccacgccgtttctcaccaaaacctaccagctcgtcgacgatcacaccatcgacgatgtcatttcgtggaacgattctggatcgtccttcatcgtctggaacaccaccgctttcgccaaggatttgcttcctaaatatttcaagcacaacaacttctccagcttcgttcgtcaactcaacacttatgtaatctaattattcttctctatcaattcctttcttttctctttttacatttttctgatttttcttaattttgcttgacttgtagggatttagaaaagttgtacctgaccgctgggagttctcgaacgagtattttcgaagaggcgaaaagcgtcttctctgcgaaatccagcgacggaagatcctctccgcatctcctccgccggcgggagcaactgccaccgtggcggttccgtcgccgctgccgctatctgcgatcccgacggcgaagccgatcgtgtcgccgtcgaactccgcggaggagcaggtgctttcgtcgaactcgtcgccggcgagagcaccggtggagctgttggacgagaacgagcggctgagaaaggagaacattctgttgacgaaggaattggtgaagatgagatcgctctgcaacaatatattcaatctcatgtcgaattacgctaacgctcaagcggacggtagttccgcggcggcggcgaagcggtgctccggcgaggatgcggtggaggagatgaatccgaagctgtttggggtggcgattggtaagaagcgagcgagagaggaggaaggacatggagcgaagtatgatacggctttgagtctgcatcagccgtttcatgcggacgtgaaatctgaagcgttggatttaccaggacgtggcgaaaataaaaaaacgccgtggctaaatcaatgtcatagagcaaatcagagggtgtgtaattgacacacgacgttgtaatagctaggtaacacgttaggttaagttaggggcgtcgtagagaatcagagtctgtaagcacggagacgcgcgtgtcaaatgtacgtcgttaaccgtttgggacttttttcgtagaagtttctcagaagaaaactaaaaaaaaaatttaaaa

SEQ ID NO: 8746 - DNA, 1105 bp, Glycine max
gagttaacgtagaaaagcttcgtctcttgtcttcgcttctttcaattccttctcctttctagctctctctcttcttatatttccacattccacgtgaaccttctagaactataatagaaagaaaccctccattccatggctccgccgctcgaacacaacggcgtttccacgagcggtgactctctgagatctattccgacgccgtttctcaccaaaaccttccagctcgtcgacgatcacaccatcgaccatgtcatttcgtggaacgattctggatcgtccttcatcgtctggaacaccaccgctttcgccaaggatttgcttcctaaatatttcaagcacaacaacttctccagcttcgttcgccaactcaacacttatggattcagaaaagttgtacctgaccgctgggagttctcgaacgagtatttccgaagagacgagaagcggctcctctgcgaaatacagcgacggaagatcctcccggcaacgccgccgacccgagcgactgcgaccgcggcggttctatctccgctgccgctatctacgattccgccggcgaagctgatcgtgtcgccgtcgaactcagcggaggagcaggtgatttcgtctaactcgtcgccggcggagctgttggatgagaacgaccggctgaggaaggagaacattctgttaacgaaggaattggaagagatgagatcgctctgcaacaatatattcaatctcatgtcgaattacgctaacgttcaagcggacggtggttccgcgggggtggcggcgcggtgcttcggcgaggatgcggtggaggagatgaatccgaagctgtttggggtggtgattggtacgaagcgagcgagagaagagaatgatacggttttgagtctgcatcagccgttccatgcggacgtgaaatccgaagcgttggatttcgcaagacgtggcgaaaataaaaaaacgccgtggctaaatcaatgtcatagagcaaatcagagagtgtgtaattgacacacgacgttgtaacagcagctaggaacacgttaggttaagctaggggcgtcgcagagaatcagagtcctgagcacggagacgcgcgtggcaaatgtac

SEQ ID NO: 8747 - DNA, 750 bp, Glycine max
ggcagccatcatttcccttctcttagtaatcctctttgtccttcttcttcacctctacgccaagtggttcctcgctcaagcacaggctcaggccaacgcccgccgccggaggcggcgccgtcgcacgacggtgaccgtctccgacgtcctaggcccggcaaggttccaccacttccacagcttcaccatagaagacagttcacccctctcaacaaaagggttagattcttcaaccattagaacaattccactgttcatctatgaacacaacaacaacaacaacaaaaaggtcgaagaagaagaagaagaacttgaatgtgtgatttgtttgagtgcatttaagaatggtgaagtgggaaggtgtttgccaaagtgtggccatggcttccatgtggagtgcattgacatgtggttgagttcacactccaattgtcctatttgtagaacctcaattgtagcaagtattgtggaaaataattctagtgatgatcatcatggtggagatcatgatttggttgagattgtgactgaaggtggttctgctgctccaagttttgagactagagagggtgaacatgggaatagtaataatggaaatggaggagcaagaacaagtgtttctgttgtgtcagaaaattcttcttctgagttctttggatgctctttggagagaatgcttggcaagggtttcccaatatcaagtaatgttaattaattaatgaaatcacatgcttgagatgtatatgcccc

SEQ ID NO: 8748 - DNA, 606 bp, Glycine max
cgtgatccataaggtttcgtgacattacgaaaagaaaacaagcatcgttacgaaattcgtaaagtttcgtaatgttacggaaaaagaatcaccaaaataaggaaggggggtgtatttagtaaaaatgggggtgcaaatagaaaccaggcccacttgggccttccaggaagttctccagaaggcggtgccttatgtaggaagcaacctagctcgcctgggcgagctgggtggcaagccctccctcattttcctataaatagggggaggagggaagaacaaaaatgttcaaccctcctggtatctgagattcacttaaaattagtcagaaaaattgtttcggtgaaaaaaatccaagccgaggcgcttccgtaacgcttccgagatgtttccgtgggtgatttcgcgaagattttcaaccgttcttcgtcgttcttcggtcttcaaccggtaagttcccgaaatcgaacttttcaattcattctatgtacccttagtggtcctcatttgtttcgcgtgcttttatttttatttcatttactttccgtacccccttttggcgtgctttagtcatttatttaagtcattttctcgcctaatcgaaaaata

SEQ ID NO: 8749 - DNA, 1263 bp, Glycine max
gatcgttattgtgttgcttattcttttttccacaaccttgaatgtttaccgccccgccggataaggagaaggagaaggaggatctgcgtcgcaggcactgttcatcgccatgtctcgggttgataacagaaattcctcagccaccaagcgtgctaggactgatggtagtcgtagggaagatgattggacatgccccagctgtggcaatgtcaatttctctttcaggacaacttgtaacatgcgtaattgcactcaaccaaggccggctgatcataattcgaaatctgctgccaagcctctacaagctccgcagggttattcatcctcagctccttatttaggttctaataccccctcttcaatatatcttggtgttccaccatatggatcttctctgttcaatggatcatctgttcctccctatgatgttccattttctggaggatcagcatatcactacaactatggtagtcgcctttctgctggcagtccttatagaccgttgcatttatctggaccaacaccctacactggtggaccagtgatgggaaatggtgggatatatggaatgccccaactgttggatcggtatggcctgggcatccctatcggacctgggacaatgggtgctaggcctggattttttcacgatgacaagtcacagaaaaaagatgcaactcgtgacaatgactggacatgtccaaaatgtggcaatgtcaatttttcattcagaactgtctgcaacatgagaaagtgcaacacacccaaacctggatcacaggcctcaaagtcggacaaaaattctaagcaaaagatgcctgagggaagctggaagtgcgaaaagtgtaacaacataaactatcctttcagaaccaagtgcaacagacagaattgtggtgctgacaagccggctgagtctgaagaatctccttcatcagctgcagatcaaaatgatcagtgagtactaggacatgtttgagggttgagaaggtccagagttgtcatcaagcattgctcagtctgggtgtctgacagtcagtcttgtcgtcttctatgttgcagcagttgtcaagtcactcaccttctcaatatgtgtcaagttgttgtattaactgagatggtattttggtctttgtggattgttatgacgcatgtgtcagccaactttcctggtataaaggttattgcatgttccagttttaagttttcttttggttcttgactgtctgtcctcaagtataactctagattaatagatgcctt

SEQ ID NO: 8750 - DNA, 142 bp, Glycine max
ggagaacctttgatgtttagggaaaaggagagaaaaatgaatggtgaaaatttgatttctgaaagacttctgttgaaatctgtgtccatgtaaacattactcttctggtctcatatttagtaacaagtgtctctttctgtcc

SEQ ID NO: 8751 - DNA, 136 bp, Glycine max
gtttcattttgattgacttttgttttgtgcatacatgtcatttgaactgttacgttagtatttacttcgttgttgtcaatagtgtttgttgaagttccgaaatcgcgtagaatttttcatttaggaacgtcgtccc

SEQ ID NO: 8752 - DNA, 740 bp, Glycine max
cgcgtccgcccacgcgtccgcccacgcgtccggttggtattgaggggaatgttggctggctcgaggcttttcacaaaggaggttcacagtggatggaactataaggcttcggaccaggcttcattcccctcaaaagtacttccttcatttgtttatacttcaaacttcaaaccacaagatcataggtgtagctacgtacctagctagcttctctctttattttgaaggatctctctacacacacgtcatgtgtgtggttgagaacttgagatgtttccttgcaaaggtgaagttgagaggaatgttgtctggctcgaggtcatggaggaagaggagagtactgagatcagtgaaagtttccaatggaaatttaccctcttaacacacacacagaaaaaatgattctcggaccaggcttcattccccccacccaacttttgctttccatttcctttaaatttctttctctccattttcatatctcgcatgcccttatggtaaggctttctcttcctttcatctttctctcaatctgcacaaaaaaaaaaaaatgctctttcacagtttgtttttgcaggctcagaattttcaactcagtggtggcaatcttgttttgtaaaggttgtattttcgttaccttcttttttattacgagtgaatatgctaccttctcccaaattccaaggtacaacttactttagtgatggatgaacccatttctttacatatatgtgtgaccc

SEQ ID NO: 8753 - DNA, 429 bp, Glycine max
ggaagagtgttgtgttgagatgggttggtattgaggggaatgttggctggctcgaggcttttcacaaatgaggttcacagtggatggaactataaggcttcggaccaggcttcattcccctcaaaagttcttcctttcatttgtttctacttcaaacttcaaacacaagatcatgtgtgttgtgtgtggttgagaacttgacatgcttcttcttcctagcttgcaaaggtgaggttgagaggaatgttgtctggctcgaggtcatggaggaggaggaggagtagagtactgagatcagtgaaagtttccaatggaaatttaccctcttacacaaaaaaatgattctcggaccaggcttcattccccccacccaacttttgctttttccttaatttaaatttctttctctccattttcatatctcgcatg

SEQ ID NO: 8754 - DNA, 435 bp, Glycine max
ggagcatcctcactgcatttgttcaataaagggaagatggtctcttgcatatacctaaagtgttgaagctgatggctctatgatgcagcaaactggcatgtttatatctcttctgaagcaacaccttggcttggtctatgatatgcctgtaatagttagatatgcttgccacccaagagatatagggtgactttgtgaattgggtggctgcattgtgactagtctcattatgctcgtgctcatgtttctgcaagcaacaccagccgttctcaattaggatcacagctacctcctacctgtaaaggcagccaatgaggaacagaaaataccgtttttacaagatattgcactcatttgtgcttgttgtatgatgtatgaggacatgaaaccgcaagctgccccattctgtgacataagattttgttagaagctgcc

SEQ ID NO: 8755 - DNA, 834 bp, Glycine max
accacacgcgtccggggaattggttcagacttgagttcagttcggtttcacacactaaaacgcaattgttcaaagttgaagctgaaagtgtctgaaactggaagttgatatctataaagcgctcactctgtcttaggtggggttttaagtgttgtgttaataacagaacttcatcgtgacaatggttttgataagtggcaacaacaaaagtgtcttacaacaaacaaatgatgagagggccaaagcacaaggtgttacagtgcttcagaattcacatcagcatggaaacaagaacattgaaagtgggcgtacacagaatgtggtcaactctgggttgaccaaagcaatatcaacaatggatgaattcaagtgtggatttccatcagaaggcctatcgaccacatcaaataaatggtggggaaattagtatcgtgatcatcgtgcaggcgccaacgcgaatggagccaagagtcatcaacctgaagagaaagtaggggcagaaacagacaagatggcacacgaaacgggaaaagctgaaaaaagtgaaattcctcatggttcatctttattgaaagctgtgaggaaaagtgcggtggaagaaggaagagaagcattgaaattaggagtttttcgaggctatggcgtaaacaagctaggcaaaagagagaaaacattgctccaccacatattcggatcttcattgccaaggtcatggatggatccatgattagaaggttgctgatatggctaaatgagagaacaagaggaccaattagacaaaactttattagaatatctgatacaagattagttcactagcgaccatggattgag

SEQ ID NO: 8756 - DNA, 741 bp, Glycine max
tagggtgttgctgatctctctctcttccaccgcacactctctgctcctagggtttctccttcgagtgagggaaatggctcccaaaccgcctagtacgggtctgtttgttggactgaacaagggtcacgtcgtcaccaagaaggaattgcccccacgcccctcagatcgtaaggggaaaacaagcaagagggtgcactttgtgaggaacctcataagagaggttgctggttttgcaccctatgaaaagcgtataactgagttgctgaaggttgggaaggataagagggcactgaaggttgcaaagagaaagctcggaacacacaaacgcgcaaagaagaagcgtgaggaaatgtccagtgttctcaggaagatgagggctggtggtgctggagacaagaagaaataagtcttatttactgttttccagattcactagatggacctgtgtattgatggacgagctttcatatttttgctttggttcaattagtttacttcaagattttgtttgagaaatatgttttgcttaactgagacatgatttatggaagaagctagattggattattttctgttttactagaaatgagagttataatcctttttcaagggaacttcgcattttattagttgcctgagggttatattgcaagctgtgatgctttgcatgccttttattggttaaaaccaaatgactctatttgtgataagtaatattattctttttgtgacaaaaaaaaa

SEQ ID NO: 8757 - DNA, 622 bp, Glycine max
cccacgcgtccgcccacgcgtccgcccacgcgtccgcccacgcgtccgcttcgagtgaggtatttgctgcttctgatccttgctcagtttaattctaaattaccaatttcaacattaacttgtgattgcataaaccataagcgaaacgattctgaagcgcgtttgtttatgggacagggaaatggctcccaaaccgcctagtacgggtctgtttgttggactgaacaagggtcgggtcgtcagcaagattgaattgcctccacgcccctcagatcgtaaggggaaaacaagcaagagggtgcactttgtgaggaacctcataagagaggtagccggttttgcaccctatgaaaagcgtataactgagttgctgaaggttgggaaggataagagggcactgaaggttgcaaagagaaagctcggaacacacaaacgcgcaaagaagaagcgtgaggaaatgtccagtgttctcaagaaagatgaaggccttggtggtgcttgggagaccaagacaagaagaaaaaattttaaagggtttccctttttaaaatttttttttttaaacccctttttggggggttttttttttttttttcccccccaaaaaggaaaaaattttttt

SEQ ID NO: 8758 - DNA, 557 bp, Glycine max
  unsure (1)..(557): unsure at all n locations
gcctatttgctattctccctctccgcatacactctgctcgtagggtttctccacctagagggaaatggctcccaaaccgcctagtacgggtctgtttgttggactgaacaagggtcacgtcgtcaccaagaaggaattgcctccacgcccctcagatcgtaaggggaaaacaagcaagagggtgcactttgtgaggaacctcataagagaggtagccggttttgcaccctatgaaaagcgtataactgagttgctgaaggttgggaaggataagagggcacttgaaggttgcaaagagaaagcttggaacccacaaacgtgcaaagaagaagcgtgaggaaatgtccagtgttctcaggaagatgagggctggtggtgctggagacaagaagaaatagtcttattatttactcttttcagattcctagattggactgtgtatgatgacgagctttaatatttgggttggttcaatagttaatttcagaattggttgaaaaatgtttggtaaatggccctgattttggaaagttgttgggtttagaaaaaaaaannaa

SEQ ID NO: 8759 - DNA, 280 bp, Glycine max
agcgattcggctcagcgcacactctctgctccttggggttccccctccgcgtgagggtaatggctcccaaaccgcctagtacgggtctgtttgttggactgaacaagggtcacgtcgtcaccaagaaggaattgcccccacgcccctcagatcgtaaggggaaaacaagcaagagggtgcactttgtgaggaacctcataagagaggttgctggttttgcaccctatgaaaagcgtataactgagttgctgaaggttgggaacgataagagggcactgaa

SEQ ID NO: 8760 - DNA, 432 bp, Glycine max
gacagagatattccaatatatacattgtttttcttaaaagaaaaaagttatgttctttaaatacgaaaattccaaatccaccttcatggttttggtagatgggtaggttacgggtctaagcaaatggctaattacagcttgagcagacaagacgcgctttatttgctttcattagcttttcaactttgagtttgaaatgcaagctaggttgcacaccattggctttattcttggaaaattggaatattgaaccctcgatttccttacaaatttcccgttgcaagccgtgaatgagttggaagcgccgggtgtttaagtcttcaccagtggcatcaaacaatagttagatcagatgtgtaacagaaggtatgaaacaaatcaccagtaacttggacttttttaacattttctttataagatatagtcaataaa

SEQ ID NO: 8761 - DNA, 433 bp, Glycine max
gaggtttgaagcaagcaagttccgcaatgagtgaacccagatagagagatagatagtggcgcaatccgggtttggtttgtccccaaataacagaaaatgacgatgctttccaagatatcatcatcactgttactatcactatcctccaaacccaaacccaaacccatttgcaacccctttctgctttctcgttcagccgccacaacgaaaacatcagaagaataaaaaggagaacgcaaaagcagcgttggcgaaggagaagcgcagaacccgttccgataagcagttcaacagagacgcaataatcgagcgttgcagaataaacgacattgacaccgacaccaagttctctcacgttcccgtgatgctgagcgaggtcttggacgtctattccaactccacactaaccttcttcgtcgatggcactctgggc

SEQ ID NO: 8762 - DNA, 547 bp, Glycine max
ctcgagccgaatcggctcgagcgagaaggcgaacatccgtttccatctaagtgactttgtctacttgtgtcccccagaagccttaaagctcttctctgctttgaaaatggctgattggggcccggtggtgatcgcagtggtgctgttcgtgctgttaagcccggggcttctgtttcagatgccagccaggggaagggtagcagagtttgggaacatgcaaaccagtggggcctccattttggttcacgccatcatctactttggcctcatcactatcttcctcattgccattggcgttcacatctacactggctaactcctggatctggttcagtttcacccatctatgtttatctctgccttttaattagtctttttagctttacaataatttccttgtttgatctctatgtatcttatgtggggttgggtcatgggtgcccagaaaaaaacaatagattcagataaggatgatgctgctgtgtgtgtttttttttttttttttttatcaagatagtatgggtcatgatcctttttgctttgtgac

SEQ ID NO: 8763 - DNA, 709 bp, Glycine max
agaacaaggataggctagacaagtctgacctaagattgtccaaggcagtaattcattctaacatggatttgataaagcagctagatagtaaggcagccaagcaaggaaagaaaggtgatacattctcactggttcacccctcacaaccaccttctttgctacagctgaaagatgttgtcttgtcctctgctcttgatctgagacgaacagttccaagacctgtggttgcaccatcaggagtaagttccagatctgtctcccctttctctagaagaccaagcccccctcgttcagctacgcctattccaacaacttcaggacttgccttctcaaaaagtatttctgatagtttgaagaaaacaaatgaacttttaaatcaagaagtgcagaagttgcatgctcaggtcgagagcctgagacagagatgtgaactgcaagaattagagcttcaaaggtcagcaaaaaatactcaagaagctatggcactggctgctgaggaatctgctaaatgtaaagctgcaaaagaaggtattaagtcgctcacggctcagctcaaagatctggctgagaagcttcctcctggagtgtatgatgctgagaacgttagaccagcttacctaccaaatggtattgagccaaatggcatccgccatccagattcaaatggggagcagcactcaagagcagagtcaatcagtgcatctagttt

SEQ ID NO: 8764 - DNA, 422 bp, Glycine max
ttcttcagtcacatgtccttctctcttttcactctccactttccttcttgtgttatttagatcctcccctttgttcttcattgtactacactactaccactactactattatctgctttaagaagtgagaaacccaaaaagagagagtgcaagtggaacctgttcgtgtcctaacttttttttttctttcttttgcttagccattgtttgttataagttcccacttacttaccactttcatgggacacaacaacacttgtcatcatcatgtcaaaggtttccacgcagacccttttagccatagcctctcttctgcttcaaatggtggtggataggaggagaaaatgtgggaacaatgaaaaaagtggtggcagtggtttcattttcttaccctttattctgtttcttttggcttccacttc

SEQ ID NO: 8765 - DNA, 718 bp, Glycine max
ccaggggcgattagtgaagataatattttgaatgggatagcatgggatggttggggtctggcaactgatggagaagtcttgtttggaagtgatggcagttcaacattgtatcaaatgtatcaatttgagcctcaaccatttaaagttgtatcaaaacaagttgtttactacaagggtcatcaagtgcacaatctcaatgaattggaatacataaatggtgaagtttgggccaatgttttgccgactgactgcattgtaagaatctctccccatgatggaagggttcttggatggattctcctccaaaatttgaggaaagaacttgtggaagctggggagattagtgatcgtgatattttgaatgggatagcatgggatggtgagcagaatcgtatttttgtgactggaaaacaatggccaaagctgtatgaaatcaaggtttcacctataaagaaaccaattgaagaagggatcatcgagcaactttgcttgtatgagcctttgaatgggggatttgtgttggctgacccagcccaaagagaatgaggtgaagctgaacataaaatgatggccttaagaggacccaaaaggatgttcgagacaactcacaggttgaaaaaactttatcttatattgggtttaggataaatatcattagattatgtattttggaaaatgccatcaataaagtatactccattttccctttttttttctt

SEQ ID NO: 8766 - DNA, 539 bp, Glycine max
  unsure (1)..(539): unsure at all n locations
acgagatttggggaaggtttaactctcctcaataataggctgttccaagtaacttggttgcagaaagctggtttcatatacaacccgaaaaatttaagccagattgggacatttaatcatgatatgaaagagggttggggtctggcaactgatggaacagtcttgtttggaagtgatggcagttcaacattgtatcaaattttgagcctcaaccgtttaaagttgtatcaaaacaagttgtctactacaagggtcatcaagtgcacaatctcaatgaattggaatacataaatggtgaagtctgggcaaatgtttttatgactgactgcattgtaagaatctctccccatgatggcaatgttctaggatggattctcctccaaaatttaaggaaagaacttatcgaagctgggaataattgactggaaaactgtggccagagctatatgaaatcaaggtttctcctgtaaacaaaccaattgaagaagggatcattgagaagctntgcttgcgtagccctttcaaatttacatgattga

SEQ ID NO: 8767 - DNA, 544 bp, Glycine max
gaagagtgacccagagagagtttctcaccaaacacacacttctcttctcttctcttctcttcattttctgtggttctcactttcttttctctaatcttctaatctcttattttcttcccccctctgttactccccgcttctctgaatccctttctgttaatcatctgtctttcaactcgtgattttttgggtttgcctcaccaaaaagattcaaactttgaaaatttttctcgaaagccaggtgttttcagaatcgagatccagctttttttttgtttgtttttaaaaaattattattttctttcgttcagccgcgagggttgtttttgatccctcaaaagctctctttctttttttctttcttggatttaaggggttgtctattttaaacctctcccatccttttttgttgtaatatttaaaaaccacaggttgatttttttaatctaagatctgtgtgtgtagttggaaaattgaatttttatatggcagctacgatgaattctacaacgagacatcacaccagttcagtcatatccattca

SEQ ID NO: 8768 - DNA, 451 bp, Glycine max
gatccaagagtgacccgagacacagattcttaccaaataaacaaacaaaaaaacacacacacacacactttccattttctgtggttcttcttctcacttctctaatcttctcccccctctgttactccccgcttctctgaatccctttctgttaatcatctgtctttcacctcgtgattccaaaaagattcaaactttgaaaatttttctcgaaagccaggtgttttcagaatcgagatccagtttctttttatccttttgttaagaaattattattttctttcattcagccaagagggttgtttttgatccctcaaagcttttttctttcttcttggattaaaggggttgtctattttaaacctcttccatccctttttttttataaaaaaaattattatttttttttgtaatttttaagagaaacgcaggttgatttttttaatctaag

SEQ ID NO: 8769 - DNA, 1248 bp, Glycine max
ggggttggggtttggattgtaccggcaaacttagggtggactcactctcgatctcaccgataaccaaccaacgtggcttcttctcctcaggtaaatggaaaattggtgaagcgggctattttgtataaattggaggaaatgttttaattttgtttctcaagttcagcttcttgctgtacaagtaatagactattattagacttgccagaaatcaccaactgggttgctctttctcctcaggttctctaagtcaactttcagtttttgattgttgaggatggtgctggttttggccctgggggatttgcacataccccacagggctcctgatcttcctgctaagttcaaatccatgcttgtccctggcaagatccagcacataatttgtactggaaatttatgtattaaagaaattcatgactacttaaagactctttgtccagacttgcatataactcgtggtgagtatgatgaagagacaaaatatccggagaccaaaacactaaccattggccaatttaagctgggactatgccatggtcatcaggttattccatggggagacctagactcactggcaatgctacagaggcagctcgatgtagacatccttgtcacaggtcacacccatcaatttacagcttacagacacgagggaggtgtggttataaatccaggttctgcaaccggtgcctacagcagcatcacttatgatgtgaacccaagttttgtccttatggacatcgatggtctgcgagttgtggtttatgtatacgaacttattgatggagaggttaaggttgacaagattgattttaagaaatcatccacaagccactctgctcattaaacactgggattttggtctactctcttttctctttctcttatttggctgtttagttttctttttactccttcaaacttttcaagggtactgtttttagttttattttgctttgtatgtacacttgtatttggccatatcataggattcttaggatttggttaatatgtgatctgcgccaaacgtaacgactgattgatcagcaatggctgtgtattactactccttttacaagttgcccagagatgatatgcagcaaaaagaaaattttattgtaaaaacgtaggaattaaggtgggaaattgatcacaaaaatttggagagggatacaagtggattattgtatttgtgcttgtcaaagtaattaaaaaagaaatagaagcaaaagaaccaattatttt

SEQ ID NO: 8770 - DNA, 430 bp, Glycine max
tgtgaatcgacgacgtattttggtgcgtgcaggtcccggtgttagaattggggtttccgtttcgattgtacctaccggccaacttagggtgcagtcactctcgatctcaccgatcaccaacgtgccttcttctcctcaggttcccttagtcaactttcggttttttgattgttgaggatggtgctggttttagccctgggggatttgcacataccccacagggcacctgatcttcctgcaaagttcaaatccatgcttgtccccggcaagatccagcacattatttgtactggaaatttgtgtattaaagaaattcgtgactacgtaaagactctttgtccagacttgcatataactcgtggtgagtatgatgaagagacgaaatatccggagaccaaaatactaaccattggccaatttaagctgggac

SEQ ID NO: 8771 - DNA, 1102 bp, Glycine max
agccttccgaccggttgcaagaggccgacgttctctcgcagctcatcgagaatgtcgaaggaagtgagccagcagaggaaggactacgtagaccctccgccagcccccctcatcgacttggccgagattaagctctggtccttctacagagccctcatcgccgagtttatcgccacactcctcttcctctacgtcaccgtcgccaccgtcattggccacaaaaaacagaccggaccatgtgacggcgttggccttctcggcatcgcatgggccttcggtggcatgatctttgtcctcgtctactgcaccgccggcatttctggtggacacatcaaccctgcggtgacttttggcctgttcctggcccgcaaggtgtctctcattcgtgccctgttctacatggtagcgcagtgtttgggtgctatctgcggtgtcgggttggtgaaggccttcatgaagcactcctacaactccctcggcggcggtgctaactccgtcagcgctggctacaacaaaggcagtgctctgggtgcggagatcatccggcacttccgccctgtgtctacaccgttttctcggctaccgaccccaagagaagcgctcgtgactctcatatccccgtgttggccccattgcccattgggtttgccgttttcatggttcacttggccaccattcccatcactggtacccggattaacccagcaaggagcttcggtgctgctgttatctacaacaatggcaaagtttgggatgaccattggatattctgggttggaccattcgtgggagcgttggcggcggcggcgtaccatcagtacatcctgagagcagcggctattaaggccttagggtcgttcaggagcaaccctaccaactagtttacttcatccatagacagaccctttattttgtgtttgcattctgtatgtgtgtatgcgtttgatgtaggagaaccatgatgatgaccaattcgtccttttctttcttttgtaatttactatttattgttttatttcttaatttgcttttgtttgtatcagagatcatcatgatcattcatgaccgttatttacattattgtttttattatattctaagg

SEQ ID NO: 8772 - DNA, 457 bp, Glycine max
gtccttggggacagaaggcattctcaaattatcttggtgacaataaatctgagtgggaggattacgatgccactcgtttggtaacaaagtttcccaatgtttcttccaccattttgattgatcagggagaagatgacaaatttttgcctgatcaactgttgcctcacaagtttgaagaggcttgtaaaaaggccaacgttcccctactgttacgtttccaacctggttatgaccacctttactactttatagccacattcatagatgatcacatccgacatcatgctcaagctcttagacttaattaagttatgtgcactctgattatctataactattttgtcaactcttctaactttactaagctgttcatttgctcgtggtaccatgggttgtacttgagtatggtatggaaaccttttttcttcgtattacaatgttttaaaactaaacttta

SEQ ID NO: 8773 - DNA, 471 bp, Glycine max
attggagtctgtgagctcagctgctaaaaaagcagaggaattgtataatagcatcaatgaaaataaaatcagtgtggagactctgaaccgtattgaagatcactttactgttctaaatttaaggtgtattgaacgtctatatggtgatcatggtctggacgttatagacatcttgcgtaaaaacccaacccatgccctgcctgtaatattgactcgactgaagcagaagcaagaggagtggactaagtgtcgttcagatttcaataaagtatgggctgagatttatgctaaaaatcactacaaatcacttgatcatcgtagcttctacttcaaacagcaagattcaaagaacttgagcaccaaatctttggttactgagattaaagaccttaaagaaaagcagcagaaagaggacgatattattcagtctattgcagctggaaataaacagcctctaatttcacatctgga

SEQ ID NO: 8774 - DNA, 474 bp, Glycine max
cgccctattgaaagagaagaaagagtttggcactgataatggcgggaaaggaaatctaactataaaaccctaaccctaaacccattcgaatcggaatcggaagaagataatgtcggaggcggaggagctaccccggtctattgtgcgccgcgtagtgaaggataagctgtcccgttgctccgaagacggagaaatttccgtcagcaaagacgctcttctcgcattctccgaaagcggtaggatcttcatccactacctttccgcaacggctaatgatatatgtaaggagtctaagaggcagattatcaatgttgaggatgttttcaaagctcttgaggaaactgagttccctgagtttcttcgtcctctgaaagcttcccttgaagagtttaggaagaagaatgctggaaagaaagctgcagtgttcaaagggaaaggatgatgagccgagaaagaaaaggaagttggaaggtg

SEQ ID NO: 8775 - DNA, 535 bp, Glycine max
  unsure (1)..(535): unsure at all n locations
ttcttgagttaattcgttcagtaagtcgactcttgagtaaattcttttttttagtagacttttggtaaactttataaattctaagtaaattcggtagaatttggagtttacaattgagtcaataagttaaaaaaataagacaaaaatataaattattttgggttattttttgtttgtttagtgttaaacataactttatttggtgtgttatttttaaatacaaaaattttcacttttaataacattaaactcttgttctctaataacatcaaatcctccatgagaatcatctatcattattataacatttaaaagttattatccagtgatgcattaatagacttgattatttaagtattgtaaaatttatgattaaccattttattttattatatttttaaattttttaattgatattttatttatagatattttattattatttttatatgaaataaattcttacaagtntaatcaaatttttcatgaatttatgtaaaacttttgagattgataacattatattatattaaaa

SEQ ID NO: 8776 - DNA, 858 bp, Glycine max
cccacaacaacaaagatcaccaacactttgctggtgccattctttctgacctctcttccaaaaacacttcctccacccaccttaaaaaaacagaggacagccatgagtcgcagaaacgaaagtggtccaaagcttgacttgaagctgaacctgtccccaccgagggctgatcggagactggattcgccgacacgatcggcgacggcgtctccgacgtcaccgccgagctcgtgcgtgtcttcggagctgaaccaagaggacaagagttactctaacagccctgaagccacttccatggttcttgtgggttgccctcgctgcctcatgtatgtgatgctctctgaggatgatccaaagtgccccaaatgcaaaagcaccgttttgcttgatttcctccatgacaccaaaaaccccaccataaggaggagttagagttatagagttagggtcctctgtttgtagctccgttttcatctgttcctaatagtaggacatattatattagcttgcaatgcttaggaattaatctccttttactgtttttaactattccccccttttatgagtagtgctatgtgcgctccacttttacgctctttcccaacaattttgtcaaagcaggggatgcagagattgcagagacagaaagaggcagagtggagcgtgaatagcactattttcaatcacctatagaaagttactgggaaattcggaaatgttaggtatctattatataggagctgggtgctctttagcggttaaaaaaaaaagtgtaatagggggcttataatctcaggtgccctccctcttagcttgcttgttgaaatttaaggtgaaatcatcaaaccttagtttccc

SEQ ID NO: 8777 - DNA, 423 bp, Glycine max
gtgttgctcttgttaaccatagttacatggatgtatggtatagaacaatcagtgttattgcttctatcatctattccggaacattgctcaatatagaactgattagagagagagagaaaaaaaagcatgtatgctttttattgatttattgttacgtgaaatcaggtgaggaagtcaatgtgtcgcatcaagcatgtacttactgagagagcaattgaagaaccagatcccaggaggtctgctgagatgaaaagaatgataaatgctctttgatgacttaaaattgacctgttcttgtgatgacattactgggtatgttgttagaataggacatctacatttgcggatgtaaggttcgctaacttgaagcattgtccaaaaatattgtttatgaaggagtttacccgtgaatgatttttgctt

SEQ ID NO: 8778 - DNA, 727 bp, Glycine max
ttgaattacacctgaacaccaggtacgtaaaaaaataaaacaaaacaaaaacacttcctcttcctcctttcccccgaaaaacccttaaaccacgaccttcatatttgcagtgctagtctgtttatttcttcagctatgtttttgtcaagaacacttggacgaacactctttgctgctgctgccagatcaaaacaatatgccactacagcagctgctgctagcagagaaggacacaacccccttcaggagttttttgaggcagacaggagccctgaagatgacaaacctgttgtttatggtcggagttggaaggcgtgtgaactgcgtctgaagtcttgggatgaccttcataagttgtggtatgtgttgttaaaggaaaagaacatgttgatgactcaacgtcaaatgcttaatgcacagaacctgcgttttcctaacccggagcgcatccctaaggtgaggaagtcaatgtgtcgcatcaagcatgtacttactgagagagcaattgaagaaccagatccgaggaggtctgctgagatgaagagaatgataaatgctctttgatggcttaaaatggacctgttcctttagtagcattactgggtatgttgttagaataggacctctacatttgcggatgtaaggttgctaacttgaagcattgtcctaatatattgtttacgaaggagtttacctgtgaatgatttctatttcttgataaagtgtt

SEQ ID NO: 8779 - DNA, 710 bp, Glycine max
ctctttagtttctgacttgtcctcttcctgcatctttggtcacttccaccacctcctctctcttcttggcttggtagagagaaaataaaaaaaaaacacaaagctaaacacagacactactgttacagaatctagtaaaacagtctccagaaacacaaacctgagttaagaaaaacaacaaacaactgagcttttgattgaatttttaaccattctcatctgaacatggcttgttcagtgcatctccttcttcttcttacttcacttctggctttgttctttaacccaacatgtgtctatggcaatgatgagcttagaacacttttggacttgaaatctagtttggatccagaagggcactttctgtcctcatggactattgatggcaccccatgtggtggttcctttgagggagtggcttgcaatgagaagggtcaagtggcaaatgtgtctttgcagggaaaaggcctctctgggaagctctcaccagccattgctggtactcaagcacttgacaggactctacttgcactgcagctctttgtctggagagattccgagggaagttgctaacttgactgagcttagtgacttgtacttgaatgtgaatcacttgtctggtgaaatcccacctgagattggcaagctggagaatctgcaagtcttgcagctttgctataatcagttaaccggaagcatacctacacagc

SEQ ID NO: 8780 - DNA, 570 bp, Glycine max
ggggcgtcaaaatctgaatcttgttcctgcctgggaaaacaacgattctatcatatgaatcagcgctgtttggggttgtctcctactcctacaccctgaattgaagcccgcctttgttttcctccaattcacttcttcgctagctcctgcttccacattccctttcccggattcgaactataatggcttgtgggagtaagagcgggaaaagtgagatcagtgaaggaggtgcaaatgattcagtggctgtgggagatgtgatatttgtcaagcttcgcggtagctcatggtggcctgtacaggttgttgatgaaaatagtgttaataagagtgttaaaccgagcaaacggaccaaacgattgccgggagacatccttgttaggcattatggaagctatacatactcatatgctgatcctattaaatgtcgtgatgagtttaagaggatacttgagcgtaatgatggttctctcaagaaagtacttctacagactcttgaacaggatcttcctagcacaaaatcccgtagatcaaaggggtcatcatcgaagcctaaaggaacatcaagca

SEQ ID NO: 8781 - DNA, 495 bp, Glycine max
gtaaaatggtaagaaaagctcgttcgtcatttttcgtgcctcaaatctttacaatcgataaccacacccatcgcctttattcagaatgtcggaatcaccattcagaccacgagaaaagcttgctgagaagcaaaaatattttcagagtatccacaggcatacctacttgaagggacccatggataagattacatccgtggccataccactggctttggctgcaacgtcaatttacatgattggacgagggatctataatatgtcgcatggaattggaaagaaagaataacctgggaatttctgattgaggagggtttcccacacaaacctaccttagcttcgttaatatgggccagtggttttctttgcatttatgtctgttctcttaataaattgcttagttgcagattttgactgccattgggggtttataacttgaatgaaagttgttctttgtatgtttgatataatcaaattgagtgaattggctcaaaa

SEQ ID NO: 8782 - DNA, 413 bp, Glycine max
cccacgcgttcgcccacgcgtccggctggttctgcatttttcgtgcgtcaaatctcacaatcgataactaaactcatcgcctttattcagaatgtcggaagcaccattcagaccacgagaaaagcttgctgagaagcaaaaatatttccagagtatccacaggcatacctacttgaagggacccatggataagattacatctgtggccataccactggctttggctgcaacatcaatttacatgattggacgagggatctataatatgtcgcatggaattgggaagaaagaatgacctggaaatttctgattgaggacgggtttccacacatagcctccttaatatggactagtgggtttctttgcatttatgtttgttctcttaataaaattgcttagttgcagattttgac

SEQ ID NO: 8783 - DNA, 649 bp, Glycine max
gagacatatgtaataatgatatcatgtataatttgatgataatagattttgtattcttcctctgaagccataacctaaccttaaaaggctaaaaccttttgtgtttgcgccgctctaaagccaagcctgagactcgcgactcaccaccactgctcgccggcctctaattttgaaagcttctgcgcctcccacgccatttttgatactctctttgtgttcgcatagtgagatatggggaagaaggcgaagaaagctatgaagaagaatttgaaaagggcttcctttaataagaatccatctgaggatgctgatttcttgcccttggaaggtggccctgctcgtaagctcgccggccagcagaagccgccgccgccgccggagaacaccgccacggttttgtacgtcggtcggatcccacatgggttctatgagaaggagatggaaggttattttgggcaatttggaaccattaagaggttgagaatcgcaagaaataaaaagtctggaaaatcaagacattttgggttcatagaatttgaatctcctgaggtagcaaaaattgtggctgatactatgcataattatctcctttttgaacaccttctccaagttatgtgatacctccagagcatgttcatccaagaatatg

SEQ ID NO: 8784 - DNA, 351 bp, Glycine max
cttttgtgtttgcgccgctctcaagcctcagactcgcgactcaacaccactgctcagactgctcgccggcctctaatttatcaaagcttctgcgcctcccacgttatgttcaatactctcttggggttcgcatagtgagatggggaagaaggcgaagaaagctatgaataatttgaaaagggcttcctttaataataagccatctgagggtgctgatgtcttgcccttggaaggtggtcctgctcgtaagcctgcgcgctccagcagaagcgcgagaaacgcaggtttgatgcgtcgatcgcatgatctataagaatgcagtatttggattgacatcaagtagaccagata

SEQ ID NO: 8785 - DNA, 575 bp, Glycine max
gtgatcacaatctcattcgttaacacatcaatttctatctctcttatactctcactactctctttgctctttcttttctccactatggctgcacaagaaaacaacttccaagactacttgcctgtgatggccaacaagcttggtggggatggcctaattgatgaactgtgcaatgggttcgatcttttgaaggattctgataaaggggtcatcacttttgagagcctcaagaggaattcttacttgcttggtcttcagggtctcagtgatgaggatcttcgctccatggttttggaaggtgactttgatggtgacggtgcactcaaccagatggagttctgtgtcttgatgttcagactcagccctgaattgatggagggctcaaagatgtggcttgaacaagtccttcaacaagagcttaaagattatttctaattcttgtaatttttttctctttctcccttactcttttaattcatttgtcattttgggcaatttcccatatacttatgtaagaaaatttaacaaaaaatgaaatggcaaaagtgattaatttgatacttcctagttccttc

SEQ ID NO: 8786 - DNA, 558 bp, Glycine max
tctcgagcgctcgagccgctcgagccgctcgagccgattctacctcatactctcaacactctctacgctctttgattactccactaacgctgcacaacgaaacttccaagactacttgcctgtgatggccaacaagcttggtggggatggcctaattgatgaactgtgcaatgggttcaatctgttgaaggattctgataaaggggtcatcacctttgagagcctcaagaggaactctgccttgtttggccttcatggtcttagtgatgaagatcttcggtccatggttttggaaggtgactttgatggtgatggtgcactcaatcagttggagttctgtgttttgatgttcagactcagccctgaattgatggagggctcaaagatgtggcttgaacaagtccttcaacaagagcttaaggattatttctaactttccttaagctcttgtttggccttcaaggtcttagtgatgaagatcttcggtccatggttttggaaggtgactttgatggtgatggcgcactcaatcagttggagttctgtgttttgatgttc

SEQ ID NO: 8787 - DNA, 768 bp, Glycine max
  unsure (1)..(768): unsure at all n locations
gggctttctctggttcctaagatggtgttgcatttggtgcctctggcgaatctccacttacaagccacgagacccgcggtggttgggttcgcgttcccactgctcctcaagttcttgatgggcttcaggatcttccgagacaacgcgcttcaccagtcaagactcttccttttccaattgggtcaaattgcgttcaacaccgaagcccgagtctccaacgtggccagaatggaacgtgctctcaggttaatttggagaacactcactccttctccttcatccaccaccgataattcccaagtcactcaacagagcctccatgacctttctatgctttcgctctagtcaccactcactttgggtttctttgcggtgaaagaaacaaagaaaaaagttaaatcaacgcggaacgtatcctctacttccatcattccacctccggttagtcgtttccggttactactttatcatccttgttgtttcttgtatattaatattaaccactttttactattgttgctgtttggaatctgaaattgatgtatgtttcggctttgtcctatgaattaggttaattttcatgagacatgttggacaaaggttgtttgtggtactgtgtgtctaattaatcttacagcttgcaataattttgcataacgcaatttgaattttccgcccgacaaactttgtcggatgaatgaaaaggtattaaaaaaaaaaaaaaaaaaaaaaaaanntagcgcccgctctagaggatccnagctaacg

SEQ ID NO: 8788 - DNA, 566 bp, Glycine max
gaaaccacacttgattttcttgtaggatggtgttgcatttggtggctctggcgaatctccacgggctaaggcccgcggtggtcgggctggcgtgcccgcttgtcctcaagttcttgatgggcttcaggatcttccgagacgacgcccttcaccactcaagactcttccttttccaattgggtcacatagccttcagcacccaagcccatatctcccgcctgcccagaatggaacgtgctcttaggttaatttggacaacactcactccttctccttctccttcttcaaccgccgataactcccaattcacacaacagagcttctacgacctttccatgctttccctttaatcaccaccactcactcactattagagaaaggggtaattctatttatactgatataagtaaagagaataattgtaatttactcggtttttcctctatctctttcttactcatcttctccacttttcttagtaagtttgtacgtgtgattcaagtttctattgtttgatttgtgctaggttaatgttctagatccaacactcactctactttacttcc

SEQ ID NO: 8789 - DNA, 298 bp, Glycine max
cttgcgcagcatgtgtttcaacatctggttctctctttcaagaactctatggaactctccctttttttatgtgggttttcgtctcaattttgtcttcttgcttcgagatactcaatcttttttgatgtgggttatcatagcgatctacgaatctcttgatcgaacctgtggacaatgttcaaccaatctgaatctatgttcttttggctccaaatgtataaccaatgtgtcgcaacaccctccatgcttatgaatgcatactacaacttatggaatgaaggtatttcttgtacctcag

SEQ ID NO: 8790 - DNA, 705 bp, Glycine max
attccatccgaagcgtccgaaaaaacataagaaaagaaaggtgacatggcaaagtgataataatagctttcttctgcgtctcaattcatctcttctctgagtctcaacctaattccccaatcaatcatctttacgtgtttgttcgagaccatggccaaaagccccttcaagcttgaacatcccttggaaagaaggcaggctgagtctgctcgcattagagacaagtatcctgatagaatacctgtgattgttgagaaagctgaaagaagtgacatcccagacatcgataagaagaagtaccttgtcccagcagatttgactgttggccaatttgtttatgttgtccgtaaaaggattaaggtcagtgcagagaaggctatttttgtttttgtcaataacactctacctccaactgccgctttgatgtcttctatttatgaggaaaataaagacgatgatggttttctttacatgacttacagtggagagaacactttcggttctcgctagggtcaaatttaataatatatgagatcctctgtaaatagatgctgcaagatgtaaactttctgctgtcgatagtcgatgcctatcctgtttattgcttatggtttacgtatctattgagcagatattttgctgctttgattatgtgcattctcttcaaattatggatttcaatatatgaatttagattttatgctc

SEQ ID NO: 8791 - DNA, 531 bp, Glycine max
gagaccagagcaggatcaaaccaaaccctaatatcaacttcatctgtttcatttgattttgattcgaacccagacagagacatagcctctttctttcgtttggagaaacaaacccctcgtttcaatcattgatcctttcctgttagatacgaattactcttccaatttcatcatggccaaaacctccttcaagcttcagcatcctttggaaagaaggcaggctgaagcttctcgcattagagagaaatatcctgatagaatacctgtgattgtggagaaagctgaaagaagtgacattcctgacattgataagaaaaaataccttgtccctgctgatttgactgttggccagtttgtatatgttgtccgcaaaaggattaagctcagtgcagagaaggctatttttgttttcatcaacaacactctgcctccaactgctgcattgatgtctgctatttatgaggaaaataaggatcaagatggctctctttacatgacttacagtggagagaacacctttggatcccatta

SEQ ID NO: 8792 - DNA, 404 bp, Glycine max
gaaagctgtcatggcaattggcaagtgataataatagcaaactaattatacgtttcttttcttccccgtctcaactcaattccattctcttctctgagtctcaacctaattccccattcatccatctttacgtgtttgttggattccatggccaaaagctccttcaagcttgaacatcccttggaaagaagacaggctgagtctgctcgcattagagacaagtatcctgatagaatacctgtgattgttgagaaagcggaaagaagtgacatcccagacatcgataagaacaagtaccttgtcccagccgatttgactgttggtcagtctgttgatgttgtccgtagaacgactaacgtcagtgcggagaacgctatttttgtttttatctacaacactctacc

SEQ ID NO: 8793 - DNA, 454 bp, Glycine max
gagccttgggtaggtagctgccaatgctgtcccaccacaagtccacttgtcctcccaaaatttaatttgatcaccgcatcccaacttccactccaagccgttgtgaaaagccagctcttgttgtgggtgatggagtgccaatttcagatccctccaccaaaaagaatcattagaacctctagattcttcatctaagctcctccaacctccatactttgattccagtactttagcccaaagatctttgtggttttggaataagctccatctccattttcccagcaaagcaaggttaaagctgttgacatccttgattcctagcccccctctttcttttgggaggcacatcgtctcccatttgacccatgaaatcttagattggtcatggctgcctccccaaaggaatcttctctggataccctgaagtctttttatcacctttgtaggaaccctg

SEQ ID NO: 8794 - DNA, 422 bp, Glycine max
ggttaccatttgtgatttgtgagttcctacacagtgttctctttcgttgttgttggtcgtgctcgtcctcctttctctcggcgatccgaagcgcaaaaccaccgcaatccctacgaatttcgtgtctcgatcccgaatctcaagctggaagagatgaattggattcagcgcaagatctacctttacaatgtgacttttgggctgtatatgttggactggtgggagcgttgtaccttcaatattgtggtgattatattaatgtgtttcgttctacgatacgttactcagttcttcaagatgtacgtttggtaagaagcacaaccattgtcacgggaagaatcaaatgtagattggtgtagctgaatagggaatatcttgatataacctgacttggaatttcttaaagctacccagaaattgag

SEQ ID NO: 8795 - DNA, 908 bp, Glycine max
aaaaaagaaaggaaaagcaacaaccgtgaatatttctttcttacagctacacacataaacaatagaattgacccttgtgtgttgtctctctgagattgtggtgagtagcataatggaggcaccgaagctgaaggtagtgacactgaaagccatcgaagcaactccgtcaaccttcaaagagttcggtcaggtcgtggaggcttcgcgagacggccaggaattcggtccccacgatgctcaactcgacctttcccaaggaactccaaggttctacattatcaagcttgaaaaatgcccgcttaagttttctagtattacacatcatgcaatcgtgactcagtgcctcgggtctatcggtggtcatgtttggtatcttggagtggccaagtcatctgttgttgattcaaatgagatcaaggatgacacaggcaagaagattgtgcagtcacgttctggtcattcatatgtgcctccagccattgaggatgtccaagttttcaagatttcaggttccaaatttcttaagcttaaccggggaacatggcacgccggccctctatttaaggctgctgcaatggactttttcaatctagaactgagcaacacaaatgagactgatcataccacacactactttaagaaggacgatggagtgatgtttgtaattgacgattaacttcataattttatctagtttccagcatttcaactgattctgcatgttatattataccattaacactttgtttggtttgagtgacttagcagggagtgatttaagttggaaggatttaggagagatataaatcatttcccttgttgtttgtgtgaaattacgaaggataaattacaaaaatccgttatttgggacggaaattgaagagtgcgatatgcattattttgttttc

SEQ ID NO: 8796 - DNA, 447 bp, Glycine max
gacacagcagcatcttctaccttgtgttgtgtctgtttgtgtgagtggcataggcataaccaatggacgccatgaaggtagtgacgctgaaagcaatcgaagcaactccgtcaaccttcaaagactacggtcaggtcatcgaggcttcgccggacggccaggaatttggttcccacgatgctcaactcgacctttctcaaggaactccaaggttctacattatgcatattgaaaatcgcccgcttaagttttctagtattacacatcatgcaagcgtgactcagtgcctcgggtctattggtggccatgtttggtatcttggagtggccaagtcatccattgttgattcaaatgaaatcaaggatggcacaagcaagaagattgtgcagtcaccttccggtcattcatatgtgcctccagccattgaggatgtccaagttttcaagg

SEQ ID NO: 8797 - DNA, 408 bp, Glycine max
tgggaactttaaaaattgaaaccgcatccctcattttctctcattcacccaatggctgctacggcttctgtttcctcttctatctgcaacagaatatacaacctttccttcacacacccttccctttcactcaccagcagcaacttccctcaaagacccgtatctcaaaaaccactcagtctcaacctcgagtcccaaagtttcgctctttcctttctcccacttcaccgtcttcccccacctttcgctgcctttgatgggttggaagtagctcaagataccacagagtcccaacaagacgaaccagaaccagaaaccgttgaaaaaacagaacaagaggaagagcaaaaggtttcagactccaatgatgctgggaagctctatgttggaaacttgccatattcaatc

SEQ ID NO: 8798 - DNA, 609 bp, Glycine max
gaggacgatgaggatgatgaagatattgaagtggacgatgatgaagatgaagaggacgatgacgatgatgatgatgacgatgatgatgaggaagagagcaagaccaaaaagaagtcatcagcacctaagaagagtggaagagcacaacttggtgatggccagcagggtgagcgacctccagagtgcaagcagcagtagaagtatttatgcagaatgtcatttatgtagttgagttttgttggtgttcgagaatgtcctgatgtgaaagtgggtttcatgttgttttttaatgtttcttaaattgattttcctccctatatcttggcagtccgaatttgttgcgagtcccttctcttattttgcgcctggtagagagaatgtggttataggtagagatgctgtgatttgtttatgttggaatttgtactgccgtgtcaggtatacttgaaatatagttcgtgctttcaactagtaatttttgctgttaaaaaaaaaaaaaaaaaaaggggggcccgccgatattgacactttctccccggggaattattcccggccggaacccttggggggaacacccttccccaagaggggcgctctaaaaggtcgggg

SEQ ID NO: 8799 - DNA, 411 bp, Glycine max
  unsure (1)..(411): unsure at all n locations
gattcccctttttgttaaaactgtatctattcctaaactccagtagtggatccgaagccagcttcagctctgagcgtagaatccaaatcctgaacctcaacaacctgcggcatcaccatctgctggattatcaacagtatcacccctgtaatccgcgtcgatcacgcccgctcccacatcagtgtcattccaacaaactaacatttgcacaaaacacgccaacccgagtgaagatctaaacaagcaatctgtgtgtgttccgccatgaacgaagaacaacagtgtctgcttctcagctcagcttctcgcttctggccccccaaaggagtgaagctatcgtacggcactgcgggcttcagggccgatgcatcacttctccaatcgacggtgtacanagtgggaatccttgca

SEQ ID NO: 8800 - DNA, 693 bp, Glycine max
agtgagaagaaagaaaagctgcattgggtaggttaggcgttgcagaaccgaaacacgtcacctctgccagccattttttctttttttcttttttcggattatagagaacgtgagcgcgaagatcggatactcgcaccgatttccttcattatcacagtttcaaccgaacgaacgactcctctccaaccatttctcgcagaattccagttccagtttcaggttcactttgttgatggctaaagttggtaagttgcggagcaaggctcaaggtcagagggcaaccccgcatcttttatcgtgtgcaagaaaaaatctgaaagatgttaatgtaaggaacaactcttctaaagcatcggagaagaaagattgggaagatgcaacctgctcagtctgtatggaggtcccccacaatgctatccttctcctttgttcatcttatgacaagggttgtcgcccatacatgtgtgccactagtcatcgccattcaaactgttttgaacaatacaaaaagacatatacgaaagcaacttctgttcaaagcttgcagctagaagcaaacaattccaatattgatttaagcacaggtgaacctaaagacgatactgaagttcctgagcttctttgccccctttgtcgccggcaggtgaaaggttggacagtggttgaagtggcacggaagtgtctgaatgcgaa

SEQ ID NO: 8801 - DNA, 785 bp, Glycine max
gttaacaaattagggttaaaatccaattttaaaattgaatactaaaataagcaaaataatcaagagagtaaattcataactaggggattaaatttacaattatgagataaaggaaccaaatttacaaaattttgcaggtaggaggaattgagttgaaatcgaaagggaagcggtggtttaggttaggatttggtgagtgagtggggatggcgaagttcaatgtggtgcagaagcgaaggagagctctaatagcagagaagaagagacagcttcacggagaccctttaaccggcaagctcaagatcaaggaccaacccctttccctatccggaaaacgcaaacgcaagctcttcaaaaaatggcgccgggaccaaaaggacgccttgcagaatggtttggtaaccatggaagatgttcaaatggcagttgctgaaggggataccaaagatgcccctagaccttcagcaaaaattcacttgaagaagaaggccttgaaacttaaacagctcaagcgcaaagggaagaacaaaagaaaatctgatgtgcctgctgatgtttcggctgatgcaatggtggaataaacaggaaaagctttaatattctacgtacttggtagggtggaggtagaagaggcaatgtctgatggtataaaatgttgtaaccctcgactcgagtgattgtcatggtattcctatattatatctgatgtactgacctgcattgattaatagccattagattaaaacatggaaaatgcttctaccgtgacagcataacgtaatttt

SEQ ID NO: 8802 - DNA, 940 bp, Glycine max
gctttttgtgcgtagcgtagaaatgactccatctttgcgattctcaactttctctctctaaaaaacccatcagagcatgaggagagagaaacttccctgcccttccatttccctctcgattccttcgcctttgctttcgatcctttgctagaagagaaccttattcctctctgtctctcccccttcaaattcccttccttttcttccatattcactctctcttcctaaccgcccgatgcactttggttttgcaaactaattcgttggctaaattactccgattgtgaactggttctgttggaatatccaaaatggcaaaaggtagcaggggaagacacaggattgcttctcgtcaattcagagtgactccatacccactggcttcttgcaaaagggacatttgtgaggacatgtgccaaaacaaatgttctaaggctttggaaaagaaagagtgggaagatgttacgtgttctgtgtgcatggaatatccacacaatgctgttcttcttctttgttcttctcatgacaagggttgccgtccctatatgtgtggaactagctttcgtcattctaactgtcttgatcagtacaagaaagcttatactaaagtaatttcacctaataggcaacctatgcaaggcactccaggtgtgctacaagattcaaacttgcctcttgagaagagtgaagccacagagcttgcatgtcctctatgcaggggtcaggtgaaaggttggactgttgtggaacctgttcgggactatctgaatgcaaagaaaagaggctgcatgcaggatgactgcttgtatgttgggagctataaggagttgaagaagcctgtgcgggcagagcatccgtcggcacggccacggatggtggatcctgctgatgaacagaaatggacatggctctagtgggagcgtgaaagaaaagatgatat

SEQ ID NO: 8803 - DNA, 814 bp, Glycine max
ctgacacatcctcttctcttctgtggttgccccaaaaatcagacacagatcctcaaaccataaaaacacactccaattccaattgaaatgttcaaaacacaagcgaagtgaagagagagtgagtatcgtttgaacaatggagttcagtttcgacgagaaggacttcgcgtcgtgctgcggaagcaccaaattcgcgaaggaaatggcttcggcctctcctttccgttcgttccaggacgctgtttctgtcgcgaagggcgtttggttcaacagcgttgatgtcaacggttggcttcaggccttctccgcgcaccctcagatcggtcaaacccacgctccctctgtcgcctctgaagccagtgctcagtggagtaagggagagcaatcaactgctttagcaactgctactggttctagcttacaggaactatctgaatggaatgctcggtacagggaaaagtttgggtttgtatttctcatttgtgcagctgggagaagtactgatgagatacttgctgaactgaagagacgttatacaaacaggccaattgttgaatttgagattgctgctcgggagcaaatgaaaattacagaactacgccttgcaaagctcttttcaagtagagaaaacatttcttctacagctgataagaattccactgctagaaaggcagaagaagatcgtataagcattatcagtagtcacatgactgctacttcagagagttcaacaggcaaatcaattcagcatcctgccagaacccgccctcccattaccactcacgtgttggatgtttcgcggggggctccagct

SEQ ID NO: 8804 - DNA, 668 bp, Glycine max
gacatagcagatagatgattccttagccatttgatctctctaacagcctttctacctatgatactatcttgatcttgctccctctttcctacggcattcaccccaccttgttgttctttccatttttctgacttgctccttttttctctcaaacacttcatttcttgagtttttttcactaagtttgttagggagatttacacaatggccaaacactttcttctgcttctttttgcagtatgcgttgctgctattgatgaagaaccatttataggggtgaatattggaagagacctctcagatatgcctcaccccactcaagtagtagcactacttaaagcacagcaaattcgacatgttaggttgtatgatgctgaccaagctatgctcattgcccttgcaaacacaagaattcaagttgctgtatctgtccctaatcaagagatcctagcaattggtcaatcaaataccacagcagcaaaatgggtttcccataatgtgatagcacattaccctgccactaatataacaactatttgtgttggttctgaggtcttaactaccctcccctatgcagcgaaagtgcttgtcagtgcccttaagttccttcactcagcacttgttgcttccaatcttgatcaccagatcaaagtctcaccccctttcct

SEQ ID NO: 8805 - DNA, 457 bp, Glycine max
  unsure (1)..(457): unsure at all n locations
cgatagaacattgcttttggactgcttaccctcagtgccactccttgcatcccttttccaccagccgatgcaatcactgagttctgcaaccatgcacccaaagattggcatttgacatagtccaaaatgcacatgtcttgtgttggaattggatttagtgcattcacctttccacatattcagtaaatttataaccattgaatgaaaattggactgacttagatttttaaatgtgttttaagttgattgactgagagaaaatgagtcgtctaaggctgaatggtcattttggtacctgaaagtgtatagtgattctaagtaagtccctgaattcaagtaagttttaaaaaaaatccctgaaaataacttcttacatttacataatttgttagtttcaaatgttatcattaaaatgcagtttatcccttatatgtagggactttgcattntaatgata

SEQ ID NO: 8806 - DNA, 547 bp, Glycine max
atcgaggacggcgtcgacgtcctctcgctctccctcggtggcggttccgcaccgtacttccgcgacacaatcgccatcggcgcgttcgccgccatggcgaaaggtatcttcgttgcatgctccgccgggaacagtgggccccagaaggcctcgcttgccaacgtggcaccgtggataatgacggttggtgcaggaaccctagatcgtgatttccctgcctacgcttctctcggtaacaaaaaaagattctccggtgtttctctctatagtggaaaaggaatggggaacgaaccggttggtttggtttatgacaaaggcttgaaccagtcaggtagcatttgcttgcccggttcgcttgaaccgggtctggttcgtgggaaggtggttgtttgcgaccgtggaatcaacgcgcgggtggagaaaggtaaggtggtgcgtgatgccggtggtgttgggatgattctcgcgaacatagcaccgagtggggaagagttagttgcggatagtcaactgctaccggctgtggcagtgggaagaatcgtggggg

SEQ ID NO: 8807 - DNA, 795 bp, Glycine max
cggacgcgtgggcggacgcgtgggcggacgcgtgggttccacgtttctttctacacacttcattttcaaaacaaagatcgtagaaaagcggttgcgttccggttcggttaattaacacaccaaaaccaaaccaacctttctccgtcaacatttaattccttccgtcgctagaaaaatgcccaagccacgtctggatcggaaaaattagggcgctagggttttgttcgcttcatccgattctgcttcggattccgatcggaaatgtccgaacctcattcatcgccccgaacctccgcgtatctcgacgcgctctctcaggcgatccacaagaagcttcagcgggcgttggctaattcctcgcagaggcgcaatttgttgcaggagctgtttgcggacatagctttagaagtcgatgaccgagccaaagatgtgattgtcaacaaggaagaagatggcatttctcccgcagaggatattaatgatgggcccgtatgcttctacgatgtgcttgctgattattttgtgctagtgtctgagagtagaaaacctatccttgactggattgttcaactttggagccaatcatttgcttcacatatctttgccctactgtttcacaaatggttatttgaagttcatcttgataatccagaagtgcttctccggtattcatctgctctggttcaaggtgccacaaatgttttctggattgacattcaaacaaatacaaggcgattccagtctctattaagtgtaagagtctagaaggaatctaatgtttatttgcactgatat

SEQ ID NO: 8808 - DNA, 392 bp, Glycine max
gatccacgattccttttccagtaaaacacagacgcattttagtttttttagtttctgcataaaaaacaaacccctgccacactctatctaaccttcttcttttccacgtttctttctacacacttcattttcaaaacaaggatcgtagaaaagcggttgcgttccggttcggttaattaacacaccagaaccaaaccaacctttctccgtcaacatttaattccttccgtcgctagaaaaatgcccaagccacgtctggatcggaaaaattagggcgctagggttttgttcgcttcatccgattctgcttcggattccgatcggaaatgtccgaacctcattcatcgccccgaacctccgcgtatctcgacgcgctctctcaggcgattcac

SEQ ID NO: 8809 - DNA, 516 bp, Glycine max
ctctataatgagtcataatacaacagaagggcgtcaaacaaattgatgataatctttaaaggtacacatatttagaagtcatgataaattctagaccgaattggtttggaatgttgtaggatgccttgaatagactgagcataatcccaaacggtacacaacacttgaaagtcatgagagccccttactggatttgaactatattgaatgtgcaagtggttgacgtggacatatggcttttactcttccccattttcattcgtctttttcttctatttctaggtatgatgctttggcttaacacatttggattttagagggtgtggttgcaacttgagataagatctccatgaatattgatggggttaattggtcataatactattaaaggagttgaaattgtagtgggttctattatgaatgaattattactggtgggtttgccttagtgggaaagaaggaaagaaaaagaagagggagaaaaaaataattgagagatattatttaaagagaccc

SEQ ID NO: 8810 - DNA, 324 bp, Glycine max
caatactgatacttatttaattcaatgaaacaagcatcaatcacacaataacacaccaatcaaacacaatcaaaatcttagaatcaaatacaatcaatcaatcattaaccacaaatatttcaatcaaccaatcaatccttatttatccaaatcactaatatataacaggcctaattctcttctaatggaaaagaatgtttctttggggagaggttttgtgaagatatcagcaagctgattctttgcatcaacaaattctagcacacaatctccctttagaacatgatctcctagaaaatggtgcctaatttctatatgcttggt

SEQ ID NO: 8811 - DNA, 443 bp, Glycine max
tttccctttggttcctacccatataacctacactaacatcatcacattctcttctttttggttagagaaacaagacataatccttttcttcttccattcccttctcctttcaatctctagaattaacaccatgtcactgacacttttcctgaagacccttttcctcttcttcccttgctacctgtgcctccttgactcagcaacaacaacaacaacccttaagcccattttgctaaccccatccaagcctgcaacgacaatccctgcattcccagaacaatctgatgtctcagggtgccctctcaccctctcagatgagctctttgatgggattaagagtgcatgtagtggtgccaaaagtggtgctgacatggagctccaccacagcacgtgctggtcagtgcttgcagcatggttgtaatctgcatattctgccactgcac

SEQ ID NO: 8812 - DNA, 344 bp, Glycine max
tgtaagtagattcccctaacgttcataacctaatttgactagtcgttactaaataaaattgtttgtaaattaggttgttttctatcatactcgaaccgagttgttttgaatttgtagagtggttggaaaatgataaaaataaaaaaggaagggaaaaaaaatcacagtttggatttttcaacttacatttttaatcaatattaacacattaacatttatcaataaaaaaattctccatatcctaattttttcaagtgggttttttttattgataacccaacttaatcattgacgcttttttgtggccaaacaagatacatagatatatatatgtatctactcac

SEQ ID NO: 8813 - DNA, 757 bp, Glycine max
  unsure (1)..(757): unsure at all n locations
aagtctatgtttgttattttaaacattgtaggtaagtattttcttgtggatgcgggatataccaatggtccgggatttttagcaccatattgagggactagatatcatctcaatgagtggattggaaacacccctcaaagttacgaggagttatttaatcttcgtcatgcaagtgcccgaaatgcaatagaaaggtcatttgggatctagaaaaaaagatggagtatattaagaactccttcattttttgatatagagacacaaataagaattatcaatgcttgttttgtgttacacaatttcataagagacgaacaacaaactgatcaacttttagaagttcaagacttagaatttttatctgttgttgatgaagagttagtccatcaatcaagggaagaagttcaaaataatgtcatagatgatatcacaactattcaagctaccgaggaatggacaagattgatacattagctatgaatatgtttgctaactatcaagttaggagaaactttgcttagggatagttcttttttaaatgtaatttgctattgctgacaaactttgtgtgctttgttactattgtacttttctattgaagatggacttttatgtactttgctattgcataaaaactttgcttgaaataaaacacaaactggcataatnnnnnnnnnnnnnnnnnnnnnnnnnnnnnnnnnnnnnnnnnnnnnnnnnnnnnnnnnnnnnnnnnnnnnnnnnnnnnnnnnnnnnnnnn

SEQ ID NO: 8814 - DNA, 788 bp, Glycine max
gtccgcaaagccgttactcttactcatcacatgaacccctaaatcctaattgctttgttttcccccaattcccaatggcgaacgactcgtcgtttttgttcgccggcattcgtttcgatagaaagaagttcggcgccgatattgccaggttccagaaaaaagacagtgatactgattcggcgatgattttgagcgccgccgaagacgaaggcgagaaaacaatagaacctctggaagaagagaaagtcgcggcgtcaacgacgaagaagaggaagcgcaagggaacctcttccgaaacggtcgaaggattcaatgtgttcagaagttcgacgtctgtggcgcagtcgaatgatgaagtccgagtcattgaggagtccgttgagctgtataataataataagaaggaacaaaataagcaactcgagcgggacgcaatattcagaaagcaacacaacattcatgtctctggttatagcgtgccgtctccgcttcaaagctttgatgagttgaaatcaagatataactgtccttcatatttgttgcgcaatctgaaggaacttggatttagagaaccaacacctatccaaaggcaggctataccagtacttttacaaggtcgtgaatgctttgcttgtgcaccaagtggctctgggaaaacccttgcgtttgtctggccaatgcttatgaagcttaaggtattgctcattttctccaactgtgtttgcagttcccaacttcggtgtccttggttcaaataatcaactgtgttttacaggatccggaaaaag

SEQ ID NO: 8815 - DNA, 501 bp, Glycine max
agtcgagaatgatgggagattctagttacaagaacacccttgattgttttatcaaaacattgaagaatgatggacccttagccttttataaagggttcctcccaaattttggacggctgggatcttggaatgtgatcatgtttctaaccttagaacagactaaaaagttcgtcaaaagtttagagtcgtcctgaggcgagttcccgttgagaattttctaaggggactggttgcaactgcaaatgtagtggaaattgtagaaaataaaggtccctttctcttcattctgctaaccaggatgtggtcaaacatttttttacggaggaaaaatttgatagtaaaatgagaatgctattcatatatactagcttttagcaattgccatatattctgtgggattgcatgcagttgtcatgtatttctctttaaactttattatgaaccgagcttggacatgtcacgagattcgtttcaaaaaaaaaaaactagagacaaacaatg

SEQ ID NO: 8816 - DNA, 1332 bp, Glycine max
gacgtcagacgcacgcgtacgtaaactcggaatatcggctcgagtctctatttacacttctcttctgtgtttcttagaagaattaagatggctaccttgactgtacctccagttcctccttcccccagagatgatgccatgcagctttaccgtgcttttaagggatttgggtgtgatacaagtgctgttatcaatatacttgctcatcgagatgctacacagcgtgcctacatccagcaagaatacaaagcaatgtattctgaggaactttccaagcgcttagcttcggagcttagtggaaagttagagactgcagttctgctctggttgcatgaccctgcaggacgtgatgcaacaatcattaggaagtctctaacagcagacaacaaaacccttgaaggtgctactgaagttatatgttcacgcactccatcgcagctacaatatttaaaacagatctatcattctatgtttggtgtttatcttgagcatgatattcaaacaaacaccagccccggcgatcatcaaaagctcttgcttgcatatataagcacacctcgtcatgagggccccgaggttaatagagaaattgctcagaaggatgcaaagggtctttacaaagcaggggagaagaaactgggaactgatgaaaagacttttatccacatattcagtgaacggagtgcggcgcatttggctgccgtcagttcttattaccatgacatgtatggtcattcactgaagaaggcagtaaagaatgaaacatctggggcctttgaacatgcacttttgacaataatccaatgtgctgttaatccaggaaagtattttgcaaaggtgttgcataaggcgatgaaaggcttggggactgatgattccacactcattagggtcgttgtgacaaggactgaggttgatatgcagtatatcaaagctgcatatttaaagaaacacaagaagactctgaacgatgaagtacactcagaaacatccagtcactacaggacttttcttctctcacttttgggccctaatcactagccaagatgttcaatgatgtaagtggaataaattcacccttgatgtgtaaatttgactgtttttagtgctttgtgatcaatgtagccgacaacttgtagaataaggcctttgttgttgttgttgttgttgtagtgctttgtgagtgttaatttatcagcctatagcacagatgaagatttgttgtgtattatttaagtatgcttaactattttcatttcttgtttcaacaaatcaaacattgacaatcaaatagaggttagagaagctactattttccattcaaccttacat

SEQ ID NO: 8817 - DNA, 472 bp, Glycine max
caggactacaggagcaattgaattagtattgattaacgttacatctaacgggtattacgaagtcaaccgatctaaaaaactaaaactcggatcccctttatgttgtttattttgatttggagtggttccatcgggagtttggatggccaccttgaatgttccccctcttcctccttcaccgagagacgatgccatacaactttacgctgctttcaaaggatttggatgcgatactagcgttgtgatcaatatacttgctcatcgagatgctacccagcgtgcctacatccaacaagaatacaaagcaatgtattctggggatcttctcaaacgcttatcttcagagctttctggcaagttggagactgcactactgctttggatgcacgaccctgccggacgtgatgcaatcatccttaggcagtctctaaccctgcccaaaaatcttgaagctgccactcaacttatatgt

SEQ ID NO: 8818 - DNA, 456 bp, Glycine max
ccacaatacaacttcagtttcaacagcgaatctctcttttttccattctcatgcctcttgtcttcttgtaacacacccttttctcttttctctctaactcccctccaagaaattctgagagaatagaatagaaaagagggtgagtggttttttgagttttgatagaatagctgcatggggaagctggttgagattcttgaccaaggggtcaggattgctgcaaggtttcactctaattgcccccaaacaggccgtaagtactaccaccctccatccctctccgacaaccacggccaccactaccatggtggagccaacacaagcagcggcctagtcaaagatgctcgcgcggcgaggagccttgacgtaattctttattctgtttgacagaaccatatttgcttattttttggctgttcgattcaatcattgtaaggcgtttcatacatgtatttt

SEQ ID NO: 8819 - DNA, 619 bp, Glycine max
tcggggagagggaaaagagttgaagacttgaagtgaagaaagaaagaattgagaaaggatagggtttagggttggcaaaggaaggaagggatggaagcagctgtggtggacgtcggctctaagcttctcaaagcggactttgcaattcctgaccagactcccgccatgataattcccactcagatgaagcaattgctcgatgatggatcagtcactgatagttcactggctgacaatgtcaccgttgatcccgtcgtgcgaggatttattagagattgggatgccattgaagatttgttgcaccatgttttgtatactggcctcggatgggaaattggcaatgaaggacaaatactatttacagatccactttgtaccccaaaggcgaacaaagaacagttggtgcaactaatgtttgaaacattcaatatatcaggattttatgcctcagaacaagcagtgttatcactctatgctgtgggacgtatctcaggctgcactgttgatattggacatggaaaaatagatattgcaccggtaattgagggtgctgttcaccacatcgcctcgagaagatttgagtttggaggtactgatctaactaatttcctggctcaag

SEQ ID NO: 8820 - DNA, 678 bp, Glycine max
  unsure (1)..(678): unsure at all n locations
accggnccggaggtccacgctcgacccaaccatacaacgggtagtatgaacgacgtaagggattaagtacggaactaaaccaaacatggggacaatgggatataagcggctcaaagcggccttagcaattcctgaccagactcctgccatgataatttccactcacatgaagcaattactcgatgatggatccttctcagataattcactggctgacaatatcaccgatgatcccgctttgcgaggatttattagacattgggatgcaattgaggatttggtgcaccatgttttgaatacctgccatctataacaaaatggcaatgaaggacaaatactatttacacatccactttgcaccccaaaagcgaacaaagaacagttgatgcaactaatgtttgaaacattcaatatatcacgattttatgcctcacaacacgcagtgttatcactctatgctgtgggacgtatctcaggctgcactggtgatattggacatggaaaaatagtggaaagaatcatgtacttaggctgctatattcggtaacataggttcctaggattaatttatcagcagtttcacagttccaccatgccagatattgcaccggtaattgagggtgctgttcaccacatcgcctcgagaagatttgagtttggaagtactgatctaactaa

SEQ ID NO: 8821 - DNA, 484 bp, Glycine max
accggcccggaattccaggctcgaccgacgcgtgcggaagaccacagacaggggagaaaggatagggtttacggttggcaaaggaaggaagggatggaagcagctgtggtggacgtcagctctaatcttctcaaagcggactctgcgattcctgacccgactcccgccatgatgatgcccactctcatgaagcagttgctcgatgatggatcagtcactgatagttcactggctgacaatgtcaccgttgatcccgtcgtgcgaggatttattagagattgggatgccattgaagatttgttgcaccatgttttgtatactggcctcggatgggaaattggcaatgaaggacaaatactatttactgatccactttgtacccctaaggtttctcaaacttgtctgatttcccttttttgtttaatggaattgccagtaatagcttaatattcgttttccacttttccaggcgaacaaagaacag

SEQ ID NO: 8822 - DNA, 354 bp, Glycine max
aattgggcgaaaagagaagagagattgagttgaaggggttagggtttaggaagggatggaagcggcagtggtggacgtcggctctaagctcctcaaagcgggctttgcaattcctgaccagactcctgccatggcccgcacttggagaggttttatctccttcaatgcataattctaagtttctaacccacttagctattctcaagtattactttggacttcacaaccgcacaatcatatcaccactttagtacctacctatacctaactatctatctctgtcagaatccctaattgaccttctttccattggactcagataattcccactcagatgaagcaattactcgatga

SEQ ID NO: 8823 - DNA, 457 bp, Glycine max
tgagttagtaattggccatttaccattttgtccggtgagcgttgctgaagaaaacgttgggttgaggcagagtgttattcttccctaaccttcgtctgaaaaccctaaaacattgaatcttaagaatggacctgtcatggttgagtgccatcctggtgggggctggttaccttgctttgggttacttcattggttctcagtatccccctcgtttcctcttctcacataaattatcgactaaacataaagaagatgcttcacttctcaatgacagcgacaataagaagaggaatactaagtccaaactcaaagaccccctggagattgaacaactcgctgaaatcctcgatgattttaagatgatactcgttgtcaggaatgatcttaaaatgggtaaagggaagattgctgctcaatgcagtcatgcaacgttaagtctctataaaaagattcttcg

SEQ ID NO: 8824 - DNA, 231 bp, Glycine max
caaaacgtgtacgcgagactgaaaactttggggatatttgtttgatgtttgagcataaaattttcgaccatttattatatgaagttgtcaatgaagttttagaactttattattgagaattttgtcatcttgatgtgtaaagtatcaatatatagatgtaggatattacgtgatgattttgcaaatgaactcttctgtttgctacatgatacataaaactaacttcaagcc

SEQ ID NO: 8825 - DNA, 451 bp, Glycine max
ctttttcctgcctcgtctagggttgttatctcctctctcgtttggcagctattctttccggtggttccatagttccgggtgacgcctttccttagttcctctcattcgcagttgtagggacagctgtgcaaggtggatatggaatgcgtggctcagggaattatagagacacagcatgttgaggccttggagattcttcttcaaggactatgtggcgttcagagagaacgattgaggatccatgaaatatgcctcacgagtggtcatcatctaagtactgtgccctgagaggttcgactgttgagtgacctatagcaagctgaaccttcgtggactgttaaacatgtatgtcgtgcaatgaggggagcatgcgcaaagcaaatctctgatctggataggtcaatggtggaaagcagatctagcaggaatgcactgcgcatgctttatacac

SEQ ID NO: 8826 - DNA, 346 bp, Glycine max
gctggtaagcgttcgcgtccgctcgtcacgttccccctcacttccctctcgcgttcgcccttttactgaccataggggttatggaatgtggggtccagggaattttagagactcagcatgttgaggccctggagattcttcttcaaaggcctatgtggggttcagagagaacgattgacgatccatgaaatttgcctcaagagtggtccacatctgggcactgtagcctcagaggttcgactcttgtgtgacctagagcaagctgaaccttcctggactgttaaacatgtatgtggtgcaatgaggggagcaggtgcaaagcaaatttctgttctcggtaggtcaa

SEQ ID NO: 8827 - DNA, 1114 bp, Glycine max
ggtgagcagcggcgatgttattgcgattgataaggcgtccgggaagattacgaagctcggacgatcgttttcgcggtcgagggactttgacgctatggggccgaggtgaagttcgtgcagtgtcccgatggggagttgcagaagaggaaggaggtcgtgcattgcgttacgcttcatgagattgatgttattaatagcagaacacagggatttctggctcttttcacaggggatacgggtgaaattcgtgctgaggtcagagagcacattgacaccaaagtggcagagtggagagaagaaggaaaggcagagattgtgcctggtgttcttttcattgatgaggtgcacatgcttgacatagagtgcttttcttgccttaatcgggctctggagaatgagatggctcccagattaggttgtggctaccaccagaggcatcacaactatcaggggaacaaattacaaatccccacatgggattcccattgatctgcttgaccgacttctcatcatctctacccaaccttacacagaggatgaaattcgcaagattctggatatcagatgccaagaggaagacgtagacatgagtgaaggtgcaaagtgtttgttaaccaaaataggtgtagaaacatctttgagatatgctattcatctaatcacagcagctgcattggcatgccaaaagcgaaaggggaagacagtggagttggatgatataaatcgggtttacaatctgtttttggatgtcaaaagatcaacacagtacctaatggagtaccaaagtcagtacatgttcaatgaaacaggagaagctgatgaagatgaaaccaatgccatggtctcttagatttacaaacatctgttagagagttcgtaatttcctggttagtctttctataagttgcagcaatttgttccatgatctggttggtcaatgcacttcaattgtgtttgatattgatccccaggactttcccgcggttgaactgtgcacgactgtgcaacttatatactatgaacatggcaagctgtacccaatttatgctattactgagcatttcctccctcgtttttttttgttgtaacatggatgcacaatcatcaatagaga

SEQ ID NO: 8828 - DNA, 289 bp, Glycine max
tcaagacgtcatgcatctcgtcatggatcagatgaaggacgacacgtatgacacaagagagaccaccgcacagaaggagatcctgaacatggggaatttggtgatgatcatgtggatagatggtagccatgttattctatttgaactcctagtattaccttctgctttgctcaacatgtattatttttcaaaagaaaatattatgatatacaacttttaagagaactcccttgtattccaaggttttgcactgaagaatttgctactagaatgaaaggttaagttctca

SEQ ID NO: 8829 - DNA, 612 bp, Glycine max
gacccaacaacttaatttattttgtaacgccaaacgtccatccaaaattgcgttcctaaatcgccgctaccgaacacagccgtagacttttaattcattccgctgcgtttctttctctgcacttcaaagttcaaaccctagcgaagcatccactgtcgccgtcgcacactcgcacgccgctcacaggtttatgggctacgctgatgtcctgaatttgttgttggccgtggtggtttggtgcactgcttacgttactgttgtagttctcgcttcctttcgagccgtttgcactttctgaaaccttgcaatttcattgataacatgggttatgcacagcttgtcataggtcctgctggtagtggcaagtccacgtattgctcaagtttgtatgaacactgtgttgctgcacggcgatcgatacatgttgtgaatcttgaccctgctgctgaaagttttgactatcctgttgcgatggatataagggaactcatttccctagatgatgttatggaggaacttggattgggtcctaatggtggtcttgtctactgcatggaacaccttgagataacctagatgattggctcactgaggaactggacaattatttag

SEQ ID NO: 8830 - DNA, 481 bp, Glycine max
cgaagaataccgcacaaagcttaggactttttttttggtctctggagttacaccacagccacggaggcacccaggagaggctttaatgaatggcggttctgcatctagtaacttaagggcagctctctcccattgcgtacaacaagtgcgaagttatgattatcatcactatctttgccttctcgagctgcctccgtctatgcggaaggctgcatttgcactccgtgccttgaatgttgaaacagcgagggctatggatgttgcctcagatcccaggatcggccttatgcgccttgtttggtggcaggaagccatagacaaaatgttcgccaataaactgattgaacacccaacagcacaggccctggcatctgtgatagctgagaccaaactcagcaagatatggttgaaacgatctgttgatgctcggatcaatgatgcaagaagagaggttactgacatgcccaaaactattggagag

SEQ ID NO: 8831 - DNA, 623 bp, Glycine max
attttaattagtttttacgtctctcctctttcagattttgagtctaagaacctgattattgaggtgataaataaatctgttaaattgcataagattacccgtcatctagtgaagcattgctctttattttcatggttttcgtctctcatctccgttgccagacagaggcttaatggaaatgaaaataaacttttcttgaagcatgtgttggtagcattgaaggctgccaatgatgttatttcatcaggaggcatctccaagtggttgcaaaatcatggccttgagcagcttatggagctttcatccaatctatttaatttcttattccaggatgcaacattgtcaaatgaaactgtagtactagttaatccttttctacgaatgatagcatcagtgttgaaattatctcaaaaaaggaaaatatatcagccacattttaccctatcaattgagggcttgtatcagatgtaccaggctggcagtgtgtgtaatcaagccataaaaagcataaaccatagcttgcgcttgaagcatacttatgaatgcacctcctgtttccattttcatgatgaatcaggaaaggctacaaagctttcttatccgggcaactacaactgctttac

SEQ ID NO: 8832 - DNA, 809 bp, Glycine max
ggaggaagaaacgggagcttttagtggtagtaatgaccaagtgacgctttcgccccttattcaatgctttaccaaactccctatcctcaaccctttcaatttcatcatcctttgccttcttccttctcccctctccttgcagttccaaccacaccacctcctctctatctccctttccctcaggccgaaaaagaaatggagtgcgtggaggcagcgttgaagagcaattataggaaagaaatgaccttaaaactgagcccacaaaccttcacggaagaggttagtgtccaaaacggcacaacctgcgacgactttttcgttaacgacctccttgacttctctcacgtcgaagaagaacccgaacaacaagaagacactccttgtgtctcccttcagcatgaaaacccaagccacgagccctgtactttcaaagacgattatgcctctgtgcccactagcgagcttagcgtcttggcggatgacttggcggacttggagtggctgtctcatttcgtggaggattccttctcggaattctctgcggccttccccaccgtaacggagaacccaacagcatgccttaaagaggcagagcctgaaccggaaatcccggttttctctttcaaaaccccggttcagaccaaagcaagaagcaagcgaaccagaaacggtcttcgtgtttggccattcggttcaccttccttcaccgatttttcctcaagctccaccacctcttcctcttcctcttcttcaccctcaagccccttgctaatttacacccaaagcctcgaccacttgtgctccgagcc

SEQ ID NO: 8833 - DNA, 1023 bp, Glycine max
agcggccccaatattttgaaagcaaatcccaatcaatccgggcagcgcagtgtcagtgacttattaaaatcgggaaggccaagagaagaaagatcaaagagagagaatggtttcgtatgtgaacatcttgctgtacggcgtgggagggttggtggtggcggggatggcattgctggtggcgtttcaggagaagctggtctacgttcctgtcttgcctggtctcaccaagtcctacgccatcaacccctcccgcctcagactcacctacgaggacgtctggctccaatccgacgatggtgttcgccttcacgcttggttcatcaagctcttccctaattgccgaggtccaaccattttgttttttcaagaaaatgctggaaatattgctcatcgtcttgaaatggttcgaataatgttgcagcagttacattgcaatgttttcatgctttcttaccgaggttatggagcaagtgacggctatccttctcagcatggaataactaaggatgctccggctgcattggatcatctttcccaaaggcctgatattgacacatctagaatagttgtgtttggacgatcacttgggggtgcagttggagctgtactaacaaaaattaaccctgacaaggttgctgcactgatacttgaaagcgctcgcacgtctatattggatatggctggagttttgttacctttgttgaagtggtttattggaggaagctcttcaaatggtcctaaagtactcaattttcttgtacgttctccgtggagtactattgatgttgttggccagatcaaacaacctatcctttttctctctggattgcaagatgagatggtccccccatcacatatgcaaatgctatatgctaaggcagctgctcgtaataatcagtgtctctttgtggattttcctactggcatgcatatggatacttggctggctggtggtgatcagtactggagaacaattcagcagtttcttgagcagcatgccccagagcaaaaagaagacagatc

SEQ ID NO: 8834 - DNA, 463 bp, Glycine max
gattccgattggctgggtgtttcccgagaaagagaaagaaaaagcggccccacattttttgaaactcaaatcccaatcaatcaatctcttctgtgaactgtgatgcatgcgagttgaaattgaatcgaaggcaaagcgaagaagatcaaagagagagaatggtttcgtatgtgaacatcttgctgtacggcgtgggagggttggtggtggcggggatggcattgctggtggcgtttcaggagaagctggtctacgttccggtgttgcctggcatcaccaagtcctacgccattaacccctctcgcctcagactcatctacgaagacgtctggctccaatcctccgatggcgttcgccttcacgcttggttcatcaagctcttccctaattgccgaggtccgaccattttgttttttcacgaaaatgctggaaatattgctcaacgtccaaaaatggtccgaat

SEQ ID NO: 8835 - DNA, 347 bp, Glycine max
gggcatgttactattctttcttcttccactactctactcattgatcgaaattcgaatgatcgctttctctgatctaaactaactgtgactgaaccggaaaatcaaccacccccaccatcattttcattctcattctcctctctctgttttttctatttcctttctttcttatcgctccccatttacttgttttttcatttttgcagggtttcttttgctcatcaccaccttcttcatattccctctccaaccatggacgtgggatcgtggagttcttctccctccaagatcaagtcgcgattcaccttccaagatcgcctcttccgcagaaagaattctcaggaaaa

SEQ ID NO: 8836 - DNA, 762 bp, Glycine max
  unsure (1)..(762): unsure at all n locations
ggggaaagggaaaacacattcttgggaaggcattaatgggaaaagaaagcctgtgttgttttaatggatttccggaccaatggcttaaccttggtttcccccagggccggcaccagaaaattttggccggtttttattttggaggttttcattccaaatttactttcccaaaattcgatgaaaggatcttcacttgatcaaaaaagtctgaacctgttgcatactctgttagcaaccctacagcaaaaccaaacattgcccatcttccattgctaatctcatttttcccgatgaaaccaaagaaaggaccctgatctgcttgttcaagcttcttctgtttgaagtattcctgcaactccttagccttttgcctctgaaactccaacgtaatgacgttcttatcatctccaacaacagtagctggcttctgtgggggtgaaggggatggtggaggctgagaaggaagtgttggcttctgaagctgaggggcacttgatgatgatgatgatggttctcttattggaggtgccactggccttcttataggcccttcagcttgagaattccttatagtgacactgtgaggcttggaagaagaaaacctcaaagaataggatgaagttgataaagtgcaagatggggaagaggaacgtgttgggattttgatgcatgggattgaacacgccatccacattttttttcttctttttaagattgttttttctttttctcntgatgctaactaacggacgcgtgggcgac

SEQ ID NO: 8837 - DNA, 363 bp, Glycine max
atgcgcatgaaatttttcaatctcgagggagtccagcataatgggaaaggaaaatcacattcttgagatgtcatcaatgtgaagagaaagcttgtatgatataaatgaattacagaacaaatgactaaacattgtttacaccaaggacagcaacaagaaaatattgacagtatcttatattgatgtattcattccaagtctactatcccaaaattcgatagaaggatcttcacttgatcaacaaagtctgaacctgttgcatactctgttagcaaccctacagcaaaaccaaacattgcccatctgtagaaatgaaattactgattagtaagtcaaaatacagcagaacttgcaactgataaa

SEQ ID NO: 8838 - DNA, 551 bp, Glycine max
tgatcccggagcatactctgttagcaatccaacagcaaaaccaaacattgcccatcttccattgctaatctcatttttgccaatgaatccaaagaaaggaccctgatttgcatcttcaagcttttctgtttgaaatactcctgaagctccttagccttctgcctctgaaactctaatgtaatgacattattatcatccccagcaacaggagaagccttctggggcggaacctgagaaggaggtgaaggcttcagtggctgagggacactacttgatggttctctcacaggaggagccactggtcttctcagaggcccttcagtctgagagttccttatagaaacagcagcataaggcttggaagaagaaaatctaaatgatgaagttgatgaagatgtgcatgatggagaggaggaacaagctgggattttgatgcatgggaatgaagatgccacagacattttttttgttggattggtgatacagatactcaatcctttagattttatttttgttagtttttgaattttttttatgcaattaactttttc

SEQ ID NO: 8839 - DNA, 413 bp, Glycine max
aatgtattctactctcatatcttaaccttttgtctttctccactctcatattttcttctcttctcttcaacatgaccggtgttgctgatgaagcccccgttaccctcgacacgctgaagcaattaatggctcagttcgccaaagagagagactgggaccgttttcacagcccaagaaaccttcttttggctctggtgggtgaagtaggagaattgtctgagatatttcagtggaaaggtgaggttccaaagggtcttccagattggaaagaggaggaaaaggttcatcttggggaagagctttctgatgtgttgctttaccttgtcaggctctctgacatttgtggcgttgatcttggtgaagctgctttacgaaaggttcaactcaatgccatcaaatatcctgcaaaagtt

SEQ ID NO: 8840 - DNA, 443 bp, Glycine max
aaagaaataaagttgaatattgagaataccgtttcttccaacttccacggtccaataaaaaatttgattcagccatttttgttccagcgagtctcctttcttatttcttcggttcctctcttcttctcttttcccccaaaacacaagagagagaagaaagacgaatggagggtgagggtgcagcagtgtggcaaggtgcggttttaggtggaataatcttctggcttgtttctgcttcataccttaacgctactcgcaaacttaggtctttcttacaaccttgggttactcatcacgttgacactcaaacccctattatcctcaagatccagagttacgggtttgggttcctggatgcacttttctctgggttgtcttgcgttgtttctgtgcccttttacactgcttttctccctctgctattctggagtggtcatggcaaa

SEQ ID NO: 8841 - DNA, 982 bp, Glycine max
gacacatgacaagacaacaaacccaacacgatcatcatcgttcacgccaagtaaacgatcctctcttctccacctcaccctttctctctcttctctctctttttctctctgttacttcacaataccaacagcacaacctggttccgggtcgcactacttgccccggatcaggacccttctcatgcaaccaccgattcaagtgtttttcgcctttcctaaacaacaactataggcaactaaagtcgaccctttggctagataatcacaccaacatcaaaaaaatcgttttttgctttgtgggtattggtgttttttttttagttgtgacaaaaaaaaaacatggtgggcatattttcgagattctctgttggaagaaatgtccaccgacgaacgcaaagtgccctggatgagagggaagtgaggcccccaaactcagaggctgctgctgcagttgcaagtgctgcaactgccacttctcatggaattgaagtggctgtggagtttaagccagttgaacatccgattgaaccacttgacaatgataggcccattcagtgcccgttgccagaaccatctattcttaacgatggaagaatatggaaagaacgagtatctgctactgtggggagaagaggggacctgccagtgatgaaggaagggggaacacttgaatctgaagatgctggagctagaccacgaacatcccggtctaaccgaatgatcttaccatctgttagtgctccggagcataatcttttaaaacttcttgacgagtgtaatgcttcaggcatctaaaatggtattattttgaatgtggtattttgttgtcaacttatctgtgatacccttcatctctttttgctgtcctttgctgtttctatatattatgccgctcaaacatgtgtatgtatattcaaatgtataatcataaaagtcaaatgtggctcattttcactagctgctttatgaaggctctagtaat

SEQ ID NO: 8842 - DNA, 576 bp, Glycine max
ctcgagccggatttttaagtgacgggaacaactgaatagagaatagccagatccagacagacactgccagtgcgagaagcctatcagcaaacagagtcttcttttctttttcttttttctctacacacagtgaaggaaggaagagagtatcatccatggcggccaccagagcagtaaccattgccagcaactccacatgctctctgcttgcaaagaaaacctttgtgggtggcactgctctttccctcaacaacctcaaattttgtcgtactaggaggtcttacacctgcagagccatctacaatcccctggttgtcgtcaaggaagaaggccaacccgaaacctttgattatagagttttctttgttgacaaatctggcaagaaggtttctccctggcatgatattcccttgcggttaggtgatgatatctttaacttcattgtcgagattcctaaagaatccagtgcaaagatggaggttgccactgatgagtctttcactcccataaaacaggatacaaaaaaggggaagctccgatattatccctataatatacactggaactatggcttac

SEQ ID NO: 8843 - DNA, 359 bp, Glycine max
cggctcgagctgccacaaagtgcgagaagcctatcagcaaacagagtctcttcttgacacacagggaaggcagagagtatcatccatggcggccaccagagcaataactatagccagcaactccacatgctctctgcttgcaaagaaaccctttgtgggtggcactgctctttccctcaacaacctcaatttttgtcgtactaggaggtcttacacctgtagagccatctacaatccccaggttgtcgtcaaagaagaaggccaacccgaaaccctcgattatagagttttctttgttgacaaatctggcaagaaggtaccctttttgttttacttttattgggccagttttgtttttc

SEQ ID NO: 8844 - DNA, 349 bp, Glycine max
  unsure (1)..(349): unsure at all n locations
cacataaggggttgtgtgtaattctgtatttatatgcaatagcgatgtaaaaaaagaggtgtatgctgtttttgtaggaagggaatctgtatagtggaaatgagtctgaggcacctgagttgacttttgtcatttgggttacagggagttaagtagaggtgattattccaaatatgccccaacaacacttccctttagattttttttttttttttggtttctgtgatattcatagtccctttagatgttttgtttcttcaacaggacaatgttttaataggttgaacaaatttcttaccccctttttggggcatagtatatgtgtgatttgtgtgtaaaaaaaanaaaa

SEQ ID NO: 8845 - DNA, 482 bp, Glycine max
  unsure (1)..(482): unsure at all n locations
cgggaatcataatcccgttgtaattccacaaaatgctctacaaccacacttcctcgatgtcattgccttccccattgtacctgaatactacgtcgtttcgcctcacgcgccaatctccttttccttttccccgccggcgcttcaatccaccggctttccgatcagtttcgccgttgagttccagcccctctgcatcactcttcgatctcagagggggcaaaggaatgagtggattccatgacgttgaactgaaggtgcgcgactatgagttggatcagtacggtgtggttaacaatgcagtttatgctagttattgccagcacggtcgtcatgaactcttgcaaaacattggtattaattgcgatgctgtggctcgcagtggtgatgcattggcattgtctgaactatcgctcanattccttgcacctctaagaagtggagacanatttgttgtaagagttaggatttctggctcttcagct

SEQ ID NO: 8846 - DNA, 552 bp, Glycine max
aggaggatggagaaataactagtggatcttcttcaaaatctgccccatctagcgatgaagattagcatgaagaggaaagagagtcaaaatgagatttgttcatgattagaatgatgttgggtaatcaagcagttgaattggatgattgtcacagagaaaatattttccatgcaaggtgactttatccaagggaagttacgctctttgatcattgatactgggagttgcactaatgtgcctaatgcaaggttggtttcaaaaatgaatttggagattaagccacacccgtggccgtacaaacttcaatggcttagtgaagatggtgagatgattgtgaataggcaagttgaagtgggattttccatagggaaatatgaagattatgttttgtgtgatgtggacctatggaggcttgtcatttacttcttgggatgccttggcagcatgataggagagtcatgcatgatgggttcaccaataagttcacttttgtgcataaagattgcaaaactactcttgcaccattggctccaagaaaagatggtgaggacc

SEQ ID NO: 8847 - DNA, 426 bp, Glycine max
ccaacgcgtccgtagggtgccaaaagaacaaagaagggggtacttccattttcacatcacttccacacgtcctgtgccgggtacgactcccgctcgcatcgtcatcatcactgggaccttactctggcatcattatcatctctttggtcacgcgaccttccgcattcacttttggccctgattatataactattactctcaagtaactctcggcaaacaccatttcacatccgtcgactcacgagatcgctcatcattgaactcattgagacatgcccggtgttattatcatgtccactgctagagtagaatactgatgatacttcatgatagtggaactgtatcatgttttctcccattatttttttcttctctggcctacgctttggatattcttggatcatcaactttagtgatccgaagatg

SEQ ID NO: 8848 - DNA, 230 bp, Glycine max
cacactgagtatataaaaaataatctaagttcgattctcacataatacatccttggagaagagtgtgcacctttaagtgtgattaagtttcagatcaaagattaatcccataatcaactcaaagaaacgaaacttatgagaatactttagagtctcactggggaaccaagtcaaaaatatatattaaaagtttaccattttaaggcactaaaacctatcattaaggcctc

SEQ ID NO: 8849 - DNA, 417 bp, Glycine max
gattggcattgccagatgcacttgttctctctgctgatctctgctccttcttccactctgtttcgattttccacttccaaggataagcatccttatgagttatttttctcggctggtcaaagccattttttagttcctggtggaatagcattttcaactatggcgctctatggaaccaccttatccttcaatggaatttcttctactaccaaggagtttaatatcttaccatgctcattcaccagtagctttcggaagctacatcatgtttgtctgccttcctttactccaaacagattagttttgggcaaaagctttggaagaggagaccaactgtgtcttttacctggtcatatttcaaagttgcaaatgggaagattgagactgggagtaaaaagtgaagactctgagagcata

SEQ ID NO: 8850 - DNA, 715 bp, Glycine max
gacattacttgtttttatttttcagcattttaactttcactctcttcagagacatgatgacagcatgcaaatgcatcaaacaactactaaattgatgaagctttaggtcacattttcagtttcactctctcttcttccatggaattgtaagattttaggacaagagcttccacgtttatcagattgtgatctcaaaatggggaaatcaccaggaaaatggatcaagaccgtactatttgggaaaaagtcatccaaatcaaatatttcaaaaggaagagagaagattgtcaataaaaaagcagttgttgcttccaacgagttggaaaatggtttgtccttagatccaacccccaatgagattgctacaaaggaggaggaccatgaactggagaatgaagaatcagaaaatattttacctgacaatcaagaaagagacattattggatctgttgacccggatgcaccacctgatccagagaaaatcaggctggagcaagcagcatcaaaggcacaagctgctttcaggggttacttggcacgaagggcatttagggccctgaaaggcataataaggttgcaagcacttattcgtgggcacttggttatgaaacaagccgttgttacattatgctgcatgtatggaattgtaaagttacaagcacttgtccgtggagtaaggattagacagtctaatgaaatccatgagaagtgcaat

SEQ ID NO: 8851 - DNA, 1298 bp, Glycine max
  unsure (1)..(1298): unsure at all n locations
gagatgttcggatccttttccgatgtacggaaccgagaataaccgagatgattcggaacgaacggcgttcagaagagcagagaagaagtacaagctctactacgactacaatgcttcttccaagaacaaaaggaaaaagctacctaaacccgtggacttagcggaggtccttgacttcagatctattctagaatgctatctccaaaacgatgtgcttcctccgggtgttatcgttcttcacgacaacttcacttctccagttttttctttgcaaaatcgcccaggcttttattttattcctggggcattaagcatagagagacaatgtagtttgatcagggagagtttgactgattttccgcagccaccgaacagaacaaatcacaatgccatgtatggtcctattcaggatgtgtttgttgcggctaaagaagggaaagttttggttgaagacaactctccaattacttcatctgaaactgatactgatatagatcataaagatggtaaggaatggaagtttactactgaaaaggacgcgccgtcaagaaagtgcagatcagcttctgcttctgtgttacttcgaaagttgcgatggagcacccttggcctacaatttgattggtccaagcggaattatgatgtgtctctcccacataacaaaatccctgaagcattgtgcgagcttgccaaacaattggcaaaacctgctttgcctactggtgttgaattcagacctgaagctgcaatagtgaattacttcggcttaggggacacattgggtggccaccttgatgacatggaagcagattggagcaagcctatagttagtctaagtctgggctgcaaagctatatttcttttaggaggaaaatccagagaggatactcccctggcaatgttccttcaaagtggcgatgttgtacttatggctggagatgcaagggaatgctttcatggggtccctcggatcttcacagataaagaaaatgctgaaataggccatcttgagacacagctgacgcgtgaagatgatctttgtttcttacaatacattcaaacttctagaatcaacatcaatatcagacaagttttttgagttgtatattttattttctttcaaagtgaaattttgttttattagcacaagaaacaaaaaatgacgtatcgtttgcatttaacgtgattattgcttcattattgttttatatgacaagtgagtcccaacaaacctcaggctcacattcctnnnnnnnnnnnnnnnnnnnnnnnnnnnnnnnnnnnnnnnnnnnnnnnnn

SEQ ID NO: 8852 - DNA, 541 bp, Glycine max
ggtagtttgtagaattcaagagtaatttgtgaagccttcctccttctcaagtcttcaactagggtttcatatcaggctcatgagtgtgcccttcattcctatcaattatcaaacagcttcggtgatcatcgtaactacctctacatttgtttgtttatcatttctttgctcgtatcaatgtctaacaccagcaacaatgtcgctggggtcgacaacacgttcagaagaaaatttgatcgagaagagtatctagaacgagcacgggagcgcgagagacaggaggaggagggtcgagcgaaacctaaagccaaaggtcctcccgtgcagaggaagcccttgaaacatagagattatgaagtggaccttgaatcccgcttgggcaagactcaggttgttacggccggttgcaccgctaagtcagcaggctggatactactgctcagtttgggagtgtgtggtgaaggactctgcaaactacttggatcatattaatggaaagaaacatcaaagagctttaggcatgtctatgcgagtagaacgt

SEQ ID NO: 8853 - DNA, 823 bp, Glycine max
cccacgcgtccgcccacgcgtccgcccacgcgttcgggcgaaacgaaagagaaagagaatggagaagagggtagcaatattacaggaatggtttgaccgcgttgactcggagaaaagtggaagcataacagcggtgcagctaaagacagctcttgctgtgggcaacctggaatttccgctctcagtggttcagcaaatgatcaggatgtacgatttcgaccggaatggtactatgagctttcaagaatttgtttcactcaacaacttccttcttaaggttcaacatgcattttctgatctagagaggggtcgtggttttcttgtacctgatgatgtatttgaggctttgggaaaaattggtttcatgctggattctcctgctttttactctgtctgcgagagctttgatcaaagtaaaaatgggaggtttcggctggatgacttaatatcaatctgtatattcttacaatcagcacggaacctatttaattcatttgatacagctaaacaaggcagagttactctcgatctgaatcaatttgtctattgtactgccaattgcagaatatgattcaactatatgacgggttgagaagatgattcacaaatactgcactttgtaataccataaagtcatcttagagtaagttaaattgtgatggtgttgtataagatgaaaacatctcgggtttggatactatttgtcatctgtctgcaaaaaactgtggtttttttttttctttccagatgatgtaattttgtttataaaacgtaagttgttataaaacatcttgagttatgataacttgtgaagttgattcct

SEQ ID NO: 8854 - DNA, 539 bp, Glycine max
agacgacagaagggggaaacgaaagagaatggagaacagggtaatattacaggaatggtttgaccgcgttgactcggagaaaagtggaagcataacagcggtacagctgaaggtgagactgctcttgctgtgggcaacctggaatttccgctctcagttgttcagcaaatgatcaggtgagctgaccctcggatccatcttcttcttctctattttaacttcaatttttgttttcccttaggatgtacgatttcgacaggaatggtactatgagctttcaagaatttgttgcactcaacaacttccttcttaaggttcaacatgcattttctgatctagagagggggcgtggttttcttgtacctgatgatgtatttgaggctttgggaaaaattggtttcatgctggattctcctgctttttactctgtctgcgagagctttgatcaaagtaaaaatgggaggtttcggctggatgacttaatatcaatctgtatattcttacaatcagcacggaacctatttaattcatttgataca

SEQ ID NO: 8855 - DNA, 669 bp, Glycine max
gatgcttcacaattaatagtgctattagattcttaggaactttactccttcaattaattatttatgcatttggtacattatacatgcaagctgtaactagtaaaaaaaaattgaatttgaaggaggaggtgaaggctgaagtgtggagaaggattagggtttgtgtttatatatttagatatagaatagcagaaaatttggattgtgagggaaaaaatgggtagcgaagaggattcgattgagcaaagcgttgcgtcccgtcgcgaaagactgctagctctcagagccgctcaggagttgtcgagtgttcccgaacctgaacctaacggcaacaaggacgatgataatgaagaagatcaagaacctcaagaaatgaagttccgtaactacgttcctcacgacaaaaacctccaggaagggaagcttgcccccgcggtgctcccaaagttcgaagaccctgtggatgatgtgcctccacccgagcctgaagctaaggaggatccgttcttgaatattgctccgaagaaacctaattgggacctgcgaagagacgtccagaagaagcttgataagctcgagaagcgaactcagaaggctctttatcaactcatggtggaacaagagaagcaaaatcaattaactgaaggagatgatacaaacggcacagta

SEQ ID NO: 8856 - DNA, 638 bp, Glycine max
ggccgtcgacgttctcaccgccatggccgtccccgtcgagctctctgaccgcgactccctcgtgaagtccgctagcacatccctcaacagcaaggtcgtcagccaatactccacgctcctcgctcccctcgccgtcgacgccgttctctccgtcgtggatgcccccaagcccgacatggtcgatctccgcgatgtcaagatcgtgaagaagctcggcggcaccgtcgacgacaccgagctcgtgaaaggtctcgtctttgacaagaaggtcagccacgccgccgggggacccacccgcatggagaacgccaagatcgccgtcattcaattccagatttcgccgcccaaaaccgacatcgaacagagcattgtggtgagtgattactctcagatggataggattctaaaagaagagcgtagttatattctcagcatgattaagaagatcaaggccactggttgtaatgtgttgttgattcagaagagtattttgagggatgcggttactgatttgtccttgcattaccttgcaaaagctaagattttggtcattaacgatgtggagagggatgagattgagttcattaccaagacactgaattgtttgcccattgctaacattgagcattttcgcactg

SEQ ID NO: 8857 - DNA, 388 bp, Glycine max
  unsure (1)..(388): unsure at all n locations
ggtgccttattgaatagtattaagaatatgttgtagagcattgcaatgatgatagctatctctgcaacttttatgattttcttcttgtgttcgccatcagtggctatactaatcaccaggttgccgctaccctcaccagtgacaggccctgagtccgtagcattcgaccggaacggtggagggccatatgtcggtgtttctgatggaagaattctcaaatatgctggtccaaccgagggcttcaaggaatatgctttcacttcaccaaacagaaacaagacaatctgtgatgggcttgctgatttctcagaactccaggcagcatgtgggaggccattaggattgcgttttcaacatcaaacantcgaactatacgtagctgatgctt

SEQ ID NO: 8858 - DNA, 413 bp, Glycine max
ctgtgcggggaagaccgcaacgagacctaggaagcacgacgacaacaacactcgtcctcacaccgactgccaccgcgtccaaagatgattgatgatcaagatctgggtttctttgccaattttcttggcgtcttcatctttgtactggtcatagcgtatcattttgtcatggctgacccaaagttcgaaggaaactaggaatgtagactgaggtgctttgcaaatggaaatgaatttgatgcaatcaagaactgtagtttgggaatgtgaacgttaagcttactaaaactttcataaacatcaaaggagcataacatttcaattttcgctatacttatgcgtgctcccttaagttatgttttgcagttaaggaactttcgttgatagactaatgaaaacactgaatttgcttt

SEQ ID NO: 8859 - DNA, 407 bp, Glycine max
ggactgtgggggaacccgcagcgagacctaggaagcacgacaacaacactcatcagagggaaaagtcgcgcccactgccaccgcgtccaaagatgatcgatgatcaagatctgggtttctttgccaattttcttggcgtcttcatctttgtactagtgatcgcgtatcattttgtcatggctgacccaaagttcgaaggaaactagtaatgcttttaagtttaagatgtaattttgtgttgtagacttgggaatgtgaacgttagcttactaaaacttccataaacatcaaaggagcataacatttcaatttttgctatacttatgcgtgctcccctaagttattttttgctggtaaggagtgtttgttggttaactaatgaaaatactggattttcttttaaaaaa

SEQ ID NO: 8860 - DNA, 516 bp, Glycine max
gttgatgttaaggaaaggcgcgaatcccatgattttgttcaaaccttcatcagctatgcgattgtctccttgtgcgaacaccacttcaatgagttccggatcgggttcacttttgtggttccggaagggtcttcggatccatgacaaccccgctctcgaagtcgcttcgcgtggagcctctcatctctaccctgtctttgtcatcgacccgcatttcatggaacccgacccgaattcttccgcacccggatcctctcgcgcgggtctgaaccgcatcaagttcttgctggagtgcctcgttgaccttgacctcaacctcaagaaccttggctcaagacttttgattctcaagggtgaccctgctgaagttgtcattcgatgcttgaaggagttgcatgttaaaaagctatgctttgagtacgacactgaaccgtattatcaggctctggatgttaaagttaagaactttgcacttgctgctggaattgaggttttctctcctgtaagtcatacact

SEQ ID NO: 8861 - DNA, 1855 bp, Glycine max
tattaataaaacctagagttatggcaacacgaacccccatcaattttgagggcgaatatgaaaaagaaaaaaaagattctaaagaaatataactaatattctttagaataatcaaaaagaatattaaattcaaataaattttagatagaaaaaagacttaaaaaggaggatttgaaatgcgagatctaaaaacatatctttccgtggcaccagtagtaagtactctatggttcggggctttggcgggtctcttgatagagatcaatcgtttttttccagatgcattgatattcccttttttttcattctagttattgacacggaaaggggtgaagaagattatagatccaattaagtattaaatatatgtaattaatatgtaattaatctcctcttctttatttcgtcttttatttcttcttttttttacaattgtaatagaataagttaggaaagagaaagaataagggttaatttggcctaattgaaattcggagtgaaactcgggatctcgtccaggcttccatggaattgaattaataattcaattccatttctattaataaaagagtgaaagcagaaatttaaatggaatgtatagggtgggggcaacaatatcataaaaaatacttagttaaaaaaacgaaaatactgtattgcaattgtattgcaattcgaaacgaaatatagttcgagatcattgtattatttttgtactatattaatcttaatcttaattggaacgaaatctttcaaaattggatttctaattcttaatttatattttcgttttttcgttcttttctttttcttagattataatccgaaaacaaaagagttaagtgaattaaaaacccaagggaggttcatggccaaaggtaaagatatccgagtaattgttattttggaatgtaccggttgtgataaaaagagtgttaataaggaatcaacgggtatttctagatatataactaaaaagaatcgacagaatacgcctagtcgattggaattgagaaaattttgtccccgttgttgcaaacatacaattcacgcagaaataaagaaatagatcaaattgatcgcttgtgtgttacccttcgaaccaaagaacttaacatgtaaaatgatctatttttcttatctatatagatagatctatctgtattctatcatttacagttgaatatatacaaatatcagtatataacaacatatattaaaaaaataacaacatatattaaaaaagtcagaataaaaaaacaaatcctttatagtatttcttgtaataaatgtgatttttggaatagggataaataaaccatggaaaaatctaagcgactctttatgaaatccaagcgatcttttcgtaggcgtttgcccccgatccaatcgggggaccgaattgattataaaaacatgggtttaattagtcgatttattagtgaacaaggaaaaatattatccagacgcgtaaatagattgaccttaaaacaacaacgattaataacaattgctataaaacaagctcgtattttatctttgttaccttttcttaataatgaaaaacaatttgaaaaaagcgagtcaaccgctagaactactactttaagaaaaaaaaaatatagaaattaagaattctaaatccaattttgaattgagatttgaatgaaatattgattgatgttttgtttgaaaattacgacaattcaatttgggtttttatgtggtaagaaaaaagataataggtaacaaagaatcatttttttttattcagcgtggttgtttattttgatagctttatcatatgataaaaattcatatgataaagctatcaaaataaacaaatttatattct

SEQ ID NO: 8862 - DNA, 814 bp, Glycine max
  unsure (1)..(814): unsure at all n locations
accgggtaggaacngccgggacgacccattcgttccggttgcaaaagaacaacaaagggggaaatcaaaagagttaagtgaattaaaaacccaagggaggttcatggccaaaggtggagatatccgagtaattgttattttggaatgtaccggttgtgataaaaagagtgttaataaggaatcaacgggtatttctagatatataactaaaaagaatcgacagaatacgcctagtcgattggaattgagaaaattttgtccccgttgttgcaaacatacaattcacgcagaaataaagaaatagatcaaattgatcgcttgtgtgttacccttcgaaccaaagaacttaacatgtaaaatgatctatttttcttatctatatagatagatctatctgtattctatcatttacagttgaatatatacaaatatcagtatatatcaacatatattaaaaaaatagcaacatatattaaaaaagtcagaataaaaaaacaaatcctttatagtatatcttgtaataaatgtgatttttggaatagggataaataaaccatggaaaaatctaagcgactctttatgaaatccaagcgatcttttcgtaggcgtttgcccccgatccaatcgggggaccgaattgattataaaaacatgggtttaattagtcgatttatgtagtgagcaaggattatatgtatccagaccgcgtaaatagactgtcagtcagctagtgtttgatatatgctcattcaaagcaaacaagcatcgtatttaatacatcacaatttgtatataacatgttgcaagtttcaac

SEQ ID NO: 8863 - DNA, 408 bp, Glycine max
ggttgttcgctttgcaattttttcttctagaacaccgcctcagccacactacatacgccccccgacgcacagaaggcgaagaagctaaacgacgacgcagcgtgctggaagacgctatgtacggcgtgtcgtccacgacggagtactcggacggggcgctgatgacgccggagaacatattcccggcggagtaccacagcttcctaatgtcctccgccgcccggattccgatgttcggatccgacgagcttctctccgccgtcaccgccggcaacgaaaccgaaccctaccctggcgccaccatcgcaccggaaattcagcgccaaaacgacgcctcctctctcatcaaagccaaaatcgcctctcaccctcactaccctcgccttctccaagcctacatcgattgcc

SEQ ID NO: 8864 - DNA, 444 bp, Glycine max
aaagttgtgaaaagtttttcgaacacccaaaatggacttggatggatgcatgaattgacaaaagagtatgttttggaaacattgggttgacttgagtaggaaaaatgaatcctgagccctagtgtcacatgaccataaaaacttgatgcttgagtgtccacatgggtgcatgcatgactgattttgcataaaatttctgaatcatcattgttgtgtgtgtatcatggaaataatatgggacattcctttatccctgaaccgctggccaaaccaacaccctgacgtacatcgtgtctggccattctgcaagccttttgtgccaagacctcaaaccaccataaaccttgacaaaggatgagaatttccatccttgtccttggaagaaggaaccatgaggtctcccaaggaaaaaagagtcattcaccattaacctaacacgcttcc

SEQ ID NO: 8865 - DNA, 1146 bp, Glycine max
cttccatatgagtattatccagtgatgcatgttcattcttcactgtaacaccctttcctttcatttattgcctggggagtgtgagcaaacgaggcagaaatgaaagtcaccaacaacacaacacaaaagcaaccaattttctttttctctctctttccctcattttctatatcagtttcctcaccttctcaatttttgaacgagacacagtgaggaaactgaacccttttgtttattcagctaaaaaatcacaccatttttttttctttttatttcggggatagtgatttttatcacagaatctaagggttttgtaggcagaacttcaggtttagcaatgaagaaggttcccaagaccagctgcaagtctgcatcacacaggctctttaaggacaaggcgaagaaccgcgtggatgacttgcagctgatgttcctggatctgcagtttgctaggaaggagagccgcacggtcgatgccgcggtgcttgaggagcaagtccatcaaatgcttcgcgagtggaaggccgagctcaatgagccctcgcctgcttcttcgctgcagcaaggtggcagtcttgggtcattctccaccgatatctgtcggattttgcagctttgtgaggaggaagatgatgcctctagtccattagctgctcctaagcctgaacctaatgatcagactctgcaggctgggggtaaggtcatgttccaagagggccaacagcaacattatttcccattggttgatgagtgcaaacactccacctcaagtgttcagagtgtggcacctaacaacccagatggacatgctttagaatatcatcagtttgatttacatcaggactatgatcatggcttgtatactggttttaatggtacacgttattgtgaggaggatgcgattcctcatatatctagctacctaccaagtatctgccctcctccttctgctttcttaggcccaaaatgtgcactttgggactgtccaaggcctgcacaagggttggactggtgtcaagattattgcagtagctttcatgctgccctagctctgaatgaagggccaccaggcatggccccagttctacgacctgggggcattgggttgaagataatttactttttgctgctcttagtgcaaaggca

SEQ ID NO: 8866 - DNA, 508 bp, Glycine max
ctgtaacaccctttccttttcatttattgcctcaggagtgtgagcaaacgaggcagagaaaggcaccgcaacacaaaagcaaccaattcgctctctctctctgatttcctattcctttatatcagtttcctcaccttctcactttttgaacgagacacagtgaggaaactgaacccttttgtttgttttttcagctgaaaattcagaccaatatatattttgagtattttttttcctttgatttcgtggaaagttattatcacagaatctgagggttttgtagacagaacttcaggtttaacaatgaagaaggttcccaagaacagctgcaagtctgcatcacacaggctctttaaggacaaggcaaagaaccgtgtggatgacttgcagctgatgttcctggatctgcagtttgctaggaaggagagccgcacggttgatgccgtggtgcttgaggagcaagtccatcaaatgcttcgcgaagtgaaggccgagctcaatgagccct

SEQ ID NO: 8867 - DNA, 684 bp, Glycine max
  unsure (1)..(684): unsure at all n locations
cggaattncccgggtcgactccacgcgtccggaagacgtacgcccacgcgttttggtgagttgtgtaattttgtttgttcatcttgtgttgttcactgttctttcccagacccacctcaaagttgaaagcagccatgggttttttcttgaaatgggtcaacttgtttgtcttttttcatttccttgctgcaacacccatcttctcagattcctcctccagctcaaatgcaatcgccaccaccaagttccttgatttagccaaggatcctcgggtttttgattggatggttggtatcaggaggaagattcatgagaatccagaactgggttatgaggaatttgagaccagtaagctgattagagctgaattggataaactgggcatctcatataaacacccagttgcagtcacgggtgttgttggcttcatagggactggacttcctccttttgttgcattaagagctgacatggatgctcttcctatgcaggaaatggtggagtgggagcacaagagtaaagtacctggaaagatgcatgcatgcggtcatgatgctcatgttgccatgcttctcggtgctgcaaagatcctcaaacggcatgaaaatgagatacgaggaactgttgttcttgtttttcaaccagcagaagaaggaggtggaggggctaagaaaattttagatg

SEQ ID NO: 8868 - DNA, 384 bp, Glycine max
ggcagaatcggaggtcaagccaaccactcaaaaacccacctgtgtgttgtcaccgttgcttcagttatcgtgtccatcgtcaccgccgcttcagctgccatgttgattgttgtcatcgcagtttgagctgagagcattgtttcgcctactcccttgcactgctgcttctttctccttcttcttcgcgtgtttggtctcctcgtgtctttgcgtctttcacaaaaccagcttctacgacctcccatcctcgaatacgtggtcgctctgcaagggcagcagcgccgcgcgagctcagaggactggaggagctcttggaagcgccgcgcgtcatcccctattagatgggatttgtttcgaaaatcttcctgagattattcaagaaaa

SEQ ID NO: 8869 - DNA, 545 bp, Glycine max
cagatgttttatttgcaacactgaaagcacgagcagttccgttttggtttgttcgtcgccgctgcgagagagtgccctagctacctctcgagcttgccacctacgcgactgaaaagtccatttgtttttttctctcccttttcgattgtgaaacagcgtcgcagggagaaagaaatggatgagggaaagcataaatcgaggaaagaaattcgtgaggtgaaagatggggattctaagaggagtcaccgcgatcgtgaccgtgatagaactggagaaaggggttggcataaaaacgatgggaggcacagggatagggagaagagggatcgtgagtcccgaagacctgagagagagaggagtactgattctggagacaggtatgatagagacagggagaagcgcaaagataaagataaggatgtggaccgagaaagaagtcgagataagaaaagggaaagggataggacagacagagtaagggagaaagaaagagagagggaaagaaaagaagataaggagaggatcagagagagggaaagggaaag

SEQ ID NO: 8870 - DNA, 296 bp, Glycine max
gccgttttggtttgttcgtcgccgctgcgagagagtgccctagctacctctcgagcttgccacctacgcgactgaaaagtccatttgtttttttctctcgcttttcgattgtgaaacagcgtcgcaaggagaaagaaatggatgagggaaagcataaatcgaggaaagaaaatcatgaggtgaaagatggggattctaagaggagtcaccgcgatcgtgaccgtgatagaactgacagagtaagagagaaagaaagagacagggaaagaaaagaggataaggagaggatcagagag

SEQ ID NO: 8871 - DNA, 607 bp, Glycine max
gaaagacaaaaaacattatcttcaactcctttgctcgtgttgtgttttggatatttgagtgagagaacagtgaatgaggagttccaattcccaatattcaatttcaaatgttcttctccatgcagcttctttgcttctacaagcacccaccaccactgtttgtacacaatattaatgaaggcatttttaagtacaagaggtttttcacaaacccttcttcttcttctcgtggcatagttcatgcagtgaaggaagattcacaatcacagcaatatgaggtagacccagataaagccagagaagcactcaaaaagcttgatgagcaaatccagtctctctccaataaaaaacaagtctccactccaaaactcagagtttcggacatgaagcttcccacagagcaagccagtcgcaatgatgagaagttagaaatttcagattcgttccttacaactttagctgctggtctggttctcttcactgtattttataatgtactattctatgctgtaattaagcctgccatcgatggttcataacatctccatatatggctcgtgtgtgtatacatagaagaagaaggttttatagcatataagaacctcgt

SEQ ID NO: 8872 - DNA, 463 bp, Glycine max
gactcaaaaacacactcttcaaattccaatccaaaccaacaataatgtctctcttccattgccatgcctttcaccaccgcatggccactctctcacccttctcacccttcaattccaaacccctctttgcttttctaccaaacccctctttcttaactcatcatcaacaacaacaacatccttatcctctcaccaaaaccacaaccactgacctcaacaacaataggcctctttcactctccacactgcccagaaagttgctctgcaaaccaccccaggggaaatatgtcagagaggactatctagtgaaaaagttgtcagctcacgaaatccacgagctggtgaagggagaaagaaaagtccctcttatcattgatttctttgcaacttggtgtggaccatgcatcttaatggcacaagaacttgaaacacttgcagttgaataccaaaacaaggcacttat

SEQ ID NO: 8873 - DNA, 1481 bp, Glycine max
gtgtattattatatttaatttggcatagactttcactcctgccttgtcttgcgtctggagggatgtaaaaacccacatggaacttgctggcctatctgtgagagaggatgctgttggtaacatatttggtcgttgggatggccttgaacctgagcttgctgcagttgcaacaggttcgcacattgatgctataccttactcgggaaaatatgatggagttgttggtgttttaggtgctattgaagccatcagagtcctgaaaaggtctggttttaaacctagaagaccattggaagtcatatcattcacatcagaagaaccaacacgctttggaataggttgcttgggaagccgcctattggctggaagtgaggatcttgcaaattctctaaagacatcaactgatattcaaaacatatctttcctagatgctgcgggatctgctgggtattcaaaaaatgaagatgacttatccagtgtatttttaaagaaaggaacatattctgcttttgtagaactgcacatagaacaaggacctattctggaagatgaaggtatatctataggcatagttactgccattgcagctccagcaagtctaacggttgaatttgaaggcaatggtggccatgcgggtgctgcccttatgcctaacagaaatgatgctggtctggctgcttctgaattagccctggctgtagagaggcatgtgttggattctggttcaattgatactgttggcactgtcggtatcctggaactgcatcctggagcaatcaacagcatccccagcaaatctcacctagaaattgacacaagagacattgatgaggaaagaagaaataaagtggttgagaaaattcatcaatcagcaattaaaataaccaaaacacgaggtgtcaagctctctgatttccgtgtcatcaatcaggatccaccagccatttctgatgaagcagtcatcaaggcagtagagactgcaacaaaagaactaaacttgacaagcaagttgatgattagtagagcctatcatgattcattgtttatggccaggttgtctccaatgggcatgattttcattccatgttacaaagggtacagccataagcctgaagagtttgccaccattcaagatatgtcaaatggtgtaaaagtattaacactcaccctagccaaattgtccagtcactaacatcttctgtagtgagttcatgtgaacttttgtaggaaaaggacatgtaatttacttctgttacagcctactgattaaatcatttcaaattttggatatacccccttcaatctatcagaatgaggggttgaaccatacaatttgaaaagtggttctataagaaccactttttacaggagtaaaatgataactgcctgtggaaggagtcacaacggtgaattttatttcatcggagtgtttaaaagccaaaggaactaatgatattgtagaatccagttgcatatacccc

SEQ ID NO: 8874 - DNA, 704 bp, Glycine max
aacaaacgaggaatcctttattgctgccgatgaggtaggtgtggctggtgatagcaacaacaatttaatacctcaaaaatggttcactctctgctcctacttcttctcctcctcactctcactgcaacctctgctcaacatgacggcccttcgatcacagccaccatggagcaattctccggttacaaaatccacgaacctcactctttccaaccctcttcactctccgttgatgctcaggctcttcagaaccagattgatgagcttgcggcgttttctgactcacctgctccatcagtaaccagggtcttgtatactgacaaggatgttttaggtcgcaggtatgtaaaaacccagatggaacttgctggcctatctgtgagagaggatgctgttggtaacatatttggtcgttgggatggccttgaacctgagcttgctgcagttgcaacaggttcgcacattgatgctataccttactctggaaaatatgatggagttattggtgttttaggtgctattgaagccatcagagtcccgaaaaggtctggttttaaaccttgaagatcattggaagtcatattattcacatcataagaaccaacacgctttggattaggtagcttgggaaggtcagaaactgcatttctatactgtatcacaataggacttctatttgtggctatttttatcaataaatccat

SEQ ID NO: 8875 - DNA, 1173 bp, Glycine max
cgcgaacaattctatccattccgtagcagagagaggataagacttaagagtgtgttttatagcttagttctgtacttgtgttgtgtgagatagccagccatgtcgatcttttctattccctcaccaacgtaccgttgttcaatttcaatttcaatttctcggcagccattgccatgttctttcacggctcaagtgagaagaagagggaaagggaaagtggtaatgagcatggaggcaggcattggagtgatgggcaccaagttgggtatgatgagctatttcgaatccgacggagaggttgttcctgtcactgtcgtgggtttcaaagaaggcaacatcgtcacccagatcaaaactgaggccaccgatggatacgacgccgtccaggttggttaccgaagggtcagagatcgcaaattgaccaaacccgaaatcggtcatctccagaaggtcggcgccattcccatgcgccatcttcaggagttccgtcttcaagccatcgatggcttcgaccttaaccagcgccttctttttgatgaaattttcaaggagggtgatcttgttgatgtctctggcaccaccattggcaagggtttccaaggtggaatcaagcgtcataacttcaaaaggggtccaatgacacatggttccaagagtcacagacaactaggatcaattggtgctggaaccacacctggtcgtgtgtacaaggggaagaagatgcctggccggatgggaggaaccaagaggaagatcagaaagcttaagattgtcaaaattgataaagatcttaatgtggtcatgatcaaaggtgctctccctggtaagccaggcaatcttctaaggataactcctgccaagattgtcggcaagaacattccaaagaattagcatatcttttctcttaacttgtctgtgtatttgttgtgccttccttttagccttttagttgcaagtttatgtatactactattgcttctttcaacccattctacattcattgagttatacacagcacattattactatgacttcagtatcatcttactcgatacaatttttgatttcccacaccgcggttatatttatcgccagaggtagggaaatcaaaatacagagaatgaagtacaagtaaaccaaaactttcaatcaattagccaaattagattttgc

SEQ ID NO: 8876 - DNA, 407 bp, Glycine max
ggagttgtgtgtatgtgagataagctgccatgtcgatcttgtccgttccgtcaccaacacagcgttgttccatttcgatttctcggctgccattgccattgccattgccgtttcaattgcaagtaagaagaagagcaaaagggggaaaagtggtaatgagcatggaggcaggtattggagtgatgggcaccaagttgggtatgatgagctatttcgaatccgacggagaggttgttcctgtcactgtcgtgggtttcaaagaaggcaacatcgtcacccagatcaaaactgaggccaccgatggatacgacgccgtccaggttggttaccgaagggtcagagaccgcaaattgaccaaacccgaaatgggtcatctccataaggtcggcgccattcccatgcgccat

SEQ ID NO: 8877 - DNA, 465 bp, Glycine max
ggaattcgaagcaaacacgaaccctagctttcgagttctctcatctcgcgcggttctctccgttctcggcgccggtgccgccgcgtctcgagactgttcgtccattgcacggagccacggagcaattccgtcgcactctaagcctgcagcttcaacacgccgtcgtacctgaagcagttccgtcggactcacgccctagtctctgcatctttgtttttcagtgatgggaaagatgcacaagaataggaaacaagctggtgggcatggaactccaagagaagaaaccgatatgcaggaacaagaaatggacataaggaagattatgaaagatgtggaaaattttagctactcacatatgtcatggaaagaacgcaaaaagattgaaaatagacatgttgtctctcttggtgggaagccccaaaagaatcagagattacctttaaagtgtggcacgaccaatgatga

SEQ ID NO: 8878 - DNA, 439 bp, Glycine max
gacgatcgttaagtctcactctcaacaccttcgaaccctagcacagccccgtgccgtcaactgtcaaccaccctccgtccaccgcacgcgcacctcgccaccaacatccagcaactcgcaccagaacagcacctcccatcgttgacgcacaaagtagcaggccgtcgcactcgcgccctcccgtccacagtcgcagtcggaccagccaccagtgatgggaaagatgtgcaagaataagaaacaagctggtgggcatggacctccaagagagcaaactgatacacaggaacaagaaatggacataaggaagattatgaaagatgttgaaaattttagctactcacatatgtcatggaaagagcgcacaaagagtgaaaatagggaatgttgtttctcttgttgggaagccccaaaagaatcagagattacctttaagtgt

SEQ ID NO: 8879 - DNA, 383 bp, Glycine max
gaatatttagaaaaaaaatatatatatataaaatcgtggttggggaggttatagtagcaagagccattggaattttttttttatacattggaagaatccatttttgttattaatagactagtaagaagaaaagaataactgaaaaatcaaatagttattcatcaaagtctcaattattcaatgaccagaattaaacgaggatatatagctcggaaacgaaggacaaaaattcgtttatttacatcaagttttcgaggagctcattcaagacttactcgaacgattactcaacagaaaataaaagctttggtttcggctcatcgggatagagatagcatatcaaaaaggaggtgcagaaaaaagaaggcggccgctctagagga

SEQ ID NO: 8880 - DNA, 804 bp, Glycine max
ggaaaattgaaatgagaagatgaccattctttttttgttttttttgccatttcccccacccattgatgggcataatatctgaattgtttaacttctatggcaacaaacaaaagatcaaaaaacaaaacagtttttgctgttccttgaaccaatgaacaagcatatcatgtaagtaatggatgcgctaaaattattgtgaagacaacaacacacaattcccaaaccagtcacaacaggctaaaattttcaactttcaaacatcaaacttaattgggtcatagaagaaggtgatttcaaagcatgtgcaagtcctatcctacttcttagaggacttccctttttttttagggcctttccccttggtggcgtccccggaagaatccccaatactactgtccttcacattaatcgcgccatgaccgaattccggagacagtatcttcgcaatctcaggaaaaccaacattgtttctgccacgcaacagtgtctgcaaattctgctcccaaatcttgtccttcttaatgccgggactcttgaaattatagagtttgatgaacttggagagaatgagagcgatttcggaacgagattggcgagggatgccgaggaaggtgcagagctcgctggaagatttgcggatcttggtgttgccagtgccggtgatttcctccaccgctttcgccacagtggacatgcttctccgaccaaacgaccccatctcaatctgattcgctacctcttgcttgcggctgctcccacccttccttctaccttatagaaatcaacaagaacattgtgttcgtc

SEQ ID NO: 8881 - DNA, 409 bp, Glycine max
cgggtcgaggcacgcgtccacccacgcgtccgaattcgagcggccgctttaagtccggaaagatagcgactcctttacctccaaaggccacatttcttgatgatccattacgagttcttcgagcaattagatttggtgctagatttgaatgtactctagatgaagatctgaaagtagctgctgcatgtgatgatgtgaaagatgctactagctgctaaaattagcagagagcgcattggaactgagagtgatctgatgatatccggaaatcaacctgtcaaagctatgacgtataattgtgatcttacactattttggattgtattcagtcttcctcctgaatttgaaccttacatttcagatgggtgttaaaggctttgcatttcttacttggatactgcatggaacc

SEQ ID NO: 8882 - DNA, 648 bp, Glycine max
tcatgaaatgggcagcatcatcatctttgttctgtttataagcgtccatttctagggcatattgctccttatttttctatgccttctcttcatagggtctcttttgttcttctgtcatgtttttccactcttcggctgtgatctttggaacctccaagaaattcttgttctcggcagcaagagctgctcgcctatcattagtgaacaagaaataagctgacatggggtgcttcggtttcaatggatccttctctttcttgttcttcttgccctctttttctgcctcttgtttgaattgcatgtactgttcgagcaactccatggcagtcttctgcttctgctcgtcttccaacaacctcattgcctcagtctcacgtttttcctttgcaatcatttgcaaataagcttctttctcggcatggtatatctcctcataaggcttcttctcttctgcagtaacagtcttccatttagaacccagcatggtagaaatttccttaaattctgcctctgagttcgctttcttgatctgcaccaagccatcaatacataaaaaccattgaatttaacttaaaccaacaaattaaagagagaaaataagaaaaatttaattatcccaaatgattttacctcattccattggtcttt

SEQ ID NO: 8883 - DNA, 368 bp, Glycine max
agccgggggccccttttttttttttatgttttttttttttttgcccatcttttctgccctctggttgaaattgcatgtactgttcaagcaattccatcgcagtcctctgcttctgctcgtcttccaacaacctcattgcctcagtttcacgtttttcctttgcaatcacctgcaaataagcttctttctccgcatggtatatcccctcataaggcttcttctcttctgcactaacagtcttccatttagcacctagcatggttgaaatttccttaaattcagcctctgggttcgctgtcttgatctcattccattggtctttcatccacaaaatgtaaggtggagaaggccgtttcttctcagagcac

SEQ ID NO: 8884 - DNA, 472 bp, Glycine max
agggtctacatagagcaagtgggaggagagacaagacaatagagagagatcaaagggcaaaatgagaaatacttgaactctcaacttcactgcccactcttgcccagaaccccataaaacatacataaggggcactgaggcaattgatgctttgccttttctattttctagtaactttgactcactaccattgtgtttctgcttgaggagatcactgtcttcaaccacagtaaccaagccaagagacacactttatcttccttcatgggaatatgagaatgaaactcactgtgccaccactcatatcaacttggtggtaggtagggcttgtgtgtggttcagaaagaagctttacttgtaaaaaaaaggagtgagaaagatggccactacagaatagagagagaaagagccacccaatactgagcagcttgtgggccattttgaagcggccgctctttaggattcaagctta

SEQ ID NO: 8885 - DNA, 426 bp, Glycine max
cgggtccgacccacgccgtcagaacggttgcaaaaaaccaacaaaagggggtaccttcctttaaaaattaaaattagaatcattatcgtttatcacactccaaccaaagcgcctttcgctcttaccaccctcgcgggtcattttcttgggaaaactcgtttccaccaagaaaatcgatttccctggaaacaaacactcgcgaatctccgatgcgactcgtttcactttaattcgatgatgatcgccactatatgccgccctgtgcgttccccgtgggaggaaccaatggatcgctgcttccgattttttccatgcctcgccgatcctggtcgaaggtcttcgttgtgcttgaagttgtgcttagtgacgattcacctgatttatgctggcgtgctcttcttgttcgatggggatttgatagaaagg

SEQ ID NO: 8886 - DNA, 483 bp, Glycine max
cggtctagaattcccgggccgacccacgcgtcagatgtttgaagtaaaagttagagatggcttcttcaagttttttatgtctgtgtttgatgtttgcttttgttgtggcttgctttgctcgtggcattcccacagaccaaccacccgtgctctacggagacacacacaagaatccatctacttcaaacattgagcatcatcaatggtcgggagacaaagttacacacccaatttcaacccatgtcaagttctcaagtttcacagagaattcagaaaggatactgacagaggtagattatgacggtccacatacacacccaaatccacctcctcatgctcagaagtttcgattgtaaacattgtcttctcaatgacaaaaaataaataaaattattatgtcacaattttaatttttcttatccttaatgtgccaaaatatttcgcatctttatgaccttttttaattaaataaaatttcttccc

SEQ ID NO: 8887 - DNA, 702 bp, Glycine max
atatgttgatttgcttatttttcatcaatctgaacttaatttttaaaaaactttatcaaatgcacaacaaaaatttgcatttacaaattaaaacctacttttaattttgaaaaatttaaaaacctaaaaccaaaaccaaaaccaaaacctaaccaattaggcaataggaacatggtttctcgtcagaaaattgagttgaccggaggagttacatgtagctgagcgcaaggcatagaaattgctcttaacgtaatgtatatcagaaacctgctgtagtgcgcgtagtaattcaaaatttgtggtaaagcaaatggcgaaagttttctgtgattttcggttccttctcttggttgccgctggcgtcttcatctatatccagatgaggcttttcgcaactcaatcagaatatgctgatcgcctagctgcagctattgaagctgaaaaccattgtacaagtcaaacgcgatcactgattgatcagattagcttgcaacaaggacgaattgtggccctagaagaagaagagcggaaacgccgagaccaagaatgtggacaaatgaagtctcttgtacaagatcttgaaagaaaagacctacagaggctgattgataaaatgcaggttccggtggctgctgttgtgatcatggcatgtaatcgtgctgattacctagagaggactattaattctgtattaaaatacca

SEQ ID NO: 8888 - DNA, 468 bp, Glycine max
ccggtcagaaattcccgactcgaccaaccactcattcggccaagccttcgaacggtgccaaaaaaacacagaaaggaattgacaaataatatatatatatataaaagtttgctattataaagtcaagaatataaagatatattataatatcaataactaaaatttagacaaatataacttcttttagatgaatttttctttaaaaaaattataaattgatcactatttcacttcacgcaccaatagaatttggagtgattttttctaataaaataaggaaataacaaaacaatatactacactacgtatatagtgatagatagcctcacacatgaagataaaagattaattccaaaagtgaaggccttgaatatgattggagcatttactttctcataaacattttacgcacacaacaaagctaataaattttagagagctagatgcaccacacttatacattagttt

SEQ ID NO: 8889 - DNA, 338 bp, Glycine max
gatgcgagaaaacgacaaaaggggtccatgcaattacgtgttattaaaacaaattacccgcacgtatgtttgttaacaagtcttttaacccatgatttaaattgacgaagataaaaaaaaaaatgcacttaacccacacagattgcaatttgcaccctatatagtcagtgggtatcatcactatcatggaaagggtgcggtgttgcggtgagtttggtattgagtggctaagttcattgaagttagacgtcagttagtccactgcaactgtaacggaataaagttagcattagacgtctatgaataccttctaattgtgccttccaaaaaaaaataaa

SEQ ID NO: 8890 - DNA, 394 bp, Glycine max
gcgtccgacaggagccaaaagacgaccgaaagggctgatgctggatctgcgggaaatccttaccctagcatttatggcatgaatccagtacagcctggagtggagaattttcctcattatggacctgggcctgctgcttggggtgcatatgacatgcaacgagctcaaggacaccgataaattcctgttaagcaatcttattactggtaccttgggttgcaactttctagatgattgattcagggttttaagagttatctactcatgaacgtcatggaatttgtctattagatggtccttgaagttgtacttaaattaaaaagctcatatgttggttgatggtgcaataaaaaatgtttatttatggtggccaattaaagaccttttttttccc

SEQ ID NO: 8891 - DNA, 757 bp, Glycine max
atttatcctgagccccgaaattgagaggggatagaattggaaaagagggaaaacactctattgagtttttcactatataagttttagccactctcgaagctgaagcagattagggtttctgcagccgccacactccctttctgaacgagatcttagatctctcgttgatgctttaaaagaaccctaatctcatctcatggctattgcttggtgcaccagcattattgcttccaaaataaataaatgaatgaatgaatgagcataccactccctctctctctctctttctcaccactcactcgctttgcctggctgcttgttttgatctgtttcattctttcttttctttttatgtgacctttggaacttcactctctctctctctctctctctctctctcaaccctaagaggctgtgaagatggtttcggagtgtggacccgatggatctgccgccgtcaaacctcctcgccggtggcgcggcaactttatcgcttttgattttgttgcagccatccctggcggtgttgtttttcgatgaccgataccatcgctgtgccagatctgagcctcaccaattccctaatctaagaactctccctcgctggcgttgtcttaacgcagtgtttgacagatatgtatggagtgagagaagggaaatgatattttccgatcccatcgttactctcttccctctctcattccatacatcgtctgacgaacctagcgttgatttgtactgcatgtttagtttactg

SEQ ID NO: 8892 - DNA, 584 bp, Glycine max
cgtccgcggacgcgtgggctgcagccgccacactccctttctgaacgagatctcagatctctggttgatgcttcaaagaaccctaatctcatggctattgtttcctgcacttccatcattgcttccaaatgaatgaatgaatgaatgaatatactactctgtctctctctatctctctctctctctcgctcactcactcactcgctatgccatgcttcttgctatgatatgtttctttctttttctttttatgcgacctctggggtccttcactcgctctcttatctgtctctcactttcctaaccctaagaggctgtgaagacggtttcggagtgtggacccgatggatccgtcgccgtcaaacatcctcgccggtggcgcggcaacgttatcggttttttgatttcgttgcagccatccatggcggtgttgttttttaacgaccgatctcattgctgtgccagatctgagcctcaccaaatccctaactgaagatctctccttcgctgacgttatcttaacgcaatgtttgacagagatgtatggaatgagagaaggaaaatgatatttccgatcccatcgt

SEQ ID NO: 8893 - DNA, 793 bp, Glycine max
gatatcatagatacatatagaattctgtggaaagccgtattcgatgaaagtcgtatgtacggcttggagggagatctttcatatctttcgagatccaccctacaatatggggccaaaaagccaaaataaatgattttagcccttataaaagttataaaaaaacggattcctcctttcacgctcatgtcacggcgaggtactgcagaagaaaaaaccgcaaaatccgatccaatttatcgtaatcgattagttaacatgttggttaaccgtattctgaaacacggaaaaaaatcattggcttatcaaattatctatcgagctatgaaaaagattcaacaaaagacagaaacaaatccactatctgttttacgtcaagcaatacgtggagtaactcccgatatagcagtaaaagcaagacgcgtaggcggatcaactcatcaagttcccgttgaaataggatccacacaaggaaaagcacttgccattcgttggttattgggggcatcccgaaaacgtccgggtcgaaatatggctttcaaattaagttccgaattagtggatgctgccaaaggtagtggcgatgccatacgcaaaaaggaagagactcatagaatggcagaggcaaatagagcttttgcacattttcgttaatccatgaacaggatctatatagacacatagacccatgaatccatacatctcgatcgaaaaagaatcgaaattgatgaatatatctctcgaaacaaacgaaaaggaaacgaaaaacaaaaacataaatcatggatcaattaag

SEQ ID NO: 8894 - DNA, 232 bp, Glycine max
ctcgagccgctcgagccgcggcgaggtactgcagaagaaaaaaccgcaaaatccgatccaagttatcgtacgcgattagttaacatgttggttaaccgtattctgaaacacggaaaaaaatcatagctcgatagataatttgataagccaatgacagaaacaaatccactatctgttttacgtcaagcaatacgtggagtaactcccgatatagcagtaaaagcaagacgcg

SEQ ID NO: 8895 - DNA, 340 bp, Glycine max
  unsure (1)..(340): unsure at all n locations
taattcttgagtattaatgttgattgcttgtgtcaatatgtccaagggattgggtatcagcaagtagtttagaatttgcaaccatgcggaagctagggtagaatacattagtgaattggggatgagcaagagagatgagtagagaattggggatgagcaagttcaaacctagacattcattaatcaagatcgacgtcacaatccaagtctagtatttctatctttacttaattattttattgtcatttaatttttattgcaatttattttatgttatttatttcatggccnannanaaaaaaaaaaaaaaaaaacaaaagcggccgctctagaggatcca

SEQ ID NO: 8896 - DNA, 550 bp, Glycine max
gttactggttgtattatcagaatgttgaaattatgatagatttatgaatcctcttttctcccgagattatcgatgttactttttatattatcagatactatttgtgaactacgtgtccaaaaccgaacaacacagtgttaattcagcaatgcttagctattagcacactacctgcaagaaacatcccaagagctgataagaaaatgcagttatatcatcatcccttggatttggaaagccagagggtgagacttgcattggaggaggagggtgtagattatacatctcaccatgtcaatcccattactgccaagaacttggattccactttcttcaagatgaatcgccatggaagagtcccggttttccaaaatggctctcacatcatttacaatactattgatataatccagtacatagaaagaattgctgtggtttcctcaggggctgagagtatcagcgccagtagcagggaagtgattgaatggatgcagaagatacaagactgggaccccaaaattttcacactttcacacatacccgagaaata

SEQ ID NO: 8897 - DNA, 376 bp, Glycine max
atttcattgccttcttatgcttatgttgtgtctgctttcactgctttttctggacatcaatgatctgaatgatttctggtgttggaacagacgatagttcacttgtagcacaacctggtacttcctaagaggtgataagaaaatgcaattgtaccatcatccatttgatttggactcccagaaggtgagacttgcgttggaagagaaaggcattgattatacatctcaccatgccaatcccataactggcaagaacttggattcttcattcttcaacatgaatcccggaggaagactccctgttttccaaaatgggtctcacatgctttacaagactattgatataatccagtacataaaaagaattgctgtgttc

SEQ ID NO: 8898 - DNA, 487 bp, Glycine max
ctgttgagcgatgatggttgatatgatatgatatcatcaggtctggtcatagacgtccatgatgcatcgcaaatggacaataatacattgatcctattccatggccacttgccaaaacaaaacattaaaaaaaaggttaagtttcaatgcagtgcatggcaccatttgttgaagctgaggactggccacgcatttgttgtggctgaaaagaaagataataatggtggtggggggttttgggttgtaagtgaccaactttggggtccacgtaaaaattgcatgacagggattggatgtcggttctgttggtgttgttgggtagggccccctagttgaggtgtctaataatggaaaaaagggtagttaggataatgttgtgaataaaaaatgagtcctggctttggtggatgctaacttgttcttttcccaatttaatttgttcactcagctaagttcaccattgagaacaacacttaatttgtgcatt

SEQ ID NO: 8899 - DNA, 1052 bp, Glycine max
  unsure (1)..(1052): unsure at all n locations
cggggcgtctctgtatctatcttctctcggagccgctattatccccagacgccaccgccgcagcaccagaagaagaagaagagtgatggctgagtacgacctaactccgcggatggcgccgaatctcgacaggcaccttgtgttccctctcctggagttcctgcaggagcggcagctctacgacgacgaccacatcctgaaggcgaagatcgaccttctcaacaacaccaacatggttgactacgctatggacatccacaagagcctctaccacaccgaggacgtcccgaacgatatggtcgaccgccgcgccgaggtcgttgcccgccttaagtcgctcgaggaggccgccgcccccctcgtcgccttcctccagaacgaggctgctgtgcaggagctccgagcggacaagcagtacaatctccagatgctcaacgaccgatatcagattggtcctgcacagatagaagcgttgtaccaatatgccaaattccagtttgagtgtggaaactactctggtgctgctgactatctttatcagtacagagctttgtgcacaaatagtgaaaggagtttgagtgcattgtgggggaagctggcagctgaaattttgatgcagaacttgggacatcgctcttgaagagctcaaccgcttgaaggaaatcattgactcaaagaattttgcatcacctttgaaccaggtgcatagcagaatatggctgatgcattggagtctgttcatcttttttaatcatgacaatgggagaacacaaataattgatctgttcaatcaggacaagtatctaaatgctatccaaactagtgctacacaccttttgcgatacttggccacagcattcattgttaacaagaggaggaggcctcaattcaaagattttcttaaagttattcaacaggagcagcattcctataaggtccccatcactgagtttttggcttgtgtttatgttaactatgactttgatggggcacataagatgatgagggaatgtgaagaagtcatacttaatgatcccttncttgtaaaagag

SEQ ID NO: 8900 - DNA, 1190 bp, Glycine max
ttactaacaggatggtcaagtcatgttgcgttatgtgcttgtgtttgatcttacttcacattttcctgcgctttgtgccaatacagtcagcacctgaaagtgccattgtgacacagattcctggcttcagtggcactctaccttccaagcactatgctgggtatgtgacggtggataagagtcatgggaggaacttgtactactattttgttgaatcagagggtaaaccttccgaggaccctgtggttctgtggcttaatgggggacctggctgctctagcttcgatggattcatatatgagcatggtccttttaattttgaggcagcaaagacaagggggggtcttcccacactgcacctcaatccatacagctggtcaaaggtttccagtgttatatatttggattctcctgctggtgtggggttttcatactcagagaataaaactgattacataactggagacataaagactgccactgattctcatgcctttctccttaagtggtttgaactataccccgagttcctttccaacccgttcttcattgctggagagtcatatgcaggagtttatgtgcctactctcgcttctgaagtagtgaaaggaattgatgccggggtggagcccaaactgaatttcaagggttacatggttggaaatggtgtcacagatgaacaaattgatggcaatgctcttgttccatttgtacatgggatgggacttatcccagatgaactgtttgaggaggttaaccgtgagtgcaatgggaatttttatgatccaacaagtgctaattgttctagcaagctttcaaaagttgatgagttggttgatgagataaacatatataacattctagaaccatgctatcacggcacagaagcagagaagattacagaatcctatattaggatgccatctaccttccggaagttgggtgagaccgaaagaccttttcctgtgaggaaaagaatgttcggtcgtgcttggcccctaagagctcctgtgagagatggaattgtaccaacttggccacaactgatgaatagtaaatctgctccaccatgcacggacgatgaggttgcaaattcatggttaaacaatgaagcagtcaggacagcaattcatactgcacaggtaaggtttctagtaagattcctgtactttggatataaaaacactaaa

SEQ ID NO: 8901 - DNA, 738 bp, Glycine max
  unsure (1)..(738): unsure at all n locations
aaaagaccaccaaatggggaaaagaatgttcggtcgtgcttggcccctaagagctcctgtgagagatggaattgtaccaacttggccacaactgatgaatagtaaatctgctccaccatgcacggacgatgaggttgcaaattcatggttaaacaatgaagcagtcaggacagcaattcatactgcacagaaaagtgtggtcagtagttgggatttatgcactgacagaatttacttcgatcatgatgctgggagcatgatcaagtaccacaagaacttaacttccaaaggttatcgtgcacttatattcagcggcgatcatgacatgtgtgttccatacacggggagtcaagtgtggacgagatcagttggatacaagattgttgatgaatggaggccttggtcatccaatggtcaagttgctgggtatacacaaggatacgacaaaaatcttacttttctgaccgtaaagggatctgggcatactgttccggaatataaaccacgagaggcattggacttttacaaacgctttctcgctggattgccaatatgatatagaggaaaagagaagatggagtaacgctgcttcttattttgtttgtactttgttaataataatgatttaaggatgtatgaagacacattttatatttgtgttctatgtttaccttattaatttattaccatattaatattaaactagatgtcaacctagtttgaaaaaaaaaanaaaaa

SEQ ID NO: 8902 - DNA, 451 bp, Glycine max
gggtcgacgctacgaatcggaagcaagaagacgacagaaggggatctcagaagcaatctatcaaacacatattccgataaacagaaacaccaccgttgaatttgagaatcccggcgaggcatgttcttgctccgagtccactcggtggaagaggaccaccctctggatccccaaaccatcttccaatcccaatcccaatcccaatcccaatcccaatccaacaaccctaaattcagcgaacgcagaggcgcactccacttgttccgaacctcttcccattcctcgctcccaacccagacctctctttcttctctcctcttcatcctcgccgtccccaactacctctccttccacgacttcattcccttctgtggaccccacctcgaccgtttccaccaccttctcttcatcagaaacgacggcaccgaagatcgctatagcgtcctcatcg

SEQ ID NO: 8903 - DNA, 755 bp, Glycine max
aaaagaataataattttcatctaaaaaaaaaccaccgttgaatttgacagtcccggcgaggcatgttcttgctccgagtccactcagtggaagaggagcaccctctggatccccgaaccatcttccaatcccaaaccaacaaccctaaattcagccaacgcagaggcgcgctccacttgttccgaacctcttcccactcctctccctcttctcttctcttcatcctcggcggccccaaatatactttctttacaagactacattccctttaaaacagcaaatttgacacgattgtggatgaacacaaccgtcttcttacatctcagttggagacacaaagacaatattatgaatcgttactagtggagacaaaaagtaaaatggaaagttccatgtctgaagcagtggagaaagctgcagcttctgaaatgctggatatccaaaatgaactggaaaagtgtacagaagaaagaaatgccattgctgaggtcaatcagaaactcataaaaaatcaagagatatggcggaagaaggttaaagaagctgaagggagggaggctacatcaattaaattgaagaatgagaggataaatgatttggaggaacagattagagatatcaagatttttcttgaagcgcaaaaaacaattgataaaatgtcagattcaaatgggatcaaggagggaacagtcctaccggtggcttatgagcaatcttctccaggccacagtaagagaaacaaaaagtctggtcgt

SEQ ID NO: 8904 - DNA, 757 bp, Glycine max
  unsure (1)..(757): unsure at all n locations
gaatgatttaccattgcaaccaggcacagcagatatagttttcagcatttgttataatacagatgattgggagttgattaataagtatgcaaaaagatttgtcatggctggcgtaaaactacgacaaacctcattggaaacatggatggaatttgctgccaaaagaggacatactgagtcattatggaaaatagaaaagttgagatctgaatcaatgaagcagcacactttgataactgggttttcttgtgtcaagggtctactgttggaacgtaaacccagtgatgcagttgctgtcattcaagttctaaatcagaccttgtctgatacaaagaaatcaggcatcaagggtgaacttcagaagcttgtatccgagtggcctttggaagttattaagcaccaaaaagaagaggacagaaaggcattatcagcctctttgaaatctgatatccttgtcatggttagtgagttactgagcgtgggtcttgatgcaaatgtaagtttggaagacctggacagaaaggaatgtattccacgatagcatggagttcagaatttgatgacattgtgtttcagaatgtgcttgtttgcagagtatctccttaccaggatgcttcctagccctggttagatactgagtctgcgaacattgcaaacgttgattcctaaattaaaaattattattttgctgtgnaanannannnnnnnnnnnnnnnaaaaaagcggcccgctctagaggatccagcttancgtacgc

SEQ ID NO: 8905 - DNA, 549 bp, Glycine max
ggcatcatccaatcttatcttccttcctgcttctgcttcccttcactcccatagtttcctctcaacacccatctaccaaattcctcccatcatcttttgattcaccttatcaatttcaaattttacaacattttcactttaatcatcttctcttgtgagttctagattcccgttttgctcagatagttaaacaaaaaccaaattgtcccaacaaagtagttcttccttccattcacacatttttgtcttagtagctgcacaaaaatgtcaggtggtgttggtccaacgggcagtgacattagcctaccacaagaacaagaagttggccacaaagaaccgcaagaacaacattcactcaagaatctccacaaaaccatcaccaccacaccacacaaaccaactttcctctctttccgccatctcaactgcttagctgtggttgttgtcttatccgccagtggcatggttgcccctgaagacttcgcctttgtgctcttctccataatctacatgtacttcttatcaaagatggctttcccatctcttctc

SEQ ID NO: 8906 - DNA, 500 bp, Glycine max
agacgacagaaggggaccggcggtggaagagagatagaccaataatctgaatctgaaacaccttcgtgttcgtgttgcatatccaaaccctaatttggaaattgaatttttgcaagatggttctggcggagttaggtgggagcatttcgcgtgctctccagcagatgagcaacgcgacggtgatcgacgagaaggtgctcaacgattgcctcaacgtcatcactcgcgctcttcttcaatccgatgttcagttcaagctcgtccgcgacctgcagaccaacatcaagaacattgtcaacctcgacgatctcgctgcaggccacaacaaacgcaggatcatccaacaagccgtgtttaacgaactctgcaaaattctggaccctgggaagccctctttcactcccaaaaagggcaaaacaagtgttgtcatgtttgttggtttgcaaggttctggaaaaacccacaacgtgtacaaaatatgcatattatcatcagaagaa

SEQ ID NO: 8907 - DNA, 413 bp, Glycine max
ggatgttagactacgtgtatagagaccggcggcgaaggtaaggtggtgcaaacaagcaaaaaaccctaattctcgaatatcagatcggcgatcggaggaagaacctgaagctgggcgaagatggttctcgcggagttaggagggagcatttcgcgtgctcttcagcagatgagcaatgcgacgatcatcgacgagaaagtcctcaacgattgcctcaacgacatcacgcgcgcgcttctccaatccgatgttcagttcaagctcgtccgcgacatgcagaccaacatcaagaacattgtcaacctcgaagacctcgccgcaggtcacaacaagcgcaggattatccagcaggccgtcttcaacgagctctgcaagattctcgattccggaaaaacctcctttacccctaaaaa

SEQ ID NO: 8908 - DNA, 616 bp, Glycine max
  unsure (1)..(616): unsure at all n locations
gaagattcaaatagcaaccaacaacaaacaacccctaaagattgtcctcctcctggggggtttggaaaaaggaagaccaagaaggatgagaaaggtgagaaaaaagctgagactaacgcagcaagaatcggtcgctatgtcacgactcaactctgttccttccctcagagccggcgataactcctccttctacgaacacttcatcctctctggcatccgagttgaccgagtccaacccggtctcgtctcctgcactttcaaagtcccctcgcgcctcgctgacaggagtgggaagttggcgagtggagcaattgcgaatctggtggacgaggttggaggtgctgtcatccatgaagagggtctccccatgaatgtttccgttgacatgtctatttcttttctctcatctgtgagagttggcgtaagttattaccatatactgtactaacaataacatcttaattaatgcctattttgctaagtgagaggataaggttgaaattgatgattgatgttgtgcatcaaaccctactttcacatcattaattnttgtctgttgtatatagggggatggtaattgataatgacctcatatctacccagtccaacattagta

SEQ ID NO: 8909 - DNA, 889 bp, Glycine max
tgtcggagtccgagtcgactcgccgcgatctcatacatctcattcgttcattctctccgacccattaaattaaacctgttttttttgttttgttgtgttctcttcgaaagcggaatcaatcaatccctcatctcattgctgagatctgcaagctggctatggactacgaaccctacgacagtagcggaactgatgatgaccttccaccaacccatcaaaatagaatttccaggggaggaggaggacgtctcgctgggaatgggagatctgctgttggttcaattccttacccaaggatgtatggtgaaattgatatggagacccaaattcatcagcttgagcaagaagcatacagttcagttctaagagcctttaaagctcaagccgatgccattacttgggagaaagaaagtttgattacagagctgagaaaagaactgagattgtcaaatgaggagcacagagaacttctaggtcgagttaatgctgatgatgtgatacggaggataagggaatggagacaggcaggtggccatcagcctggtgtacttagtactggtcaaggtcttcatgattcaattcccagtcccacagtctctgcttctcgcaaaaagcagaagattacaccatctgtaccaccatcacgatcttttggtgggccttctcctccatttcacccccaaacactgactgcgccccaccaaccatcttctgcagcaaaacgtggatctgctcctgggtcaaagggaaagaagcacaaacctggtcaaatattacctggtgtctcttcaatgaagcagtatccttcatcaggaccaggtggaaggaatcaagtatctaatagagctgtcatgggtgagcatgctgagggagcatcatttgattcgtt

SEQ ID NO: 8910 - DNA, 386 bp, Glycine max
atctgaatttgattgataataattggagtaggagcccagccgcattgttgtaatttcgggctgtctgacggtggctggaagtatccgagtcggagtccgagtcgactcgctgcgatctcatacactcattccttctctccgacccacaaaatcaaacctattttttttttgttgcttttgctttggtgcgttctcttcggaagcggaatcgatcaatcccccacctcattgctgagatctgcaaactggctatggactacgaaccctacgacaggtgcggaactgatgatgaccttccaccaacccatcaaaatagaatttccaggggaggaggaggacgtctggctgggaatgggagatctgctgttgcttcaattccttaccca

SEQ ID NO: 8911 - DNA, 579 bp, Glycine max
accacacgtccggcgagaagacgaaagaagggggtcttgtacaagtttgtaatggttgaggtattttcagctctgtgaaaagatactggttttcttccttggctctttatcagcgatgatataaaattcgctgttgttattaattccaagcaggcagcacatggggtttgtgtcaaatatctgataaagagttgaaagtacttgggggcagtgggaatttggcagtgctctttagtttggttagtgcccatgtctgccacgaaatttccttcggggccatctatatgcgatggaggcaacttgttccttgcggatgtctcatccatattaaagaatgaataggaactcacggtaagtgcgtgagatccccttctttatttcctcaaaatttatttggagatattatcatgactaagaataagaatatcacattactctaatgtctgcctcacaaataggtaatagggtattaaatttgggttctgagtttggattaatcctataatatttaggcacaaaatataaacagaaatatagttgggcgatgattctagcttaactggtggttcggggacatta

SEQ ID NO: 8912 - DNA, 432 bp, Glycine max
  unsure (1)..(432): unsure at all n locations
aatttgtatatgctaccaaacctcatactttccctaactgcaattaatctgcatttgcacgaacctaacctactatcgaaagtcgaaacatcccctgtcactttgactcaactcacacaccaatctccatatccctaccaattttccctattcactcatcaattttctcgtatcaggtttgatctgaaatccaggattgctacttaggtttgcatcaatataatctgacaagagaataattttgtggtagtgtagtccaactgtccaacttagagcaagcagcatggaggatattctgttggataccaggtgggaagatgtaatctgccccatatgcttgggagttcctcataatagtgtgctccttcagtgttcatcntatgataaggggtgtcgttcttttgtatgtgacacaagtcagttgcactcaaa

SEQ ID NO: 8913 - DNA, 469 bp, Glycine max
gggggtgtttatttggaggaagcaattgagtgatgagtgatggcgaaaggcgtaatcggagaagaaacgcgactcaaattagcggagggtcttctcagccaatccgcagttccatccgaggtgggtcttctaatcggcaagttcagctcctccttgggccgggccttcctcttcgacctcattcccaccccacacaacgactctgccgagcccgcctgcgccctcaccgaccccgacaagaagaagggcaccaaatccaaccccgccgattcctcttccttgctcatccacaacgattgcgtcgccgaacatgcccgccaggtttctagaatgctcgtcggcggcatcaaggtcgtcggcctatacgtttgggttagcgatgccgcattcaaaaattcaaccataatgctttgccagaccgtgaagggtgttgctgaggcagctccggttttggagggtgattgggatg

SEQ ID NO: 8914 - DNA, 415 bp, Glycine max
ggagtgagagggtagcaattgagtgatcagtcgtggcgaaggccgtagtcggagaagaaacgcgactcaaattggcggaggatcgtctcagccaatccgcagttccatccgaggtgggtcttttaatcggaaagttcagctccgctttgggccgggccttcctcttcgatctcattcccaccccacacaacgactccggcgagcccgcctgctccctcaccgagtccgacaagaagaagggccccaaatctaaatccaaatccgagctcgctgattcctcttcccttttcatcgacaaggactgggtcgccgaacatgtccgccaggtttctagaatgctcgtcggcggcatcaaggtcgttggcctatacgtttgggttagcgacgccgcgttcaagaattcaaccataatgct

SEQ ID NO: 8915 - DNA, 763 bp, Glycine max
gggtcgacgttcgaaacggaggcaataggacaacagaagggggaaacaaaggggccatcaacaaacgaaatcctcgtcttcatcttcttcttcttcttcttctttgttcagcttccctaacgttaacgtcgtcgtcgtttatcccaaaacaaaacgatggacttcaacacttttgcaaattccatatcctcttctcatgcaattcctccaatacacacttatcgccttcaaccctctccttttcctttccacctcccattttcgaatttaaagcgttcaggtttggttaagaatcggcttattgctcgttgcacttctatgtccgatgaatttggttctgttaatgggttgcaattctcgcccaataagctttttgtggaggaggctattggggctgaatatggggaaggctttgagacttttagggcagatggaccactaaaagttgatgtggactatttgaatgagaaattgcaagatggttttcttcagcgcatacgctatgctatgaaaccagatgaagcttatggtctgatcttctcttgggacaatgtggtggctggtacacgagctctaaaaaggaaggcatgggagcagctggcctttgaagagggaaaggatattccagaagaaggtgatatgcacaaattactgttttatgcaggtgctgattatgtgttgcataagttttttctctcagataaggcggaaaatgagctgaataggctaaagttaaggttttctcagatatattatgataatc

SEQ ID NO: 8916 - DNA, 2380 bp, Glycine max
ccacgcgtccgatacggtggcaaaaaaacaacaaaaggggaatcataacaattgtcttcctaaggagagggagggagagattcgaattccaattagggttttctcatcatcatcgactttttctcttatgcaaggaaggttctccttctccgatttcaatttgattgaacgagtagtgttaagattatgatattttttgagaagcttcgtttctctcctcacctaagccgcttcattgccggcatcatcttgttaattttctgcaattcattccagttagtctccaatttccccattcctatacagccttagattctacgtcgttaactctctccgatttgattctatattcgatattcgttgatttgattcactcctctctctctctctctctctctcgctttcgattcgacgcctgaacaagtgaacatggaccctaatcacctcttcttcacgcatttccgcgatggtgctattgcctcacgcattgagggccaacacagaggagctcttccttctgttattgtgattggtgctggaatatctggacttgcagcagcacgaagtctctatgatgcatcttttaaggtgactgtactggagtcacgagataggcttggtggtcgcattcatactgacttctcatttggctgtccagttgacatgggagcctcatggctacatggagtttgtaatgagaatccattggctccattgatacgtggcctggggctttcattatatcgtaccagtggtgacaactctgtcttatatgaccatgacttggaaagttatatgctttttaacatcgatggtaagcaagttccacaacagatggtcattgaagttggagacacctttaagaaaattctggaagagacagggaaagtgagggatgagcataccgaggacatttcagtttcccaagctatttcaattgtgctagataagcaccctgatctaaggcaacaaggacttgcccatgaagtgctacaatggtttatatgcagaatggaagcttggtttgctgctgatgcagatatgatttcactgaaaacctgggatcaggaacatgtcctgtctggtggtcatggactcatggtgcaaggatatgatccagttataaaagttcttgcaaaagatattgacatacgcttgaaccacagggtgaaaaagatatctagtggttacaacaaggtaatggtgacggtcgaggatggcaggaactttgttgctgatgctgctatcataactgttcctattggaatcctaaaagcgaatttgattgaatttgaaccaaaacttcctgattggaaggtttcagcaatttcagatcttggtgtgggcaatgaaaataagattgccctaagatttgacaaagtattttggcctaatgtagaactcttgggcactgttgctccgacctcttatacctgtggctattttctcaatcttcacaaagcaacaggccatcctgttcttgtctacatggtagctggaaggttcgcttacgacattgagaaactatctgatgaagcagctgcaaattttgtgatgcaacagctcaagaagatgtttccaaatgcttctaagccagttcagtatcttgtgtctcgatggggaacagatccaaactctcttggatgttactcgtatgatttagttggaaaaccaactgatgtgtatgacaagcttcgtgcacccttgggtaatctattctttgggggagaagctgtaagcttggacaatcaggggtctgtgcatggagcttactctgctggggttatggctgctgaaaattgtgagagctatatgttagagaaactaggccacgcagaaaagctatctctagcttctgttaggcatgaaatgcttgaaactcttatacctcttcagatctcgaggatgtgatttgttggtgctcagtagcttttagacaatgattctgcataatgcaatggcaaaatatttgccattcgatataataaagaaataaatgttctttaaggatggtgaattggtgactatcgtccaagtaacaccattttcacttatccgcattggattcgaatagctttttttatccttttttttaggcctggcttattaaggtgtatgtagtatgtaccttggtccatctgagacacagtgcatgtaagaccatcactattgtgttaccccacaattctgtaatgtgggtgtgtcctacttgtaggtagcttctcaacattttccttaatcaacatgtttcttggcagacaaaaaaaaattctttccttaggctagtttgtttgtttgccctttctatctcttgttctttcttattagtgtttttgcatttagccgaaagaggaccaaaaggaaacatgattatcatttc

SEQ ID NO: 8917 - DNA, 715 bp, Glycine max
tctcgatccgattcggctcgagatcattgttggctattcattcattcgtgttcctcaggagagagagggtgcgtgtgattcggattcgaattcgaattagggttttgcgcatcgtcatcgaatttttctcttatgcaaggaaggttttccttctccgatttgaatttgattgaacgagtagtgttaagattatgatattttttgagaagcttcgtttctctcctcacttgagccgcttcattgccggcatcctcctgttaatcttctgcaattcattccagttagtctctaatttccccattcctatacagccttagattcaacgtcgatcgctacactcttctctccgattcgtacgattccgtattcgatattcgtttgtttgattcactcctcctctctctcgctttcgattcgttggtgattgctgcttgaacaattaaacatggaacctaatcagctcttctccacgcatttccgcgatggtactattgcctcatgcattgagggccaacacagaggagctatcccttccgttattgtgattggtgctggaatatctggacttgctgcagcacgaagtctccacgatgcatcttttaaggtgactgtactggagtcacgagataggcttggtggtcgcattcatactgacttctcatttggttgtccagttgacatgggagcctcatggctacatggagtttgtaatgag

SEQ ID NO: 8918 - DNA, 920 bp, Glycine max
agggaaacacaatgggtaacaagaaggggaatcaataatccccttatttgggaactttcggaagtcgcgcgttgtaattaaccgcaacccgaaacggtgcactgcagtcttgtctaccatcggcgttcactgctctcccagagagaggcgagagccactgaaacaaaacaaccatcaaatcaagtttaaatttcagttctgttctgcttctaatggtaatggggagtttcagaaacgctgcaatcaacgtcgtcagagtgatcaattccaacaaagccaccatcgctgcttccacaaacccccttcacactctcaggtttacccctttctcgtcccacactcaaaatcaaaccctggaaatcgatttatctaacgaagaaagcaaaagacgcttgtttaaccagctattatatagaagcaaacagcgagggttcctggaactggatttggtcctcggaaaatgggttgaggacaacattcactccttggatgaaattcggattaaggccctcattcatgttctcgacctggagaatccagatttatggaagtggatatctggacaggaacaacccccagaatcagtcagcacaaacccggtctttgctgcagtgcgggaaagagttatgaaaaaccttgataatcattctgctcctgaagtaagagcaacgcctggccaaccatgggtaagaggctgggatgatatcaagaaaggacaagatggccctgtttctggaaatcagtagcttgacattcaatgatcttatcatctattacaatgaagaaaatgtggtccaccattgttggctttgtaactatatataactaaataagggctgggtaactgcaactcaaaaggtttgtattagctgctagaaatcagtaaagggatttaaactgcatgattttgactttcttgg

SEQ ID NO: 8919 - DNA, 402 bp, Glycine max
cccgaaacagtgcactgcatctggactcatcggcgttgctgtgctcccaatcctatttacacagagagagccactgaaacaaaacaacgatctaattcaagtttaaattttcagttctgttctgcttctaatggcgagtttcagaaacgctgcgatcaacgtcttcagagcgatcaatactaacaaagccaccatcgctgcttccacaaactctcttcacactctcaggccccttttttgttattctaggtctacccctttctcttcccacactgaagctgaatccctgcaaatcgatttatctaacgaagaaagcaaaagatgcttgtttaaccggctattgtatagaagcaaacaacgagggttcctggaactcgatttggtcctcgggaaatgggttga

SEQ ID NO: 8920 - DNA, 476 bp, Glycine max
gcgtccgacgctagcagaagagacagaatgggtgacaatctttcttagctagatcagtgcctcatttttctttcagttttcctgcttcttctcttcttcaactggttttgagattgccattttcttatcttgtttagtttagcttgtttggttgagaggaattaattattttgtataaaacaatgaaggagagtgtaggaaaccctttgcgtcttcaatctgtgaatcatatctccctcatatgcagatcagtggaacaatcaatggatttctatcagaacgttcttggattttaccccatcaggaggcctggctctttagattttgatggggcatggctattcggctacggaattggaattcatttgctagaagcagagaaccctgaaaagttgccaaagaagaaggaaattaatccaaaggataatcatatatctttccagtgtgagagcatggttgcagtggagaagaagctg

SEQ ID NO: 8921 - DNA, 384 bp, Glycine max
ggtgacaatctttcttagctagatcgccatttttgcttacaattttcctgctacttctcttctttaactgttttctgttttgtttttgagattgccattttcttctacttttttaccaacattgaaggagagtaccatgggaaaccctttgcgccttcaatctgtgaaccatatctccctcatatgcagatcagtggaacaatcaatggatttctaccggaacgttctgggattttaccccatcaggaggcctggctctttagattttgatggggcatggctattcggctacggaattggaattcatttgctagaagcagagaaccctgaaaatttgccaaagaagaaggaaatcaatcccaaggataatcatatatctttcca

SEQ ID NO: 8922 - DNA, 1150 bp, Glycine max
gggtgaaatccacttggctgtgaggtttacttgttcttctttgcttaatatgatgcacatgtattcactacctttgttgccaaagatgcattatattcacccactaactgtcagccagcttgataatctgaggcatcaagctactcagattgtttcaatgagactgagtcgtgccgagccaccgctgagaaaggagatagtggaatatatgctagatgtgggttcccacatgtggagtatgagaagaagcaaggcgaactttttcaggattatgggagttttgggtggattaattgctgtaggaaaatggtttgaccagatttgcaactggaaaaatccaatcacaacagttctgatccatatcctgttcataatattggtcatgtaccctgagcttatcttaccaacaatcttcctttacctcttcttgatcggagtttggtactacagatggaggccaaggcacccacctcacatggacactcgcctctcccatgcagattctgcgcatcctgatgaactggatgaagagtttgacacattcccaaccaccaggccttcagacatcgtgaggatgcgatacgaccgacttagaagcattgctgggaggatacagactgtggttggtgatttggccactcaaggggagaggctgcagtctttgctcagctggagagatccaagagccactgccctctttgtgattttctgtctggttgctgccattgtactctatgtcaccccattccaaattgtcgcacttttcactggaatttatgtgttgagacacccgaggttccgccacaagcttccttcagtgcctctgaatttcttccggaggctgcctgcaagaactgattgcatgctctgagtcatggatagtgcacaaactacaaaaggagcagcttgctttgctttcattgttcagcaccagattttgtggatttgcattttcattatgtcataggattttctgttttgaatttcatggtttaatttgtaattttgtaggctgtgagttgaaattaagttatgttttaatcaatttcatctttaattagatgtagtaaagtttctcaatgggagtttgaactttaccccccaacaatggctattgatattgagcttaagtgattactgaattctgatt

SEQ ID NO: 8923 - DNA, 599 bp, Glycine max
gcgacgtgagcggttcgctgcccgcgacgttgtgagaaggcacacagtttactcactaactcactgtgagagcaaagaagaagaagaatgaaggacgccggaaagagccacaaggcgaatgcaaagctgtcgccggagacgcggaaggatcggaaatcggcgacggggctgagtggatcgccgaagaagggaggccacggcgggaagttcacgtggatcggccacggctacgagcaagttgagatgccgcacggtgctatggacgccaaggacccgaacttcgaggatcctgtggagatcgccaccgtgtgatcgcggtggtttccggtggccaggtctgtaaatagtagtaattggcgaaacgtgttttttcgtgttcaataatgtgaagcgaatcggagaagaagcgttttctgtgattgattgttatagatctgatctatctgcggtatttggtagtggcatggcacttgtgttgttgtacatatatcgtcttggagttggaagtgcactcgtatccaaaactatttataatttttttagaacttaaatatgttttttttcaaagtaatttagtgttgtttttgattcagtcccgg

SEQ ID NO: 8924 - DNA, 567 bp, Glycine max
gaagtcacacacatttactcactcactgtgagagcggcgaagaagaagaagaacaataatgaaggacgccggaaagagccacaaggcgaatgcaaagctgtcgccggagacgcggaaggatcggaaatcggcgacggggctgagtggatcgccgaagaagggaggccacggcgggaagttcacgtggatcggcaacggctacgagaacgtcgagatggagcacggtgctatggacgccaaggacccgaacttcgaggatccagcggagatcgccgccgtgtgatcgcggtggtttccggtgacgagatctgtacatactaataattgctaagagacgcggttttcgaattcaataatatgaagcaagtaggagaagaagcgctttctgtgattgattgttatagatctgatctgtctctggaatttggtagtggcatggcacttgtgttgttgtacatatatcgaatggtcttggaagtgcgtgcactcatattcgcattcaagtttctacgagcttttgttatcaacgataattgaattttcaattttcaagtttattaaaaaaaa

SEQ ID NO: 8925 - DNA, 599 bp, Glycine max
ttaggtttcaatgcttgttctgaagaaatttacagggttcagacagcttggaaggtaccggatgaccagcttcgggaggagctgcggttatctatatcagagtaggtgattcctgcataccgctcgtttgtgggatgatttaggtgtcagttagagggaaggcatgttgggaagtacattaagtatacaccagaggatctagagacctatctattagatttatttgaaggatcccctgctgtattgcatcacataaggaggaaaagtacatagtatatcataagatgcttttagcaggtgaactcattttatgagaattacttgaaaatggtttcctgtgtcatgtgtatttctacttggataggtgtttattttacaggtgttaatgttagaatgggattttgtgacattcgactcttcctccaagccccttccccaaatccaaaaaagatttatttttttcatgttccttcgaatactgtaatatcttttgtatatagtgttctgatacaggttatctatgttgtttatacttgttgaaacagtacactcattagctatcatatattcagatcctgtccacctactgcagtttgccc

SEQ ID NO: 8926 - DNA, 594 bp, Glycine max
  unsure (1)..(594): unsure at all n locations
aaacacgccaacacgggtttctgttacaagagtcttttaaaaaaagaaaagaccaaatgaaaataaatctattgttcccttgttttctttctccatatgcttgtctttcgtttcttttagtttttagcgtgtctttgtttctggacttcgtttagttggtttaaggttaaagcgtcagcgtagttgtctttccttaaatgtcgaacaaagcagggttggcttgagttttcttcaagacttagtttatcaaagaaaggaagagttagatagattaagagagagaaagagttgccattgtttgtttttgtttatgtaactatgtgttgagttggaaacattattattggctttgttaaaacagagaaattgttgtcgaggagataaaaataagaccgttagactgagagttttgcgggagaaaaaaaaaacaagactttgactcttagctgttgagataatttgcctttcaattctctttcttcttagttattaacctcaataatttctcaacttctctttctctgctcctnttgntttttcctcatcttaattagttctcattgtaagagaagctgaaactccttcaatcttttt

SEQ ID NO: 8927 - DNA, 506 bp, Glycine max
ctcgagccgaaacaagcactgaccgaccaaatggatttgaagtcaattactgacagggaagtttgctgcttcatgatctcatgcaaaaactcgaccaacatcgactctgttattgactggcttgtaaagcattccaaatcaaagagctgagaacctactttctgttttgaattctaatgcaatttacgggtaacattttctggatttactagaggcatttgcatgtctaactcgtttgctgattgatttattcatcccttttgtcagatgctttgtaatataatatcatatcattcttgtccgatagggaattaaacgggatgacatacatgtgaagggttactttatgagcaaattatatcgtgtcattggagtagctatatcattaaaaattcactgaactgccatgagaactgatctttttatcgttgtaaattagattggatattagattctttcgaaggacccagtagcgcgtgtccttacgctaattccatcagcttgcc

SEQ ID NO: 8928 - DNA, 404 bp, Glycine max
gaaagttacagaagtaattgtaaacatggagtttggttattgtgctgtgtttctgatactgcttcttccaatctcatgtgcagattctacctcagttgagaagcaattcagggaatgcttgttaacccaacttgatggaaattctgaatacattgaaaaaataaccttcacctcatcctcctcgctatatccccaagtctgggattcattggcacaaaatcctagatgggttagttccacaaggaagcctcttatcattctaacacctttccatgaatcagaaattcaagaagccattctatgcagcaaacaacttgaactgcagctcagagttagaaagcggtggccatgattatgaagggctatctttccttggtaagggtccatttgtgatggttgacctc

SEQ ID NO: 8929 - DNA, 542 bp, Glycine max
agccttcctaccggttgcaaaagaccaacaaaagggactgaagggaatggttataaaaagcagctcaatcattccagagatcagggaagctatatttaggtgtcttgtgtgtggattctgctctgagccagttcctgtggagagagggcgaataaccgaacccactatatgtttgaaggaagagtgccaatccagaaactccatgacacttgttcacaaccgatgcaggtttgctgataagcaaattgtgagggtccaggagacacctgatgagattccggaaggaggaacacctcacacagttagcttgctgatgcatgacaagttggtggatactgcaaagccaggtgacagagttgaggtgactggtatttatagggctatgagtgtcaggattggaccaacacagagaactgttaagtcattgttcaagacatatattgattgtcttcacataaagaagaccgataagtccaggatgttggtagaggatgctatggatgttgatggccaagacaaaaatgcagaagttctctttgatg

SEQ ID NO: 8930 - DNA, 473 bp, Glycine max
aaagtcactggttgctgctctaatacctctacagaaggattctgaggttccttctcatgtgttgatgggtatcccagatggtacagctgcttttcccctttcacctcttggagaagcttctctacgaatggatctgactgccctgcatgaggtgatggagaaaattgggtataaagatgacgagggtgcagcaactgagctttcattccaaatgtggacgaaccagatgcaggaaacattgaactcaaagaagaaaggggacgctgcttttcggcacaaggattttaaaactgcaattgatagctatacgatgttcattgatgttggaaccatggtttctccaacggtttatgcacgtcgtagtctatgttatctgatgagcaatatgcccgacgaagcacttaatgatgcgatgcaagcacaagtaatatcccccgtttggtacattgcgttttatttacaagctgttgctc

SEQ ID NO: 8931 - DNA, 357 bp, Glycine max
gatgtttgtgtgatgaaaagcaatgcagttgaaagtgatgttgatgtgcatgagttgaaaaatagtgcagtagatagtgaatctgaaccttcaaatggtgcagttcagagtgaaattgtgtctgagatgaaaaacaatacagaggagagggcagctgaaccttcaaatggtgcagttgattgtgaagctgaacttccaaatggtgcagtggagagtgaagctgaaccttcaactagtgctgtcgagagtgaagctgagccttcaaatggtgtagttgagagggatactaaaccttcacgtggtgcaggtgagggggaaactgaaccttcaaatggtgcagtggatagtgtagctgag

SEQ ID NO: 8932 - DNA, 414 bp, Glycine max
  unsure (1)..(414): unsure at all n locations
cgcgtcaatacaagtggcaaaagaacacaaaagggaaaatttggttggtggaaaaaatccccatagaaccaaaaagtaataaatcaaagcttcgttatcttcttcaaacccctggctgaatgaaatgtcgcaggtgaatgagcaccaccaccacgcaccctccacgccagggaaattgaagccagaaaaatccccatacaaccgcctccgtatccactcctctctctccaaactcactctctggtcctccttcttcctcgcattcatcctcttcctcttcattctgtcaccgccttcgccctccgcctcnccccgccgccgctccctcggcgactcctgnggcggctcccactgggaaaagcgcgtcgccaagtccgctcgccgctcctccccctcaagctctctgtcctcgtc

SEQ ID NO: 8933 - DNA, 502 bp, Glycine max
caaaaccctagccattgaatttgggcacggatcttctcccacgctatctcaggtaacatgcctgagaatccactgcagaccttgttccataacattgaacaagtctcaagctttgttcaacaccatctctctaatttcataggccttcatcaccacccatcttcaggaccccgcttgtccatctcttcctccaccaaaggcccactttcaaaaactgcaacttctgtacaactcgctgatactgctgtcaaggttaagtctgctgcccctttgggagaatgagagtggaggaggggtggtgaagcggatctccaaactcaagattaccattttttggaatggttgaaagttcaggtcctttttaccttgatagggccccatagttcaaagtctgacatggagggagttatagtgagtcagccactagaattaaaagggggtgcgtgtatagagaggggggatttcacgtgtattcatgagagtcattcagttgggctgagag

SEQ ID NO: 8934 - DNA, 524 bp, Glycine max
gaatgacgagccgtaagaaatttggaattccttggcctgaatgcaacgacggtctgtcctacgacgacgtcgttcgagcctctgatgccggggcgacactcatagagttttactccaccaagtacaagagttctgctcccttacaaggttggttgcagcgaataaaaagtgggcagataacagttgatggaggagttgttactgattctaacacagtcctcagagttggatcaaagctaatctatcatagacttccatggaaggagccagatgcaccgcacatgatcgacgtcttatatgaagatgatgacatgattgctctaaataaaccgtctggcctgcaagttttgcctggaggtctctaccagcaaaggacaattttaacacagcttcaatgggaagccaacaatcagggtacctgtgaaatgcacaaaaggctgcatcctgttcccgatacatcgcctagggaggggaacttcaggaattttattatgtgcgaagacaagactagccagagctcgtct

SEQ ID NO: 8935 - DNA, 515 bp, Glycine max
gatatcattgattaagaatggcatttgattctttggtcttttgtaacggcgtgacctggtgacaaataggcgtgttcacgtgcatttatttcactttctgtgtccaactttacttgtcaatattccattagtgccacagagagagagagaaggtgaattgagccatggtacctcctccatcacaatccattgaaatttctggccacggataccaagctggggatgatacacaagacaaggtcatcaatgaatgttgctcttgttgctatgactgtacacagggtctcttcgatttcttgtgctgcaacttttgttagaagtctttagattaaatttcagtgttattacttaataccagcaatatgtaaagtcattgggacataggtatatcgagaagttcttttcccatcccctttattaccatagaattgatggatgatcagaattaactaagaaaaagttgtgatttttagatattgcgacttttagtatgaatattctccgtttctctccca

SEQ ID NO: 8936 - DNA, 531 bp, Glycine max
actcgagcctttcatttctcatcctttgtccagttacattgtcgatcaagacccattattctctaaaaagctgtctccaaattccgaaggcagagcagagaaaagaaagaacctttactttgaagagagaattaatggcgagtagtgttattccactgttggccatgattattgtacaattgggctatgcagggatgaatattacctcaaagcttgcaatacaatctggcatgcaccctcttgttctcgttgcttatcgccaaatttttgcaactatttcccttgctcccttcgctttttggttagaacggaatacggctccccgaatgacaaagcacattgcgttccagatattactatcttccttaacaggagtaacaggaaatcagattctatacttcttggggcttaaatattcaacccctacaattgcatgtgcactaaacaacttgctaccagcattcacttttattctttgctgcctctccagacaagagtatttgagaatcaagactaggggcagggtagcga

SEQ ID NO: 8937 - DNA, 438 bp, Glycine max
ggactctgttatcaagtgatggcgatgatggcggcgacgacactcacactgacaccaccgagatggtcgtggcgtccaactcgtcgttccttttgccggcaaatgcatccagggctgagaggtttgggaatgtacagaaatggtgggagcaatgaattgaatgtttctgcctgggatgataagccctttgaaatgcttccgagcggtaacaaggcttacttggatgagcaggatgtggtgacgtttcttgatcctcctaaggacttaatccctttcgacccatcttcctataatcccgctgcatacctatggaaaaaaattgaagatattcctcaggaaaggcgacatcgacttctccgattgttgaaacctagacttgtatcaattgcttggcagaatgctggtacacgattcgatgatcccaagttagtaaagaaa

SEQ ID NO: 8938 - DNA, 599 bp, Glycine max
cccacgcgtccgcccacgcgtccgcccacgcgtgcgcaaatatccactccacccaataaacctgacacagtgaaccaaacaggctaaaagaacacaaaccctaatcaataaaaaattgtgttgcagaaaaaaaccatggcgggggaagagaccaccgggaagaagagggtggtgacagaatccctaggatggctaacggaatcgtcgataatgccaaagaagcaccgagccatagctggcgttggcgcatcctcaatcctcgaattgaaggctgaactatacaagtctcaggaagattccaaaaaaatctcgcgaattggccggccccgatgccgagtaccaacgcgccaagaacaaaatcgcccccaaagacaaattctccgtcaaaaaccgcggcgtcgatgcccgcgctcacaacaatttttggtgtcagggacaagcttgagttgaaggcggtgagtgatggaacggcgagttatgcggcgctagagaggaaggctgagttgtatgagaagttggtgaatggagagttgtcggatgaggaggatcaagagaagtattgtgtggattttttccgcaagggaattgagcatgatgag

SEQ ID NO: 8939 - DNA, 475 bp, Glycine max
attcccaggtcgaaccaagccttagtaccgctaccaaaagacgacaaaagggggtgtaaggacttgtttgtttgattagtaaaaagatgaaggttgctgcagaaggctgcaacttactgttattgttcattacctcttacctttcactgatctcagggcttggcgtccattctttgtcttatgatcattctgctaccacaaagtgtttggcagaacctcggagagcacagtatggaggaggcattatagtaaatccaggatttgatcacaacatagagggttggacagtatttggaaaaggagcaatcaaggagcgaatatcgaatggaggcaatagattcattgttgctcacaacagaacacatccattggatagtttctctcagaaggtccaacttaagaaaggaatgctatacaccttttctgcttggcttcaggttagtgaaggaagtgacactgtgtcagttatgtttaa

SEQ ID NO: 8940 - DNA, 462 bp, Glycine max
gacaggaacaaaaaattaacatgaagaacaatttcagattaattagaacagaaaaaactcgaatcagttcacccacacagggcattagggagacagaatccacaatggctccagagtggacagacgagaaacacagcatgtatatcaagtctatagaagcatctttcgttaatcagttatatgattctaagcaaatgaaaacttcatatgaccctgctaccacttccggccagttcaaggtactacgtggtggctgttggcaaaaaatcaattttgagagagtgaatccgcaaacgagtaggattaaccagtgtcatgacttgacggaaaatccatggattcagcactaccgatcttcaagcaaacagagaagcatagcagtttcatcccttcaagaaagtgttactaccacaagtaaagttgttgatttaggccaaaggaaaggagttccctctggatcag

SEQ ID NO: 8941 - DNA, 543 bp, Glycine max
caaaaagacaacagaaggggaaggtaagggcgagagagtccagtgagtgttagcggttctggttctggaaattgatcgagtcgaaaagaaccctaacaataacatggattctcaggttgccgtagctcttgctctttcacttgttggtggtgtcagcacttctatcggtgcactttttgtaattgttaataaagctcccagtttgaagatgcttgggctattacagggttttgctgctggtttgatgcttagcatatcgttctttgatttggctcacaatgctttgaactcattgggcttcttgaaaggcaacctttggttttttgctggggtaatattctttgctgttgttgccagttttatcccagagccaacacttacacccacttctgatgtgaagggcagaaagaaaaatggggatgaaggaggcaaggatattatgaaaaagcatcgccggcaagttttggtcagtggaattgttacagccgtaggcataagtttgcacaattttccagaaggaatggcggtgttccttggatcctt

SEQ ID NO: 8942 - DNA, 545 bp, Glycine max
caaaatttgactttctagagtttgagagatggctttcatcgctcgggtgtgcttgctctttcttttgctcacctctgtagtcacctgcaaggaacaacctttgatgagggacctaaatagcaaccacaacatagacgaacatcactatccaggggccaatccaaaatacgatcctcgcatttctcgtccaccacgtctagggaaccgaaagatgcagatcagtgaagaagattatcccggaccagggcctaacactatacattatcctttctcccctcatcctcccccacttgatgattgaagacttagtgttatagacatggctaatggagtgacagtggagttaaattataagcatgtttaaaaagattaagttacatatatatgggagcgaatttgaaattaatatgtataaatttctctctctaagtattttaataaacatatatgtttaggacttgatctcaaaatccttaggtgttgtttctttttatttatttttaccacacgacactcgggtaggggtgaaaaaaaaagcggccgct

SEQ ID NO: 8943 - DNA, 511 bp, Glycine max
cggttggaaaaggacaacaaagggggaaagtcctaatcattaagttcgaaaaagggctggctgggtggctttggcatggcctaaaattatggatccaaagaatcctctgtccctggatgatagctgcagtggggagacaattgattgggaatttggattcactatccccaagaaagggaatctggctgcctcaaattgtggaggaaaaggtgttgaggggacaaaaatatctactgtgtcatgtccggagaaggactctgattccccttccaataaagagaaaagtatttgtttaaagggtaaaaagaagttattggactttaatgcgcttgatccagatgagattattgatccagcatcactgaatcttgaatcagacgatagcgatgaggatgctgacgatggtgctagtgagaattcatattcttcaagtgattcatctttacggccatatgatttgtcagatgatgactcagatttgaaaagaaaaattcacaagtggctgatgtag

SEQ ID NO: 8944 - DNA, 713 bp, Glycine max
caatcgtctttattgttgttataagacaaccagatgggggacctagggttacttaccacccctacgcgatggggaggttggaggagatatggggttgtgattgtttggagtttcggccacaaaggtggctgaaggatggggtgtttcaacccatgaatccgttcgagtacccggtttttcaagcggggttgagggtgtgtgtagggaaggaagtggctctgatggagatgaagagtgtggcagtttcgttgctgaggaagttccacatcgagttgctggcacccttgtcttttgggaaccctcgcttctctccggggctcactgccacttttagttttggccttcccgtgatggttcgtgaaagaggaactacaacaaccaccaaaccatcaaaaggagtctaattccattgattgataaaaaagtgtgagtgtgtaaatctcataatactctaccttattcctagctatagattcaagggcatggaattaaacagagtcttgaatggactaaacataactgataattgtgtcgatatacttttgagagtcttacaatttttggaacatagatatttacaattttgggattagggtatttatattttaaaattggcccaaaaaaaaatacagtaaaattttgttgatttaaaggaaaaaccctgccaatttatttccaataaaaacaaaaaaagaggcctttggtttgtgaat

SEQ ID NO: 8945 - DNA, 362 bp, Glycine max
aaagaccacaaaaaggggaagaacaacgggtttttttcagcacccaaaaaaaccatggttcttctgcagctagatccgtttctcaatgagctcaccagcatgtttgagcgcagcaccaagcttggctctgtttgggttactcttaaacgatcatctttgaaatctaaggtgcagaggaataaattggccactgctggtgaagcaattgagtatagatgccttatacgtgccactgatgggaaaaagacaatttctacttcggttggaccgaaggatcaccagcgctttcaagcttcttatgcaactatcttaaaggcgcatatgactgctctaaagaagagagaaaggcaagacaagaagaa

SEQ ID NO: 8946 - DNA, 429 bp, Glycine max
ggtctataaagtaagtttcattttatcctttgaagtgtgtgagagagtgaaaacatggccactatcaagccaactggaaagaaggcatgtgtgattggagggagtggatttatggcctctttgttgatcaagcagttgcttgaaaagggttatgctgtcaataccacagttagagacccagataatactaaaaaaatacctcaccttttggcactgcaaagtttgggcgaattgaacatatttggagcagatttaactggtgaaaaagattttgatgctcctatagcaggctgtgaacttgtcttccagcttgctacacctgtgaactttgcttctgaagatcctgagaatgacatgatcaagcctgcaatcacaggcgtcttgaatgtgttaaaagcatgtgtgcgagcaataagagtcaaacgagtc

SEQ ID NO: 8947 - DNA, 552 bp, Glycine max
gcaacaccattgtttccaactgaaaaccgtccgtctcaagtttattgctacctctgaaaatcctagaggaaagctgcccatctgttctgactgagctattggagtacgtggccagatttactgagcattcggacatcatgtgcaagcataggaatgaagccctacttgatggcagtgacataaatgggaggcgggtgaagcaaaggctctagtatgtgaagaacactgcacagcattctgtacatccctcttctactctccgttttaaaagatagcgagagcttagttagagggagaatatatatataatcttttataggatcagaggcaatttttaattttcttggcttattcatgtgtaagagatgtaaatgtaatttgtgttgttgctgttactgttctgtttaacgtgtaggtttccgcaatatcttcagtattactttttactggaaaaacatgtcttgcaagtgttgagcattacatatttttatatatacatagatacatatatatatatataaaaaaaaaaaaaaaaaagggcggccgccgact

SEQ ID NO: 8948 - DNA, 540 bp, Glycine max
acgaggttactccgttccgttggcacctccgcaaaacccacttgttgaattgcaatcccctttcaaaagggtgttccaatttggtttcatgtttttatctttaaacttcaccttcaaacatgtctcaccttctatctgctgctactactttttctcgtttccaactcttgaccctcaacaacacattcacaacccaacctccctttctcggattcaagggtacatcatgtttttttgagaagcacagttgctgcttgagtgttaaaccattttgtgcatcccagaagagaggggccaatatcttctgttctatgaatatgtcagcacagcaatcagatgatcatgggaaaatgaagctggaccaattaatagacaaagtgcaaaagctttgggacagttctcctgagccggtgaagaaattcccgcataacaaggctttagacagcttcattcaacttattcttgatcttattttggttgttgtcaaatacctagctgtacctgtattcgcagttaccttcctcagtgaaatgtcgtact

SEQ ID NO: 8949 - DNA, 563 bp, Glycine max
catcactcagatgcaatattgtgctgcactctaaaggcattgccagtgttcactttctcgaaccaggctgggcttgacatgctggagaccacccttgttgcattacaagatacacctttagagaaaatatttgatgatcatggacgaaaaattctcttttcagagtttccccagattattcaacagggttttgcatgtcttcaaggtggtatttgtctttcaagcatggggcgacctgtctcgtacgaaagagttgttgcttggaaggtgctgaatgaagaagagaatgctcattgtatgtgctttatgtttatgaactggtcttttgtttgacattttgttctgagtacagtagtgcttattgtaatctaaagtgttagataaggatttactccaagacactcgtgctttgttggttggtgttttactgtatttgcactaaatacttggattgcacattaaatgactatttatttcttagtctatgtaacttgtttccttattcaacatccagctaatatttatgcattattaagaagtgttgcagcttcttatgtttgtgg

SEQ ID NO: 8950 - DNA, 1288 bp, Glycine max
gggagacttaaatgaaaaggaaataatcttaagtggaaccttctgcgaaattagccttccttcgtcccttgattgaagtataaattaggggtgttgaaattcaaagccatatccgtcattaaccaaatttgtgtttctccgattgcaagcaatggactccttcaattccttcttcgattcaacaaaccgatggaattacgatactctcaaaaacttccgtcaaatttctccggtcgttcagaatcacctcaagcaggtttattttactctgtgtttcgccgtggttgctgcggctgttggggcttaccttcatgtcctcttgaacattgggggttttcttactacagtggcatgcgtgggaagcagtgtttggttactctcgacacctccttttgaagagaggaaaagagtgactttgttgatggccgcatcactgtttcagggtgcctctattggacccttgatagatttggctattcaaatcgatccaagccttatctttagtgcatttgtgggaacatccttggcctttgcatgcttctcaggagcagctttggttgctaggcgtagggagtacctgtaccttggtggcttggtttcttctggattgtccatccttctctggttgcactttgcttcttccatctttggaggttcaacagctctctttaagtttgagttgtactttgggcttttggtgtttgtaggttacattgtagtagacacccaagaaatagttgagagggcacacttgggcgatctggactatgtaaagcatgccttgaccttgtttaccgatttggttgcagtttttgtccggattcttgttattatgttgaagaattcggctgagaggaatgagaagaaaaagaagaggagagattgattttcttaccaatctgctcagttaacacttcaactcccttggactgtaatacttaaaacagctgtctatacagtgttgttcacttgttaagcttgctccaactgtgcagtttagtcgtttgtttgctttatatcagtagtacactagtacatgttgacatgttttgagttctctaataagataaatttttacgttacaaaacaacaaatctgctccaaagatgaaaagggaaccgagaaagggagtagggaagaagtcaatggtgaaggtccctaataaattcttactccatgactatgtgaggatttttgttggggaggaagtggaattcagcaatacactttttttttcacacatcagggtaaaattttatacaaaactcgctaaataacgagtttcatt

SEQ ID NO: 8951 - DNA, 492 bp, Glycine max
ttagcgctcgagccttgattgaagtattaaatattcctatataaatataaattgggggtcttgaaattcaaagccatatctgtgattcatcaaatttgtgtttccccgaccccgattgcaagcaatggacgccttcaattccttcttcgattcaagaaaccgatggaattacgatactctcaaaaacttccgtcagatttctccggtcgtgcagaatcacctgaagcaggtttattttactctgtgttttgccgtggttgctgcggctgtcggggcttaccttcatgtcctcttgaacattgggggttttcttactacagtggcatgcatgggaagcagcttttggttactctccacacctccttttgaagagaggaagagggtgactttgttgatggccgcatcactgtttcagggttcctctattggacccttgattgatttggctattcatatcgatccaagccttatctttagtgcatttgtgggaac

SEQ ID NO: 8952 - DNA, 486 bp, Glycine max
cgagtcaagtcgtgagtgcgggaggacgacagaagggggaagcagaggcgaagtggtgccgtcatgccatggaccccagaaagcacaagcatatgaatatggcgactcccaaccctaacgtcgttttcatagacaccaacctcgatacccacttggccctcgtcgtttccgaccttgacactgtctccgacctcaaaagtaatctttttatttatttatttatttatttctatctcttcttcaattttttagagactggttctggaacaattatgccttacttcgttcataatgcttctcttccattgtagtttatgcagatccttctttcaccttcttgtcaatagtttttggtcttagtagatgggttttggttgtctgttctcaatagtgaccaactcttggttaactttatatgacatgaatgcatttcgtatgtaaagagtattctgtcggaacatcccttatgcttttcgaaaattgggc

SEQ ID NO: 8953 - DNA, 394 bp, Glycine max
ggaagcagaagccaaatggcaccgggccgtcattccataaaccccaaaacccatggcgacttcgactcctaaaaccaacgtcgttttcatagacaccaacctcgatacccacttggccctcgtcgtttccgacctcgacactgtctccaacctcaaaaagagttttctgtcggaacatcccttatgctttccgaaaattgggaaaattcagattcatgggataaaggttgagcgcatggggtacttttaccaccttacagattccatgcctgtgagaagtgccttcagtggtgtcaaagagagctggtttctcactgttgatgtttctgtgttgagggagtgtgctcagaatgactcaatattttctctgggcattgcaaataatgctttgact

SEQ ID NO: 8954 - DNA, 555 bp, Glycine max
agagagagagagagagagagagagagagagagagagagagagagagagagagagagagagagagagagagagagagagagagagagagagagagagagagagagagagagagagagtgagagagggaaaccgtggcattatttgcactacgcgttgagcggcgcgtgacgcacggctcatttaattacttagcagaagttagaagcgcccgtgtccgtgtttcttccttaatttcttcttcaccttattatcatcaaatgttctgagattgagctcatgttgggtgtaggtgagaaagaactcacaatagagaacaacaacacaattccatggctgattttgactcaacttatagtcctccttctcctctttgcgctcctctttttcttcaccctcctcccattgggtcccgacgaccaccaccacaacaaccttgtcaccgccgacacgccccctcctccgacaacctcttccagtgtcttctttttcgacgatattcaaattcagcagattgactccccgtttactaatcacgattcatcgcccactcatcca

SEQ ID NO: 8955 - DNA, 682 bp, Glycine max
aaggcatttgaggactgtgggttttcttcacagatggggaatgctattaaaaaacaaggatatgagaagccgacaactatacaatgtcaggctttgccagttgtgctttctggcagggatatcattggtatagcaaaaactggttctggtaaaactgcttcttttgtacttcctatgatcgtgcatatcatggatcagcctgagcttcagaaggaggaggggcccataggggtgatatgtgcacctacccgagaattggcacatcagatttttctggaggccaagaaatttgcaaaagcgtatggggtacgtgtctctgctgtctatggtggaatgtcaaaacttgaacagttcaaagagcttaaggcgggatgtgagatagttgttgctacccctggcagattgatagacatgctgaagatgaaggcattgacgatgatgagagcaacttacctggtgcttgatgaggctgatcggatgtttgatcttgggtttgagccgcaagtaaggtccattgttgggcagattaggccggaccgccaaaccttactcttttctgcaactatgccttgtaaagttgaaaagttggccagggaaatcctttctgatcctattagagtaactgttggagaagtggggatggcaaatgaagatattactcaagttgttcatgtaattcctt

SEQ ID NO: 8956 - DNA, 1347 bp, Glycine max
aacagcctctctctctctctctctctgccaccttatattgccttgccacatttctgacttctgagtcttttgtgggaattgagttcattcaaatgattcctctgtcccataacccagtctctgttcacctgggtggagtaccctgtgaccctcttcacccaattacgttccatccaattctgaataagcctcgttcttctgcctctctgttttggaactgcaaaaggagaaggaagaggaaaagctccattactatggctctctaatctcagaaccaacaatttcctgcgccatgtggaatcaatgaagcttcttccatcaggtgcgggtcacatttcacacttgaatgctgtgatacttggtgaatctctcgccactgaagaggatgatttcgttcttccaagtgaggactttgctagccaagccaatgttcagtccccagaacagtatctgaagatgtataatagatcgattgaggaccctgctggattctggtctgagattgcctcagagttctattggaaacagagatggggtgacaaagtgtgtgatgaaaattttgatgtaaggaaagggaatataaagattgagtggttcaagggtggcatcaccaacatctgttataattgcttggatagaaatgttgaagctggacttggtgacaaggtcgccgtttactgggaaggcaatgagcctggtttggatggtactttgacatacactcagcttctccagcaagtttgccagcttgcaaactaccttaaagatattggcgtgaagaagggagatgctgtaattatttatttgcccatgcttatggagcttcccatcgcaatgcttgcctgtgcccggattggtgctgttcattcggttgtatttgctggtttttctgcagaagctctttcccagagaatcattgattgtaaaccaaaagttgttattacttgcaatgctgttaaaaggggccctaagcctatctatctaaaagatattgttgatgctgcaatcaatgattcagcccaaaatggggtctctatagataaatgcctagtttatgaaaacccattggcaatgaagagggtagataccaaatggaaggaagggcgtgatatatggtggcaggatgtcattcctcaatatccaactacttgtccgttggagtgggttgatgcagaggatccactttttctactctatacaagtgggagcacaggaaaacctaagggtgtcctccatacaactggtggttacatggtgtacactgcaacaacatttaagtatgcatttgactacaagccgtctgacatctactggtgtacagctgattgtggttggattactgggcac

SEQ ID NO: 8957 - DNA, 486 bp, Glycine max
gggaagaggaagagagcagaaactcgaggagagaagccataaaaaaaatcacagatctaaccaaacttcaatttcgattccgattccggtttatgtttatcttcagcgatgacctctactatttattaactgtcatatcaaaggaaggattctgggagcaatggttataggcaaacttactggacctgtacaaggttcagtcttccagtcattgagcatatctacaatttcagagcttttgagtaaccaacactggtcagagctcaaaccccattttagaacaaccaaacctgcaatattccttgaccaattgttcaatgcgggggttgattcagagcttgttttaaggttctttcagtggtctcagaaagagttcaggatttcatatggtcttgaaacaactggcaaagttttacatcttctagcaaattcaaaaaagtactctaaagtcaggtcccttttggataaacttgtgaagaatgagaa

SEQ ID NO: 8958 - DNA, 802 bp, Glycine max
  unsure (1)..(802): unsure at all n locations
caaggatatctcagactttcaaactgaaccttgttataaggatgcctcacagatgttgaattttcctgctggctgtgagctacatgaagcacttggaccagctttttcgaaagtgggtaaatgttttgattggccaacacaggttaatcaagaaatgaaacctgttgaaatgtcagatgagattagcactagccaattgacttctgaatcttgtccagaacatcttttggaagcaatgctggtcaacattaaccatagtaataatgatgttaatagtgaattatcattttgtacatcaaagcaatctgcaatggcctctgcaaaaaatcatgaagcttctattcacaatgtgcatactattaattcagaaggctatttgatggatcagctctctcttgtcagagaggacaaacaccattctttgagttcatcatcagggatatgtggtgtgatgtcctcaaaaggtgtttcatctacatttcatagttcaaatagtggacagcttgaaaggtcgtctgaaccatccaagaacagcaaaaaaagggccaggccaggggaaagttgtacgcctcggccacgggatagacaactgatccaagatcgtatcaaggagttgagggagctggtgccaaatggagcaaagtgcagtattgattcactcctggagcgtgcaataaagcacttgctctttctccaaagcataactaaacatgctgacaagctaactgactntgctgatacaaagtcaaagttgcatcacaaggaagcagacattcttggatcctctagttatgatcagggc

SEQ ID NO: 8959 - DNA, 707 bp, Glycine max
ctcgagccgctcgagccgattcggctcgacttctctaagcactttactttttttttcagccatggagtttcattgccttccaatatttctttatctcaatttgatgttgatgacagccaatgctgcgttaactcctagacattactgggaaacgatgcttccaagaactcccttgccgaaagcaatcacagagctactaagccttgaaagtaggtccatatttgaatatgccgggaatgatgaccagtcagaaagtaggtccatattaggatacgctggctataatcaagacgaggatgatgtgagcaaacacaatatacaaatcttcaacaggttgtttttcttggaagaggacctgcgtgctggcaaaatattcaacatgaagttcgtcaacaacacaaaagccacagtcccgttgctaccgcgccaaatttcgaaacaaataccgttctcagaagataaaaagaagcaagtgttggcgatgcttggcgtggaagcgaactcaagcaacgccaagatcatagcggagaccattggtctttgccaagagcctgcaacggagggagaaaggaaacactgcgcgacttcgttggagtccatggttgatttcgtcgtttccgcgctcgggaagaacgttggtgctttctcaacagagaaagaaagggaaactgagtctggaaagtttgtagtggtgaaaaatggggtga

SEQ ID NO: 8960 - DNA, 650 bp, Glycine max
agggggaaacttgaagtgccatcggataagtggtggagtttgtttatttgattgattttgcaaatcaattgaatgattggatccccaatcaccccacaaggtgtgattgaaagaaaaaggggcatagggaaagttgaagttgaagtgacaaatatgcagagtgataaggatagagaagaggacatggacaggctaagtgacttgcctgactttgttttgcttcatataatgaaatttatgagcatgaaacatgctgttcagacttgcgttttgtctaaaagatggaaggagctgtggaaacgtctcacgaatttggcgttgcattcctcagactttgccgaccttgcacatttcagcaaatttttatcatgggttctgtcgaatcgagatagctccatttccctgcatagtctagatttgaggcgtaaaggctgtatagatcatgaactcctggacatgatcatgggatatgctgtgtcacatgatgtccagcagttggcaattgaagttaatttaaatgctaaatttggttttaagttgcaccctagtatcttttcttgtaaatctttgacatttcttaagctttccatctgggctgtcccttggatgactgaacttccaagttccctgcagttgccagcattgaaaag

SEQ ID NO: 8961 - DNA, 569 bp, Glycine max
cacactcccacccaaagaaacaaagactatccctggttttcaatctggctccttcctctctgtccatgacgacgtcgtccggttccctaaagaacacgattcccccaggcctccaagaagtgcttctcaacagaaaacgcccccaacaagaacccaacaacaatgccggaccctcttcctccaccgaggacgctgccatcgccgacgattgctccagctccaactccaagctcatcgtgctggtcaccaacagtgacagcattgagtcaccgggccttacattcctcgtcgaagccctcgtgcgtcagggcctctacgacgtccatgtctgcgttcctcactcggacaaatcggcttcggcccactctgtcactcgcggagtaaccgtcgaagcttgttcggcacaaattaatggcgccaccgcctttgaagtttcaggaactcctgtggattgtgtttcactagcgttatctggggccttgttttcatggtcaaaacctatgctggttattagtggaattaaccggggatcaagctgtggtcatcacatgttctactcaggtgtggtt

SEQ ID NO: 8962 - DNA, 422 bp, Glycine max
gtctgatccaaacaaacactatccctggcagtaccaatccatctctttcctctctggcccatgacgacgtcgtccggttccgtgaagaacgcgatgcccccaggcctccaagaacccaacatcaatgccgaaccctcttcctccgccgacgattgctccaactccaacacgaagcccatcgtgttggtcaccaacagtggcggcattgagtctccgggcctcgttcacctcgtcgaagccctcgtgctccagggcctctgcgacgtccatgtctgcgttcctcaatcggacaaatcggcttcggcccactctgtcactcgcggagtaaccgttgaagctttttcggcagaaattaatggcgccaccgcctttgaagtttcaggaactcctgtggattgtgtatcactagcgttatctggggc

SEQ ID NO: 8963 - DNA, 566 bp, Glycine max
gggagaggtgaattcgcagacgaacattccgctcccatcgcatctgtaacaatggaagcgcgccatgcaactcttggtcgacgaacgttggaggaaattcggcaaaagagggccgcggagagattgagtaaaacctcttcgggaccagatctcacgcaggttcccagcacctccgagattgcgggaatgagcaagtccgagagcgcaaataagctctctgagacagatcttagtgctctattgtctcaattgaaaggactgcaaaagaagaacacggagttggaggaagaaaacacaaaaattagtttaaagcttcaaacgatggaaattgataatgagacaatgcacaagcaattaaatgatgtggaacaaaatacagtgccatctctaaggaaagctctgagggatgtcgcaatggagaaagatgctgcagttgttgcacgggaggacctttcagcacagcttcgtaccctgaagaaacgtctcaaggaagcagagatgacaattcggccgggagatgcacactgaagagatgactatcacacatatgctatcagtgcattata

SEQ ID NO: 8964 - DNA, 302 bp, Glycine max
aaagatttcaacttttgggggatttagtgggcccactgaagttacttgtggtgggaatgcactgaagttttatgcttctgtgcggctaaatatcaaaagaattgggtttgtcaagaagggtgaagagactttaggaagtcaggttcttgtcaaggttgtgaagaacaagcatgcccctccatttaaaactgcacactttgagattgagttcggcaacggtatatgtagagaaacagagatcatagagttgaccgtaaaatacaaaatcataaagaagaatggttcactttttgaatataatg

SEQ ID NO: 8965 - DNA, 1044 bp, Glycine max
gatacgcagcataatataagcacgcacgttgccgaagaaaataccactactcctcctaagtctttgaagtcataaagacaaaagaaaagacttagtcatagcagcaaacagggaggaaaggcacgtacacgaccaccgtttacctgttttttgaacgttgaaattaattgacctgcgcctgcgcgtgtcactgtttgagagcacacaaacaatgtcctcccaatctgacgccgttggctgtaacttgaaggagacggagctcaccttaggccttcccggcaccaaaactaatggcacaaaacgtggcttctccgacacccttaacacttctcataataaaatgttgcgccccacctccaaggaacaagtggtggggtggccgccggtgagggcaagcaggaaaaatgctatgaagatgagttgcaagttggtgaaggtggcggtggatggagctccttatctaagaaaagtggatcttgaaatgtacgagacttatgagcatttgatgagggaattagagaccatgttttgtggcttagccattcgtaatcatttgatgaatgagaggaaactgatggatcctggaaatgggattgaatacatgcccacctatgaggacaaagatggtgactggatgttggtcggggatgtaccctggaaaatgtttgttgaaatcatgcaagaggataagacttatgattagctcagaggccgttggtttaggtccgaggtctacttcttcaaaatgtacgggttccacctagctagctagaagaataattaattagtgcgtaataatgataagctgatagctgataattaagcattccttggacaccttcaacgtttacaagctccggttagaagaagagtgaatttggtacagggaaatatccatgcatggtgcttgatgtacatgtccctttagcacctctggttaattagctacttttgttttgactttaaatgaagaactagaacaaatactggtctctatattagctagttgatctaaaaaacaaataaggggaggctggcatgtaa

SEQ ID NO: 8966 - DNA, 481 bp, Glycine max
acatggtaacggagcagaggaaaagcgtgtggtgtcttcttctccggtggatcctcaggcctgtaatttgggattagccactcatgaatcaaaatcaatccattaaatcaaaatacctttctcactgttaactcatcaacaatacctaatttttttggttctttttttcacacttacacatattggctttctcttcctcgtacatataaaaggaagaagcaaagcatctttttcttttttcagtattcacgcctctgcccgcttaattttacttctcaactctctctgtgagtgcttctactcttttttttttttgtctttccttctttatttatctttctaaattacgaatcaataatcatcttttttttttatttatatatatttatcttcttcttgatcaagtattgaactttttggaattttcgtgaaccccatttcaagtaaagaatctgggttcgattggcataggagattggag

SEQ ID NO: 8967 - DNA, 709 bp, Glycine max
ttgttcacgcgtccgggaaaagcgtgtggtgtcttcttctccggtggatcctcaggcctgtaatttgggattagccactcatgaatcaaaatcaatccattaaatcaaaatacctttctcactgttaactcatcaacaatactaataccaattttgttggttctttgtttcacacttgacacatattggctttctcttcctcgtacatataaaaggaagaagcaaagcatctttttcttttttcagtattcacgcctctgcccgcttattttcacttgtcaactctctctattctccaagccataattggcgacccaccatggcaccagatactactgccttaagttattggttgaattggaggttcttcctctgtgcactatttattttattaactatgggcctggcatcatttttgatatggaagtatgaagaattcaataaatcgaggaatgagagaagagaaaggcagcgagaaacggctgggtcactttatgagtatgaagcatggagtacatgtcttaacggaattcatcctgcttggctgcttacttacaggataatttcttttcttctgcttttttctttgctcactgccaatgtggttgctgatggaggtggcatattttatttctacactcagtaagctacattgcacatatcttgtctattctagtcttcatgcagttatttattgatgagatagatt

SEQ ID NO: 8968 - DNA, 1354 bp, Glycine max
gggagtatacagtcttaactgagtgtgtagagcttgtaagaaagataacaggaatacatactaaccaaagcaagtataagtaactcatcagtttcttgatattaacagattcctcgagccatagttggcgacccaccatggcaccagatactactgccttaagttattggttgaattggaggttcttcctctgtgcactatttattttattaactatgggcctagcgtcatttttgatatggaagtatgaagaattcaataaatcaaggaatgagagaagagaaaggcagcgagaaacggctggatcgctttatgagtatgaagcatggaatacatgtcttaaaggaattcattctgcttggctgcttgcttacaggataatttcttttcttggggcttttttctttgctcactgccaatgtggttgctgatggaggtggcatattttatttctacactcagtggacatttactttggtcactatttactttgggcttggatcttgtgtctcaatatatggatgtcgctataaacacaataaaattgatagcagcacagtcaatcgtgctgatttagatactgaagaaggcacttatgtggctcctacacttgatgggactccagaattacctaacctgtacaagaattccaatgccaatcaggagccattcactcggaatactgctggtgtatggggttatatttttcaaataacttttcagacttgtgcaggtgctgtagtgctcactgacgttgtattctggcttgtcctttatccaacatatctgaatactaaagatttccatctgcattttatggatgtttgtttgcactcccttaacgccatattcctcctcggtgatgcatcattgaattgcatgagatttccagtgtttcgatttgcatattttattttgtggacagctatatttgtgatttttcagtggatcattcatgcttgtgtttcattatggtggccttatcctttccttgatctgtcatccccatatgcacccttatggtactttggtgtgggtgtaatgcacattccatgctatggcttctttgctttgataatgaagttcaagcacttgtggttgtcaaaattgtttcctggctcttgtcagtttatacggtgataatacattgaagattagtcatcggagtaaggctatcttcatcgtggctaaagcagattttaactttgaagatcaatttgtaaccccatccctccccccagagtgtttagaggactatcatttttgtgcgggggtaattgtgatatgtatttgtatttgcaacttcagatggaattcataaaagttctctggtctaaccatgtaaatcaaccat

SEQ ID NO: 8969 - DNA, 626 bp, Glycine max
gacccaaacaaacatgagtagggtcatagatgacgacagcgggggagaagtaagagaaagagagacatcgcgtttgttagctccgaattgatcaatggctcagtcatattcgtggctcttcctggcgacttgtgccaccctcttccttctgatttcgtcggcgacaacagcggacgcaggaggagcaggaacagcaccagggatggaaatgacgtggatgccctccatctccatggaaggagctgaagaagagttcatgttggacaacgagatcaaccggcgcatgttagcgagcacaaggtacataagctactgtgcgatccataggggcagtgtcccctgttctcaccgcggagcctcctactaccattgccaacctggcgctcaggccaacccttaccatcgtggctgcagtgccattacaaggtgcaggcactaagctaaattattctattctatttttattttttaaaaaaaaaaaattggcattgggataattgcattgtacacatcaagatattattgcatggttattaattaactccttattattatgtagtataatgtattggccgattgctgatatataattaccccaatgattcagtgtttgtgtcccccccaaa

SEQ ID NO: 8970 - DNA, 557 bp, Glycine max
taatggcggaaggccaaaattccgccatataaacacgccagtgcaccttatggggccaccatggcgggcttcccttcataaatagcctatggcggttggcaaaacatctgccatgccatggccgctatttaataacactgtatacaactatgcatggatggtcatgattaatagtttgtaatcacatgatcatttagaagtcaagtgcatttaacttttaatcttgaccattgaaataaaatccaattgtgtaaattttctcattttttacaataaccaagtctaggaatattgtctgatatgtatgaatttctcttagaacttgaatggctgttgaatttttgctagatgttgttggataatttgtaaatattatcttaaataggcagttaaggttggtggccaaaaccatctcaatctttaagatttaatattgttcgcaaggtctttggtttgattcttactagtaaacttttagtggaaagttatttacttatatgttggtagccattgtaaacccttgctaaagcttttcctctcctaaacctatctgtgcg

SEQ ID NO: 8971 - DNA, 642 bp, Glycine max
gggggaatctagtggaagagtgaataagagatatcaatatattatgataatggagggatacaataagaaggttatgattgtggggatggtgttgggcatggccatgattgggatggccaatggccaatactcgttttgtcgcatgcccagcgatgggttggcggcatgcaagccgagtgtgagtggggactatcctgctgatccctccactgcttgttgctcagccattgccaaggctgatcttaaatgcttctgccgcttcaaggattcgggccttctctctatgtatggtgttgatcccaacaagtgcatggaactccctgttaagtgcaaggttgtcgactctttccactgctagattcattagagggggcactaatcaatataaactacacaagggcacttaattaactatgtactctcgttgattgccattgttaattttctagcttgtgcccctgctgtttatgtttcttattttccaacgtgcttgttgctaatgtaatggatcgtggcgtgcttgtttttgtttgttgttgttgttgtaacttgtaatagtgtgatttgtttgtttctctactttagttttggctaatattcctgttacgtacgtacatctttaattttggtttgttgtgaacc

SEQ ID NO: 8972 - DNA, 496 bp, Glycine max
tcctgcgacaccagacagtgacagacagaacaatgggggaagcaaagggaaaggaagaagaagtgttagcctcagttcactcaaccgtgttcaaagaatcagaaagccttgatggaaagtgtgttaagattgagggctatgatttcaaccgcggcgtcaattatccgttgctactcagctccatggtcacaactgggtttcaagcttccaacctcggtgatgccatccaagtcgttaatcaaatgctagattggaggctagttgatgaacccgtagctgaggattgcagtgaccaagagagggatttggagtaccgaaaatctgtgacgtgtaaagtgtttctgggtttcacttctaatcttatttcttctggtgttagagatactgtgaggtttcttcttcagcatcgcatggttgatgtagttgttacaactacaggtggcattgaagaagatcttataaagtgcctggcaccaacatataaaggagatttctc

SEQ ID NO: 8973 - DNA, 568 bp, Glycine max
gaataataataatgagaaaaaagaaggagtaagtcaaaggaagcaaggcggctacggtatgcataaagtctctgacggaacaagagcttcactacacaactgagcccttcctcaacacgtcaaaaattcatctcatctatctgtagatcggagaaaccaaaaaaaaaaaatggagttcgacgagaagaaagcaatgatccgcgacgtggcgttacaagtcgttttcatctcgctcacgattttcagcttcctctggatgcacggcatccctcaaaacctctacgccaagctccgccaccgtcccccgaacccacgggccgtgcaagccaagcgccatttcgtcaaaggcgcgcagctcctcgcccaagccagaagatccaaaagcgcttcctccgcaacttccctcgccaaacaagccctagccgaggccgagaaggccatcgcgctcgaccccaaggacgccgcctcgcaccttctcaagtccatggcgctcgacctccagggcttccgcaccaacgcgctcgatgcgctcgacgccgcgttgtctccactcgcagcgggttccctc

SEQ ID NO: 8974 - DNA, 1008 bp, Glycine max
ggtaccggttaggaattcccggctcgacccacgcgtacggggagccactaaacgatgatcccaaacgttcaaatccctacctgggacgcggacggaggaggagcactctccccgtcgatctcttccaatgctgacacgtgctcattattctcctccgaccatttccgaatgttccagttcaaggtgcggaactgtccacgtggcaggtcccacgactggaccgagtgtccctacgcccaccccgccgagaaggctcgccgccgtgacccccgcaagtaccactactcaggcacctcctgccccgattaccggaaggggaactgcaagaggggcgacacgtgtcagttcgcgcacggcgtcttcgaatgctggctccacccttctcgctaccggacccagctctgcaaagacggaacaaattgccgccgcagagtgtgcttcttcgcccacaccagcgaccaactccgcgtcgtgacggattcatcgtcgtcgtcgtttgtttcctctcccacttcggtgctcattaactcttcgttctccgattcttcgccgtacagcttcgtccgcggaatagttaaactggatgaggaagggtcgtattcgggtctgacccgttgcgtgttcgggtcgccacgtggcgggtttatgagtgtgaatgggtgcgaggaggagcctgcgatggagagggtggaatcggggagagacattagagcgaggatatatgcgaagcttagtagggagaattccattggatgagtatcggaactcgtgaaatgaatggattccgtggcctttcatttgggtctgtctgtttgtctctgtacaatatataatgcaattcaataaaataaaactatatgtacatagttgagaaggtagagaccgttttgctctctgtgttttgttttttaccttagttcctggctgcccaaaattgggtagcatttgattgtaccaattgttaattttgcccttccctcaagaatcatgtttttcttattatttccc

SEQ ID NO: 8975 - DNA, 510 bp, Glycine max
tcctctcccacttcggtcctcaactcttcgtccttctccgattcttcgccgtacagcttcgtgcgcgaaatagttaactcaacgcggaatgttaaaatcgaggattcgggtttgacccgttgcgtgtttgggtcgccacgtggcgggtttttaagtgtgaatgggtgcgaggaggagcctgctatggagagggtggaatctgggaaagacattagagcgagaatctatgccaagcttagtagggagaacacgattggagcctctgaccctgacattggatgggtttcggaactcgtcaaatgaccgcatgtttgtttctcccttgttagattattatgttcgagacaaagtcattttatcttttctaactctaaaccaaatatgcactgaatggattccgttgcttttcatttgggtctgtatgtatagttaagttgtataatgcaatttgaataaaataaaataaaactctatgtacatagttgagaccgtttgggtctctgtttttgt

SEQ ID NO: 8976 - DNA, 341 bp, Glycine max
  unsure (1)..(341): unsure at all n locations
gtctagggaaaatgatgatgtaactagatgaaaaatagttaccacagtatggtcggaaaatagatagttatagtagtgtgtttggatttctgttccaacacctcaaacgcccgttcatttcaatccatgcatagagaagcttttctgtttgggtacattgcaacgtgtgcggatagttattcaaacacatccacagtgttacaatgggatgtaatagtaatacagtttgccagtaattagtgagttaaccaaactatatatccttttgatgaagtaacacatcagttacttgaaatgagtaactagccatttcaatgcacgaaaaagtcaaccccgncgtc

SEQ ID NO: 8977 - DNA, 452 bp, Glycine max
  unsure (1)..(452): unsure at all n locations
gagaacagaaacagaacaaaacacaacaataaaattaaatcctatttttctaaaaaaaagagaaaagaaaatgcaaaaagtagaagagagtgtgatggagtcgttggtgtgtccaagcttcagcgcctattcctccaacacgctcgacgacatcgcggatcaagtcattcgaaacgacgtgcgtttccaagaaaacgacaccgacttcgaattcgtcgcgtttcgcaaggtcgccgacggagtttttgtggacaacaacgccactccggcgttcccgatcttcgaccgcgacctcgccaccgcggcggaggaggacagcggagaaggaaaacggcgagcttccngcgaggaggatgacgtggcggcgattcagatcacgctcgggaagctgctgatggacgattcttcagcgtcgtgctcgtcgtccgaggtggaggacgagctggagaatg

SEQ ID NO: 8978 - DNA, 676 bp, Glycine max
aggggcaatgtaaccgaataataacacgggcccgctccctctccatcccatcacaaagaaaacagagattcgcattattagcagatcggactcaaccgatgaagttgaagccgcagtgaaacaaaccagaataattgacgcatcatcaattagatcgagctgctagaaatgaaggatgaggacgggcttccgacgaccgccgccacgaagaaggaaagcatggattcgagtctgtttgggaaagggaggtacaaattctgggcgttagcggccatcttgcttctggcgttctggtccatgttcaccggcaccgtctcgctccgctggtccggcactctcaattccctttccagcgacatcgacactcccatccacgacgacctcgatgttctcgaaatggaggagagggagaaggtggtgaggcacatgtgggatgtgtacaccaacagtcgcagggtgaggttgccgcggttctggcaagaggccttcgaggctgcctatgaggatttgacgagcgatgtcgctgaggtcagatacgctgccgtcgccgagatcgccaagatgtctgttcgctccattcatttttatccacctcctcttcaatccacgagtgcccgatatttcagcaagagcctggaggaagccgagataggtaaagatgcaacaacctcaaggc

SEQ ID NO: 8979 - DNA, 402 bp, Glycine max
gggcagtgtatctgagtaatatcactgtccctttccctctccctttcatcagaaacacaaacaaaacaccgattcgctatattaccagatcggactcaattcctgaaccgatgaagttgaagccgcagtgaaccaaaccatcatcatcgcgttaccggaataatcgacccatcatcaattagatcgaaatgaaggatgaggacgggcttccgacgacgaccgcggttacaaagaaggaaaacttggattcgagtctgtttggaaaaggcaggtacaaattctgggcgttagcggccatcttgcttctggcgttctggtccatgttcaccggtaccgtctcgctccgctggtccggcactctcaattccctttccaacgacatcgacactcccatccacgacg

SEQ ID NO: 8980 - DNA, 1842 bp, Glycine max
  unsure (1)..(1842): unsure at all n locations
atgcaccgcgtacgtaangctcggaatttcggattaccaacagaatctactctctattttcctagcttagattccttctccaatggctcttgccgtttccactacttcttcctcttcagctgcagcagcagcagcagcgtcgagctctttcttctcgcgccttggatcttcatcggacgctaaagctccgcaaattggttcctttcggtttccggagaggcctcaagtttcgtctggtgttgttaatttaactcaaagacgctcctcggtgaggccactcaatgccgaaccgcaacggaacgattctattgttcctcttgcagcaactatcgttgctcctgaggttgagaaggaggaagaagattttgagcaaatagcgaaagaccttgaaaatgcatctcctcttgaaattatggatagggccctcgagaaatttgggaacgacatcgctattgcatttagtggtgctgaagatgttgctttgattgagtatgcacatttgacgggtcgaccctacagagtgtttagtcttgacactgggagactgaatccagaaacctacaaattttttgatgcggttgagaagcattatggaattcacattgagtacatgttccctgatgcggttgaggttcaggcattagtaagaactaaggggctcttctcattttacgaggatgggcatcaagagtgctgcagagtaagaaaggtgaggcccttgaggagagcccttaagggtctcaaagcatggatcactggacagagaaaagaccagtctcctggtactaggtctgaaatccctattgtccaggttgatcctgtttttgagggactggatggtggaattggcagcctggtgaagtggaacccggttgcaaatgttaatggtctagacatatggaacttccttaggaccatggatgttcctgtaaattcattgcattcccaaggatatgtttcgattggctgtgagccgtgcacaaggccagttttaccgggtcaacatgaaagagaaggaaggtggtggtgggaggatgccaaagccaaggagtgtggtcttcacaaaggtaatataaaacatgaagatgctgcccagcttaatggaaatgggacctcccaaggaaatggctctgccactgttgctgacattttcatctcccagaatgtggtcagcttgagcaggtccgggattgagaatttggcaaaattagagaaccgaaaagaacactggcttgttgtgctctatgcaccatggtgccgcttctgtcaggctatggaggagtcgtatgttgatttggcagagaagttagcaaggtcaggagtgaaggttgcaaaattcagagccgatggagagcagaaggaatatgcaaagagtgaactgcagttgggaagcttccccacaatacttctcttccccaaacactcttctcaaccaattaagtacccttcggaaaagagagatgttgattcattgacggcattcgtgaatgctttacggtgatggttaattgagtatcttgctcaatgttccgtcgtacaataccggcaataaatttcttcacagttttggcaattcactgaaaatgggaatggcagttttgacagcaaaacgaagattctcagctagaagtatccctgtataggtttagataatcttcctcacaaatataattgtagtagtcattctgagaatgtgatttcctgttttgttagatgagtagagttatggttgtattatgttgtttcttcactatcataatctacgtttttagttttgccagatttccaagaacgaaggctacatagttcagctgtatgtccgtgtgacataatagtgtcctg

SEQ ID NO: 8981 - DNA, 332 bp, Glycine max
ttctgagagagaacccataacagctagttaatggccctcgctttcacttcttcaatttccgcaccaacttccaccttcccatcatcggaacccaaacttccgcaaattgggtcaattaggatttcggagaggcccattggaggcgccgttaatttcaatttatctcaaagacggagcttggtaaagcccgttaacgccgaacctccacgcaaggattccatcgttcctctcgcagcaacaaccatcgttgcttctgcttctgagacgaaagaggaagattttgaacagatagccagtgatctcgacaatgcttcacctcttgaaatcatgga

SEQ ID NO: 8982 - DNA, 392 bp, Glycine max
attctcctacatgtccctgaaaaaaaccaacagaatctactctctttttttctaccttagattccttctccaacaatggctctcgccgtttccactacttcttcctcttcagcagctgctgcagcttctagctccttcttctctcgtctcggatcttcctccgacgcaaaagctcctcaaatcggttcgtttcggtttccggagaggtcgcttgtttcgtctgttgttgtcaatgtaactcaacgacgctccttggtgaggccactcaacgccgaaccgcaacggaacgattctattgttcctcttgcagcaactatcgttgctcctggtacgttttccgcgttatgttatgaacacattaccttgttttcagggaattttctgaaataaag

SEQ ID NO: 8983 - DNA, 612 bp, Glycine max
cttgggcaaaacaaaaccttggttaaaccctgaactcaaagttgacattacaggagagagagagagagagagagagatgtttgggaggggaacggtgtggtcagtgttgaggcgcggcaaagaagcttgcggcggatttcacaagctgagaggaacgcctttctcttattcttcttcttcaacacctttcaagttcttatcccctcccgtctccacccattgctttcatgctttccgatcccaactaatccccaagggtcatcatgttcatgtgccacaaatgaggaacttttctaagatggtctctgctgaacaaaaggaggagggattaaagctgctagtgagtgggggttctcgtgctcagtaattggttggaatatggctctttgggtcagcggcatgggtgttcagcatggtggtgctcgggggtttaacaagactcacccgatctggtctttcaatgactgattggaaattcaccggtactctccctcctttctcggatgaagaatggttgcaagagtttgacaaatataagcagtcacctgagttcaagcgtgttaacagaggcatgaagattgaagaattcaaattcatatattggatggaata

SEQ ID NO: 8984 - DNA, 405 bp, Glycine max
ctcgagccgaatcggctcgaggtcggtggtgggaataagcgttttagtggttgagtttgggtttcgcaaaacaaaaccttggttaaaccctgaactcaaaattgcattgcaatttgtaggagagaaacagagatgtttggtaggggaatggtgtggtcagtgtggaagcgcggcaaagaagcatgcaaaattcacaagctatgcctaagaggaacgcctttctcttcttcttcaacacaaccaccacctttcaagttcttaacccctgccggcgccacccattacattcatgctttccgatcccaactattccccaagggtcatcatgttcatgtgccacaaatgaggaacttttgtaagatggtgtctgctgaacacaaagagggattgaagctgctagtgagt

SEQ ID NO: 8985 - DNA, 1436 bp, Glycine max
attcgccggtcgatccatgcgaccgcaaagcgcaaattaaagcgcaaaaaccattctccttcggtgctcttgaaaacatgggaaaacagagcacagaattctctgccctcaactgcatcgacctctccaaccctgacatcaaccaatccgtcaatttactcaaacaggcatgtttggattccggttttttctacgttgtcaatcatggaataagccaggaattcatggaagaggtttttgcacagagcaagaaattcttctctcttcctcacaaggagaagatgaagattctcaggaatgaacaacacaggggatacacccctgttcttgatgagttgcttgatcctgaaaaccaagtgcatggagactacaaagaggggtattatattggagttgaaaaaggtgaagatgacccagaatcgaataaacctttttatggaccgaataactggcccgcaccagatgttcttccagggtggagggagaccatggaaaagttccatagagagacattagaagtagggaaagcagttgcaaagataatagcccttgcacttgatttggatgctaatttttttgatcagccagaaatgcttggagagcccattgcaactctgcgttggctgcactatgaaggtcaagtttcggatcccttgaaaggattatatggagctggagctcatactgactatggtttaattacactgttagcaacagatgatgtctcgggtcttcaaatatgcaaagatagggatgctaaacctcagaaatgggaggatgtagcaccattgaagggagcattcatagtgaatcttggtgacatgctggagcgctggagcaactgcgtttttaagtccacactgcacagagttctaggaaacggtcaaggaagatattctattgcatacttcttggagcccagtcatgattgtctagtggagtgcttgcctacctgcaaatcagacagtaatccgcccaaatttcctcccatcttatgccatgactacctaactcagcgctacaacgacactcatgctgacttgaatgtttataagaaacaacaagcttgagtagtcaacctttggaactgaacagcctggagatttctcacaaggacactcacctaagctgatttggatgtttacaataaacaacatgcttaagaagttagtcttttggagctgagcagctggggaattttggactgctttatgtgttagagttaacagcatcatattgcattggcgatgttatgtagaatttgtttgaatggcaaattagttttgttttgtggaaggggggattcagctgtatggtttggtacttaatgttaaacctaaaagaaaaacatgtatgaaattagcagatgtattttttttattcagcactaaagttgggaaatgggaatgataggaagatgaaaaatgaaaattagt

SEQ ID NO: 8986 - DNA, 388 bp, Glycine max
ggaaccaaacacgaccttagtctcctccatgattcccctcaaaactcatcctcattctcccttcatcttctccgtttccaaaaccaacccactttacttctctttgctccccacttctatctctcttctctcactcaaacaacccccaccctctctctcttccaatcttctcagggtttcaaatgttggagtttcagtttgcagaaccgaacaccacgaagaagaggaagacaagggggtttcgttggagcttcacgacttgtccccaaatggggaagtgtatcagaaaacgctgcaattggttgagtgttccatgttcgctgcactcaccggtttggtctatttcttgagcaactcccttgccattgagaattacttcagttgtttc

SEQ ID NO: 8987 - DNA, 359 bp, Glycine max
aggggagggaccaggtgacaattactcaggttacaattgctcgtgtgtataattgggatgttcatcaacggagagttcaacatgctgttgctacaactgctcaagactagttaaaaaggagagtttattcaaacctagatccaaaattgaaaactcataccttttgcttagagtatgatttttatctcttgccaatttctgatttagataaattgtgggttgctcccttaatctagttccggttttaccacagtagacactagtaggagctttttcgtatatttatgttattattgtcttggtctcttgtaaaatgcccatatgttaggttgatgggaaagttttggtttggtgtgccc

SEQ ID NO: 8988 - DNA, 466 bp, Glycine max
caaagcgtagccgttgggttgttctacttaatttgctgtaagcttttacttaaagaaagaaaagggctttcttcgtcactctacagtcttccatttctctctctctctctgcgccttcaaactacaaagaatggcggcgttgttccacttctctcttcttttcacagttctcctttcttccattctcttatcgaatcactcagtaaaatgcgacgaccatgatgaggaagatgatctttatcagggaatcaacaagtatagggaatcattaaacttgacatctctaacaaagaatgaaaatgcgaattgctttgctgatgaaattgctggccagttcaagaatcaaccttgtacgaataccacaggcgcaaacacagtaccaggcacggagcctcagttctccaactacccagaccttttgaataaatgtcaattgaatatttctaacacgagggatggaattgtt

SEQ ID NO: 8989 - DNA, 424 bp, Glycine max
gccgttagtgaggatgaacaagcccagtactatggcactgctattgaggttggccaattacatctaagtcatattgaaagagagctgaatcatgcacaattatgtactgttgacaatgaagtcagtgctgcccagttgattcatgcaaatgctgatggtgagaatatgcagctctgtgatccacacattgaggttgatgaatcagatctaggctatgcagcaggtgaagaaaataatgaggacccagatgatgcggctgctgaatttagtcctgaagaactaaagcacagagtcggtgaagaaataaagcaagagcttaaccatgtgcctggagaggaaaacatcgaggaactgaatgcagccaatgagattcattttgtggaaccttcagataatatggtgattgataattcacaactttgtg

SEQ ID NO: 8990 - DNA, 844 bp, Glycine max
cagcttcatgaacttcctagacctcctggtaatcaatctagcaagccacgagtgggtcactctgctccattagtattaaaaaatccagaggctgccatgactaataaatttccttcagttgtattgagggcagcatctccactcccaactccacctgtctctcggagtttctctataccttctagtggtcagagagttgtggcattaaatgtctctaatactaagtatttggatactccccaagtttcaaaggttgataaagccgtgtcacctccactaacacccatgtcccagagagcatctaatatatctgacctggcttctcactctagcgaaatctcagtgaatgcaggtgggagctaaatctcttgcgcacatactgaggttgagttctgctgaatgattcttagtttaagtgtctttattctatgtcggagctaaatcacttgcattgtggagttatagggttttcccaacaaaaaggttcaggcaaatatatgtaaatatgctgtttatgtattgtttagcttctcatctcaatttgtatctattatttttactttaactagtgatgatgggaactaaactctacatgattgtcattataatgtgttgtgtacatattcggatgaaaaattttgttcacttcccaagtccaacatgacgacaatgaaagaactttagcaacggaatgagctgcttaccccatttatttattttttccattttcctggtgctcaaatttcaaactgatttctattggccgtgagatgacacttgaatattcatcaatatgaacttattacacttaatttgggtattgacttttggattatgatttgag

SEQ ID NO: 8991 - DNA, 391 bp, Glycine max
tttttcttctattgtcaaatctacagtgtttttcttttctctctcacacgaaaccctctccctccctttccctcagatttctcacttccttttctcctttccatttctcaccttctccccctctcttcatctcttctctaccccttttttggttttccttactcttacgaatcaaaacccgcaactttggacgtcgttggagggctttcgtcgctacccaccataactgacgaggggtgaccactggtagcaaggtgtattaggtccaattcatagtacctgaaagcacactttactcaaattgggaggaggtgttagtagtaggcatgatcggtccaggggctgtagaaatattagtgaaggatttgaaagtctttgacacatttaatac

SEQ ID NO: 8992 - DNA, 285 bp, Glycine max
caggcgtgtggttcatgatgatctggaagttgttaaagttttgagaaaatccccatttgctttcacatatgctgacatggtgaatggcttggttccaaacattgacgttttgaggcagtctggtgtgcctcaaggttcgatctctctgctgatggtccattttcccagtgtagcatatgggaagcattccagatttgtggaagctgtcaagagcagttacgaacatttgggtttgatcctttgcacatactatgtgtcatcgctaggtgagtgctctaaaacatg

SEQ ID NO: 8993 - DNA, 751 bp, Glycine max
cccacgcgtccggagaagcgacagaagggaagagttttaatattattgtattgtagtagtagccatggggactttcaatcactatgtgattgttaagttcaaagatggtgtggcagttgatgatctcattcaagggttggagaagatggtctttgggattgaccatgtcaagtcctttgaatggggaaaggacattgaaagtcatgatatgctaagacaaggtttcactcatgctttcttgatgacattcaatgggaaagaggagttcaacgcatttcagactcacccaaatcatcttgagttctcgggagtgttttcacctgctattgagaagattgtggtgctggatttcccatctaacctcgtcaaagcaccagcatgatcctcaacttattcaagcaaataaacttttccatctttaaaagtgtatgcatgtgtgtgcatctgctatttgtagtctgttatggttgttcctagctagttcctacaatctcttatgcaatttcaaacttgataataagttcttcttttttcctaattaatggaaatttctagcattattggtatttgttaatactaattctatgatttctctccatgtttctactgccacaaagggtgtgatgaatgatgaatgtgaacagtatgagccccttgattggatgttttctatttggttatagaggagggaatgtgattatcaatacagagtttgaatatatcatcacctaactagcaaggggtaattttc

SEQ ID NO: 8994 - DNA, 652 bp, Glycine max
agggggccacgggtaatcctgttcctgttccaacctcccaatatccacttacccttttgtgctgccactaataaaactgcacttcaacttcaaattttcaacctttccccattcacgtcccttcttccttccaatgttcccttccatcataaattctaatcaatctcgtgaccagcaacaacaaaagcaaaagggagaatggttagcaggaagtttcaaggcagagaacttcattccagggcttgttataggtttcatttttgggttgttgttggatttatcaaagcccggtagaaatcacttgtccaagaaaatttgctcatctgccagacctcaacaacagcaaatctcagtctcaagcaatgctgatcaagaacttaaaatggttctggtcgttaggcaagacctaaagatgaaatctggaaagattgcatcccaatgtgctcatgctgccactggcatgtacgctgaattaatgcaaagtgatcggtatcttttgagaagatgggaacagtgtggccagcccaaaattgttgtgacttgcaggaatcaacaagaaatgaataaactagcggaagcagccgagagtattggccttcctacttttgttgttgctgatgctggacgaacacaggtttcggcaggatcaaag

SEQ ID NO: 8995 - DNA, 953 bp, Glycine max
tgaagccgtcctgacagacatgcatgcgccgttcgagcggctcctcgatcggctccagccggcgccgacagcgatccttggctgcgtcgagctccgctggcccatcgccgtagccaatcggaggaatattccggtggctgcgttttggaccatgtccgcgtcgttctattccatgctgcatcacctcgatgtctttgcacgacaccggggtttgaccgtcgataaggatacgatggatggacaagccgagaacatcccgggaatttcttcagctcatttggcagaccttcgaactgtgcttcatgaaaatgatcaacgagtcatgcagcttgctttggaatgtatttcgaaagttcccagagcatattatctttgactcaccacagtccaagagttagaagctgaaacaattgagtccttaaaagctatatttccctttccagtctatcctattggccctgctataccttatttagaactaggacaaaaccctttgaacaatgatcatagtcatgactatataaaatggctagattctcagccacctgaatcagtattgttcatttctttcggtagtttcctttcagtgtctactacccaaatggatcaaattgttgaagcactaaacagtagtgaagttcgttatctttgggtggctcgagccaatgcttcttttttgaaagaaaagtgtggagataagggcatggtggtgccatggtgtgaccaattgaaggtgttgtctcattcttccgttggtggattttggagccattgtggatggaattccactcttgaagctctctttgctggggtgccaatgctgacattccctcttttcttggatcaagttccaaatagcagccaaattgtggatgagtggaagaatgggtctaaggtagagacatcaaagttggacagtgaagttattgtcgcaaaagaaaagatagaagaac

SEQ ID NO: 8996 - DNA, 521 bp, Glycine max
gactcagcagtagcaaacaaaattcttcgtatttgcttcttgcttttttctttttgaaccacaaaatggccgacgacagcacagctacctgcatcgacatcctccttgccatcatcctccctcctctcggtgtcttcctcaagtatggatgcaaggtagagttctggatctgtttggtgcttactctttttggttacattcctggaattatctatgctgtctatgctatcaccaagtgatcatattcatcacctcttgtagacaatgaataatttgtcaaagtacaacggttatgcatgtttctcaactccagcattgatataatcgtttgatctcagaacaatgtgattcttttttgttttctgtctatcagactctattcgttttcagttttcattgttgtgtttttaattactgttattgtcttgtatggaaacgaaatgtagacatcgtggcttctagtcttaatatatggtaatcgaattcaaacgtactacttggttggtgtaaaaaaaaaaaaa

SEQ ID NO: 8997 - DNA, 537 bp, Glycine max
atcactccgagcctcaacagcagcaaagcaaattcgcagttggtaagagaaaatggccgacgatagcacagctacctgcatcgacatcctccttgccatcatccttcctcctcttggtgtcttcctcaagtatggctgcaaggtagaattctggatctgtttggtgcttaccctttttggctacattcctggaattatctatgctgtctatgctatcaccaagtgatagatcatattcatcattttaattttgggtggacaatgaataatttgtcaaattaaaggacgacggctatgcatgttcctcatcaactccaatattgatattcctgtataatcctttgatctcagatggacaaatgtgattcttttttgttttctgtctatcggtctcaatattcctttttcattgttgtgtttttaattattgttattatttatcttgtgtggaaacaaaatgtagacattgttttgtggcctctagtcttagtattggtatcaaattgaaatgtactacttggttggtattaaaaaaaa

SEQ ID NO: 8998 - DNA, 503 bp, Glycine max
actcgagccgattcggctcgaggccgttgaagcgaggaaaataggtgaaggcctgaagggtgaatcacttctcatctgttctccattggaagccttcgtccattctgagtcagatcgaaagctcacaagcattacgagttgaaatcgttggaacctcgtcgaacaaccgttcaaatcgtcaaagacaaacgagctctgactcgccggaatctcaccggaaagcaagtctttctgaacctgtcgtgctcggaactcagttggcgaacttgaaattgacgcttagggcaactccaacgaaaaattccgtctaaaacgaggaaattctaaaattcccgttcgctcttgcagattcacgctcgttctctttttcgctctcgctgatcgtggctcgttttccctctcgagctttctctctgaatttgaaaatgtcaatggcaagcgaatctagctgggttgggaggaagcctgtgaaacgcattgggggaatgtccgatgctctatca

SEQ ID NO: 8999 - DNA, 434 bp, Glycine max
gtcgtcttcttcgagttgccgttgaagcgatgacaatcggtgaaggcctggagggtgaatcacttctgatctgttctccattggaagccgtcgtccattctgagtcagatcgaaaactcacagtcacactcattacgagttgaaatcgttggaacctcgtcgaacaaccattcaaattgagacagacacacgtgctctgactcgccggaatctcaccggaaaacaagttcgtcggaactcagttggcgaacttgaaattgacgcttagggcaactccaaccaaaaattccgtccaaaacgagggaattctaaaattcccattcgctctctctctcgctcttgcagattcacgctcgttctcactctggcggatcgtggctcgttttcgctctcaagctttctctctggttgaagctgaagagtaacctgagata

SEQ ID NO: 9000 - DNA, 712 bp, Glycine max
cctcgagccgaatcggctcgaggatgtcatgaagatgggtgatgacagaaagaaagattgacagcggaagtacattgttgtctcagccaggtagttactgttactgttattatggaactcaaacaacaaaaactccttcttcttctgattctaacgcttctttttgctactgctacgcctatcaatacgttcgacctcttcctcgtaaaaccttaaccatcccatgggattcaatttccaaggcccactcctcttaccctcaacaggtacacatttctttggcaggagacaagcacatgagagttacatggataaccgatgataaacattcaccttcatatgtagaatacggaacattacctgggagatatgactcaatagctgaaggagagtgcacctcttataactatctgctatatagctcaggaaagatacatcacgctgtaattggccctttggaagacaataccgtgtacttctaccgatgtggtggaaaaggtcccgagttcgagctcaaaactcctccagctcaatttccaattacttttgctgtggctggggatctgggtcaaactggttggactaaatcaacactggcacatatagaccaatgtaaatatgatgtctacctgctaccaggagacctttcatatgctgattgtatgcagcatctgtgggacaattttgggaaacttgtggagccgcttgcaag

SEQ ID NO: 9001 - DNA, 665 bp, Glycine max
gttctagatcgcgggcggccgctcgcgatctagaactaagttcacacacacaaaagaatcagcatggctttcaatcaagagttagaagctgtaacccaagctttctcagggcatggagtggatgagaaatcattggtaacattactgggaaaatgggatcctctggagagagaatctttcaggaagaagacaccacatttgttcagtgaagatcatgaacgccattttcagaggtgggatgatcaatatgtccgtcttctcaagcatgaattcgtgcgttttaagaatgctgtggtgctttggaccatgcacccttgggaaagagatgctcgtttagtaaaagaggccctaaagaagggtccaaatgcatatggagtgctgattgaggtttcatgcactagatcctcagaagagctattgggagctaggaaggcataccattccctctttgaccactccattgaagaagatgttgcctctcacatccatggcattgaaagaaagctattggttgccctactaagtgcctatagatacgaaggaacaaaggttaaagatgacactgcaaaatcagaagccaaaatcctttccaatgcaattaagaatgctcataagaagcctattaatgaggatgatgaagtgataaggatattggcaacaagaag

SEQ ID NO: 9002 - DNA, 454 bp, Glycine max
tttacgcgttcgcccacgcgtcggagaaagaaagaaggaaagcaaagtagacgagtgattgcgttgcgattgacgacgacgaggaatcatgtcttccggcggcggcggtggtaagccgttcttctgccacgtgtgcagtcagaggattacgtgctccgatgagtcggaaccattctgcccgatgtgtatggaaagtttcgtagaagaatgcaaccctaacaatcccaaccctaatctcttccccgacagtgatgaatcttcggatcccgaactccccttccaccgcttctcacttctccctctcttgctctcatcagtctctaggtcccgatccgaacccgacgtgttcgacccgatggtcttcctccagaaccaccttcaggaccttcgcgccgacggtgccaacattcaagttgactttgaccatccttccaacgagaatcaaggctttcgc

SEQ ID NO: 9003 - DNA, 468 bp, Glycine max
cctcgagaaaagtaggaaaccagattagagtagtagtttgtgttgcgattgacgacgacgataacgacaacgacgaagcatcatgtcttccggcggcggcggaggcggagcaaagccgttcttctgccacgtgtgcagtcagaggatcacgtgctccgatgagtcggaacccttctgcccgatctgtatggaaagtttcgtagaagaatgcaaccctaacaaccctaaccctaatcttttcaccgagaatgaggaatcttctgattccgaaatctccttctccctgctccctctctttctctcctccgtatccaggtcccgacccgaacccgacatgttcgacccgatggttttcctccaaaaccacattcagggccttcgcgccgacggcgccaacatccaagttgactttggccacccttccgagcagcaagggtttcgcctccctgcgaacatcggcgactactt

SEQ ID NO: 9004 - DNA, 840 bp, Glycine max
gggattacctaataataagttaataacatatgcatgccacgtggatgctgtggatagaagataggaagcaagcaggtgcagcttgaggcagaggagacgacatggaagccgtaacaggctcccaccatttttccactctctccctttctttctctcacaacaaaaccttgcgctcttcttctgccaaatcaatcaggctttcctctccttcgaccaacgcttccttatcttccagaaactggttcgcgaaagaggtatggggttgggtgaactccaactccaaaggcgtcgccgtgagaaggtacacacgcggagtggtggtcagggctgaaatgttcggccagttaacaagtggccttgagactgcatggaacaagctcaaaggagaagaggttttgtctaaagagaacattgtggagcccatgcgagatattaggagagctctcttagaagctgatgttagtcttcctgttgtcagaaggtttgtgcagtctgtcagtgaccaggctgtgggtgttggtgtcattcgaggagtgagaccggatcagcaattggttaagattgtacatgatgaacttgtacgattgatgggtggagaagtttctgaactggtttttgccaaatctgggcccactgtcattttattggctggacttcagggagttgggaagacaacggtttgcgcaaagttggcaaattatctcaagaaacagggaaaaagttgcatgctagttgctggggatgtttacagacctgctgctattgaccagcttgctattttgggaaaacaggtggatgtgcctgtctatacagcaggtaccgatgttaaaccttcagaat

SEQ ID NO: 9005 - DNA, 388 bp, Glycine max
  unsure (1)..(388): unsure at all n locations
ggaggaacataagggtgttgtttatatcgtgcttgagagttgatatttgagtggtctttcaatggggcatttgggtcagaatattttgaattatgaacttgaaaatggagtcaatatgtgttgtgatgaagactgttctaagaatgagatcaatacaactcttattcagtatgctgtgaaagacctattgacgggtcttggggaagacatcaacagggaaggcattataaagacacctcttcgtgttgccaaggcactttgtgatggaaccagaggttatagtcaaagtgcgaaggaaattgtggaaggtgcacntattcctgaaactggcgtagacaacacaaaagttggtcatgcacgtggagtatgtgggcttgttattgtgaga

SEQ ID NO: 9006 - DNA, 787 bp, Glycine max
gaaaacagaatgaatagagagagatggtgtagaattgaatgggtggaaagtgaaagagtaagacaccacaaagtgtaacttgagtgattagatctgatgagtgcagaaagaagggaggattgttggtgatcgatcatcgatcatcgatcatcgatcatcgatggcgtctgctagccttggaagtggtggggtgggcagttccaggtctgttaatggtggcttcaggggttcttccagttccgtcgattggcttggcagagagatgcttgagatgtctttgagagaccacgaggacgatagagatagtgagcctgacatcattgatggtttgggtgctgagactggtcacgtgataagaaccagcgttggtggccgaaatggtcaatctaagcagaatgttagttatatttctgagcatgttgtgggaacaggctcttttggtgttgtttttcaagccaaatgtagagaaacgggagaaattgtggccatcaagaaagttctccaggacaagcgctacaagaatagagagttacaaattatgcaaatgctggatcatccaaatattgttgccctaaggcattgtttcttttcaacgactgacaaagaagaagtttacttgaatcttgtacttgaatatgttcctgaaactgtgaatcgcatcgccaggagctatagcaggattaaccagcgaatgcctttaatatatgtaaagctttatacctaccagatttgcagggcccttgcttatatacataactgcattggtatatgtcatcgtgacatcaaa

SEQ ID NO: 9007 - DNA, 1110 bp, Glycine max
gacaacaaaatactataagggataaaattattccaacatacatgacacaccaacccaaacaatacagcgtataaactatactatactatactataacctaacactatcatgtcttataagttataacagagaggccctagaataaccagaggcacatgtctgacataaatatacatgaaaacgttgtctcctgaacaaaaatagaaaacaactcctttgacgacaaataaagaaaggaaaaagaaacttttcatattatataataatataatcctaggaactctttctgtggagtttttctcggataaaccggataatttacaacctgctagtaagtgacgacaacttggggggtggggatggggggcattgctaggtgtgcaaagccataaataagttctgtttacgcgcatgctctggtataagccgattgatgacatcagggggtacaccagaaagttcctgaggtttaaaattaaacagtggaggaagtggtcgagcattaggaaggcgggtgtttgggtccctcaattcatcaaaaaatggatgaatgcaagcttccaatgcagtgcatctcaaattgggggagtactgaaagaacctacagacaaggtccactgcttctgggggtaaacgtttctgaaagaccttgtgccacggatgaggttttatctgtggaaacttaaattcagtataatttgggttcatgcactttatctcctccctggttggagttcccaaaaccttgatgatttcaactagctgatcaactccactctctccaggaaacaagggctgtccaagaagtaattcagccattacacaaccagttgaccatatatctatggcagttgtatattcggtggccccaaatataagttccggagcacggtagtatcttgaacagatgtaagaaacattaggttctcctttcaccaacacttttgcactcccaaaatcacatagtttcagctgatgagtgtgcgggttctcaagtaggttctgaggattaaccagcgaatgcctttaatatatgtaaagctttatacctaccagatttgcagggcccttgcttatatacataactgcattggtatatgtcatcgtgac

SEQ ID NO: 9008 - DNA, 466 bp, Glycine max
ggatagatggaagacgcactgagagagatggtgttgaatgggtggaattggaaatcgaagtgaaaagaacggttgaaagtgaaagagtaagatgctattgcaattgcgctgctctcattctcaccacaaactgacacttgcctgcagttgaagaaagaatagaggatcgtggtcgatggcgtctgctagccttggaagtggtggggtcggcagttcgaggtctgttaatggtggcttcaggggttcttccagttccgtcgattggcttggcagagagatgcttgagatgaggttgagagaccacgaagacgatagagatagtgagcctgacatcattgatggtgtgggtgctgagacaggtcacgtcataagaaccagcattggtggccgaaatggtcagtctaagcagaaatgttagttatattgcagagcatgtagtggggacaggctcttttggtgttgtttt

SEQ ID NO: 9009 - DNA, 369 bp, Glycine max
ggtgttgaatgggtggaattggaaatcgaagtgaaaagaacggttgaaagtgaaagagtaagatgctattgcaattgcgctgctctcattctcaccacaaactgacacttgcctgcagttgaagatctgatgaattaattgagcatctgagtgcagaaagaatagaggatcgtggtcgatggcgtctgctagccttggaagtggtggggtcggcagttcgaggtctgttaatggtggcttcaggggttcttccagttccgtcgattggcttggcggagagatgcttgagatgaggttgagagaccacgaagacgatagagatagtgagcctgacatcattgatggtgtgggtgctgagacaggtcacgt

SEQ ID NO: 9010 - DNA, 547 bp, Glycine max
cctcttggaactttgtcgaaaaaaatagaagacactagaagacagtgattggattagggaagaatcgcagacagtgttccgcttcttcatcgaacttgccggttgtcattgacctctctttctttccctttcctttttctccatctctcgcaactcttcacctcaccgcgtcattcgcacgctgagacagcaaccaccgaacactgaatcgcgattcgcagtgtatgacgagcgcttcggagctattccacaccagaaggcatcgattgggacgaaatgctctcgatctagggctcgacaccgaactccacgccgccgattctctccgccaactccgccttcgtcactactacctccgccgccaccacccggagcgtgcatctgatagaattgatgggaggtatcggcggtctttcgtaagtgagagcgtggattctgaagaaaacgtgagaagtagtcttagagggagtagcagcgagagactacccgctggtgtggttcttgcacgggcaagactccttcagaggttgagaggggaacctctatc

SEQ ID NO: 9011 - DNA, 515 bp, Glycine max
  unsure (1)..(515): unsure at all n locations
atttntgcctcttggaactttgtcgaagaaanaagaagacaaaagaagatagtgattggattagggaagaatcgcagacagtgttgggcttcttcatggaacttgctagttcgcattgacctctctttcttgtcctttcctttttttctccatctctcgcaactcttcagcttcacggcgtcattcgcacgctgagacagcaacctccgaacactgaatcgtgattcgcagtgtatgacgagcgcttcggagctatttcactccagaaggcatcgattgggacgaagtgctctcgatctagggctcgacaccgaactcaacgccgccgattctctccgccgccactaccacctccgccgcctccgtcaccacccggagcgtgcatctgatagaattgatgggaggtatcggcggtctttcgcaagcgagagcgttgattctgaagaaaatgtgagaagtagtcttagaggaagtgacagtgagagactaccccgtggtgtggttcttgcacgggc

SEQ ID NO: 9012 - DNA, 371 bp, Glycine max
gcaacctccgaacactgaatcgtgattcgcagtgtatgacgagcgcttcggagctatttcactccagaaggcatcgattgggacgaagtgctctcgatctagggatcgacaccgaactcaacgccgccgattctctccgccgccactaccacctccgccgcctccgtcaccacccggtacgtacatttccttttctttccgccgctattccactaattacaatttgaaatttcttatatttattaaattattattattaggagcggaaattgaaattgatgttagtgtgttgaggttgtggctattaattttgtggtttttaggagcgtgcatctgatagaattgatgggaggtatcggcggtctttcgca

SEQ ID NO: 9013 - DNA, 549 bp, Glycine max
aaaaattctcaaccagcaggcccatcttcctcatttccaagtgcgtgcaattcaactgattcattcaatgaaccaattggaaattctagcctcccatctgctgaaaatgctttcccccaaattctggcaatgcaagaatcgctcaatcagttattgacaatgcaaaaagagatgcagaagcaaatgacaatgatggttgctgttccagtgacaaaagaaggtagaaggcttgaggctgccctagggagaaacatggaaaaagctgtcaagtccaacagtgatgctttgtgggctcgaattcaggaggagaatgcataaagtgaaaagttgttacgagaccgtatccagcaagttacaggtttgattagtaactttatgaataaggatctaccagtgatactggagaaaacagtagagaaggaaatggcttcagttgggcaagcagtagtacgtgcaatgtctcctgctgtggagaaaataatatcttcttctattgtggagtccttccagagaagagtgggtgataaggcagttgaacaacttgataga

SEQ ID NO: 9014 - DNA, 1523 bp, Glycine max
gtcttgataggggcaagaagctgccttttcccgatggaatacttatcaatggtcgcggacctaatggagtgtctttaaacgttgaacaaggaaagacttataggcttagaatatcaaatgtggggctgcaacactccttaactttagaatccaaaaccacaaaatgaagctggtagaagtggaaggaccgcacacccttcaagaccacgtactcctctcttgatgttcatgtaggccaatcttattcagtgctggtaactgcggatcaacctgctcaggattattatattgtgttttcctcacgattctcctacaaggtcctcaccaccactggagtgcttcgctatagcaactccgcaggcccggtatcaggcccaccccctggtggacctacaatccaaattgactggtctttgaaccaggcccgctccattcggacaaaccttacagcaagtcggacgaggccaaacccgcaaggatcgtaccattacggtatgataaacacgacaaagacgatcatactggcgagttccgctggtcaagtaaatgggaagcaaagatacgcaattaacagcgtgtcttatgttgccccagacacccctcttaagctcgccgattacttcaaaatctccggtgttttccgccccggaagcatatctgacagacccactggtggcggcatttaccttgacacttctgtgttacaagctgactacagaacttttgttgagattgtcttccaaaacaacgagaaaatcgttcagagctaccatcttgatggctactctttctttgtcgttggtatggacgggggacagtggacacctgctagcaggaaccagtacaatctccgagatgcagttgcacgttgcaccacacaggtataccccttttcatggactgctatttatattgcccttgacaatgtgggaatgtggaacttgaggtctgagttttgggcacgacaataccttgggcaacagttatatttacgcgtttatacagcatcaacctcaatcagagacgagttccctgttccaaagaatgcaattctttgtggtagggctagtgggagacacacgcgacccctttgagctagcaagagtttaaaggttccacgcttgaagaggcattctagctttagaatacgaaaagtagttaacttatctacttctaattttatagttgagtgctttggtttttttattttatgctatgctccagtgggatgatgaatatgtaggttgtatccctaaatgaccccagctcgaggtcccattaattatttcccacagagagatagagagtgtgtgtgagagagaatatatattatattccctttgtattatctcggattttactagtattgttatcaagaagaagggtgaatcggattgcgaaagttggcgtttggaacctggctataagcagggtctgtgattcatttaattgttgtagcagtgcagaactttttaatttcaattgctatatgcctatatcttttttcaatattgacagcaaaa

SEQ ID NO: 9015 - DNA, 837 bp, Glycine max
tataaaagctgaaaagcgcgagagaacgaggtctgaaacttatagcactagcacgcataattgttggagctccaaaccagacgggactactctctagctccgtccacgtgccgtcgtacgctctgaaatcttccgtcgtctctggcatctccgctgccagccttctgatctgtcataccaaatggccaacagggttcaaattcctaccaacaattcagcactcattgctatgattgcagatgaggatactgtagttggatttttgttggctggagtgggaaatgttgacatacgtaggaagacaaattacctcattgtggattcaaaaacaaccgtcaaacaaattgaggatgcattcaaagaatttacaacaagggaggatgttgcaattgtgctgattagccaatatgttgcaaatatgataaggtttttggttgatagttataacaagcccgttcctgcaatacttgaaatcccttctaaagatcatccttatgatccggcacatgattcggttctgtcacgagtgaagtatctcttcaataccgaatcagttgcatctgggagacgctgaattcaccttttgcagttgcagctttttgggggtgtttgttgtttttctttgtacaatatggataataatcttttcttgaaattcagagttctatgtagctgtagcttaaataatttgtgctgtctggggataatttaaaattcctgtcacagaacttcaagacgggccaatattttctggtgtcatgtcagattcagatgaaaattcaacttaaaatatgcgttgatataatctctctttgactaatttccaccgtgtgattt

SEQ ID NO: 9016 - DNA, 405 bp, Glycine max
ggaggccttagagagagaaagagaatgtcgtcgacggtgctggaggtgacgcgggcggcacacgaggaagtggagcggttggagcggctgatagtgaaggagctccagaatgaccctgcctccaacaaagagcgcttgtatcagagtcaccgtgtgcgaaacatgatcgacaccattacttccaccactgaaaagcttattggggtatatgaagataacgacaatgcaaggaaggacgagattgctgcactcggaggccaaaccgccactggaattaacgtttttagcgccttttatgatagacttaaagagatacgagagtatcataggaagcacccagttgctcgagctgctgacgccaatgacgatcatgaaacacttctcaatgaggaacctcaaattgag

SEQ ID NO: 9017 - DNA, 651 bp, Glycine max
gacactattttataacgcacatagtttcttctgataataatttttctgtcactacccactcctttctctgtctccatcgtttcgcattgcacaagcactctctctttcccttaccctttttcaggtttcaacgctccaactatccatggcaaaccgctggctcagacccgaggtgtatccactgttcgctgcggttggtgctgctgttgggatctgtggattccaactggttcgtaatatctgcatcaaccctgaagtcagggtgaacaaggagggaaggaaggcaggagttttggagaactttgctgagggagagaagtatgccgagcatttcctgaggaagtatgtgcgcaacagaactccggagattatgccctccatcaacagcttcttcgctgacccaagtcgcaactaagttgctttgaataaataaaggtttatgtgagatatgaattctattatggttaaagacagattgtatcgtgcttttagaaaacaaaatgtggttgttgctttctctggccgtgcagtgtgtttgctgtggttgagaataataatactgattttattgcattaatgattgctgctgtttcaatgccataatcctgtctagcttttgctgcagaaatttgtggtgaaaaaaaaaaaaaa

SEQ ID NO: 9018 - DNA, 394 bp, Glycine max
ggtctagaaaaatttacacaatattttaagacgcacataaacttcctctgtcactacccactcctctctctgtctccgcctttcgcattgcaagcgctctctttctttgcttttccttccccctttcagtttcttcaacgctgcaactatccatggcaaaccgctggctcagacccgaggtgtatccactgttcgctgcggttggtgccgctgttgggatctgtggattccaattggttcgtaatatctgcatcaaccctgaagtcagggtgaacaaggagggaagaaaggcaggagtgttggagaactttgctgagggagagaagtatgctgagcatttcctgaggaagttatgtgctcaacataactcctgagattatgccctccatcaaca

SEQ ID NO: 9019 - DNA, 520 bp, Glycine max
ggaattcgtcgccgagatttcctctaacatgttcctcaaactaactattctagctgctaatttctaccatgctcatattaatattaatatcatatcatatcatctacatgcataatgcattgcacctaaacatgccacatacttaattatttatcattagatactaaataattgaaccactgttacaaaatagcattatataagtccatgaaacgccgtatataatgcttttgttattattattagcgttgcttcttgcgccattgagccattttccttttttcagcagcactagttccgtgtttgtgtctaatcaatgatgttgtgttgtgctctgttttcctctgacttgtatggtttagttccaataggttatgattgctaacaatcagaatcagagtgtgttggggaattagagaatcttcttccattagcaaaaacaccgtgactagttgcagagggtaaatggtatatcttattgtggactacgtacgaggatcccttttcttcttttccgctt

SEQ ID NO: 9020 - DNA, 585 bp, Glycine max
agacgacagaaggggaactaagtagagaataaaatcaaatcaggagagcatgcatatgaacatgatgatgaagaaggtgtgtgggtttgcaatagtgatggtggcagtgcagcttctggtggaggtgagtcccaaggcagaggctgtgacttgtacccctgtggagctgagtccttgtttgggggcaataacttcctctcaaccaccatcaacaatttgttgccagaaggtgagggaacaaaggcaatgcctctgtggttacctcaaaaacccaagtctaaggccatatgccaattctcctggctccagaagggttgctagctcttgtggggttccctttccaacttgttaattaccttcatatcatatcatatatagtatgtaataaaccctgttggctggaaattatatatatatatatataagaatgatatcagtcagtattgcagaataagaaaatgatcgatgctagctagctgtttaagagtgactatatgtttgttagcttgaacaagttaatatatatatgtgtgtgtgtcgaagaaattccctgaataaatttgctgtgtatttcagttcttgccc

SEQ ID NO: 9021 - DNA, 444 bp, Glycine max
gggcactcagtagagaattaaataaaatcaagaaagcatgcatatgatgaagaaggtgtgtgggtttgcaatagtggtgatggcagcactttttctggtggagatgagtcccatggcagaggctgtgacttgtagccctgtggagttgagtccctgtttgggggcaatcacgtcctcttcaccaccatcgacaacttgttgccagaaggtgagggaacaaaggccatgcctctgtggttacctcaaaaaccctagtctgaggccatatgtcaactctcctggttccagaagggttgctagctcttgtggggttcccttcccaacttgttagtcactttttacttcatatatatgtaataaactccccctactgttggctggaaattatatatatatatatatatatgttgaagaaattcactcaataaatttgttgtgttttcc

SEQ ID NO: 9022 - DNA, 1387 bp, Glycine max
aatcacttaggcccagttcccccttaaaccctattcgccgcaataaaaccttctaggtcgaagcaataaaacgccggagacagaggtagtttccacgacggtgcaggtcgcgacacgaaggggcttcttgcggcgtgagatcgtgcgattataccgatcctaacagagtgagatttcagggttacataatgaccaagaagaagaaacaaaatggggttgttgttggagagggtgatggtgttggtggtgttgtagatttggagtctgtcatacacaaccacgctctttttttcgacaagttgattgaattgattcccgccaagttctatctgccaactgatgacaaggagaagccatggtttcagggtctaaacaaggctgcaaaagctaaggcaaagaaagagaccaaggagaatatcaagaagtctcggagggaccgtttagaccctgacaaaccctctgcaactacccttgaccttctcaaggaaagctttggaaaagagaaggtggatgacagtgatgaagagcagggtgccgcggcgcctaggcctgttgtttctgggatgaaaagagatgatgggtctgtgacttatgaagagcttcagcaaaggcttcgtcgcaggctcgaagagtttcgtgcaagtcgtaatactgggaattcggataggaagagggatgaaagaaatgctaggagaggatataaggacaagaaacgcaagagggatgaagaaactgaggaaggtaaccctgtgcgtggtgaattggcggcggagaaagtgaagaaggatgctgcagaggcctccaaggatcttgtgtttggacatgttaaacttcagaatgaggaaatgctagggaaaaagaagaggaaggtttcaaagcataaggaacttgaaagggctaagaaattggaagaagtgaagaagaaagatcctgagaaggctgaagcttttgctaaaaagcaatcatggaaagcagcaatggatagagcttcaggggttaaggtccatgatgatcccaaactgttgcataaaagcattcataaagagaagaagaaccagcagaagaatgcggagaaatggaaggatagaattcaaacgagggaccagttgaaggcagagaagcagcagaaaaggtccgagaatatatctgcaaggattcatgagaagaaaatgcggaaaattgccaaaagggagaaaaaacttatgcggcctggctttgaaggtcgcaaagaaggttttatgaatgatggtggttccagctaaaatgggttttgaagtttgttgatttttcttttcattgttattatcttgcttttgattgaagagtagtgttagagaatgacaattcaagggttccaagatgcacctattcatttctctctgctccc

SEQ ID NO: 9023 - DNA, 290 bp, Glycine max
gaacaataaaacgccagacacagggcttttccaccacgccggtgcaggtcgcgacttcaccaacgaagggggttcttgacgcgtgagatcgttcgattatacgatcctaacaaagtgagattttagggttacataatgaccaagaagaagaaaccaagtggtggggttgttggagagggtgatgatttggagtctctcatacacaagcacgcccttttttttcgataagttgatcgagttgattcccgccaagttctatctgccaactgatgacaaggagaagccatggt

SEQ ID NO: 9024 - DNA, 354 bp, Glycine max
ggcagcagaaagcgatgaaaggtcaacaacagctaaaaaaatctaaggtggtgaaaattgactcaagaaaatcatgggaacaccacataactaatgcaaccaataaaggctaccctgttatggttcatttctctgcttattggtgcatgccttcaatagctatgaatcatttctttcaacaactggcctccacctatcaaaatgttctctttctgaatgttgatgttgatgaggtcaaggaagttgcttccaagttggaaattaaagcaattcctaccttttgtttgatgaatggaggagctccagtggataaaactgtgggtgcaaaccctgatgaattaaagaaaaagatca

SEQ ID NO: 9025 - DNA, 896 bp, Glycine max
ggaagaagcaaacacaacaaagttcagtcgtctcgaacaaaaagaacaagaaaacaaacacacaaacagacaaacaataatttaaattgttctctggtgttcttgctattaattaatagtaatttccactgctccagttccaaatatatatacttactagtttcctacacactccttaattactatttttcactttctcctttcaatatgaggaaccccactcacaagtcccctgaggttgaaaatgatggtgattttaaagttcatctgttctcttcatcatccgagttgcttgaaaagcttcatgaaaaatggagttcagtggagaaaccaccatacccagctatgtattctagtatttatggaggtatcatacttgatccagcaatgatggtaatccccattgatgatcacatggttcacagagggcatggtgtgtttgatacagctattgttctagatggatacctctatgagttggatgttcaccttgacagattcctaagttcagcctccaaagcaaagatatcctctcccttttctcgatcagtgcttcacagcattctaatacaactaactgcagcatcaaaatgcaagaagggaactctaagatactggctcagtgcaggtcctggagatttcttgctatcatcagcaggatgtccaacatctgcattctatgcagtagtcattgaccaagatatttcccaatgcaaagagggagttaaagtgattacttccaacataccaatgaagccttctctatttgccacagccaaaaatgtgaactatcttccaaatgtcctttcagtaatggaagctgaagcagaaaggagcatcttcttctatatgggttgatgaggaaggttatattgctgaaggtccaaatgtgaatg

SEQ ID NO: 9026 - DNA, 1305 bp, Glycine max
atttgaacgctctcatgatgggcagatcactgtgataatttacaagggaacacatgatcatcctaaacctcaaccaaaccgccgttactctgctggaactattatgtctgtgcaagaagagagatctgataaagtttctttgaccagccgagatgacaatggatcctatatgtgtggccaggggtctcacctggctgagcctgacagtcaaccagagctatcgcctgtagcaacaaatgatggtgatctagatggtttgggggttttgtcaaaccggaataatgatgaggttgatgatgatgatcccttctcaaagcgaagaaaaatggaccttggaattgctgacatcactcctgtagttaagcctatccgggagccacgggttgctgtacaaactctgcgtgaggttgatatcttcgatgatggctaccgctggcgcaagtatgggcagaaggtggtgagaggcaatcctaaccctaggagttattacaaatgcacgaacactggttgccctgttagaaaacatgtggagagggcatctcatgatccaaaagctgtgattaccacatatgaggggaagcacaatcatgatgttccaactgcaaggacatagttgccatgacatggcaggaccagcaagtgcaagtggacagacaagaattaggcccgaagaaagtgataccatcagccttgaccttgggatgggaattagcccagctgctgaaaacacaccaaacagtcaagggagaatgatgctttctgaatttggggatagtcaaactcacaccagcaattccaatttcaattttgttcatactacgacagtgccggggtactttggtgtgctaaataacaggctctgacccatatggttctagagaaaatccaagtgatggtccatctttaaaccattctgcttatccttgccctcagaacatagggagaatactaatgggtccttaaaattgtttgtacaccaaaaaactaaataaaatgaaattctgagttccattttgcctttttttttggcgggtaaagctttaaaggcatagctcctcattttctcttcggaaatgctgatagttcttttatgttcatatctttatatgataagagctgctctttagcagaattagcagtagctgtgccccttcaggttgactcttaaatctaattgatgtttgtataatttatatacagatttcttctgtacaaatatgaagcttataccaaagttgcttcaacaaaaacccttgtaaaagtgtttggattcaactatttataagaagtagcttttagcctgtt

SEQ ID NO: 9027 - DNA, 980 bp, Glycine max
aattattttagtttattgttttagtcttgggtcaattttcactgtctcctgatgatcattttaccatgtggggtgagttaatttgagagtgtcgtgcgctgatttttcttcttaaggctcaagggtcttctgggtttgatcgaacaagaaaaaaaaaaaaaagagtcttctgttatcctttcaacgctaccagatgccggaaaacaggcaggttctgaggaatgctgattctggtgacaacattgaagaagcaattcgacatttgaaaatcaatgataattgggatagagatgctgcagctcaatctacccaatatccagatcgacccggtgaacctgagtgcttgtattatttgaggactgggagcgtgtggttatgggagtaactgtcgctaccatcaccctgctcatatttcaattggtactcattatggtgaagaactccctcagagggcagggcaacctgattgcgagtattttcttaagactgggacatgcaagtatggatcaacatgtaaatatcatcatccaaaggacaggcgaggtgctgctcctgtgtcattcaatactttaggccttcccatgcgtcaggaagaaaaatcatgtccctattacatgagaactgggtcttgtaagtttggtgttgcatgcaagtttcatcatccacagcatgcttcccttggagcatacccattggctggatctcctactcctacctcaacaattattcctacatcaggtttaccatatgctggagggtttcctgcatggtcagcagtaccaagaatgtcgtatttatctggacaaggacttcaatcttatgtgcctccttttctgtcttcttcgcaaggtgttatacctgtgcagagctggaacaactacatgggaaatatgaaccctgcaatgccgaacggttttcttggatctaatcttgtttatgactacatgaatctgggcgagtcactctttggtgggcaggca

SEQ ID NO: 9028 - DNA, 564 bp, Glycine max
gcgcccttgttgtcgtccacgcgtgcggtgcagagtagggagaaattctcaagattatagggtttaaattgcaaaacgcagagagagagagagagtgagagggcgaaacgatgtcgtacgacgatgtggagatcgaggatatggagtggaacgaggagttgcaggcctacacgtacccgtgcccgtgcggggacctgttccagatcacgaaggaagaccttatgctcggcgaagagatcgctcgatgccctagttgctctctctacatcaccgtcatctacaacctcgaagatttcctctccgattccgatcaaaatcgaccaaacaagggcctccaaccttccaagcagcaacccctcaccgttgcttgaatttcagatgtcctgacatgaagagcggagtaggttttgtcatggctttgatttatcataccatcacatatattgttttgcagataggaattcttggtatttttgatggagaaatgatggaaaatggtaattaataatatgctagattatattacagcaagaatactaatcttgtcactcaactccattgaac

SEQ ID NO: 9029 - DNA, 382 bp, Glycine max
  unsure (1)..(382): unsure at all n locations
gagcaacagcttcttttgttccgcataggagtgttgttgggttgctggtacttctgaaaagcccaccccaaagtcgaaacgaaagcgcagagagagcgaaacgatgtcgtacgacgatgtggagatcgaggacatggagtggaacgaggagttgcaggcgtacacgtacccgtgcccgtgcggggacctgttccagatcacgaaggaagaccttaagctcggcgaagagattgctcgatgccctagttgctctctctacatcaccgtcatctacaacctcgacgatttcctctccgattccgatcagnatcgaccanacaacggcctccaaccttccaagcagcaacncctcaacgttgcttgaatttcagatgtcctgaca

SEQ ID NO: 9030 - DNA, 619 bp, Glycine max
tgcaaggaaaaataaaaaaggggttttccttatttcaatagcgaggcgagacatcgattccaaaggtgcgtttctgctgtgctagggtttctgcatcttccacctccgtcgcgatgaaaccaggcttcatctgattccgatttcccttcgctccttctcctccttaacattcatcttcttcgattcctctacaaattatgattattattatgatgaactccatcttcgcctcgcataaccttcgcgtcttcggtcccggcttgaatcccttcgcaccttattgcatcgccaatcactcccttttcctttccctttcctctcgctaaattacaattccctttctttttcctctccaacttctccttctccgtttctccgaacatgtaaattcggaggacaccgtctttgattcggtctatttttttgggggttactttacttcggttacgcgtcgtcgttttgcttttctttgtcgtcgtttttgcgttgcgttgattgctgagaaagaaagaaagaaagaaagaaagatgctggaggaacagcctgttgttttgttcaggaagagcccttccaggaggcgcttgagatctgcttttgctaccgatgataggggttggac

SEQ ID NO: 9031 - DNA, 505 bp, Glycine max
gagaaaagaaaagaaaaaaaaagggttctcgttggtccactagcgaggcgtgagatagatagattccatcggtgcgtttctgctctgctagggtttcatcttcttccatcacctccgtcgcaatgaaaccaggcttcatctgaatccgattccccttcgccccttctcctccttcactttcaccttctccgaatcctctaccaattattatgatgaactccatcttcgtctctcacaaccttcgcgtctttggtcccggcttgaatcccttcgcaccttattgcatcgccaatcacaccctttcctctcgctaaataccaattcccctctccgattttcggggttactttacttggtcgttttgcttttttctttgtggtcgtttttgctttaattgctgagaaagatagaaacatgctcgaggaacagcctgttgttttgttcaggaagagccctttcaggaggcgcttgagatctgcctttgataccgatgataggggttgga

SEQ ID NO: 9032 - DNA, 763 bp, Glycine max
cacgtgaaccggtcttttacttttccacccacttccattttgccgtcattatggaggatgcgtgctgcttctgctaatgctgcagaggatagagaaaacaagttcctaactatggcaattgaagaagcatataaggcggttgaaagtggccatggtcgcccatttggtgcagttattgttcgaaacgatgaaatactttcaagctgtcataacatggttgtaagaaatgctgatcccactgcccatgctgagattactgctataagagaggcttgtcgaaagctgaatcaagttgaacttgctgactctgaaatctatgcttcttgcgagccttgtccaatgtgccttagtgcaattcatttttccaaaattaagaaactggtttatggagctaaagcagaagctgcggtagcaattgggtttgagagtatcattgctgatgcactgaaggacactggtttttatgagaaactcaacttagaggtaaaaaaggctgaaggtagtgttgctgtaatggcagaacaagtattcgagaagaccaaagacaagtttattattccctgattagttagctttaatcatcttattaaatgtgagcgcaagttacaattgttcaggaaaacttttgattcttggacaaaaataattttttgtcagactttattttggattagtcaggtctcattttcctgataatccggaggattagacaaaaaagaaataattcaaccaatataaaatttgcacgttcatgtttttgccc

SEQ ID NO: 9033 - DNA, 395 bp, Glycine max
ggacatcactgtcactgtatttgcgcgtccttaccttacttacctctttgtctgtctttccttctctttttcattttgaaggcaaattcgcggcctcgagtcttttctttttctgtatcgtttttactttccatcacttccattttccgtcatcatggaggatgctgctgcttctgctaatgctgcagaggatagagaaaacaagttcctaactatggcaattgaagaagcatataaggcggttgaaagtggccatggtcgcccatttggtgcagttattgttcgaaacgatgaaatactttcaagctgtcataacatggttgtaagaaatgctgatcccactggccatgctgagattactgctaatagagaagcttgtcgagagctgaatcaag

SEQ ID NO: 9034 - DNA, 546 bp, Glycine max
ggaaggcaaattcgcggcctcgagtcttttctttttctgtatcgtttttactttccatcacttccattttccgtcatcatggaggatgctgctgcttctgctaatgtgttggaagccaaagatggaactatttctgttgcttcatctggcaaggtatgattgatactttctgcttcatctgcaactgtccagcatagagaccacaagatccacacaaggccagtgttggggagacttgaggggagtaaacaccggatagatttatccctgtggagggaccacgtaaagaaacctgatattacactttaatcaaaaaccttatgactcaaatttataagttttcttcttacttatatggtgttcaatcttttcacttctattcgatgcgggaaaaattgacttacattatgtatgaaatatcaagtttaatttattgttttatgtattgtgatgacggaattttcgtaggctagtttttggtggtttgtctacaaagtcgtacaaggagccacggactctataaaaatttccacatttatgggttta

SEQ ID NO: 9035 - DNA, 804 bp, Glycine max
cggctcgagattttggccagaaaaagtgaacagtgcgcgtgcccattgctggcagacatggaatgtggtctccgaacgcttctttccgaatgctcttattgggacttcttcaatagcagcacaatgaaaagaacttgtataaaaaacagaaacccaacatttttctcgtgaaacgttcttcgttgaccatggagctctctgtgcccttcagattccgatcacggaacctcctctcaccctctacacacatacccatcacctacccttccaagcatcaaccaccctttttaactaagtttgtcaacaaacccaagatttctaaactaacggtgagagcgcagagaagggcacccattgaagggctgagcgatgagttgaacgctatagctcgttgtaaccttgactttgcttacactcgaagaagggtccgcgctgctttcgctgatatgcagcagcagctggatcattgcttgttcaagaatgctcctgctgggatcagaactgaagaatggtacgaaaggaattctaggggattggaaattttctgcaaaagctggatgccaaagcctggcattccaatcaaggcctctgtgtgtttctgtcatggatatggtgatacttgcaccttcttttttgaaggtatagccaggataattgctgcttctgggtacagtgtctttgcaatggactatccaggttttggtctttcagaaggattgcatggttatataccaaaatttgattatctggatgatgatgttatagagcattatacaaaaattaaagccagacctgatctcagtg

SEQ ID NO: 9036 - DNA, 626 bp, Glycine max
gacacccaataatttctccatcctcaacggaagtacgagtttctacaaagcaaaaacctgaaaacggaaaacctatcgcagcacgctctttcatctctcactcatggcaacaacactcatgtttttccgaccaaccatgatccgggcctccgctggttctcccgccaagcccgacccgagaaacaggaagcccgtttcctccaactggtgggctcctctgttcggatggcccgcggatccggactacatgggcccattgcagaaggcgagtgagaaatcggatccggagcgggaagtgggcctggacctgggccggcccagatccaagttcacagcggggtgcttcacggagaagaaggcgaaagagctgagaaagaagaccgtggaaacgtcgacgtttcatgacatcatgtaccactccgctattgcatccagactcgcgtccgatgtttccaaagggtacgagaaataaatgtttggttttaattaatgttttttctacccttagactcagactcactcatcgttgtatttcgctttaatttctttcaactatgaactattggcctgttcatgatttgggactcattgtaattaatctatgtgcgtgatttgtctccttatgt

SEQ ID NO: 9037 - DNA, 723 bp, Glycine max
ggggtgcgttaggggtttctaatttttgtaacagagcgaaacacttccgtcagtggtgtccgcatatccttcccgccgataacctttccggtgatcgttcttcgctcacgcacgcgttacgctgaaggcatgaatgcgttcaaggcatacaaggcctgtgtgccaattgcttggagccccaatatctatataactctggtgaggggtattccagggaccaggaggctccataggcgcactttggaagcacttcgcttgcgcaaatgcaatcgaactgtcatgcgatggaacacacctacagttaggggaatgctccaacaggtcaagaggttagtcgttatcgagacagaggaaatgtacaaggcacgcaagcaggaggaggaagcacacagagctcttcggcctccgttggtcataagccacaggcctccctcggttactgatgctttataaagtcttctgcattcttaaagatattatcttcttgctactaaaactatctaatgccattgtttaaagctttggtctcaaatggactaaattttgctttcaagatcatgtcatagtttgattctatgattctgtagtgttttctactgataacattagtcaaattcaggcctctgctcatgaaacctggctagtagcaagtgttcatttatttatattctttagtttgggaatattcaccctttattccataattgccttttctcttttggg

SEQ ID NO: 9038 - DNA, 634 bp, Glycine max
tgggggaaattacgcttttgattcaggatgatgtggggggtcttcaggttctcaagggtggtaacaagtgggtcactgttcagcctctgtcagatgctatccttgttctattggctgaccaaactgagattataaccaatggaaagtacaggagctgtgagcatagggcaatcactaatcctgatagagcaaggctctctgtggcaacatttcatgaccctgctaagacagtcaagatttcccctgcttctgaactgataaacgactcatcactagctaaataccgtgatgttgtttatggagactatgtatcatcatggtataccaaaggccctggaggaaaacgaaatattgatgcacttttgctggatccttaagctaatgctttttttctctcctagtctcatgtcttgtatcttgggagtgaaaggaagtaaaattaactctcatgcaaaaagttctgatatcaacatactgttttcatatggatcttggaatccaactcaaactgagaatgacgctaatttgccaatttgaccaataaactattcaaagtattatagaaattggtatttgattgtaattacgctaccccaatcttatgtttaagctttcaaggggtccatatacttac

SEQ ID NO: 9039 - DNA, 456 bp, Glycine max
ggaagaagaatggcgactgagaatgagaagagaaagcggaaagaaagtagtgatgttagaagcaaaaagaagaagaagcagagaagcgaagatgaagaggcgacgaagcagttgcgtttctttgagtcggcgatgggtattgagctttcttcgctggagttggaatccctcaaagataataagtgcattttggaggtatcagaagccgctgattcagacgtgacagtattgggcaaaactattagggcagcgtttggcgcgtcttggaaagaggctctctgcgaagggaagcctgtagagggaaaagtcattgctggaagccccgcagttcttatcataacttcttctgctttaagatgcatagatctcttaagaggctttcgctctatgactgaacaatgccatgctgcaaagttattctcagagcatatgaagcttgaggagcagatttctttg

SEQ ID NO: 9040 - DNA, 1054 bp, Glycine max
ctcatttggatgatataatctctaatatcgcggcagatgtgggggtataagaggtttttcaaacgggctcaactcgaggcgtcaactttcctcaaggatgactgcttgaagataaactgcactgttggtgttgtggtgtcttccattgattgttccaagttaaacacaatacaggttcccgaatccgatattggggcacatttcgggatgctgttagagaatgaggagggatcagatgttactttctctgtcggtggagaaaggtttcatgcacataagcttgttttggctgctcgatcaactgcatttgaaaccgagttttttaatgggatggaggaggatgatcatgatgtagttgttactgacatggaaccaaaagttttcaaggctttgcttcattttatttatagagacactctaatagatgatgaagagctctttatgtcacgttcatcattcttgccttcggtatctgaatcatttgctgcaaagttgttagctgctgcagaaaagtatggtttgccaagacttaagctgatgtgtgagtctgtactttgcaaagacatctctatagattctgttgcctatattctggctcttgctgatcgttatcgtgcaacagaattgaagtctgtctgtctacaattttctgctgaaaaccttgtcgctgtgatgcaatctgatggttttgagtatcttaaggaaaattgtcccttgctgcaatcagaactgctaaagactgtggctggatgcgaggaggaatttagtggagaaggaaagtgtcgaagtgtgtgggctcaattttctgatggtggtgacaccaatgataggagtgtaagacaacaaacctgggaaaatggtgttgaaagaagtcaaagcttatgggttcacctttcggatggtgttaacaacaatgataggagtccagggcaagaagcctgacaagggattccgctgggacaagttaaacgtgtcattggtacaggaccaacctgcagggattcctccattgcatgcagtgttgtctttcttttcttttaacgggggatagtgg

SEQ ID NO: 9041 - DNA, 1728 bp, Glycine max
gaaaacaaacctgtatcatcttcttactctttcgtttgtctctcttctttccctttcccctctctttcgagggtttttctttttctttttttcccccttttttatttttccttttttttttttactttctcttgtttttcagttttgcttccatttcctttgaatccccatttacttgttcctctgcaactctaaccctagaattgaagatgcaaccacagaggttaaggcagcatgccatgttgcaaccatctctctaccaccaccccgctctacttactcctcctcagatagagcctatcttgagtggaaatctgccacctggctttgattcgagttcatgccgcagtgtttatgtaggcaacattcatccccaggttacagattcccttcttcaagagcttttttcaactgcaggcgcccttgaaggatgtaaacttattaggaaagagaagtcatcctatggctttgtggactactttgatcgcagttctgctgcatttgccattgtaactctcaatgggaggaatatttttgggcagcctattaaggttaactgggcttatgctagcagccagagagaggatacctcaggtcactttaatatttttgtcggtgaccttagtcctgaggttacagatgccacattgtatgcttgcttctctgtatatcctagttgttctgatgcaagggtaatgtgggatcagaagacaggccgttccaggggatttgggtttgtttcttttcggaatcagcaggatgctcaaagtgctataaatgatttgactggaaaatggcttggaagtagacagattcgttgtaattgggcaaccaaaggggccagtgccagtgatgaaaagcagacttcagattcgagaagtgtcgtggagttgaccaatggatcatctgaagatggccaagaaacaaccaatgatgacactcctgagaagaatcctcaatataccactgtttatgttggcaatcttgctccagaggttacttctgttgatctccatcaacattttcattctcttaatgccggaattattgaagatgttagggtgcaacgagacaaaggttttgggtttgtgagatacagtacccatgctgaagcagctcttgctatacagatgggtaatgctcgaattctatttggcaaacctatcaagtgttcatggggtagcaagcctactcctccagggactgcctcaactcctctcccaccacctacttctgcgaatgtgtcgggattttctcttgctagtcttgcagcttatgaacgccaaatggctttgagtaaaatgggtggtgcacatgcccttatgcatcaacaaggtcaacatgccctaaaacaggtagccatgggaatgggtgctcctggggctggttatgatgcaagattccagaatgttgcgaccacccaacacctaatgtactatcagtaaaatgtgttggtgtgcaactctccgcgataaacaagggaggattaaagtatgtaagaacggttttacaataccgattgtttcttctgtgcttatgtatggttattacatttgtaatactacagttatttagccgttgcatgcatgaatggtgtgtcttctattaatacctttgtgcacagcttgggaggtatctatcaacttagctgtgtaattttgccccaagtgttaaaaagctaataacacaaaacaaaaagagaaatacagaaccacagataagaggcac

SEQ ID NO: 9042 - DNA, 286 bp, Glycine max
gcatcaacaaggtcaacatgccctaaagcatgtagacatgggaatgggtgccactgggactggttttgatgcaaggttccagaatgttgcaaccacccaacacctagtgtactatcagtaaaatgtgttggtgtgcaactctctgcgataaccaagggaggattaaagtatgtaagaatggttctacaataccgattatttcttccttccctgtccatctgctatgctaccttcatcctcccattttttttttctgtgcttgtttatgtaataccccagttttttt

SEQ ID NO: 9043 - DNA, 1727 bp, Glycine max
tacgatgcacgccgtccgtaagctcttgagacgtggctggttcaactgaggtgatggctttgaatttgccttctcccgcccaagtgaagcccttatttttctcttcaaataactccacaaaacttccaggtagcttttctttgaagagaaaagatagtgacacaacagtagagagacgagtttattgctctgccgctgctcaatcaccaccaccagcatggccaggaacagctattcccgagccttctgatttcaagacatgggatgggcaaaaacctatttctgtcttaggatctacgggttcaattggaactcagacactgagtatagtggctgagttcccagaaagatttaaagttgtgagccttgctgctggctctaatattactcttcttgctgaccagattaaaacatttaagcctgaagttgttggtcttagaaatgagtctttaattgatgaactcaaagaggctttggctgatgtggatcacaaacccgaaatcatccctggagagcaaggagtcattgaggccgctcgtcaccctgatgccaccactgtagttacaggcatagttggttgtgcaggattaaagccaacagttgcagcaattgaagcagggaaagacatagcattggccaacaaagagacattgattgcgggagccccttttgttcttcctcttgctcacaaacataacataaaaattcttcccgctgattcggaacattctgcaatttttcagtctatccaggggttgccaaagggtgcacttaggaaaatccttttaactggatcaggaggtgctttcagagaatggcctgctgaaaagatgaaagatattaagcttgctgatgcattaaagcatcccatatggagtttggggagaaaaataactattgactctgctacccttttcaataagggtctagaagtaattgaagcacattacttgtttggagcaagctatgacgatattgagattgttattcatcctcaatctatcatacattccttggttgaaacgcaggattcatctgttattgcacagttggggatacctgacatgcgcttaccgctcctttatacattatcttggccagaaagaatctattgctctgaagtaacttggcctcgtcttgatcttagcaagtatggttctctaacattttatgcaccggatgacaagaagtttccatcggtgaatctttgctatgctgcgggacgtgctggaggcaccatgacaggagttcttagtgcagcaaatgagaaagctgtagaaatgtttgttgaagaaaagattagttatctggatatattcaaggttgtggaactaacttgtcaggaacatcaaaaggaattagtagcatctccgtcactcgaagaaattattcactatgaccaatgggctcgacaatatgctgctagtctgcaaaaagcttcaagtgtttgaatcccatatttctgacatattttagaagttggggctgtggtggattgttggcaactgctagcatattttgtaaatgtatttgttggttcatcaatcttgtaaaatgtaaaggggtagctatataaagtatatgtactcctaaaagggtttcaataaaagttctagcttcagaataccatgttttgagatgctaatgcaacctaggcagtacttttgtaatgctataattttcctaattgtgtggttaagtgattaattcaagtgcaaaggaaataa

SEQ ID NO: 9044 - DNA, 1089 bp, Glycine max
gaagtaattgaagcacattacttgtttggagctgactatgatcatattgagattgtcattcatccacaatcaatcatacattcaatgattgacacacaggattcatctgttcttgcacagttggggtggcctgatatgcgtttgccaatcctctatacattatcatggcctgacaggatttattgttctgaagacacttggccccgccttgatctttgcaagcttggttcacttacatttaaaactccagataatgtaaagtatccatccatgaatcttgcctatgctgctggccgtgctggaggcacaatgacaggagttcttagtgcagcaaatgaaaaagctgtagagatgtttattgatgaaaagattagctatttggatatattcaaagttgtggagctaacatgtgagaagcatcaaaatgaattggtatcctctccttcccttgaggaaattattcactatgacctgtgggcgcgaaaatatgctgctagtctgcaagactcttccagcttcactcctattcttgcatgaggatgattaaactagggatgtggctgatgcttcccaattgcctgctttcaccataatttcttcgggcattgaacaatgtagaatggtgcattccacagatgttgaaaattaaataggttttttgtttatggaatgttggtgttttaacacctttcaattgatcttatagttttgtcgtaatttcatggaaaacgatgtctttttaatagtcaataggagcctaggaggttggttggttgcctatgaatgtgtcaaagtcaagaaggggaatggattttctcatattcaaaatttacatgatgtggtcaactagaagttttgtatttctctttttctaatagaattaaataggtggagtcttacaaaaattagcagagatagacgcaaaagttgaccaatcaccaatctctttcataaaaggattccttttctttttcctcagcacacattcgttggctgatattattatatgaaattggtattatttggatatcatagctaccacccttggagaaaagaattattgactctgcttgccggttttgcttttct

SEQ ID NO: 9045 - DNA, 557 bp, Glycine max
ccctcgcgtccgcacaacacaacttccttgtgcagccaccattattgttgttattggagatttcaattctttgtctttcaaactcctcaagttgggtttatgtgatgatggctctcaacatctcttctccagctgaagtcaagtccatttttttcgctgattccttcaagtctaactgcctcacagcaaaattctcaggtgggtttgcttttaagagaaaagagcgtagagcagcatctggaggacgggtttattgctcagtgcaggcaacaccaccaccaccagcctggccgggacgagcggttccggaacaaggtcgcaagacttgggatggaccaaaacccatttcaattgtggggagtactggttcaattggaactcagacactagatattgtggcagagaatccagataagtttaaagttgtggcacttgcagctggttcaaatgttactcttcttgcagaccaggtaaaaagatttaagcctcaacttggtgctgttagaaatgagtccctaattgctgaacttgaagaggccttgcatgatgttgaagaa

SEQ ID NO: 9046 - DNA, 508 bp, Glycine max
tttgcaagtactgtaatctttccctgcagcttactaatttcaactctatcaaattctattttcagtccattctaaagaaaatagacagatccagttgatatagagttttcaaatttggaagcatttatgttaaatgaaaattttattcaacccaatttgaattattgatggttcttatttgaaatgtggttatgcaggcttggttcacttacatttaaaactccagataatgtaaattatccatccatgaatcttgcattttctgctggccgtgctggaggcaccatgacaggagttcttagtgcagcaaatgagaaagctgtagagatgtttgttgatgaaaagtaagcactatcttagctatttttcttatgccagtatttctcttagatttcactgcatttaggtttcctttgagatccatgtcattcaaccaatgatacatcccaccaaatctcttctgtatatgggagaaggatgcatcaggagtcaggactacataacattt

SEQ ID NO: 9047 - DNA, 623 bp, Glycine max
tcagtttacttcatctaagaaacaagatggagctaatagttatggtactgaccaagattcaggacaggatgatagtcaatctgaaacctcatgtaaacattgtggcactagttcaaaatccaccccaatgatgcggcgagggccatctggtccaaggtcactttgcaatgcttgtgggcttttttgggcaaataggggtgctttgagagacctttctaagagaaatcaggaacactctcttccaccagttgaacaggttgatggaggtaatgacccagactgtcggactgccgctgccgaccctgcacaaaacaatcttgctgctttctcagagcctgttaatccagctttggtagctgatcgtaaggttttccaatctcagaaaatgttggagtagttgactctggcataagtaggtctatagttattccattcagattgaccaataggaatgtacagatataacaatactcccatcaatgcaagaactttgtttttatatggttggatcagtggcattaaccattgatctctggatgtatcacctgaaacttaaatgatgacttggtgatggtctcacccaataccttgaatttaattttacatgtaaaaaaaaaaaaaaa

SEQ ID NO: 9048 - DNA, 354 bp, Glycine max
catcatcttccttgttcgctctgaattcgcgggactcggtggcctgagagtttctccttctgaattcataggctcggtgaccacagtaggcgatgttttgcaaaacgttacctccattctcaagtctgagttcgtcagcaatgtcaacaatgatgactttcatcttcctgatgccgccgccatttccgcctgtctcgatttgttagacttgtcagctgatgaactcagctggtccatttccgctgttcaaagttcccaaggaaatgataacagtacagggaatctaagctctgatttgaggacatggcgtagtgctgtacttgcgaatacagatacatgcatgagggtttggaa

SEQ ID NO: 9049 - DNA, 546 bp, Glycine max
gggaataggaaacacacccacaagtcatcaaacttcaattgagtttcaaagagatcagtggtagctagtgtggtgcaattgtgttgatcaaggatggaacaaaagaagtttgtggcactattaatggtggttgtggtaatggcttcttctatgtggaaagggtccaaaggtcttagtctctgtaacatggatgaaggtggattggaggcttgcaagccctcagtgactcagccaaacccagttgatccatcccctgattgctgcaaggctctggatggtgctgacttgaagtgcctttgctcttacaagaactcatcagagttgccttttcttggaattgatcgaactcttgctgcttcacttcctgcaaagtgcaatctcactcctccagataattgctcataattaagcttctctgagctattatctgctgctcgtctttgtgtgttgtaatcttttttctgcagatagatgacctattgagaaaaaaggaaattatcgtactctaatttctatatctcttttttttgtgtgctaatatgtttt

SEQ ID NO: 9050 - DNA, 320 bp, Glycine max
gacatcactgcattttcaagtgcagcctatacttgagtttctatctagccataacttgtagtttacttcaaacttctaagcaacatggtggtcctcactttcacagatgagttcactagcagtgtccagccaagaagattgttcaaggctttgatccttgatgctcctaacctcatccccaagctgatgcctgaggccattaagaatgttcaactggctgaagggaatggaggccctggaagcattcaggagataactattgctgaaggtggtaacatcaaacagttgcagcatagaattgatgcaatagaccttgagaa

SEQ ID NO: 9051 - DNA, 600 bp, Glycine max
aattcccggggcggcccaagccttcctcccggttgcaaaaaacccccttttggggcctctcactcactagtattttttatgtcctggtccttgaaactacaggaggggtcttttctctttttctatttatctcatctcacaccctttaatgtaacctagagagaatcaaaataataccactttcttagtttcaaactcaacttttgagggtcttttctctattaaaaacacacaagagttttagtcttttagctaacagtgttcatatgatgaatgcttcaaagttcattaaatgtgttactgttggagatggagctgttgggaaaacctgcatgctcatttgctacaccagcaacaagttccccactgattacataccaacagtatttgacaatttcagtgccaatgttgctgtggatggaagcattgtcaatttggggctatgggacacagcaggccaggaagactacagcaggttgaggccattgagttatagaggagcagacatttttgtcttagcattctcactgattagcagagctagctgtgaaaatgttctcaagaagtggatgccggaattgcgtagaattgcacctaatg

SEQ ID NO: 9052 - DNA, 660 bp, Glycine max
ggcgtttacatacacaaatatcggaatcattcattcaagactgagactcactcctccctccgtcaccatcgttttgtgcgtgagcgtttctccatttctttccccatcagcgaaaagacagaacaagctctgttgactttttccattttccaattttctcggtgattctatcagcctccgacacaatcgcgcgccaaacgttgaatcggtgccaccactcagggagggagagtctctaagagaccaacatgagtgtggatccaaagagaagtgcctctaatggccaggagaaaatgttaccatcactagaacagcaggcattgatcaatgaggtgagaaggttaattgggccacagtctggtaaggcgtccattttttgttctgatgcatgcatctcaaggtatttgagtgcacggaattggaatgttaagaaggcagccaaaatgttgaagctgaccttgaaatggagagaagaatacaaaccagaagagattcgctgggaagatattgctcatgaagcagagacaggaaaaacctatagaacaaactacgttgacaagcatgggagaacagtcctagtaatgagacctagtcgccagaactcaaagtcaacacaaggccaaattaaatatttggtatactgcatggagaatgctattt

SEQ ID NO: 9053 - DNA, 1628 bp, Glycine max
gaaaagttaaagatatttttgacgcatacacaccactcaaaaccctagtcacacccattccataaaaacaaagctttttcttcctttgccactttcccggaaaatcctcctcattttttctggaaaatttatcttccgttttctcgctgacaccaccgcacactcttcacgccttctctcactctaatctattatggcggatgaaggtgttgccaacggcggcgtcgatgatcagtacggcgaagaatcggcgactaagatcgcggcgttgcaacgcgagcgcgacgaattggtgagcgaaaacgcggcgaggaaggaggagatcaagaagctgacggcggactcgacggattgaggagcgacggtgcagataggagcgagaagattgaagagctgcagagagaagtagcgcagtcgcgtgatgctgccaaagcgacggaggttatcgccgcgagggcggcggacctggagacggaggtggcgaggcttcaccacgatatggtagcggagatgactgcggcagaggaggcgagggcggatgccgctgaattgaggaaggttttgggagagacagagtctagggttgagtctctggaaagggaattggcagggttgaagaaggtgaaggctgagagtgaggttagggttagggatttggagaggaagattggagttctggagactaaggaaattgaggaaagaaacaagagaattaggtttgaggaggagactagggataagattgatgaaaaggagagggaaattaagggttacagacagaaggttgagggattggagaaggttgctgctgagaaaaaaacagaattagatgagttggttaaacagaaattgaggttggaggaatcacttagagaatctgaggagaaagtgactggtttggagtccagtattcttcaattgcgtgaggaagcaaaggaagccgagagggtgatcatatcgctgaatgaaaaggcggtggagacggttgagacaatcgacagaggtttgaatggtgtacatggtgaagggaagggattgaagttgcagtggccagtggtggcagcagggtctacaggagctgttgttgcagctgctgctgtaatctacgtgtgctatgggaaacggaggtgattttctgtctcaccggagagtgatgaaggagtgaggggaatttgaactggaggaagttctagaggttagacataccaggtctttagtagtcatagatttgctgctgcagttttgtttgtcacaaaacaatgctgcttctctggcttttgtttttgaagcctgtgaattttttgctcatcgaagttggcatactacttgtttggttgttagttgcttgttatgaggatcaaacccctgtgtgttggatttaataaataggttgcataattgagattccaagtttctttgtgtttagtttagcccttattagcttggaggataacaatggccctgctgaacccttagtttaaggtggcacttggtagttggtatcacctttgacaagttgttcagtttctgaagttgacttctgcaattattagtctttttcatgttgattttctcacaatgtctttgaatgtagaaccacagaaccaattatatgatgtttcaggact

SEQ ID NO: 9054 - DNA, 270 bp, Glycine max
cggctcgagaaagtttccaaattgtagagaaaaaaacagaatgagagggcagacttgaatcaggattcaggaggaggcgagggcagatgccgccgaattgaggaaggtttttggggagaaagagtctagggttgagtctctggaaaatgaattggcaggattgaagaaggtgaaggctgagagtgacgttagggttagggatttggagaggaaaattggagttttggagactaaggaaattgaggaaaggaacaagaggattaggtttga

SEQ ID NO: 9055 - DNA, 344 bp, Glycine max
ttttgacgcacaccactcaaaaccctagtcacacccatttcataaaacaaagctcttcctttgtcactttcctggaaaatttatcttccgttttctcgctgacaccaccgcacactctcactctaatcaaccatggcggacgaaggtgttgccaacggcggcggcgtcgacgatcagtacggcgaggaatcggcgactaagatcgcggcgttgcaacgcgagcgcgacgagttggtgagcgaaaacgtggcgaggaaggaggagatcaagaagctgacggcggacctcgacggattgaggagcgacggtgcagatcagaccgagaagatcgaagagctgcagag

SEQ ID NO: 9056 - DNA, 469 bp, Glycine max
tataagtgtggcgagactggtcacatagctagggactgcagccaaggtgggggtggcggtggaaggtacggcggtggtgggggtgccgccggaagctgctacaactgtggggggtccgggcattttgccagggactgcccttccagtgctcgttgatacaatagtacgggggtctggccttgcttttgtgttctgtggttcttttgttttcttttttctaaatctgaatattaccctttagaaatagggttagctagggtgtggcttctttgcgttttcttttttcttttttcgggtttacattataagcaattagcttatgattagctcttggatttattggtttgctttttgggcttagggaaatgagagttttggtgaggtttctgaaaccatcgactaaatactctgtttcctgtcgtgaacgtaatatgctctgccttaccttattttgttgaaatctttgaat

SEQ ID NO: 9057 - DNA, 460 bp, Glycine max
ggtgaaaccagctccagcgcaactacgaaaaggtagagagaaagagattgatgagtgagtgagttacaaaatgaagagtgacgaagccattttcgccattatcactcctctcgcaccaaaagcgatgaaagtctagttgctgcttttctcgttttgatccgtacatttccctctgccgttgcgatctccgaagctgcgagattcttctgcctcgattgcgcacttcatgtttttacatttctggagtagctgaatcagatgaggcggatggtcttttgttaattacttcaacttaggtagacgaatctgccttggtgaatctgtcaagattgaagaatagactgcagattacttgtctggcagaaaggattcaaaatgagttggaacccacacatggagctccattacaataccattagctatccctataatacagcaggaagctctatcgaatattttg

SEQ ID NO: 9058 - DNA, 493 bp, Glycine max
tatcgagccgaatcggctcgaggtgaaaaggtgcgatgcaggtgatcatgttctatctaacacagtttgcgtgtgggtgaaaccagcaccagcgcagtgcgtaaaggcagagagagagagagagtgaaatgagtgagttacaaaatgaagagtgacgaagccattttcgccattatcactcctctcgcaccaaaagcgatgaagctctaggtttacattttaggagtagctgaatcatatgacgcagatggtcttttgttaattacctcaacttagactgcagattacttgtctaccagaaaggattcaaaatgagttggaacccacacaatggaggcccattccattaccattagttatccctttaatccagcaggaagctttattgaaatattttgaaggctcaaccttataacaatgtaactactttttcttggtgcatcacatgcttagggagagttcttacccttcaaattcaagcttttacaagttt

SEQ ID NO: 9059 - DNA, 378 bp, Glycine max
gatccatattccttatcatcacttcactggtctaacctgcgacatacatttcccgctaagccgaagcagaaatgctcctcagttactctctgcacctcccaattacatcttcttactcacacacctccgaccgcagtcccaactcgagcggttacataaagttccgaacaaggtaccgcgaaaacctgcgatacctgcgagccttaaccataatcgacccaaaaaccaaaccagaggaccttcctctccccaacgacgtcgaccacatcatcgacactctcacattcctcaagtcgcactctttctccgacgccgacatccctcgcctcaagttcctgacccctgagctcttcaccaccgccgtcgtcccctccgacg

SEQ ID NO: 9060 - DNA, 419 bp, Glycine max
ggactcgctaggtttgccaaaccaactccccaaaggggaccttagagagcaatcttcttccttctctctctctctctctctctctctctttcaatggcttcctcgtcttccagaactaagtccagtgggcccgttctacgctccctctcaccctccagtagattctgctcatacaccacatccaaaacccctttctcttctccttcatccgcattcgcttcctccacaagctctggcttctcctcttcaaccttcttcaaccagccacgtcagcatcactctcaaagccatcacagccaccaccgtgccgcatcgcccacacgtgtcaatctatacagccccgcccctctctcttcgggcgtccggttctctatcgacccccggtctatatcacccaacccgtccatatcgaaccagat

SEQ ID NO: 9061 - DNA, 404 bp, Glycine max
ctcgagccgacttcgcttccccttaattcccaaccttacattattaacttcaccaactcatctccctctaccaaacaaaacgacacaacaaaaccctctctctaaaaccctctctctgtctcccttccttctcatcttcaccaccaccaatggcgtcgccgccgccaccaccttctctcctcctcctcttcctcaccctcgtcgccgccacggcttcctccctcacctgcaccacccaaaagctcacggactccaagaacaacctctactccaactgcctggacctgcccgcgctcgattccttcctccactggactcacgaccccaccaacgcctccctctcggtggccttcgcggcggcgccccccaactccggcggctgggtgtcctgggggatcaacccc

SEQ ID NO: 9062 - DNA, 379 bp, Glycine max
gatccccatcaaaacacaagcaaatcctaaaaagttgattgagatatatagaaactagcttcaatttcacaaaatgaagaaagtgtttgtcacatttttagctgtgctagttgtatttgttcttacagcgaaagcttcagaggcacgactaccagttaaaacaaattcagcatcaaatgactacaattgttcacaagtctataacctgttagtttcgtgcgtagattacatgattggtggagatgatggtgccccttcaggtgtttgttgccaaagtgttaatgcagtgaaagcatcaacaccaacacaaattcaacgaatggctgcatgtaagtgctttttcgacgtagcaactcgccttcctttcttgctcgaaaac

SEQ ID NO: 9063 - DNA, 351 bp, Glycine max
aacacgcgtacgttcggctcctataccacgacagtttgtgatcccataacatacacaagcaaatcctagaaacttcagctgagatctatagggctatcttcaatttcacaaaatgaagaacgtgtttgtcacatttctagctctgctagttgtatttgttcttacagtgacagcctccgagtcaaagccaccagtcacaacaaattcagcaccaaatgaactacaatggttcacaagcgatgaataacttctttgtttcgtgcctagattaccccattggtggacatcctgttccctcaagtgttcgctgccaaagtgttaatgcaccgtaagcatctacacaaacacaaa

SEQ ID NO: 9064 - DNA, 1704 bp, Glycine max
tagtaactcggaattcggtcggcattcgagttctgcgctttattgcatctcagaggccaattctttcgccgcttcttctctctttccaacgcttccccctgtggtgttctcgtgttgctggtaacaatatggttgttgacgctttgaatgaggatttgagaatcaacggagcagttgaaccgttgcctgaggactttgatgcaacagctgtaatcatagatcccgtgcctttggcagttgtagacaatggcattgtcaaggaggaggcgcagatcattaaaggaaaagagaaaagagaaatagtactgggaagaaatattcatacctcgtgtctagaagtcacagagcccgaggcagatgatgaggtcactggggaccgggaagctcatatggcaagtgtgttggccagatacaaaagagctttgactgaaaggacaaagcatcatttagggtacccctataatttggatttcgattatggtgcgctcacgcaacttcagcacttttccataaacaaccttggagatccatttattgaaagcaactatggtgtccactcccggcagtttgaagttggtgttttggattggtttgcccgattgtgggaactggagaaaaatgagtactggggctatataacaaactgtggtacagaaggcaatctccatggcatcctagttgggagagaggtctttccagatgggattttgtatgcttcacgggagtcacattattctgtgtttaaagctgctcgaatgtacagaatggaatgtgagaaggttgatactctttggtctggggaaattgattgtgatgatttcaaggccaagcttcttagtcaccaggataagccagcaattataaatgtgaacataggtacaactgtgaaaggggctgtggatgatcttgatctggtcataaagaaacttgaagaagctggattttcacatgacagattctacatccattgtgatggggctttgtttggtctcatgatgcctttcgtgaaactagctccaaaagttacttttaagaagcctattggcagtgttagtgtttctggccacaaatttgtagggtgtcccatgccttgtggtgtgcagataacaagattggagtatgtaaatgctcttgccagggatgtggaataccttgcttctagggatgccacaatcatgggtagtcggaatggccatgctcccatattcctctggtataccttgaatcggaaaggatatagaggttttcagaaagaagtacagaaatgcttgcgaaatgcacactacttcaaaggccgccttgttgaggctgggattggtgcaatgcttaatgaactgagcagcacggttgtgtttgagaggccacatgatgaggaatttatacgcaagtggcagttagcatgcaaggggaatatcgcacatgtggtggtgatgccaaacatcactattgagaagcttgatgattttctgaacgagcttctggagaagcgtgctacctggtttcaagatggcaaggatcaaccctactgtatatcatcagacgtaggtgaaaagaattgcctttgtgctttgcacaagtaattgcagcatcccatctagtgtttattgctgtagttggtttttggagtgtttatccagtgtacgtcactatgttctatcaggactttgatgcaattaataacatttagaatcatctttgctgtcc

SEQ ID NO: 9065 - DNA, 489 bp, Glycine max
ggcccccgttttattgcatctcagaggccgattctttcgccgcttctctctttccttgtggtgttctcgtgttgctcgtaacaaaatggttggaagtgttgacgctttgaatgagggtttgagaatcaacggagcagttgaaccgttgcctgaggactttgatgcaacagctgtaatcatagatcccgtgccttctgcagttgtagacaatggcattctgaaggaggaggcgcagatcaataaaggaaaagaaaaaagagaaatagtactgggaagaaatgttcataccacatgtctagaagtcacagagcccgaggcagatgacgagatcactggggaccgggaagctcatatggcaagtgtgttggccagatacaaaagagccttgactgaaaggacaaagcaccatttaggctacccctataatttggatttcgattatggtgcactcacgcaacttcagcacttttccataaacaaccttggaga

SEQ ID NO: 9066 - DNA, 631 bp, Glycine max
accagggacgacttctttgactcgctctcttccaacatgcatggtaatgcttcacagaatggaaggactcgatactccgaacaaatcaagattgatactgagacgtttggcgattatgtgaggtaccatggtggtcgtgggggccgtggccctggccgtggtggacgtactcgaggtggttattatggaagaggaggagggtacggctataatggacgagggaggggacgtggcatgcccagtcgcactttgtaggtggcagttaatgtttagtcatggacatggtggagaacaagagcctaggtagcctcccctaaaagcatcgtaactatgttagagataatgcttcattgttgtgttgcctgttatatgttttgcttcgcagaataagtaggacacttttttcctgttatgctaccctcttgttactcctctaccaaagtcacttggtttggtgtaaagatgtttgtacaccattttatatcagcatatatcaccaggcagaagtttagactaatttattgcaggattgttgtttatgcatgtaattattagctagctactagttgctcattcatttctgttattcatttgtgctggggtgggaaatgattgatattcctccaattat

SEQ ID NO: 9067 - DNA, 470 bp, Glycine max
gggccgacccacgcgtgcgcccacgcgtccgcccacgcgtccggcgagtttacgacagaagggggataagagcgagcaagggagagacaaagagtgattcagagggagaaagctccctcgcacaaagcaatgcctgccatcacctgaattctatgctccttttccctttatccgcattgctctcttctctttcaccgttttttgtctctgaatatccaagatcttcaaggacaatgttatctctgagaaacatttttctgaatagcgcttgatccggcgtgaaacattcaattgttgataatttactgcttcactttgggctgtgcgagtggagcagcctattttactattaaaggcatattctcttacaaggtataaataattcttatgcatgtatttgcaagatgcattatttttattttttttaataatcaccattgtaatttattccaattgttatgacatttttt

SEQ ID NO: 9068 - DNA, 619 bp, Glycine max
ggattcagagggagaaagctccctcgcacaaagcaatgcctgccatcacctgaattctatgctccttttccctttatccgcattgctctcttctctttcaccgttttttgtctctgaatatccaagatcttcaaggacaatgttatctctgagaaacatttttctgaatagcgcttgatccggcgtgaaacattcaattgttgataatttactgcttcactttgggctgtgcgagtggagcagcctattttactattaaaggcatattctcttacaaggttgatttgcagagagcatggcgtcttgggatcaaatgggggaacttgcaaatgtggcacagttgactggtgtagacgctgtgcggttgattgggatgattgtgagagctgcaagcactgcacggatgcataagaaaaactgtaggcagtttgcacagcatctgaagttgattgggaacttgctggagcagctcaagatctcggagctgaagaagtaccccgaaactagggaacctctggagcagctcgaagatgctctaagaaggtcttacatattggtcaatagttgtcaagaccgtagctacccttatttgctggctatgggctggaacattgtttat

SEQ ID NO: 9069 - DNA, 695 bp, Glycine max
gaagaaaatttaggatgggtgggtgcatccagaagcaaagcaaaggcatgatgaggttattagggttttagagatgatgaaatgagaagtcgaatggcatcatcgtcatcggcatttctggtgatctgcatcctgcactcgttaatagcagtgacatgtggggggctgatgatgttctacatgaaggaggtctacaccttcggccacggagtgcaggccgccaccaagctcttgggatccacgccgcacgaccagcttctcatcaagacctccgattccttctccggcttgctccttgtcgcaattgggttcctcctcttcatggtctcttttgttaaagatcgtgactttcaggtcttcttcgccaagggttgcacgctcctccacctcttcatggcgatgtggagggtctacttcgaacgcaaggtcgaggatctcgctttggattggctccgccagactgttggcgattttctcttggccctttcgtgggttttcttccttgtttactcttggagggagaagtatgattagcttccctctttcttcttcttcttcttttatttaatttatgtttccagctttggatttaccttgtaaaaatcggatctcacctgtgtttagagatacgttataaagttgtgaattttgccttcccctgcttcaattacagaaaatggtcattattgttcccc

SEQ ID NO: 9070 - DNA, 558 bp, Glycine max
tttagattatggggttattagggcaccagagatgaaatgagaaggagaatggcctccccggcatttatggtgatctgcatcctgcactcggcgacagcaatgacagtgtgacgctcctgatgatgttctacatgaaggaggtctacaccttctgccacggtgtgcaggccgccaccaagctcttgggatccacgccgcacgaccagcttctcatcaagacctccgattccttcttcggcttgctcctcgtcgccattggcttcctcctcttcatggtctcgtttgttaaagatcgtgactttcaggtcttcttcgccaagggttgcacgctcctccacctcttcatggcgatgtggagggtctactttgaacgcaaggttgaagatctcgcttgggattggcttcgccagactgttggcgattttctcttggccctttcgtggggtttcttccttgggtactcttggaaggagaaagatacgttataaacttgtcaatgttgccttccctgcttcaattacagaaaatggtcaataatcttaccagattatgcctgat

SEQ ID NO: 9071 - DNA, 339 bp, Glycine max
ccgggacggactggccggaccgacccgtccgctttcaggacttattcgccaagggttgcacgctcctccacctcttcatggcgatgtggagggtctactttgaacgcaagggtgaggatctcgcttggtgattggctcccccagactgagggcgattatatcttggccctttcgagggactacttccttgtctactctcggagggagaaagatgatgagcttccctcttacttttttatgctaccattgaccaccacagctttggatctaccttgtcaaaatcggatctcacctggctttctttcttatcaaatcttgcgttagagatacggcattaac

SEQ ID NO: 9072 - DNA, 379 bp, Glycine max
ggctgctgcttctttttcttcttctttttttctctctctctttcgcagcttcgagatcggggacgagccagcgatggcgaaatcaagcgccgacgacggcgagctccggcgagcttgcgacgccgcaattgaggacccgaggcagaagatcgtgatggcgctgcgcgtcgccaagagtcacggcatctttggaaaatcttcctctaagcttggtcgcatggccaagcccagggttctcgctctctccattgttggtgacgacgtggtgtttcctgcagcgaaatcgaaggggctgaggacatcggcttttcttcgagttttgaagtattctacgggaggagttcttgaacctgcaaaactatacaagctaaagcacctg

SEQ ID NO: 9073 - DNA, 405 bp, Glycine max
ggtgatgaggcagtgtctgaaatgtgaaacttgattaggcaaaatggtgagtgaaaatggtgaatagattcctcattctaaaattaacttcatcttttccattcaccaaatccattttctttctctgctgcaacatacatagcccaatgctctctttttctttaacccattcactttaaggtttgtttggtaggatgaatggagaagaaaaaacaccggctttggctccaaagagattcatcaatcatcagatacatcaaatgctgtccttagtcttctgaaaacctacggatgctccgaaagccagttctctgtcttgccaagaggttactctcattgctcttaatcaaatctcactacattaaattctgtgagcgaagtaatggggtctaattttcttctcat

SEQ ID NO: 9074 - DNA, 680 bp, Glycine max
ttagagcgttgataacatgattcacgtgggcgcgtgctccgtgttcgcgaagatcctgaaagaaagtcctatgaaagtgcaagctgtcgtggcctgggctgtgtcggaactcgctgccaattaccctaagtgtcaggaccttttcgcccagcacaacatcataaggttactcgtcggtcaccttgctttcgaaaccgtcgaggaacacagtaagtacactattgtcagcaccaaacccacttccatccacgccgtcgtcatcgccaacaacaacgtcaagaaggaagatcattttcacgacaatgaaaagaaagcacgaatgcctcatcccttgggtgataatagaccacgaaatctacatagagtaatcacaagtacaatcgcaatgcacgctgccaccaagcaaggaaacgaaccaaatcataatcatcagaccaatggcaatggagttgataatgatgccaagcaagggaatcagaatcaccagcgaaactattcacattcggggataaacatgaaaggaagggatcatgaggatcctgagactaaggctaacatgaaggaaatggcagcgagagctctctggcatttagccaaaggtaactcgccaatttgtcgtagcattactgaatcaagagccctgttgtgtttttctgttcttcttgaaaaaggaacagagg

SEQ ID NO: 9075 - DNA, 589 bp, Glycine max
gtcgttttttttcgttttcacctttctctttctttgttttacggtctttttccgttgtcgctttttctctttcttctttgttctgaatgacccactccccttcacgccgtcgtgtcgtcgctttcccacaatgaacaagaactcaaggcctcctcaccattcgcactaaagccatcaaccctttacttctctcctcacaaattatcgttactatccaaaaatgagcaaagaataacaatctcccccaagccttccactgcgagaactgtgacgacgtaggtggagtgagtgtagtggggcatgcggagaaagacagggaacgtgaagggttggggttgtagaccttggtgaagagcaagatggagaacgggtttgggttagatttggggtgatggccgtgtttgactttgtagatctgggtggtccttgtgattcgactcaatgagacagtggaaagcattgatggtgttgtcgacgacggcttggaagtgggagtgttcatgtggtgactccacccagttgaagaacttcaccgaaagatcgatggcctcaacaaatttgggattttactctagatctcatttaactt

SEQ ID NO: 9076 - DNA, 1838 bp, Glycine max
ccctcgcgtcctgtgtctccaggccgtgcccttactccatcgcgacctactgatgttgatgactctgtatccaagtctcagggtgttaatgcaccatcggtggagggatgtgacatggcaactccagtaccagtggccaatggtgttctaagtgagagcagtaaagttaaaactcacgatgaatcagttgggccttgcaaaattgaaaaggaagagggtgaattgtcaccaaatggtgactctgaggaggataacattgttgcttatggagattcaaatgtgcaatcaatggccaagtcaaagcacaacattgaaagaaggaaatatcagtctagaaatggagaggatgaatcttgtcccgaggctggaggtgacaatgatgcagatgctgatgatgaggacagtgaaaatgtttctgaagctggtgaagatgtctcaggcagtgaatctgctggtgatgaatgcttccgcgaagatcatgaagaggaggaggatatagaacatgacgatgttgatggtaaggctgagagtgaaggtgaagctgaggggatttgtgatgcacaggtcggaggagatggcacatctttgccattgtcagagaggttcctttcatccgtgaaacccctcacaaagcatgtatcagcagtttcatttgttgaagaaatgaaggattcaagggtgttctatggaaatgatgacttctatgtgctttttagacttcatcaagctctttatgagaggctcttatcagcaaaaacacattcaatgagcgcagaaatgaaatggaaagcaaaagatgctagttcaccagatccttattcaagatttatcaatgcattgtacaacttgcttgatggatctgccgaaaatgcaaagtttgaagatgaatgccgggcaattattgggaaccagtcatatgtgttattcacattggacaagttaatatacaaattggtcagacagcttcaaactgtcgcaaccgatgaggtagacaataagcttctccaattatatgaatatgaaaagtctcgcaagcctgggaagttaaatgattctgtatatcatgcaaatgctcatgtcatccttcatgaggagaatatatatcgtttacaatgttcctctaccccctcacgactatccatccagctcatggacaatatgaatgaaaagcctgagttgtttgccgtttccattgatccaaatttctctttttatctgcacagtgattttctgtctgtctttcccaacaaaaaggagccccatggcatcatactgcatagaaacaaacgccaatatggaaacttagatgagctttctgcaatatgctctgccatggaaggtgttaaagtagttaacggattggaatgtaagatagcttgcagctcatctaagatttcttatgttcttgacacacaagattttttcttccgaccaagaaagaaaagacgaacgccttcagggaccacaacctcccggttccgcagggacagagaggaaagattccgcaaattgttggcatgctcgtaatttgtatcttcatgaagagttgttctctaacatcttctaaaacagctgaggagactcatacataattctatatgtttgagtcttggtgtagcaacctaggaaccctttgggtttacaattttatttgttgtcagtacttgaattttcacatgaaagtggaggaggggtatattgatgggagtgtgtaatatgtttatgaggtctcatgcgttgtgcccattcctttgtaaatagtttgcttcgttatatatttgtagaatattgtttacccaattgtttattagttgcaacacagttgcttcctccgttcc

SEQ ID NO: 9077 - DNA, 433 bp, Glycine max
ggcattggcatatattaatatggttgaggacatctcgtggggaatttgtgaaggctttcacttgtgagcttagaaaactgaagatgggtttcacaggggagttggtaagaagtgtcttctccaaaaatcgttctgatgggtctcatgaaaacaaagtgaggcgcaatagtgctaaaaatagaagaatgttatctgtgaggtcattcttgtgtggtgatgaattcaattcagtccttgcagagaatgattcagcttcagttaagagctctgaagtcacggtttcacagtccgtacatgagggcttgttaaacgatgaacgagacactgaaagtgaagaaactgtggagaatgtagcacagaacaggccaagttcaaactccaaaaagtcattgaatgaggaagaagcagctgttcttattcaatcagcatttag

SEQ ID NO: 9078 - DNA, 398 bp, Glycine max
aggcgtcagaaacgcatcatggggctccatgctctctcttacactagagctaaaacgccgaaaaaaaacactatctctctttcacagtgcttcacagcagaagctacctgtcctcttactcgctccgtttgctcagcaaaacggtttcttttctccaatgggtgcttcgggaaggtggtttaagtcacttcttccttttagaaagacctcaactgatcaagagaagggtggtgacaacaagagttagaagaagcggacgctatggagggcatcttcagaagggtccatgaagaatgttcgtgcgggtggtgctgctgctgcatctgattcttcccttacttatgcggtggctgtgatggttcccaaagatttcaagctcatcaagcatgaatgggctg

SEQ ID NO: 9079 - DNA, 464 bp, Glycine max
cgtcccttgaacaatgagcagaaggagcgatgaaactgcggtgactgaagaagcaccacccaaacagtccctaccgaacctcttctctttgtttcctaaaatcaattttcaactccctttcctcccacccaaacctaaacccaaacctcaagaacccaaccctcaggctcagcaagagggtccgaagcctagccgtgtacagtttccgaaaacccaagtggcggtggttgcttcttcgcctctgcaagctgaacctgatgctgaccactctcccgctgctaagacaaccaatcctcttatactctggcagatttatgcaataggagcgattgcgatttcatcatgggtttgggcaagatggaatgagaggaagggccgaggtggggggtctcccaatgatgagaggggtgaaggaaggcattctgatgatggaaatcagtgatcttcaggcgatgaatagaaat

SEQ ID NO: 9080 - DNA, 395 bp, Glycine max
aaggggatagatataagggttttaatttatcgcagctttggttttattaggatcgccgtccctttcattacacaatgagcagaaacagcgatgaacctgcgatgactgaagaagcaccaaccaaacagtccctagcgaacatcttctctttgttccgcaaaatcaattttcaactccctttcctcccacccaaacctgaagaaccgaagcttgaggctcaggctcagcaggagggtccgaagcctggccgtgtacagtttccgaaaagccaagtggcgctgattgcttcttcgcctctgcaagctgaacctgatgctgaccactctcccgctgccaagacaaccaatcctcttattctctggcagatttatgcaataggagcgattgcgatttca

SEQ ID NO: 9081 - DNA, 676 bp, Glycine max
gaccttcagcccagttactggttcacatggttatgatccttggttacagaatgctttatttccacgattgtccggtggacttaaagctcaggagagtgctactcagaatgaaatgatacatgggagtcaaagtgcatctgctagcaatcatttgcttaagacttctccggctaacaattggtccaaaaatgaatggcctgtaaaaggtactgtggaaggcttagggaattcatctgttgccaggccccataatggcaatctacatccaacctcagatgtacagtcattttggtcatcatttgattagaaagaggatatgatagtaacagggtaacaacttgataaacaccattgttctcttgagacaaatagtctcatttggggaaatcgtttagaatactgaacccacccattgtatcttcctttcttcttcttttgtgaggaagattgatgtttacataacgccagcttcgataggaatacgcgttaatgcgtgcttctcttgaggcaggtaataagaggtgtcccccctttgaggtcaatttgtcctttggagaatgaaggttcacattcaccctgtgtcatgatcttcaaatatcttaatgaaaaataaaacttatactaacgtgatccgctgctactgaaaaaatatagttgcgtttctgcctatctcatt

SEQ ID NO: 9082 - DNA, 499 bp, Glycine max
ctcgagacgcgagtgaggagactgagaaaacagaagaaaacaaaatggaagacacagtttctgcgttgaggtctttgatggtttctcactctccgccgctggatgccttagtggtgccctctgaagattatcacctgagcgaatatgtgtctgcacgagacaagcgccgcgaattcgtttccggcttcactggaagtgccggcttggcacttataacaaagaaagaagcactgctgtggacggatggacggtattttttgcaggctgagaaagaacttagtgctgggtggaagctaatgcgaattggtgaagatcctgctgtagatatctggatggccgataatttgccaaaagaagcatccgttggggttgatccctggtgcatttcaattgatactgctcaaagatgggagcgtgcttttgccgaaaaacagcagaagctggttccaacctcaaaaaaatttggtggatgaagtttggataaatcgcccaccggcag

SEQ ID NO: 9083 - DNA, 260 bp, Glycine max
tttttcggcaaaagcacgctcccatctttgagcagtatcaattgaaatgcaccagggatcaaccccaacggatgcttcttttggcaaattatcggccatccagatatctacagcaggatcttcaccaattcgcattagcttccacccagcactaagttctttctcagcctgcaaaaaataccgtccatccgtccacagtttctgcgttgaggtctttgatggtttctcactctccgccgctggatgccttagtgtggccc

SEQ ID NO: 9084 - DNA, 738 bp, Glycine max
ttcatactctctctctttctctctcatgctttaattctccaacacgagaagttaaattttagagtgagttgggtaattgttggagggtctattttttctgtccataaatacctgtctgctaggccaacccacttccatattttgcatcctttgtacctcagttccaggttaacaccaaataacacatatagtgcagattcataagcttccaaccatggaggatccaaatcaagctccagaagggtcttctcagaagaaaatgggaagagggaagattgaaatcaaacggatcgagaacaccaccaataggcaagtcaccttctgcaagcgccgcaacggtttgctgaagaaagcttatgaattatcagttctgtgtgatgcggaagttgcccttgttgtcttctcaacccgtggccgtttgtatgagtatgccaacaacagtgttagggccaccattgaaaggtacaagaaggcaaatgctgctgcttcaaacgcagaatccgtatctgaagctaacacacagttttaccagcaagagtcatccaaattgagaagacaaattcgagatattcagaatctaaacaggcacatccttggtgaagcacttggttctctgagtctcaaggaactaaagaacctcgagggtagattggagaaaggattaagcagagttagatctagaaagcatgaaacattgtttgctgatgtcgagttcatgcaaaagcgggaaattgagct

SEQ ID NO: 9085 - DNA, 860 bp, Glycine max
gggggcccctttttcttgtttttgctgttcaggggtctttttttgagacccagattaatgtatatatatattggacttctaaccccctttatatgcgagctagaattgaagttggccatataacataatacaacactatccttgcttcttgttagacatggcaactactacactcatgaagcttgctttcatgcttctcatgaaccttgttatctgcagcgcagaatcttccatcggcagaaagtccaatcctaacccagaagagttcgtgaagtcctcgtgcagggcaacacggtaccctgttctatgcgtcaagtctctgttggcctacgcaagcgtgattcgccgaagcgaccgacaactagccacgaccgctctgtcggtaagcatatcgaggagccgatcctccgcatggttggtgaagaagatgttgaaagcgagaggcatgaagcctagagaatacagagcggtgcaagactgcgtggagaacattggtgacagcgtggaccgtctcaggcaatcggttacggagttggggcggacgggcgaggacttcgtctggcacatgagcaacgtccagacttgggtcagcgctgccctcaccgacgacagcacttgtcttgacggcttcgctggttccgccatgaacggaaacgtgaaggctcttataaaggacaggattgtccacgttgctcaagtcacaagcaacgctctcgctttggttaaccgctttgcctcaagacacccaagtgctactcaaactccttaactcttatttcttgcctttctgtctttttaaatttcttctcttggaaaatcctacctatgctactaagtctttgtaatatagggctttttta

SEQ ID NO: 9086 - DNA, 1264 bp, Glycine max
agaacaacagaagggggatcgagcgagcagcgtttgtttgttccttcctcagtcgttgtgacagtgtgtgtgagtgagtgagtgagagcgacgatgggcgcgagcagcgaccccacccaagacggttccgacgagcagcagaagcgttcggagatctacacctacgaggccccctggcacatctacgccatgaactggagcgtccgccgcgacaagaagtatcgcctcgccatcgcctccctcttagagcagtaccctaaccgcgtggagattgtccagctcgacgactccaacggcgagatccgttccgacccctccctctccttcgagcacccttaccctcccaccaaggccatcttcatccccgacaaggactgccaccgccccgatctcctcgccacctcctctgacttcctccgcgtctggcacatctccgaatccgccgtcgaactcaagtccctcctcaacggcaacaagaacagcgagtactgtggccccctcacctccttcgactggaacgaggccgagcccagacgcatcggcacctccagcatcgacaccacctgcaccatctgggacatcgagaaggaaaccgtcgacactcaactcatcgcgcacgataaagaggtctacgacatcgcatggggcggcgtcggagtcttcgcctccgtctccgccgacggctccgttagggttttcgatctccgcgacaaggagcactccaccatcatctacgagagctcggagcctgacacgcctctggtgcggctcgggtggaacaagcaggacccgaggctacatggcaacgatcatcatggacagtgcgaaggtggtggtgttggacattcgctttccccacgctccctgtggtggagctgcagcgacaccaggcgagtgtgaacgcgattgcgtgggccccacatagctcgtgccatatatgcacggccggggatgattcgcaggcgctgatttgggacctttcttccatgggtcaacccgtggagggtgggcttgaccctattcttgcgtacactgccggtgcggagattgagcagcttcagtggtcgtcttcgcagcctgattgggtcgctattgctttctccaccaagcttcagattcttagggtttgaaatttgatttctcctgaaacttctgtttccctgtatgtgcaaacgaaaattggggatactttagatttgaaaacaaaacacagttgtattgttgtttctttttattgttgaaactaatgctaaccccttcgcgg

SEQ ID NO: 9087 - DNA, 752 bp, Glycine max
catctgggacatcgaacgcaccctcgtcgaaacccaactcatcgctcacgacaaggaggtttacgacatcgcctggggagaggccagagtcttcgcctccgtctccgccgacggctccgttagaatcttcgaccttcgcgacaaggagcactccaccatcatctacgagagcccccaccctgacacccctttgctccgcttggcttggaacaaacaggacctgaggtacatggccaccattttaatggacagtaataaagttgtgattttggatattaggtctcccactacccctgttgcggagttagagaggcaccgtgggagtgtgaacgccattgcttgggctcctcatagctccacgcatatttgttctgctggtgatgatactcaggctcttatttgggaattgcccacgcttgcttctcccactgggattgatcccgtctgcatgtactctgctggctgtgaaattaaccagctgcagtggtccgccgcccagcccgattggattgccattgcttttgccaacaagatgcagcttttgaaggtttgaggtcagaacaaacaattacacattctagccccttcattgtggcatagacatagcaacttctgatcccttgagtggctgagttatatatattattggagttgggcaaacaagtttgccccccccatgtttaacttgtggggaaattaacaatgttcaatttgtttgttaaaaatggatttttaacccgttgtcaagtaag

SEQ ID NO: 9088 - DNA, 897 bp, Glycine max
ataagattacacgctttttgtcatccaatttccctctcccgtgtcgtgtcgtgtcttcttctctaaaataaaaaaccctaacttctgaacctttcaccgcatcgccaccgattccctatctccactaatcaaagaaaagaaaatgagtagacgctcgagcagaactgtctacgttgggaatctacccggtgatatccgtgaaagagaagttgaagatttgtttctgaagtacggacacataacacacatcgacctaaaggttcccccaagaccacctggttatgcatttgtagagtttgaagatgctcaagatgctgaggatgcaattcgtggtcgtgatggctatgattttgatggccaccggttacgggtggagcctgcccatggtgggcgtggtcattcatcctcaaaagatcggcacaatagtcacagcaatggccgaggtggacgtggggtatctaggcgctctgaatatcgtgttctagtcactggattgccctcttcggcatcctggcaggatcttaaggatcacatgcgcaaggcaggggatgtttgcttttctcaagtttttcatgatggaaggggtactaccggtattgtggattacacaaattatgatgatatgaaatatgctattaggaagcttgatgactctgagttccggaatgcattttccaagggatatgttcgggtgagggaatatgattcaaggcgggattcttctagaagtcctagtcatggcccatctcattctagaggaaggagctatagccgcagtcgtagccgtagccatagttacagtcgggaccggagccaaagcaaatctccaaaaggaaagtcttcaaagcgttcacctgctaaatctccaaaaaggaaagtctttcacaggttcacctg

SEQ ID NO: 9089 - DNA, 1412 bp, Glycine max
tatctttggattaaatgctcttgctggaaagtcaatacacggtggttctgcaaaaggaccttggaactacaccaatgccgagtcctttattcgatacactgttagaaatggctacaccatttatggatgggaacttggaaatgaattgagtgggaatggagttggaacaagcattacagcagagcaatatgctttggatgttgctgctttacacgatgtagtttacaatgcatacaaaaagattgagcctaagccactagtcattgcaccaggaggtttctatgatgcaaactggttcaacaaatttataagcaaatcaggaaaatctattgatgtggtcactcaccacatttataaccttggaccaggagttgatgaacaccttgtggaaagaattctggacccttcctatcttgataaagaggttagcacattcagtggcctaaaaaatatacttgcaggtacaggaacctcagcaacagcatgggttggtgagtccggaggggcctacaatagtggccatcatcttgtatccgatgcatttgtttacagtttctggtatttggatcagcttggcatgtcagctgcttatgacactaaaacatattgcagacagactttgataggaggaaactatggtttactcaatactacgaattttctgccaaatccagattactatagtgctcttctttggcaccgactcatgggaagacatgtcctctcaactaccttctctgggacaaacaagataagagcttatgcacactgtgcaaagcaatcaaaaggaatcacagtactattgatcaacctggacagcaacacaactgttgaagctgaagtgaccttcaacaacaacgctgagagtttgaggcacagaaagatgtctagtcattcaaaagggatggaactgcctcttgcaagtgaaacagcaagagaagagtaccatctaactccacaggatggggatatacatagccaaatcatggtactaaatggaaaccctctgagtgtaagctcagatggtgatattcctcctttggagcctataaatgtgaattcatcagagccaataagggttgctcctttctctattgtatttgctcatttacctgatgctgttgtttcagcttgcggctaagtactaagtggcactaggggagaccaaaaaaattggtttcactaggtggtttggcaaattacatggaaaataaaatgtgttagtttccataagagaatgccaattatttagtttgagaactaggatgttggtggttttattatatgcttttactagtgcatgttcccgtgcatcaggagcaaattatgtgtgagtaagagagaaaaaacaaatatgaggtacaagatttgttgaggcaactgactgataattcgaagtactccgcggagtt

SEQ ID NO: 9090 - DNA, 705 bp, Glycine max
caaaaacccaatagtcccatactatactacttaaaaccctaagtatatctttcgcctcagtctctaaaacctcagcaacaaacactcttcttctctccgccgtctctctccattctctctttccttccccttttcgagacgacaagatggtgaagaagagcaagaagagtaagagcaagagggtttcgctgaagaagaagtacaaggtcataaggaaggtgagggagcacaacaggaagaaaacgaaggaagcgaagaagcttcgattgagtgggaagaagaaggttgagaaggatcctggtattcccaacgattggcccttcaaggagcaggaactcaaggccctcgaggctcgaagggcgaaggcaattgaggaattggaacaaaagaaagccgaacgcaaggaaagggctcggaaaaggaaattgggcttgctagaggatgaagataactccaaattgagtgaaatgaatactctaaaaggtaatgtactgttgggaagactaaagatagctcagatagggccttttacaaagatttggttaaggtcattgaagcctctgatgtcttactggaggtgcttgatgcccgggatcccttgggtactcgttgtgttgatatagaaaagatggtgatgaaatcgggacctgataaacgtctcgtcttgcttttaaataaaattgatcttgttcctaaagaagcttt

SEQ ID NO: 9091 - DNA, 447 bp, Glycine max
aaattctgtgccttcgccttacaaacaagcatcagcaacactctactgttcaccgtctctccatcctctatccttcacgcctattgtagcacgaagaaaagcacagtaactgagaggacacgatggtgaagcagagcaggaagagtaagagcacgacggcttcgttgaagaagaggtacatggtcatacggaaggtgagggagcacaacaggaagaaaacgaaggaggcgaagaagcttcgcttgagtgggaagaagaagggtgagaaggaccctggtcttcccaacgattggcccttcgaggagcaggaactcaaagcgcttgaagctcgaagggcgaaggctattgaggaattggagcaaaggaaagcggaacgcaaggagagggctcggaaaaggaaattgggcttgctagaggatgaagataactccgattgagtgacatgga

SEQ ID NO: 9092 - DNA, 490 bp, Glycine max
acgttttaaattttttttttaaaaaaaaggatgttatagaaagattactggggagggaacaagaactcaatcactctgagttgttcttcataaagaagactgcgtttgtgatattttctcctaccatgtctgcctttctttgaactttcactcgcagcttcttattcttgtgatctaagttcctctactctcattccaagcgtgggtgtatatcaaggatccggattccttgtggtcggaggaagcacgcatgcacgcagttagacgattagaactgtcataaagattcaacagttgatgaattattttagtaaattcaacttaaaaaacacatttaaaatactaactgtctgatcaaattagacagtccacattcacgattgtgtgaatgcgtgagtgcaggtggagtgatataaaatggaggagagaccagaaacagaactgatatctataccggcgacaccaagggtgtcaaccccggagatactga

SEQ ID NO: 9093 - DNA, 961 bp, Glycine max
cattttctcctaccatgtctggctttctttgaactttcactcgcagcttcttattcttgtgatctaagttcctctactctcagtccaagctatcgttttggtgggtgtatatcaaggtggagtgatatataaaatggacgagagaccagaagcagaactgatatctataccggcgacacctagggtgtcgaccccggagatactgacaccggggcagaggtcgccaagagcagcatcaaaggaaggaaaatcatggaccccaacttcttttatatcaccaaggtttctgagtccaatagggacgccaatgaagagagtgcttgtaaacatgaagggttacttggaggaggtgggacaccttaccaaactcaaccctcaagatgcttggcttcccatcaccgagtctcgcaatggaaatgctcactatgctgcatttgacaacgctcaatgctggtgttggcttccaggccctctttttgcccgttgcttttgcttatcttggctggagttggggaattctttccttaaccatagcatattgttggcaactttacacgttatggattttggttcagcttcacgaagcagttccaggtaaaagatacaacagatatgtggagctagcacaagcagcatttggggaaagattaggagtctggcttgctctcttcccaactgtttatttgtcagcaggaactgcaacagctttgattcttaattggaggagagaccatgaaactgttcttccaaatagtttgtggtcccacttgtacttcaaatcctttaaccacagtggaatggtacttggttttcacttctctatccattgtcctgtctcagcttccaaacctcaattcaactgcaggactctcactcatcggggcagtgacagccataacttactcccccatggtttgggtagtctctgtaagccaacaaaggccaccctccatctattatg

SEQ ID NO: 9094 - DNA, 529 bp, Glycine max
tcccgtttcgggccacgcgtgcgcggaaccaccgtttctctctctctcacgcacacatggtgctgccactgtcactcttctcttctgctttctgcttcgccgattctctatttttgcgcgcaatcgattgtatgctttgggccagtcgttaatgataacttgaggtctggatgatgctttctgattggttgtttacatattgtaattcagaatgtggaactttgcatcgaattgcattgctggaactgtgggactgaaaaatgattcaaagcctactcattctgcttcggaatgttctgatgatgaaaactctgttataggcagagaggaagggctggaatgcccaatatgctgggaatctttcaatattgttgaaaatgtgccctatgttttatggtgtggccacaccctttgtaaaaattgtatcctcggactgcagtgggctgttgtgaaatttccaacactgcctgttcaacttcccctttttatctcctgtccatggtgcaaccttctgtctttccgtttagtt

SEQ ID NO: 9095 - DNA, 428 bp, Glycine max
cggaaccaccgtttctctctcacgctgccactgtcactcttctcttctcctttctgcttcgccgattctctatttttgcgcgcaatcgaatgtggaactttgcatcgaattgcattgctggaactgtgggactgaaaaatgattcaaagcctactcattctgcttcggaatgttctgatgatgaaaactctgttataggcagagaggaagggctggaatgcccaatatgctgggaatctttcaatattgttgaaaatgtgccctatgttttatggtgtggccacaccctttgtaaaaattgtatcctcggactgcagtgggctgttgtgaaatttccaacactgcctgttcaacttcccctttttatctcctgcccatggtgcaaccttatgtctttccgtttagtttaccggggaaatcttaaattc

SEQ ID NO: 9096 - DNA, 393 bp, Glycine max
gaaaaaaaaaaattcaatcttttaattctcactctatcatgatttttgcgttcaattgcttccaccttcggtttaaacttggtacacctctgtcacaaatgatatgtttcatacttgatgctttgaccccgtcattagtgaccacattgaggtccaaatgatgcgtgtttcctgactatttctatagtattgtgactcgattcagaatgtggaactttgcatctagtgtaatggctggaagtgtgggtccgaataatggatgcggcaaaaccaactcaccctgcttcagaatgttctgatgatgagacttctatggtaaccagagaggaaaggctggaatgcccaatatgctgggaatcctttaacattgttgaaaatgtgccttatgtctta

SEQ ID NO: 9097 - DNA, 632 bp, Glycine max
attcttccggcacacacaacttgtcacatatcatattttgttcatcaagtttataattccttatctttgaacttacttacatccaagtaaggtctaagctagctggagttgattagatctagctagcgaagtttcatttctttggattagaaatttttcccaaagctgatcgagaagccagccaggccagagagttgaagaagaatgggaagggggaagatcgaaatcaaaaggattgagaacacaacaaatcggcaagtgaccttctgcaagagaagaaatgggcttctgaagaaagcttatgagctgtcagtgctgtgtgatgcagaagttgccctcatcgtcttctccagccgtggccgtctctatgagtattccaacaacaacataagatcaacaatagagaggtacaaaaaggcatgttctgatcactcaagcgcgagcactaccacagaaatcaatgctcagtattatcaacaagaatctgctaagctgcgacagcaaatacagatgctgcaaaattctaacaggcacctgatgggtgatgccttaagcacactgactgtgaaggaacttaagcagttggagaatagacttgatagaggaatcactagaatcagatctaagaaaca

SEQ ID NO: 9098 - DNA, 247 bp, Glycine max
cgatcattttcctatacttcgttttttatgagtctgatctttttgttctcagacttatgcatcatcttgtgctaaaacaaaaggagttgaagaatgggaagggggaagatcgaaatcaaaagatcgagaacacaacaaatcggcaagtgaccttctgcaagagaagaaatgggcttctgaagaaagcttatgagcagtcagtgctgtgtgatgctgaagtttccctcatcgtcatctccagccgtgg

SEQ ID NO: 9099 - DNA, 479 bp, Glycine max
ctcgagccatgccaaactcatcctcaaatttcaaatctctctctctctctccactccccaataaaaatctctctctccactcgtgcactctaatagagagatagagcgtgtgtgtgtgtgtgtttgaaagaagataaggatgacagggcaagtggtggtgaccaacggtggcggatgcgctgctgtcgggaagggccggagagccgccgccggcgaagaggagcagaacccggcgtcaccggtggcgcttctgctggcggcgctgaggaagtcaatggtggcctgcagcgtggacagtcccgacgatgtaatctccgccgtccatcatcccatggagatcggatggcccacaaacgttaagcatgttagtcatgtcacgttcgatcgcttcaatggctttctgggtcttcctcttgagttagaggttcatgtccccgctcctgttcccagtgctagtgttagtgtgtttggcgtctcac

SEQ ID NO: 9100 - DNA, 465 bp, Glycine max
gaaataacaaatcaaaatactcaaaggatttaaaatgacagaggccgacacagatgatgttggtacgaagtgtaacttctcgttcgcattcaacaacatcaatttctcagaccgaattctcaacattgaggttatacccgaccctcatttcatccgcgcccaatcccattctctctctaccctcgctccaaatcgtaagagacgcagactctctcttatgaaagccaatgatgtcctcttgcaacctgaggaaaaattaaattgtaatttaccagatgcagaggaagttgtggcaatcactgaggcatcactttcaggttttgtgataactcataacatgtggatctatttcttctttttcaatagcctcggattgttattattattatcaaaatttaaggctaatgcttcatgaccccacttggtgtagttggttttttttgtgtcttaaatactgatattaat

SEQ ID NO: 9101 - DNA, 943 bp, Glycine max
gacccaaacgtcagatgcttattattacaaacaacaaataacaaatcaaaatactcaaaggatttaaaatgacagaggccgacacagatgatgttggtacgaagtgtaacttctcgttcgcattcaacaacatcaatttctcagaccgaattctcaacattgaggttatacccgaccctcatttcatccgcgcccaatcccattctctctctaccctcgctccaaatcgtaagagacgcagactctctcttatgaaagccaatgatgtcctcttgcaacctgaggaaaaattaaattgtaatttaccagatgcagaggaagttgtggcaatcactgacgcatcactttcaggtgatgaagtttctcatggcaatgattcatcattgggcgtgagttggtcaaaagttcttagagttaggaccatacagataagttctccaattcttgcagaaaaaagccccttcttttacaagttgttttcaaatgtgacgcgagagtctaagcaacaaaatgtgactcttcaaatccatgattctgaagaggctgccggtatggacctacttaattttatgtatagtaatactttatcaagaacgacatctgctgctgtattggacgtgctgatggctgcagataaatttgaggttatgtcatgcataaggtattgcagtaggatgttggcgttactgcctatgacctgtgagtctgccttactttatttggatcttccttcaaacattttgacattagatgcaattcaaccactggtagacacagcaaagttgtttcttgccacacactacagagacataacaaagtttgcagatgaactgctgaatttacccttggctggcattgaagcagtgctatctagtgatgacctccagatgccttcagaggatgttgtctttgagtttgtgctcaagtgggctaggatacatta

SEQ ID NO: 9102 - DNA, 405 bp, Glycine max
ggttgtgtgtaagtgtgaagagaagagaatggtagtaggattgaatgtgcctcagccatttctgtcaccagtttgcaagacggcaccttacccacttgatctcatcgccaccgccgcgtccctccacttcggccaccttctccgccgccgcgcgacccaccatctccgccttggggttcttcttcactcctgtttcaagaaactcgctcctttaactcacatttttagattgaacgataagtggtgtcaaagatgctttcaactcaatgggttgaactatcttcaactgtcaaccggtgatttgacttcctcatggtcaactagtttctctttctttaatgggggaggagatggaggccgccgctatggaaaggctgggatgtccaactccaaaatgtctggaaa

SEQ ID NO: 9103 - DNA, 405 bp, Glycine max
ggtagtatactataataatgatgataatgtgaatgaagcagatacagagcagtggaagggatcagtgatgagatactgtcgaaaacagcaaaacacactcgcaacaaatcagacactttcactcagccttcatcagatggggatggatcccctgcaacggcgctgcacaactggttcgccaacattctcaaaccgacctatagcaataacaataacacacaacaaccacctccttctcctcctgattctcctaaaccttctctccctccacgtcagcatcatcctcgaaagtcccgcttcaaaaccgagccctctgctgcacctcacccgcaggggatccatcctctcaattcgagacgaacctttaaggactttacgccgccggcggagaaatcttccgtcgga

SEQ ID NO: 9104 - DNA, 488 bp, Glycine max
  unsure (1)..(488): unsure at all n locations
ggaatgaaagctgtagtagctatgtgcaccaatttcaaattgggagaatagaaagaagaagcttcttgttcatctcctgctctgtcattttgtacgcctattgataattggcatatgatgcataaatcatctcagaaagtttcaatgtcattctttggtcccttgtataggaacataaacaaagggtacaacttggttttctttataattggcgtatcactaggaatagctgcagttttatgccttaaactatctttcagtttacaggcctttctgtatcctgtgattaccccaatcacaacaattcttccaccaccattatcatcatcacgactattatctgtgactgaacaaccacctagtactgaattaaagacatctctgatgcacagcatgaccgaccaagaagtgttcctgaaagcatcatccatggtttcaaggtactcaagattttactcagcangccgttccaaaagtggccttcatgt

SEQ ID NO: 9105 - DNA, 592 bp, Glycine max
gggaaaccagtgaagtgatgagccaagacctcaagcgagactacgtcgtttcggaggagatcggccggggaagattcggcaccgttttccgctgctcctccgcagactccggtcactcctacgccgtcaaatccatcgacaaggtggcaataaccgccgccggagactccctcgacgcgcaatgcctattgacggagcccaagatcgttcagcttctctcccctcaccctcacatcgtaaacctccacgatctctacgaagacgaaaccaaccttcacatggttctcgacctctgttacgaatcgcagtttcaccaccgcgtcatgtccgaaccagaagccgcttcggtgatgtggcaactcatgcaagccgtggcgcactgccaccgcctcggcgtcgcgcaccgagacgtgaaacccgataacattctcttcgatgaggagaatcggctcaaattagccgatttcggctcggctgacacttttaaggagggcgagccgatgagcggggtggctgggcagccgcattacgtggcgccggaagtcctcgccggaagggattacaacgagaaggtcgacgtgtggagcgccgg

SEQ ID NO: 9106 - DNA, 1752 bp, Glycine max
gactcgagccgctcaattcaaccgcctccactctctcccgcaaaccattcttcttctcttctctccctctgagcctttcatcgctgcctcggagagatggctgcgtcggaaggatcaccaacccctcagacggttggcaatgcttttgttcagcagtattactccatactgcatcaagagccagaccaagtccacagattttaccaggagtctagcatcctaagtcgacctgaagaagatggtaccatgacaatggtgactactactttggaaattaataaaaagatactctctctggattacacaagctttagggtggaaattctgagtgctgatgcacagccttcttacaaggatggggtaattgttgtagtgactggctgcttaactggaagtgacaatctgaaaaggaagtttactcagtcctttttcctagctccccaggacaaaggctactttgttttgaatgatgttttcagatatgttgatgagtataagtcagttgatattgagtctgtgcctgcaaacgatgctgctgatgaaagtgctccaacagatgcttttgtcccagagcctgaggtcattcatgttgctgaagatgttcctcctagtcaaactgctgttgttgatgctgacattagtgtcagcaaagaagtgagtcaaccactggagaatggaaatttatcagttactgaaaaggtggtgcctgttgatcatgttaaagaatgcagtcatcaggaacatgcattcacacgctgagaaagctgcttctaataattcactggaggatactccaaagaagtcttttgcatccattgtgaatgcactaaaagaaaatgctgctcccttccatgtgagggtttcccctgtgaaacttcttgaacaaccacgtgtttctagtatacctgcaccagaagcaccagctcctagcactgacagtccaccagaaaagaataatgagattggaggtaaggcttatgcaatatttgttgcaaatttgcccatgaatgcaacagttgaacagctggaacgtgttttccagaaatttgggcccattaaacgggatggcattcaagttagaagtaacaagcaacaacaatcttgttttggttttgtggaatttgaatctgctacttcaatgcaaagtgcacttgaggcttctcctcctgttaccttggatggacgtagactttcaattgaagagcgacgagcaaataatgatagggggaggcattcatcaggaaggggcagttaccggaatgacagaaacgataacttcaggggccgtggcaacttcggtggtggccatggtggcggttatggaaacaggaaatgatagtttcgagaagcgaagcgagttctctggccggcctcgtggtggcaacaatggtgggcgtagcaatggagaagctgttccaaggagttatcagaatggaggagcaaaagtcactgtcaaccagtgaaagttcagtaaagtgattcattttgttgggaattgagtgacaacggcatttttcttatagatagcggcatctagggattctggtttgcaactgcattaagagttttttttctctattcctttatagctgtcatgatccttttgcttcagagtttttttggttaaatcacatcattccctatattcctttaaatcacattttgtatctaatattccggaataattgttttggaactgcccacaattatgccatttttttagaagtcatatgcttcttgtttgtcttttgc

SEQ ID NO: 9107 - DNA, 405 bp, Glycine max
tgatagtatgcctccgtcagagttattaaatagaaaaaatttgcaaggcaacttggttgttgagaaattagatagcctaatggtgctggcatttttgcaccttgaatcctgtcaaagcagtggccgtttgactgaggtattcgatactctactagcttcatttcagagaaccgtattgaatgcgtacaagtcaaaatttacccagtatgtgatgttctatgcatgtgcactggaccctgaaggatgtggtgtgaaatttgccatggttcttgctgatatgtttggatgtgatgttaatccccctattactaggatgagtgctgctgcttatcttgctagttatttgactcgtgcaaagttcctttcagctgcattggtcactaacatcatacaaagcttggttga

SEQ ID NO: 9108 - DNA, 862 bp, Glycine max
ggttgatgattgaatggacggagaaaaagagattagagagagagagagagaggagacgaatgagacaagatagctgaacataaaggtgaggttacgtgtatctcttgaagtagtgccatgccaccccatcaataataagatcactcaatcaccaatgcatcatcgttgttggaattccagcgctgtgtttggaaattggaactggaggggcttcaggtgccataatctcaaccttagataacagattattgcacagcaaaaaccttgtaaaaggagaattagaatcacctctctctaaggatgttggaaggaaaggctatggtgaaagaaacagacatgtcaaccaagatgcagatccatgccatggcctctgcttctcaggcccttgatctctacgatgtttatgattgcatctctattgctgcccatatcaagaaggaatttgatagtgtgtacgggaatgggtggcaatgtgtggtaggatccaattttgggtgctatttcacccattcatcagggactttcatctattttgctctggagacccttaagttttcttatctttaagggaacatcttcttgatttatcttatgtacaatctgaggtagaatacagggtttggttatcagagaagcatccatatgcagtgcaggacaagtttttaattgatccctcttgatatctgatttttcttccatgcatcatcaaaatattttagatgttacagatggaagaactatgtatgatggctgttgaagtgtctccatcaccttgtctctcagatggaactttccgacgactctggattctcctatgtgaatatgtgtatcaatagaactataattaagatgctgtctctgc

SEQ ID NO: 9109 - DNA, 375 bp, Glycine max
cttggaactggagtagaggggcttctttggtgccacaatctcaaccgtagataacagattattattcactgcaaaaaccttgtaacacagaacaacaaaaggatgttggaaggaaaagctatggtgaaagaaacagacatgtcacccaagatgcagatccatgccatggcctctgcttctcaggctcttgatctctacgatgtttatgattgcatctctattgctgcccatatcaagaaggaatttgatagtgtgtatgggaatgggtggcaatgtgtggtgggatccaattttgggtgctatttcacccattcatcagggactctcatctattttgctctggagacccttatctctcttatctttaagggaaca

SEQ ID NO: 9110 - DNA, 658 bp, Glycine max
gataaggataaagacaaggacaagagcaaagatagagataaaagtaaaagcagtactgcagatgacaaagggttcccaagacaagctgagggtctcaacgcaggtaaaccccatcaaaaggaaattaagcaagacaataagaagggtatcttgtttgagaacagactcaccaaacagtatgctggcaacaatggggagaaggctagagagaaaaatcatctggctgaagagaacaaggattcaaagttcctcctggagttggatcggaggattaaggatgatgatggaggagctaaccatcaattggttcataaatttacaaatacaaaccatagaaaagatgaggggactgttaggttggtggctaaaggtggtggcaccaggtctgatggtaatgaaaaactcaaggatatgggtcttgatgttaagaagattgatgggcgaggaatacaggatgaggtccggccaattggaaatgcagcaccagttcagaatcatgttggaaattttcatcctagagttgatggaatacccaaactattgggaaagtattttgaaaggaatttggaagcaacagttgaaggtaaagaaaaggttaaggaaaagaaagatgaaaaagaaaaggccaaggaaaagacagaagaaaggaaggttaagg

SEQ ID NO: 9111 - DNA, 589 bp, Glycine max
gaagacgacagaaggggaatattgtattttgtgctaatgtgaaaatccctctcaatgaacaggtttcttgtcttccggtttctggtagatcaccacttgggttgggagaaaagaacagacaatggaagcgagttgagagctacctcggttgaacatcatcgaatcgaataatcacttttacacatgacttatccttctattccgatttaagcccctaaacgaactatcgaagccacttcaaaaactactcttagattgcttcgatggtcgatcactacaacaagctggttaaactagcggcgagggctttctacgatgatctaacgagtaaaggagagaatcaacccaaatcgggaaggagtgataacagaggaatcgctgtggtgattctcgacgctctcacaaggcgacaatgggtccgagaagaagacttggcaaaagatctcaaattacacacaaaacagcttcgccgaactctccggttttttgaagaggagaagatcattactcgagaatataggagagagacagcaaaaggagctaaaatgtatagtgctgctacagctgctacagttgatgttcagctgac

SEQ ID NO: 9112 - DNA, 912 bp, Glycine max
agcaattacatatagcagaatcatttaagataagagtgtattactaagaagaaaaaatatgaaggttgtctacttccttgttgccatcttggctttgacatccactgttgtctctgcctatgaccctagtcctctgcaagatttttgtgtggcagccaaagaaaaagatggtgtatttgtgaacgggaaattctgcaaggaccccaagcttgtcaaagctgaagatttcttcagacatgtggaacctgggaaaactgacaacccactaggttcaaacgtgactcaggtgtttgttgatcaactaccgggactaaacacgctcggcatagctttggctcgcatagattttgcaccaaagggtttgaacgctccccacactcaccctcgcggcactgagatccttatagtccttgagggtactctttatgttggatttgtgacttccaatcaagatggaaatcgcctcttcaccaaagtgctgaacaagggtgatgtgtttgtgttcccaattggtctcattcatttccaactcaatgtgggatatggcaatgctgttgccattgctggtcttagcagtcaaaatccaggagctatcactattgcaaatgctttgtttaaagctaatccacctatttcttctgaggttctcaccaaagctttccaggtggacaagagcataattgattatcttcaaaagcaatcttggtacgacaacaataactagatttgaaatatggacgattatttgacgctaattatggatatttgattacttcaatatgtcaatcaccgtaggcaattgacctacaaatagttattattgtaataagtaaaatgtctgtggtttgtatttctttaccgtgtagttgttctgttttgtgtttgatatagtacaataaaatgtttgagttt

SEQ ID NO: 9113 - DNA, 488 bp, Glycine max
gatggaaatcgcctcttcaccaaagtgctgaacaagggtgatgtgtttgtgttcccaattggtctcattcatttccaactcaatgtgggatatggcaatgctgctgccattgctgctcttagcagtcaaaatcctggagccatcaccattgcaaatgctttgtttaaagctaatccacctatttcttctgaggttctcgccaaagctttccaggtggacaagagcataattgattatcttcaaaagcaatcttggtacgacaacaataactaatttgggagtatggatgagcatttcacactagctagttactgtataattgatcactttagtgttgtttcaatcaccccatacaacagacctaataaataaaatttaatgtatggggggtattaatttttatacataatatttgttctgtttggagtttgatttgatttaatacatattgcttgagtttaattaataaaagaacctattcttgcccc

SEQ ID NO: 9114 - DNA, 277 bp, Glycine max
caaaaaatgaaagttgtgtacttccttgttgctatcttggctttggcatcctctcttgtctctgcccatgaccctagtcctctgcaagatttttgtgtggcaaccaaagaacgcgatggtgtatatgtgaatggaaaattctgcaaagagcctaaagatgtgaaagccgaagatttctacaaagaagtggagcctgggaatccttcgaatcaattggggtcagcagcgactcctgtgtttgttgatcaactaccagggctacacacacttggtttat

SEQ ID NO: 9115 - DNA, 530 bp, Glycine max
  unsure (1)..(530): unsure at all n locations
caatggtgcagttaatttatctgaaggggacaaggagaaaggagctggaatcaggagaaagcatcacacacttaagacagacaactatggtgataagagtgatgtaaatggcttatctgaccccaaaaacaagaccaagcatattgaaggaattgatgcgaccgaggtaactggacaagcagacttggagattggcagccagtgcagttttcagtgagattagattctcatttttctaatttatatgtatccggggactgtggtcttgtttcttgcaacaagcatcttcactttgtttttccttttaacttatgagcacttgctgctgtgtgcattgtgtaagtagtgaaagatgtttatttgtaatttatttcaaattatttgtaaaaattcaatcctgttgctcataagagcaatttgagcatttgtttgtctgtctgaagtccaggatcaagatgtttttaagtgcccattaaataatgctgttcgattaccaataattatgtttcatttttgtaaaaaaannaaaa

SEQ ID NO: 9116 - DNA, 498 bp, Glycine max
gagtaaagaagatgttcatgtaaagcggtgactgtgagaatggaaggaaggaggcgtggaggttatagtggtcgacgcatagttgcaagcagaagagggagtggcaaaagcaatgccaacaacaacaacaacaacaacaacaacaacaacaacaacatcaatgtcatcaagaagcttcagagccgcgaaatttggtcgaagcctcatcgagcttttgcttctgtcactgcttctcacagattccgctctatgtgcttgacgcaccaatacgacactcatgatccctccaagactccctcttccctttggcccttcttgatgaagagaactaaggttgtcgaaattgtggctgcaaaaaacgtggtctttgctctttaccattctggtttgtgtgcagcttttagtaaaggtgaggttgctctcaagaactatgattcttgattatttttttttatgtgtgaattgtcatttcccctcacctgtttattaatcgttggt

SEQ ID NO: 9117 - DNA, 940 bp, Glycine max
gacaccacaacttgcatctcatttctcatttctcacattattattcacatctccatctagatctctctctctctctctcccaagaaattcatcaacagacttgtgattaatttgcaattgttcaagtgatctatcaagaaattgataattcaatgggaaagtacgaaaaagagcttaatctcgaggctacagagttgagattggggttgcctggaagcgatgagcctgggaaacgttctattgttagaagcaataagagatcttcaacagaagcaagcgaggaagagtgcataagcaagggcaacatgaattcttcatggttctgatatcacaagtgatgaccaagacaaccttgtgccacctgcaaaagcacaagtagtgggatggccaccggttcgatcatataggaagaatactctacaacaaaagaaagaagaacaggctgaaggggctgggatgtacgtgaaagttagcatggcaggtgcaccttacttgaggaagatagatctaaatgtttacaagagctacccagaacttctcaaggccttgggaaatatgttcaagtgcacatttggtgaatattcagaaagggaagggtacaatggatctgaatatgctccaacttatgaagacaaggatggggattggatgctggttggagatgttccatggaacatgtttgtgtcatcctgcaagagactgagaattatgaaagcatcagaagcaaaggggttgggttgtttttgaccaaaataaaaaaacaaagcaggaccatcatgcatgcccatatccaaaacatggagcaaagcaattttcagtgacgtcatccaagagaatttcttctgtttggaatatgcaagagctaggcacttggcctctgtgaaatggttatatttagcttattaaaaagagagatgcacatacacgattttattttccc

SEQ ID NO: 9118 - DNA, 298 bp, Glycine max
tctgctcgagtcacattattattcatatctctctctctctcccccaagaaattcaacagagttttgattaacttgaaattgttcaacaagaaatggagaattcattgggaaagtacggaaaagagcttaatctcgaggctacagagttgaggttggggttgcctggaagcgatgagcctgagaaacgttctgctgttagaagcaacaagagatcttcaccagaagcaagtgaagaagagtgcataagcaagggcaacatgaattcttctgatggttctgacatcacaagtgatgacca

SEQ ID NO: 9119 - DNA, 752 bp, Glycine max
  unsure (1)..(752): unsure at all n locations
ctcgagccgaatcggctcgagaaaccctagaaggaggaagaagaagaggaaggatgagacccttggacgagaaggagacgagcgcagtgttcgagaagctgttcaagttcgtcggaaacaacctgaagaacatcgtggagaacccctcgcacgaaggtcccgattcgaaccccgggcgctactgcttccggctccacaagaacaagatcttctacgccagcgagtccctcgtgaagcgcgccaccaacgtcgcccgccccaacctggtctccctcggcacctgcatcgggaaatacacccacggcggcagcttccacctcaccgtccaggccctcaacttgctcgccgccaacgccaagcacaaggtctggctcaagccccagtccgagatgtccttcttgtacggcaaccatgtcttgaagggcgctctcgggaaactctccgaaaacatcgctgccggtgacggggttgtcgtcttctccatggccgacgtgccgttgggtttcggtgtcgccgccaagtccacgctggattgtaggaagctggatcccaacgggattgttgttctgcaccaggccgatgtgggagagtacttgaggatggaagatgagctttgatgcattttcctaggctttgtaattggttttgatccatcttatcaaattacattatcttctatattatattatctgaganttcgttctccttacatatgtattacttcagcccatggatctgctttgttgatttcc

SEQ ID NO: 9120 - DNA, 685 bp, Glycine max
cgtccaaacggaagcgagaagacagaaggggagaccaaacaatactcagaacctggttaattaaggagagagtatagtatggcacagtctagtggcaaaactttggtgcagtggttggtagcagcattgctcattgccttgttgggtggtgcacaagctgttgcaatatgtaacattgactcaagtcaactaaacttgtgtcgtgctgcagttactggtcaaaaccctccaccacctgatgagaaatgttgtgcagttattcgccaagccaatttgcgttgcctctgcagttacaagtctatcctaccttcatttggaataaaccccaaaaatgctttggccttgcctggtaaatgtggtctgcaatcgcctcctaattgttgagtgtagtgaagcaatcaatgaaggtcacggactcatggtcattacaagcaccttagtcttcaatattgctttcaggtgtttcattaacactgaagataaattttaagacagcatttgatatctctcgaataacggtgcagtttattttaatcagtatgtaatgtccaaaagtttgctagcagatgtgtacgtgtattagtgtttgatgttgaagaggtatttgaagatatatcattactcttttccctctatatgtctaaacctgtaatatgtataataaaatgtctgaaatatggactct

SEQ ID NO: 9121 - DNA, 639 bp, Glycine max
agaccaaacaatactcagaacctgattaaggagagtatggcacagtttagtggcaaaactttggtgcagtggttggtagcaacactgctgattgccttgttgggtggtgcacaagctgttgtgttatgtaacatcgactcaagtcaactaaacttgtgtcgtgctgcagttactggtcaaaaccctccaccaccagatgagaaatgttgtgcagttattcgccaagccaatttaccttgcctctgcagatacaagtctattcttcctttaattggaataaaacccgaaaaggctttggccttgcctggtaaatgtggtctccaatcccctcctaattgttgagtgtagtgaagcaattaatgaaggtcttgttcattacaagcacttagtgttcaggtgtttcattaacactgaagatgcttttatgttttatggaagcatttatgtccctcgaataaagatgcagtttattttaatcagtgttttatgcctaatttgcaagcagtaagtgtgtggcgtatttttagagcgtaagctgtcgtaaccaaatgatgtgtactccacaatgtgtagcacctttgaattcttgtactgcttgaaatgcattcatcataagtcataaaagttctactcgctcgc

SEQ ID NO: 9122 - DNA, 608 bp, Glycine max
gcgaggtcacaatctagtggcaaaaaattggttgagtggctggttgcagcattattgttcattgccttgttgagtggtagtgcacatgctgttgcaatatgtaacattgactcaagtcaactgaacttgtgtcgtgctgcagttactggtcaaaaccctccaccacctgatgagaaatgctgtgcagttattcgccaggccaatttgcgttgcctctgcagttacaagtctatcctaccttcatttggaattaaccccaaaaatgctttggccttgcctgctaaatgtggtctacaattgcctcctaattgttgagtgctgtgaagcagttaacgaaggtcaagttcattacaagcaccttaattagtagtcttcaattgctttcaggtgttttactaacactgaagataaattttaagacaggatttgatgcccctcaaataacggtgcagttggttttaatcagtgtcttgtgtccaaaagtttgtgagtagatgtgtagagtattagtgtttgatgtacaggaatactttgtatctgtactttttttccctccatgtctatgtctcccctataatatgtttaataaagtttctggttttggggcc

SEQ ID NO: 9123 - DNA, 384 bp, Glycine max
gttgtgcagttattcgccaagccaatttacctcggcgctgcggatacaagtctattcttcctttaattggaataaaacccgaaaaggctttggccttgcctggtaaatgtggcctccaatcccctcctaattgttgagtgtagtgaagcacttaatgaaggtcttgttcattacaagcacttagtgttcaggtgtttcattaacactgaagatgcttttatgtcctatggaagcatttatgtccctcgaataaagatgcagggtattttaatcagtgttttatgcctaacttgcaagcagatgtcgtgtggtgtattaaaatagtcgtctgatgttgtatacaagatatctctactcctcaatgagacacaacagtaataatta

SEQ ID NO: 9124 - DNA, 389 bp, Glycine max
tttggttttggccaaagcatttttggggttaattgcaaatgaaggttggatagacttgtaactgctaaatgtggtctacaattgcctcctaattgctgagtgctgtgaagcagttagcgaaggtcaagttcatgacaagcaccttaattagtagtcttcaattgctttcaggtgtttcactagctctgaagataaattttaagacaggatttgatgcccctcaaatagcggtgcagttggttttaatcagtgtcttgtgtccaaaagtttgtgagtagatgtgtagagtattagtgtttgatgaacaggaattctttgaatctgtactttttttccaaagatgttgatgtaaacaaactaccagtcaatgtagatattttgtgtgatgg

SEQ ID NO: 9125 - DNA, 529 bp, Glycine max
gattcaaagagtaaaattaaagccaacggcagcttctggatttatctaacgaaccctccgtagttcagcatcatcgtccgtcatcatatcataatcatcaccgaatcaaaccaaacctatcttttaattcaaaacttttattttgggagacgccgtcgtttcggcaacgccggcggcgcctcctcctccagccatggccgccgcagacaaagcgaaaccctcgaagacgatgctctcgctccccgtgagcgtcgttgttttggccatcgcctacatttacttctccaccgtgttcgtcttcatcgaccgccggctcggcctattctcctcgccagcgcaccatgaacgccgccgtgttgccccgccctcgccgctgcctgcgccctcacctaccgcgccgctatttccacggatccgggtccgcttcccgcaacctacatgcccgacgtcgaagacgctcagagccccatccacgagatcaaacgcaagggtggagatttgcgatattgccaaaagtgttctcactata

SEQ ID NO: 9126 - DNA, 559 bp, Glycine max
ggaaggttggtgtgacactactgtcatactgcactgcttataacttttttctctttctctcaattcaattgccttctcccctgcgaatctcttctccacgtatcggagaacatggggaacaagatgaatgcgatcgcgttgtgcttgttagtgtcgaccctgttggtttctgcggtgtattgtgcaccgaatgctgggctccgtaggattgggctgaagaagattaaattggaccctaaaaacaggcttgctgctcgagttgggtccaaggatgttgattctttccgggcttctattagaaagtttcatctccaaaacaactttggtggcactgaggaaaccgatattgtcgcgttaaagaattacttggatgcacagtactacggtgaaatagctattggaacttctcctcaaaagttcgctgtcattttcgacactggcagctctaatttgtgggttccatcatctaaatgcaccttctcggttgcatgctactttcatgctaagtataagtctagcaaatcaagtactttcaagaaaaatggtttgtcttgctcgt

SEQ ID NO: 9127 - DNA, 616 bp, Glycine max
ggtctacaatgatggaagaatattcagtctctattacggaagcaattcaggctttagtgaatgcctcagagcgacttccagttggtgggaatgttagggtatgattatagacaagtgaatgatgcttattttctttctgttatgcatattcattggaattgtctgcatgttctaattcacataaatatattatgtcacaggttgatgtaagacaactgggggaggcactgaattcagcatcgaagatgatggaaacaatgatttccaatatacaaagattcatgccaaaggtgaaacagataagagaatggagtttcatgcttgcttttttaacatggatattaaaattgggctagtcattaaactggtgaaggccacttcatggttaatccttagttgaattggtaataataaattatatatttaattttatataagataggggaaataaattaatataaaattattagaagttttagtgaaaatttaaattagtaagcaagaattatattacatgtcttgcggaataaaaatttaaataatagaaagctatatttagatatcatattcaaaccttcctcctatttaaaaaattgtttttagaataatttgtatt

SEQ ID NO: 9128 - DNA, 822 bp, Glycine max
  unsure (1)..(822): unsure at all n locations
acgtagaaattgatcctttagcatcccttccgattctgcacttccttagtctgctggacaacaagattacatagaaacgaaattacaggctttatgttattaacaagctgaaatccctacgggtgttagatttcaagaaagtgaaaaataaggaacggttggaagccaaaaatttgttttcttcaaaagaagttattgaagaaattcagaggacacccacaaaaagtgaaactcctaatgtttccgaagtgattgaggaacaacagatgcccaaagtcgttgctcctacacctgagcaaattattgctattaaggctgccattgtgaattctcagactcttgaagaggttgctagacttgaaaaggcattgaagtcaggccagcttcctgcagatttattgttggataatgttgatgaaaaacatgaggacatgattcatgacgatagaggtcaagctgatggagaatctaatgatacacaagagcagagaaatactgattctgcttcaatggaacaggattagagcgaaggttttcaaatagtcctagcactgtggacttctttaatgtcaggttctagagtcaaactcttagtaattttctatgaagtgtacttgatgaatcttccattcttgagaactggatgtttcaattacattcgtggtgaatcattgctttagttatatatgcattaaattggattgtctaactagaatgattacggcgttttcgttgaaggttagggagaagattcaaaattgcttttctcagatacatctacggnttctgatctcaatctaatttgggaaatgaatgagcgtc

SEQ ID NO: 9129 - DNA, 1215 bp, Glycine max
cccgaaccaattaagagaaagaggggaaggcccaggaaatatgggcctgacggtggcatgacctgaggggctttgaagaccaccactcgctcctggcggcggcgtgccggttgggcagtccggtggggcatttccagcggggcctctttcggattcggcctcagctggtaccgtgaagcgcaggggcagacctcgtggttctgccaacaaaaataagaagaatgatagctctaactcctctaagcattctgggccaggatcttggtttactccgcatgtcattacggtgaacgctggagaggatttgtcagcaagaattatgacaatttcccagagtagttcaagaaatatttgcatcttaacagcaaatggagccatatctaatgtgacacttcgacaacctgcctcatctggtggaactgtgacttatgaggggcgatttgagatcctatcacttggaggttctttttttcttgctggaactgaaagagctggggggctgagtgtgtccttgtcagggccagatggccgtgtgttgggcggcggagttgcaggtcttctgatagctgcttcccctgttcagattgttttggcgagctttgtttctgatgttcgcaagcacttgaagcgtgcaaagaagacggagaatgaaaaggtttcgacagcaggaggccaaagcagctcaccatcaagaggcactctcagcgagtcctcaggtggggttgggagtgggagcccactaaaccaaagcacaggagcctgcaacaacaccatgaacaactgtaccaccccaacacaaagctttcaaggcatgccctggaagtagaagtacttgactcctctcacatctttgtgtagtaggttttggtgttgtgacagacacatcagactctacttgttatgctctattacttggtgtcttttatgctttaagcatttaggatgcacacctgttatattagctttgtgtaatattaattggaggaattttagggataaagtatgcggactcgtagcttaatttggttagatgttgtgttcacttgggtgattcaagaggttctggcaggatcgggttagtatgtaggatcttgatgagatgccggtgactttgtcatccgttagttgtaatttattgtcggtccatatgcctaaactttctccttgttacccagttgttcggtggtaataatacttaatctgtttagcttcttt

SEQ ID NO: 9130 - DNA, 1184 bp, Glycine max
gtttctagaacttccatgagctcacctctgaatggatctgactcaacttgttcttgtgatgttccgttcctcttctttactttctccacaccccaatttctacacacacactccccccccttcctacttactccaaagccaacaatccttaataggctttgagcaaccaccgagttcccttctcgggctcaaccacctaagcccgtctcagatttctcagatccaggcccagatcgaggcccaacagagccaaaaccagaacccacactctctcaactttctcggcccgaagcccgtcccaatgaagcacgtgggcgggcctccgaagcccacgaagctgtaccggggcgtaaggcagaggcattgggggaagtgggtggcggagatcaggctcccgaagaaccgaaccaggctctggctcggaaccttcgacacggcggaggaagctgctttggcttacgacaaagccgcgtataggctccgaggcgacttcgcgaggctgaacttcccgagcctgaaaggctcgtgccccggggaggagtacaagcctgtgcattccgcggtggacgctaagctcgacgcgatttgcgccaacttggcggaaatgcagaagcaagggaagacggagaaaggtgccaggtcagcgaagaaatcgaagcaaggtccgaaccaggaggccaagcccgaacctcaagcttccgctgaaagtgagggttctgcggattcttctccgctgtctgatcttacctttgatgtaaccgagccgcaatgggaacattttaatttgcagaagtttccttcttatgagatcgattgggattctctctgaacttcgtctttgtttttatgtctagtcttgtggctaataataataataatttaggttagtcttgctaggtggctgctgcaattgagtttttgaagattgcagtgcttcttgtaggatttcgatttttttttttttagcatttggttattggctatttggtcaatatgatgtaaatctctctaccttggtcagctgggtttttttttttttattattattttcttgcttggcctgggagaatgacttctagccttctaggtgttgtctatgctttgatgttcatccaagtatgttattattattattattgttgttgatgtaattcaattttatttgcatctcagaatttatgaat

SEQ ID NO: 9131 - DNA, 1223 bp, Glycine max
aacttgcctttcctcaactccctctatttctctcctcagattcaccatcacctttcctcttactctcctttactacctccacaccccagtttctccacatacaccccctctgcctacttattccaaaaccaacaacccttaataggctttgagcaacaaccaagttcccttctcgggctcaaccacctaagcacgtctcagatttcccagatccaagcccaagcccaagcccagaactcgctctctcttaatttcttgggcccgaagcccgttcctatgaagcacgttggtgggccggcgaagcccacgaagctgtaccggggcgtgaggcagaggcattgggggaagtgggtggcggagataaggctaccgaagaaccgaaccaggctttggctcggaaccttcgacacagccgaggaagccgctttggctcacgacaaagccgtggacaggctccgaggcgacttggcgaggctgaacttcccgaacctgaaaggctcgcgccccggcgaggagtacaagcctatgcaggctgcggtggacgctaagctcgacgcaatctgcgcgaacttggcggaaatgcagaagcaagggaagaacgagaagggtgccaggcggggaagagtcaagcaaggccgacctggagggaagcccgaacctgaacttaggattccggtgctgctgctctggctcctgaaagtgagggttctgcggattcttctgctttgtctgatcttacctttgatgtaaccgagccgcaatgggaggatgcttcagcacattttaatttgcaaaagtttccttcttatgagatcgattgggattctctctgaagactctttgtttttttatttttatgtctagtcttgtgggtaattaataatttagttataattaggattgctcttgtggctgctgcaattgagtttttgaagattgcagtgctacttgtaggatttggattatgttagtcttttttctttttcttttttttttttaaatttgcttattggctattcgatggtcaatatgatgtaaatctctctaccttggtcagctggttttttttttcttgcttggccatggagaatgattccgggttaggtctttgcctatgttttagtgttcgtccaagtactattattgatgtaattcaattctatttgtatctcaatttatgaatgtatttgtatttcagcttacatattgtactagtttgtttc

SEQ ID NO: 9132 - DNA, 437 bp, Glycine max
gcaggttgatttttttaatctaagatctgtgtggtgtagttggaaaatttttatatggcagctacgatgaatttctacaacggaacatcacaagaacaagttgagtcagatccattcagaggtgagctcatggaagttctagaaccttttatgaaaactagtccttcctcaacaactccctctattattctctcttcagattcaccttcatcttcatcttttaatttcccttcctcttctttactttctccacaccccaatttctacacacacactccccccccttcctacttactccaaagccaacaatccttaataggctttgagcaacccccgagttcccttctcgggctcaaccacctaagcccgtctcagatttctcaagatccaggcccaggatcgaggcccaacagagccaaaaccagaacccacactct

SEQ ID NO: 9133 - DNA, 348 bp, Glycine max
gaggactgggaggatagaactgaagtggctgtgtggtgttacagttgagttgagcgatctcttctcttttcttgtcttgtcttttgcaatggctaatgcaattataatgccgggttttctgcttcgacccactacccagacgacgccgtttcggttgcccaatcacactcactccttccattcccctcgctgctccctttccctcacaccccaatcggctaaagcttttgcagttccaaggaggaaagcattgtccttgatcttatcgagttactttctctcggaggctggtttagcattggctcaacagtctcctgtgttccgcgaatacatagactcatttgatgg

SEQ ID NO: 9134 - DNA, 324 bp, Glycine max
gagttgagagttgaaagacatgggtacggtggctccaagagttgaaagcttggcgagcagcgggataaagtgtatcccgaaggaatacgtgaggcctcaagaagagctcaagagcatagggaacgtgtttgaggaggaaaagaaggaagggctacaggttccgacaattgacttgagagagatagattcggaggacgaggttgttcgagggaaatgtcgtgagaagctgaagaaagcggcggaggagtggggtgtgatgcacttggtgaaccatgggatccccgatgagctgatagagcgggtgaagaaagcacgggaaacgtt

SEQ ID NO: 9135 - DNA, 666 bp, Glycine max
ggcgggtgccagctgttcaaccactttgctttcttcttccttagtttcgtttggttagttagggttttcctttccacaacttcactttcttcttcacttcttgcaatcacacaatacaacaacgcaattcctccacaaactgaaaaaaaaacacacaatttcgctcactacagaactcgcacgtgcccttactttcctgtcacgtgtgcggtggagtttagtctccattagagatgtgggttgaaggtggaaattattgaatgtcgaattattcagcttgaggagttggaacttatttttggaagtattcatcttgtgcgtgtcattactgagttgactagtgtccaaaataggttggattggaggcattcagaattaggtttattgtgtattctgagaaaatagctaaaacggggtcgctttgttgtgtggcttcaaggccacatgaatcaaatgctggcagtagggactggtccatgggtccaaatgagccctactggcgaacaaattcaagtttttcgcctcctccgacgaggtgggatttcagatttcagtctgaaggtctgtcatatggtgtgaatgatggtgttcaactctatgggtcttctacatcggaaaacgatgaagaaagtaggggttgcgtcagaggcatccacctatatgatc

SEQ ID NO: 9136 - DNA, 1510 bp, Glycine max
cccacgcgtccgcccacgcgtccggtccctcctcattttccttcaggccctccttctcatgttcctgtctatgaaatgaatcctatgatgggtggtcctgtctttgcttatggacctcatgatgagtctgcatctacaacacagtcacagcctcaaaaaagtactacatctgcatcaaggccaattgggagctggcaacagtgccattctggtgtggaatctttttatggacctccgacagggttcactgggccttttattgctcctcctggaggcattccaggagtccaggggccaccacacatggttgtttataaccattttgctcctgttgggcaatttggtcaagttggcttgagtttcatgggaaccacttatatcccctctggaaagcagcctgattggaaacacattcctacatcttctgctgcgggggctggtgagggggatataaacagtatgaatatggcatcttcacagaggaatcctgctaacattccttctccaattcaacatcttgctcctggttcaccacttatgccaatggcttctcctgtggcaatgtttgatgtttctcctttccagccctctactgagatgtcggtacaagctcgatggtcacatgttcctaattcacaacttcctctgtcaatgccattgcagcaacaagaagggatacagacttctcagttcagccatgtcccttctgttgatcagccattaaatgccaaaaggtttaccggttctcgagcttcaacatcttctgagggcgataggaattttcctagagccactgatgtgaatgtcaaccaattgcccgatgaacttgggttagtggacacttcaaactcaactcctaccaagacttcagcacagactgttgtcaacaagactccatccgtgatccccattacagatactgtgaaggttgatgttcagaatggcaatagcagcagtagtaataacaaccagaacgcaagttcttctttcaagaatcagccctcacaatttgaccattcctcagggcatggtaattatcagagaggtggtgtttctcagagaaataattctgggggcgaatggtcccatcgtagagtgtaccaaggaagaaatcaatctctgggttcagacaagaacttttcctcaacaaaggtaaagcaaatatatgtggctaaacagaccattagtggggcatcaacagtgtcatgaggagcgagaaatatcagctggatttgaaaaaaaaaaaaactcaggaaaggctttgttattaatttttggtctggcagaaaataaaagttttgattaagcttcttctacttgggaggttgattgttgatttttgctggctacaacaaattccataccaggttctggtaggggatattggagactggtatttagcatggtaatgtggctttgatggacactgtcgttttgcaatggtgtatctatcaaccaagcatggtcgatctttgttttcttttgatcgtaaaaaaaatgcagattattt

SEQ ID NO: 9137 - DNA, 1143 bp, Glycine max
ccaagaagaagaagagaaggtggtaccgccttcaattctctctctccatttctcatcctcatcatcttattatacctcttccatctccataacatccacttgtgaaaaaaacccattaatatatatcacacacacatgtatctctgagctccaatccaatccaagaccacaccttgtcgcgtcggacgaaccttggtgtctgtctttttttttttttttgtttcattagtttctccgaagagatgcggaagggcagaggaggaggagcctcggcggcggcggcggcggcggtgaacggatccgttttaaaggagcctcggtaccggggcgtgcggaagagaccgtgggggagattcgcggcggagatcagagacccgttgaagaaagccagggtttggttgggaaccttcgattctgccgaggatgctgcacgtgcctacgacaccgccgctcggaatctccgaggttccaaggccaaaaccaatttccctctctcacctttttgctatcaacaccccaccacggatcctttcttctacgctggtttccacgaccaccaaaacaacagcaacaacaacaacgacaaccttaacaaccctcaaagaccaacttcaagtggcatgagtagcaccgttgagtccttcagtgggccccgccctcccaccacaaccacaaccaccacgacgccgtttttgaccactacgcggagatacccgcgcactccccctcttgtccccgaagactgccacagtgactgcgactcttcctcctccgtcgttgacgacagcgacgacaacatcgtttcctcgtcgtttcgacctcccttgccgttcgatctcaacgcgctgccgtttgatgatgatgctgccgtcgtggatgatgatctacgctgcaccgcgctttgtctctgatgattatcgtgcgatgatgatttttaatttctcattttttttatctcttcaacttgattttttgttattgctatgagggaaaaaatatatttaaaatgatgatcagatgtaagattatggtaatatgatcttaattctgtgagaggcagattccgtgttgggtatattttcttctttttactattgattttttaaaacatattatttccaaggaaccattgaatgggaagag

SEQ ID NO: 9138 - DNA, 623 bp, Glycine max
ggtagttgaaggagcagaagaagaagaagagaaggtggtaccgccttcaattctctttttctctctccatttctcatcctcatcatcttattattcctcttccatctctattctccataacacccaccacaccacttgtgaaaaacctcattaatatcacacactgacatgtatctctgagctccaatccaatacaagaccacaccttgtcgtgtcggacgaaccttggtgtctgtttttttttttttttttcattattttctccgaagagatgaggaagggcagaggtggaggcgcctcggcggcggcggtggatgtgaacggatccattttaaaggagcctcggtaccggggcgtgaggaagagaccgtgggggagattcgccgcggagatcagagacccgttgaagaaagccagggtttggttgggaaccttcaattctgccgaggatgctgctcgtgcctacgacgccgccgctcggactctccgaggtcccaaggccaaaacaaatttcccccctctctcacctttttgctatccacaccccaccatcggtaccttcttactaaatggtttccacgatcaacaccaccaccacaacaacaataaccttaacaaccctc

SEQ ID NO: 9139 - DNA, 410 bp, Glycine max
ggcttctgaaatagtgaaactaacgaagcaaagatgtcgtccatgctgcgcttccctttctcgtttcctcagccccgaaggcctcaattccctcgcccattcaccgcattcgccgccgccgttgccggagcctccgccgccgtcgtggccgtctcctcctccgaccgctcctttctccggaatgctctgaattccttcttctcttctgacctatcaatgcctctctggggttcactgagtttggccgacagtggggtttccgtggttgagtcaaaaaccggaacttcgttcccttcggttttagacagttctcagaaactctgcggaattggcttgcggaaaaaaagcattttgggattgaagaacattgatgtatacgcatttggtgtttatgctgatgatgaggacat

SEQ ID NO: 9140 - DNA, 258 bp, Glycine max
taacgaagcaaagatgtcgtccatgctgcgcttccccttctcgtttcttcagccccaacggcctcaattccctcgcccattcactgcattcgccgcagccgccgccgtatcctcctccgaccgctcctttctccggaatgctctgaattccttcttctctgttaacccatcaatgcctctcttgggttctctgagtttagccgacagtggggatttgcgtggttgaggcaaaacacggaacttcgtccccttgggttt

SEQ ID NO: 9141 - DNA, 1753 bp, Glycine max
cggctcgagaacagcaacaattttcatcttatgagttactactttattagagtctagcaatcaataatttattcttcatcatcatcaacatcaaccaccacatgaaactctctctctctctctctctcacacacacacacagtgtctcagactcaactcaacataaacactactgatcactgatcaccacaaacacttccaccacctcaacctaacatgtcatcgcagggttacctccaccgcataggcttcaccaggaagagagaaaggctcatcaacccaatggaccgaacctcaccactgccaccatcttcggttcagaaacaacaaggcatgtcagagtcacttccactaccctttctccctgatgaactcgttgttgaaattctctcgaggctcccagtgaagtctctgttgcagttcaggtgcgtttgcaagtcatggatgtcccttatttatgatccttacttcatgaaaaagcaccttcacctgtcgtctcgaagcacccacttcacccatcacaggatcatattgagtgccacaaccgctgagtttcacctcaaatcatgttctctgagttccttgttcaacaacctttcaaccgtttgtgatgaacttaactaccctgtgaagaacaagtttcgccacgatgggattgttggctcttgtaatgggttgttatgttttgccataaagggtgattgtgtgcttctttggaacccctccatcagggtctccaaaaaatcaccacctttggggaataattggaggccagggtgtttcactgcctttggccttggctatgatcatgttaatgaggattacaaggtggtggctgtgttttgtgaccctagtgagtattttattgagtgtaaagtgaaggtgtatagcatggccaccaattcatggaggaagattcaggatttccctcatggtttcttaccctttcaaaattcagggaaatttgtgagtggcactctcaattgggctgctaatcattctattggcccaagttccttctgggttattgtttccttggatctgcataaggaaacatatagggaagttctgccacctgattatgaaaaggaggactgttccacccctggtttgggtgttttacaaggatgcctttgcatgaattatgattacaagaaaacccattttgttgtgtggatgatgaaggattatggggtgagagaatcttgggttaaattggttagcattccttatgtgcctaatcctgaagatttttcgtactcagggccttattacatttcagagaatggtaaagtgttgttgatgtttgagtttgacttgattctgtatgatccgagaaataactcttttaagtatcctaaaattgagagtggtaagggctggtttgatgcagaggtctatgttgaaactctggtttcgccaatgaagcattaaggttgatgtgccacgcaaagcaagtgtaaggactaaggaagaataagatgtgtaaagtacttttaaatccatgtggttttatctccggttcatgtattttggcattaaatgtgtaatatgtatatgcagaactgaggggccaagcattgtatatatagatgttgttaatattttggtgaagctcagttatgtgttgttacttgtgtcgggttatgtatcccatcactgatgtaaacccctgcttcatttgttaatatatggaaattggtatatgctttcttgtattatggtaagaagcatatatttaatgactcatctt

SEQ ID NO: 9142 - DNA, 245 bp, Glycine max
gaagtggtgagataaagtcatggtggaaatcctctctagagaaatggttctgttgatcaagggcatatgcatatgctattccatatgtacctggtagtcttgtaagtcatggaaatccttcgattctctgtttcattatttcgacaaaagcttcgtgtcgcacaatcaaatacggaagataaaaaaagttactaatagagtgcatcattagtatttttgtattatttactttgagttagctaact

SEQ ID NO: 9143 - DNA, 437 bp, Glycine max
  unsure (1)..(437): unsure at all n locations
ctcgtttagttatcctaggattgagagtgttaagggctggtttgatgcagaggtctatgttgaaactctggtttcgccaatgaagcattaaggttgttgaatgttgatgtgccacgcgaagcaagtgtaaggaggattaagatgtgtaaaatatttttaagtcgtgtgattttatcgctggttcatgtatgttggcattaaatgtgtaatatgtatatgcagaagggaggggccaagcattgtatagatgttaatatttgatgaagctcagttatgtgttgttacttgtgtcgggttatgtatccatccctgatgtaaaaaaaccctgcttcatctatttgttagtatatggaaattggtatatgctttcttcccttactgtgagaagcatatatttaatgacaaatcttnnnnnnnnnnnnnnnnnnnnnnnnnnn

SEQ ID NO: 9144 - DNA, 500 bp, Glycine max
aaattgaagtggtgagataaagtcatggtggaaatcctctctagagaaatggttctgttgatcaagggcatatgcatatgctattccatatgtacctggtagtcttggttacctccaccgcataggcttcaccaggaagagagaaaggctcatcaacccaatggaccgaacctcaccactgccaccatcttcggttcagaaacaacaaggcatgtcagagtcacttccactaccctttctccctgatgaactcgttgttgaaattctctcgaggctcccagtgaagtctctcttgcagttcaggtgcgtgtgcaagtcatggatgtcccttatctctgatccttacttcatgaaaaagcaccttcacttgtcatctcgatgcacccacttcacccatcacaggatcatattgagtgtaaagtgaaggtgtatagcatggccaccaattcttggaggaagattcaggattttcctcatggtttcttaccctttcaaaattc

SEQ ID NO: 9145 - DNA, 253 bp, Glycine max
accacataaacccctccctcacactcacacacactctcagactcaactgaacataaacaatacaaatcactgatcactgatcactgatcagcacaaacacttccaccacctcaacctaacatgtcatcgcagggttacctccaccgcataggcttcaccaggaagagagaaaggctcatcaacccaatggaccgaacctcaccactgccaccatcttcggttccgaaacaacaacccatgtcagagtcacttc

SEQ ID NO: 9146 - DNA, 501 bp, Glycine max
cccacgcgtccgcccacgcgtcaaaccatctcttcctctctcagctgtctttttaatcccccttttctcattttcccttttgcaattttcactaacagtccttctttctatcttagctctcagaaacttcaataacaatgaagaaagttgtgttgaaggtggaagtacatgaagacaaaatcaagcaaaaagctatgaaggttgtctctggcatttcaggggttgagtcagtttctgtggacatgaaagacaagaaattgaccgtaattggggacattgatccagtaaaagtagcagccaagctgaggaagctttgtcacgcagaaatagtttcagttggaccagcaaaagaggaaaagaaggaagagcctaaaaaagatgataaaaaggaagatgacaagaaaaaaaatccaccaagcgaaatcgtggcagatcaactcaagttctatcaaacccatgcctattattatcagatgaaaccacaatacaatgcatattaca

SEQ ID NO: 9147 - DNA, 489 bp, Glycine max
cttatcatcttcaaatcgcaactttttcattttacttacttttcaactcacttttacctttttcgtagttttcactaacactccccgggtttagctctcacaaacttcgtacagtgacaatatgaagaaagttgtgttgaaggtggaaatacatgatgacaaaatcaagaaaaaagctatgaaggctgtctctggcattttaggggttgagttagtttctgcagacacgaaagacaagaaattgaccataattggggacattgatccagtaaaagtagtagccaagctaaggaagcagctttgtcacgcagacatagtttttgttggaccaacaaaagaggagaagaaggaagaacctaaaaaagattcagcaaaagaaattgttgtaacaataacttatggcaaaccgagaaaattattggctgagtcgcggacaatgttttttttaagacgtttcgtggcactgccaaaaattgtgcaagtagacta

SEQ ID NO: 9148 - DNA, 378 bp, Glycine max
tgggacatcttcatttttgaaattagaaaccatctcttcctctctcagctgcctttttaatcccccttttctcattttcccttttgcaattttcactaacagtccttctttctatcttagctctcagaaacttcaataacaatgaaggtcggtgttccaatttggtttcttcataattcttcttagatattcatactttgagactcataattcagagttgtagttttaacatgtgcttttgtctttgatcgtttctgtactaaatggacttgacaagtgttgtaaagttctaacaagtatttgattttgctggaacagaaagttgtgttgaaggtggaagtacatgaagacaaaatcaagcaaaaggctatgaaggtt

SEQ ID NO: 9149 - DNA, 582 bp, Glycine max
ctataaccaacgaagaacacactctcacatattattagcttttagctctctctctctctctctcagtccttcttcttcgcccagccaacatgagctcaatcgttcagggtttcaccaagtcgctggccatgaccattctctctgagatcggcgacaaaactttttttgcagctgcgatactggctatgcgacacccaagacgcctagtcttatcaggttgcttatcggctttgattgtgatgaccattctctctgttcttgttggctgggcagctccaaatctgatctctcgtacatggactcatcacattacaacatttttattcttgggatttggactttggtccttaaaagacgctatatttgaagaaggggatgcggaagaattggctgaagttgaagctaaattggataaagattggaaggctagcaatggagctacaaaaaatagcaataaggatgatgatgccacaaaaaagcataaacggtcatttttatctcagtttttttctcctatctttttacaggcattttctatcaccttttttggtgaatggggtgacaagagccagttggctacca

SEQ ID NO: 9150 - DNA, 889 bp, Glycine max
ggggttgaagaaaagaaagggtgtttacactttacttgagtgagactgagagtctcaagagagtgtgtgtgagtgtttgatattctcgattaaataaatctcactgtctctttctctctctctctctgtctctgtgtttttgttgtgttctctttactacctcttgaaaccaaaagggtcactctctgtgctgtggcctctgttttcaaaggaaacccttgttcttttccttgcctttctttcttagcactgtcttccaactcccaactcatataatttcattttccctagtcttctttgttttcaccctttccttgtgaaatctgcaaaaccagctattcagtttggctatcaaaccaagccaaagctcttatattatttttcgtatataaataggcaccaaatacacatttatgatacaccaatttgaagcttgtccacacaagacaagattatcaccagcccctttccattcacaaacctgagagtaagaagcacttgtcagtgaccaacaaaccaaccaaccaaccatgatgcctgctcatggcctcatcatcttctctcatttttgtgtccattttagccaatgaggcaagcttggtccatgaggcaaatgggtcatttccaatggtgcccttggtggaggctgggaagatggagatgatgatggtgatgaatgagagcagaaggaaacttggaagcttccagatatgtgccttgtgcacctgctgtggtggagcaaaagggatgtgcttgccctctccttgttgctatgccatcaattgcaacattcctcatagaccttttggcttttgctcattcacaccaaagacctgtaattgctttggatgccatctttagtcccctctccccctattatagtcttata

SEQ ID NO: 9151 - DNA, 1173 bp, Glycine max
ctccaacaacacccaaggctgatgctctgttcattcctagggaaaatccaagggcgttgataatttgtcccgtggagcagtggccaggaaaggcttctgagaaggcatcaacatttaaggatagatccatcccagtgattgagaatgcgagtgctgtagaaaatggttttgtcaaggagcaagctcagcctatatcgacaaagccaacatccaatgggagcaatgaagatcattctccacaaaaggcggacgtgtacaagacactcagtggtcacagagctggtgaggctgccattgtctatgaacatggagctgatgttgaggcactaatgccaaaactacggcgatctgattactacacactgcctcgtatacatgaactggcggccaaggaaagagctgaaccaggattctgcagtcatgttaaggacttcgtggttggaaggcaaggttatggcagcatcagattcttgggtgagacggacgtgcgacggctcgatcttgagtccctcattcagtttaacaaccgggaggtgattgtatacatggatgatttaaagaaacctcctgttggacaagggctgaataagcctgctgaggtgacactactcaacataaaatgtttcgacaaaaaaactggccatcagtatacagaaggcccgaagattgagaaatacaaggagatgctcaagagaaaggctgaggaccaaggtgctgaatttttatcatatgatcccactaaaggagagtggaagatcagggtcagccatttcagcatctacaagctagtagaagatgaaaacagttggataaatgatgacaactaaggttggtccgtctggttttgatacagtggaagaccccagtaaatttgatagtttcagaaccaatgttctgctttaaaatgtatttgtttttttcctgtaaattgtcactgtattgtgtggatatagcttgggccaatgttgttgatgtggttcttatcttgctttggggatatttgatagatcttacggttggggatgttcaaatatgggtttcctagtatcatttttttacgtacttaaattttgattcgcatagctgttatggttattttcaacttttatttttgtgaattatgatgtttggtatgaccctttttatttcaataagttgattaagagttcagtc

SEQ ID NO: 9152 - DNA, 642 bp, Glycine max
gagagataaggaaggcattgataatcatagctatggcaacggcgagtgcaagttgtgcggtatcatttagaaacagcttcggtgtgagtaaaccctcggatcttgggttcttgagctctcgtctgaacggcctcagaatctgcttccccaaattgccacccacacccctcactgcttctcccttccccacacccctccctatcgttgccaagagagtgtgtcccttcactggaaagaaatcaaacagggccaacaaagtatcattttcaaaccacaagacaaagaaactgcagtttgtgaaccttcagtacaagagaatttggtgggaagcagggaagcgctacgtaaagcttcgtttgtcaactaaggcattgaagacgatagagaagaatggacttgatgcacttgcaaagaaggctggaattgatctcaggaagaaataagcctatctaataattattgtaatttgtatcagagtggaagaatacattcatgttccttggtgttaattgtagaattttcttttgcgtatattattttcaaaagcaagttgtgttgatgtttgtagagaaacaaaatatggcaaggtcatgagcttactaggccatgagtctcgctaatggaaatctcttttgacaaaaa

SEQ ID NO: 9153 - DNA, 578 bp, Glycine max
tgtaaatgcaaatgcaggttgggttgggcctggtcaggggctagcacctggaaatgccaatcctggttggactgcaccggttgggaatccaggcatgtggggaagtgagcaaagtcataatggagacaggttccccaaccatggggatcgtggtgcacagggtagagattctggttacggtggtaaatcttggaataggcagtcatcatttggcagcggtggcagaggaggttcttccaggcctccttttgggggacaaagagtagtctgcaagtattatgagagtggacgttgcaggaaggggacttcttgtgactttctacacacttagttgtagggctaattacttagtggcagagaaacatctcttactgtacagtattttccaatttcatggctaaacgttgtataaggatgtgtcatgtatgtagaacttgtgcattgtagtatctcgtttatgtatcttaattgtcttttggggctgtgttttgctagcagttgacttatgcaagggttaagtagttgaagaagttgaagcccctcttagattaataataataacggaaaaaattgaggtt

SEQ ID NO: 9154 - DNA, 565 bp, Glycine max
gatactccttaattcttacaatttattatctttctctaagaactcttccaattttttctctctcttcctctttagcttcatcgccatggcatcaccagcaagaaccttctttgccttcattctcgccgtcgtcgctctcttcttcgccgccgccaatgctcaagacctctccccggctccgagtcccgatgccggagcggcgggatccgtttcgagctccgtcgccatgatcggagcttcggttgtgctgtcattgatggctatcttgaagcattgaattcgttaatttcgttgggtttgtacaaaattgattcgttttatatacagagtggtgattatgagctttggtatctatacttataggtataccggagagagattatacagtatttaatatacttattgttatttgttttaggacttagggagaataagaaggattttatcctttacattggacccgtattctttttcaatttttgttatgtaataatatattgtgattgatgatttatatatatgtttttccctttttaatctattttttatttattttcgttatggg

SEQ ID NO: 9155 - DNA, 539 bp, Glycine max
gacacacacaacttttctccaaaatcgagattaggacgttgttccctttgcgctgtcccacaagcaattaagcacagcgcacaaaggtgtggtgggcaaagggaagtttcaagttggtgttgttgcaggtgaaaaatgtggttcgtgtacgtgtgcgacgaggaagagaaggaacttggaagacaacaagctcctgggtcgtgtccctactgtggagccaaggttgaagccatggatgttgagatccagtccaggctctgcttcttgcccctctgcttcaagatcaagagaaagtacttttgtacccactgcgctaggcgcttagagttgtatatggattactgaaccccactccaaatcctcaaatcttcaattggaacaaggactttcttgtgaatatacaagtctagctgcgcttagttttgtttctcgtttttattttttttcctttttaacttgtgagtttggtcgaggatttgggtgcctactacttgagacgatgctatgtcatgaattggtcattccaccaatcggagatg

SEQ ID NO: 9156 - DNA, 374 bp, Glycine max
cgaagtccattcactattttctacaatccaagagcatgcccctcagaatttgttattcctctggccaaatacagaaaatctgtatttgggactcaggtctcagttggcatgagatttggcatgatgtttgagacagaagaatcgggtaagcgcagatatatgggtacaatagttggtatcagtgatgtggatcctttaaggtggcctggttctaaatggcgaaatattcaggtggagtgggatgagccagggtgtggtgataagcagaacagagttagtgtgtgggagattgagactcctgaaagcctttttatctttccttctttgacttcaggtctaaaacggccattaccatctggtcttttggaaaatga

SEQ ID NO: 9157 - DNA, 367 bp, Glycine max
gaaggagagatgtaaagaagagaaaggcaacaacagcagatgggttggggcagaagagataggaggacaagttggtaatttggttggggttgcggttgcggttgggcgcggtgcgtggccacccttgtttaatttttttcagaatccctagtctgaatcccaatgccattgatgtgaattggtgcaaagcaatgatttcgaatccggaattgatccactacgcctgcatcgctcgatcggagactatcctggggcagcaccagagcgagaaggagcccaacatggaggccttggcggcccaatgcgtggcccaaacacctcccaaccactccctattctcccacaccgtcaaccaacgcacatacac

SEQ ID NO: 9158 - DNA, 454 bp, Glycine max
agaacccgaacggccacgggttattcaatgcttaaaagctgctgtagagagaagagcatctgagggtgttcgattagagttatgcacagaagacaggcaggggcttctagcagaagtggtgagaacattccgagagaatgggctcaatgtgaccagggctgagatatctaccatagggaatatggctaaaaatatattctatgtaacggatgcgattggaaatccagctgattccaaaattatcgaatctgttaggcagaaaattgggttaagcaatttagaggtgaaggagttgccattgataaatcatcaggaggcagagagagaggatcaagcggttggaatgggtggggcagtgttgttgtccattgggagccttgtgagaaggaatctgtaccatttgggactaatcaaatcctgttcttaaatcagagggtagagcacaagaatttag

SEQ ID NO: 9159 - DNA, 766 bp, Glycine max
cgcttgtcaatctggagactagtttgaaaaactacgagccttcagaagaggcttttgacattgattcagtgcccagggaggtcaagtctcaaccacttgcagagaagaaagcccctggtaaaaagcctactggtttgggtgctcctcctagtggtcccccatctaccgcagatgcatatgaaaggctgcttctatccattcccgagtttgcaaactttgggaagctttttaagtcttcagaacctgtggagcttactgaagcagagacagaatatgcagttaatgttgttaaacacatttttgatcggcatgttgtgtttcaatacaactgcacaaacacgataccagagcaattattggaagatgttattgtaattgtggatgcatcggaagcagaagagttctctgaagtgttctcaaagcctctcagatctcttccttatgattcgcctgggcaaacatttgtgggttttgagaagcctgagggattgtcaattgctggaaaattttctaacgttctgaaatttattgttaaagaggttgacccaaccactggtgagacagaagatgatggcgttgaagatgaataccaactagaggatttagaggttgtcaccgcagactacatgttgaaagtgggagtgtctaatttcaggagtgcatgggaaagcattggccctgactgtgagcgagtggatgaatatggtcttggccccagggagagtttggctgaagctgtaaataccgtcattaatctcctgggatg

SEQ ID NO: 9160 - DNA, 425 bp, Glycine max
gatagttgcagctaacatggtgaacaatcctgtggtgataatagacatagatagattgaggcataaaacattggtacgcgacagatagggtgactcacgttggtgttggttgtaagcacatcactagcatacacactatttcctttccacacaagctgtgttattgttatctatctatcaatcacaagaacaaacagcattagcaatggcgaccacagcggcgttgtgtggcactatgttgaacacctccttcctgaggaggcaggcttcagtgaacatcacaagcctcaaggctaacgctaacactgtgtttggtgtaaagggaggacgtggaggcgtgtgactgccatggcaagttacaaggtgaagctgataaccccagagggagagcaagaatttgaatgcccagatgatgtatgcattct

SEQ ID NO: 9161 - DNA, 474 bp, Glycine max
ggttcggagtcgttaccttccatttgttcctctcttccgctcgtaactgcgccgacaactctctgatcgtaatggcaccgccaccaggaccttattctggcaccagcaccctagctttggtcgctcgagcttccgctttctccttcggccttgtttatggaagcattaagctcaagtacctcaaggcaaaagccaaatctcatcagaaagctcaggagaaggctcatcattgaaagcaatgagagatccccggtgctattatctgtccattgatggagtagaatactgaaataattcattacaaggaactgtaccatgttttctcccattttttttttcttctctggtttaagctttggataatcttggagcatcgagtttagtgcgctgaaaatgttcaagattttgccttgtttaaataatgaataccatgtcttcttttgagttccatgtttatatatcaaattgcctgct

SEQ ID NO: 9162 - DNA, 437 bp, Glycine max
tcgcatacacggaaatgcagaaagtggagtttgttactgtggggttccagcgttgagaaaaacctaattaacgaaccaaaaccctaaaatctggaaaaatggaatcgagcgttctggaatggctgggcgtggagataattggcgtgatgagccccgtctcgatctgcatgttccttgtggtcctactggtgtactccctctcctcgccgtccaccaccgccaccaccatcgccaccgccgccaacctcgtctacgctgagaacccctccgacaccgccgcgcagaagctcgagggcgcggtcctcaacgccgtcgtcttcatcgtcttcatcgcgctcgcaaccttcctcctcgtcctcctctactactacaactgcaccgccttcctcctccactacacgcgcttctccaccttgttcgtcctcgccgtcatgggc

SEQ ID NO: 9163 - DNA, 417 bp, Glycine max
ctttatttgtaaagacagtgacatttagaagaagcaaaaagaagtttattgagattcagacatggaggtttcagcgctgagtaaaacctagaaaaacagacaaaaaatagtgaaaatggaatcgagcgttctggaatgtctgggcatggagataatcggcgtgatgagcccagtctcgatctgcatgttccttgtggtcctgttagtgtattctctctcctcgccgtccaccaccaccactatcgccaccgccgccaacctcgtctacgccgagaacccctccgacaccaccgcccagaagctcgagggcgccgtcctcaacgccgtggtcttcgtcgtcctcatcgcgctcgtcaccttcctcctcgtcctcctctactactacaactgcaccgccttcctcctccactacacccg

SEQ ID NO: 9164 - DNA, 1025 bp, Glycine max
ctttaagacaaaaaataacttccttaataactaagaaggacaatctcatttcatttgttagttttcacatcctccaacataagtttctgagtttgaaacacagcataaacaaagcaaaatatgaatgccactctccctttttaaatggaaacaaagctgaagacaccacacgagcaatcaatagataacaaactaaagatagagtgagagtgagagtgagagtgagagacatgtataggttcagcaacacagtaatcgggttcttgaacttgttcacacttttagcatccataccaataattggagcaggtctatggatggcaaggagcagcacaacctgtgaaaattttctccaaacccctcttttggttataggatttgttgtgcttgtggtgtcactagcaggcttcattggtgcatgctttcatgtggcatgtgcactatggttgtacttggtggtcatgttgttcctcatagcagcactcatgggcttcactatacttggttttggtgtgactagcaagggcggtggtgtggaagtgcctggaagggtttacaaggagtatcgtcttcaagattactcaccatggttgaggaagagaattcaggatcctcgctattggaacactattagaggctgtattttggggtctaaaacttgtgaaaagcttgcctcttggacccctcttgattatatgcaaagggatatgtctccaatacagtctggatgttgtaagccaccaactgcttgcacttacaacgtggcaacaacaatgatgactcaagaccctgattgctacaggtggaacaatgcccctaatttgctatgctatgagtgtgattcttgcaaagctggtgtgcttgaagacataagagggaattggcacaagctctcggttctcacagtcaccatgcttgtgcttctcatagggatttattccattgggtgctgtgctttcagaaacacaagaagagctgaaacggattatccctatggtgaaaaccgcatgaccaaagtccgacct

SEQ ID NO: 9165 - DNA, 832 bp, Glycine max
ggacgaaaaatggaccgcaggcgaaaatacccaacactatttactacaaccaacggacaagcttcgttctggcgaagaatggcggcgccgggctcatccgccggcggcggcggagggacggcgaaggctacggtggcggagcagatctcgcaggcggtgcagtccacctccaacctcctccaccttatgcggcactcttctcctgcccaggctcaactggttaagcttcctaagaatcttttggcaaaggtttccaccatcaagaatacagagcaggttttggagcagttgcctggggtgatatcatctcttgacgcacacatggaaaatgggttgcaaaatgttccacatctaaagaccgtggttcaggtactttcaaatatggaaagtagccagcttagcttgctatcccgaccccatcctctccagaaggaacttgaaccaggaaaccaatctcaaggaaccggttaaagaatctcatgttgctttaggagtttcacccgtgatcaattcatgcagattttggaaggtttggaactgtgacttgttgtgtttccttcttgcagtcttcctgcaaatcaaataacaataccatcctctgataaagtgcatggttattcaactgagaaacctgttaaatattagtgacaattgggaatcttgtccaaagaattcaaggctaggctattaattgattgatggcaattgggtatctgtattctgtaatgtatgtccattcattttcagcttgtgcatttttgtttttcatcttgccaaatgttatgttcaaagtgatgtaacttttatttaaatcagttttgttttactagct

SEQ ID NO: 9166 - DNA, 339 bp, Glycine max
gacaacaaggaaggaagaggtcaggtttcttgctcagcttttgtgtttcctctattcccattatccttctatgtttgagcataaattcaggatcttgttctttctttcttgatactacaacccgtgttcttccaaaaacaactgtagtcttctgccttagcccatgttggggtatttgtctagatacccactaattcattgctgagggatattcaactttcacctttatcttgaatcttttattataattaacttgaggattttcttcctcttttctttgtttttttctttctttcattcttttctaaaatgagaaatgcacatgtgatacatcaacca

SEQ ID NO: 9167 - DNA, 544 bp, Glycine max
gtctcatttaatttactggaccacctctttctctttctacttggtcacccataaatcccatatcatatctgccaacccccaaatggctacttcttctcgccactcccctcaattcacccccattctagaggagcgtgaatttgacgacttgagtggccatgacattataagccactccagaagctcccaccctccaacccccattgtccacaagcacactaaatccaatcacaacaaccacaagaaaaagagatcagattccgaggaagatggctccgtctcttgcaacaagtgcagacctcactcccgcgacaaaatcttcatccttcccttggatcactcctccaccaacaactctcacaaaccctcttccttactcgccagccccaacggtattttcaggtcccttgtttccaagctcacccgcaagagtcccatgtcttcttcttcatcccaagaccctctcccaccctccagagaggaacaatggaaaatggcagtcgccgaactctctcacaagctgctccacgccaccagaaaaaga

SEQ ID NO: 9168 - DNA, 1125 bp, Glycine max
  unsure (1)..(1125): unsure at all n locations
cggttaggaattcccggctcgacacacgcgtacgcccacgcgtccgcccacgcgcgggggggtgaaagagtgaggagagaattacagagcattttccaacacgattacacgaccgaatcaaacccctctttctctccgaagctgcttttaatatcgtactggccttcgattgttctcctctttaatacatactgttctctcttcgatttgagggaacagtacaagagtctgagcatcggttaacccaactgcacaggtagtctccaaataatggagcctcatgatgagactggatgccaggctcctgaacgccccattctttgcattaataattgtggcttctttggaagagcagctaccatgaacatgtgttccaagtgttacaaggacatgctgttgaagcaggagcaggacaaatttgcagcatcatccgttgaaaacattgtgaatggcagttccaatggcaatggaaagcaggctgtggctactggtgctgttgctgtacaagttgaagctgtggaggtcaagattgtctgtgctcagagttctgtggattcgtcctccggtgatagtttggagatgaaagccaagactggtcccagtagatgtgctacatgccggaaacgtgttggtttaactggtttcagctgcaaatgtggcaacctcttctgtgcaatgcatcgctattctgataaacatgattgcccttttgattataggactgttggtcaggatgccatagctaaagccaaccccataattaaggcagataagctcgacaaaatctaggcatgcactactgaaggttaatgtatgaaccttgaagcttcatcttctatatgtaagtttcatatatgttgtcttcctggttttttaggtgtcctttagtgattaaaatgatccaagtcaagatggcaagggcatcattagggaaaacatttattgttggttgggagatccacttgttagctccagtgtgtttgtgctgctttgatggacactttggctcattttgtaatttgatttcctgcttggtctgcattttttttcctcnnnnnnnnnnnnnnnnnnnnnnnnnnnnnnnnnnnnnnnnnnnnnnnnnnnnnnnnnnnnnnnnnnnnnnnn

SEQ ID NO: 9169 - DNA, 435 bp, Glycine max
cgagccattcggctcaggaaagagtgaggagagaattacagagcattttccaacacgattacacgaccgaatcaaaccctctctttctctccgaagctgcgtttaatatcttactcgccttagattgttcttctctttcattcatactgttctcttttcgatttgagggaacagtacaagagtgtgagcatcggttaacccaactgcacaggtagtgtctctttatttcgtgtttcttttttgtgtttctgcgttcgatttctccgcggctgtactgggttgttattggtcggacgacacgggttaattttattggatttttattcttcccctgtttttaaaatttgataaaaaatgatttttttatctttgcggggttctggattggatgagttatgggttgaagtggcatgattcggttggtgggggtgttga

SEQ ID NO: 9170 - DNA, 375 bp, Glycine max
agaaagtgagagagaattacagagcattttccaacacgattacacgaccgaatcaaacccctctttctctccgaagctgcttttaatatcgtactggccttcgattgttctcctctttaatacatactgttctctcttcgatttgagggaacagtacaagagtctgagcatcggttaacccaactgcacaggttttaaactgccgtcatggtatcatcgtggtgttgcgggaaattgtggacaaatgtgcccgttgtggctgtaaattgtggctgtggagacttcaaaaaccttgatgttgctggccaaaattaaggtaatctccaaataatggagcctcatgatgagactggatgccaggctcctgaacgcccc

SEQ ID NO: 9171 - DNA, 649 bp, Glycine max
ccggaaagttcgatttgaccgtttccgtcgccggagattccctcacgttacacaccggtgttgattcgtcgaggattgcggacaccattctggattcctctccgctttcgatttattcagtcgacagcgttcttcttccgcaggaactgttcgcgaagtcgccgtctcccgctccggcgccggaatcggtttcttctcctactcctgcaccgtcaccagtggcggaagcgccttcgccgtttcccgcgtcgcctccggctcccgcgggagagagtcccgctggtgctccggcggaagcgccatcatcagaagctgagcggagtagttccgccggtaagaatgacggggttcacgtgaaagcttctgcggctctcactgttgcagtgtctgcattgtctgcatttgtgatttctgctacttttatgtaattttaatattttattggttttgttttgtaagtgtttttttagtttttttttaatttgcgctttttttccgggatattattggacggggaatttggtttatttatttattttgttataaattaattcaggcatgtggtgatgtagggcgtgttagttgcgtatttttattttagttttaatttctgagttatggaagattctggtgttttttgggtggtggt

SEQ ID NO: 9172 - DNA, 621 bp, Glycine max
ctgctgcgagatgaagacgacaagggagtgtttaccaatcaacaaaccctctcttatctttttcaccaaaaatggcaacattcatgctgaagttggtgcttcctctacttttcctgttcatgattcctccgaaaacagcgtatgcggagtttgagcaatggtgtgtagctgatgagcagaccacggagtctgagttgcaggcagccttggattgggcttgtgggaaagggggtgcagattgtagcaaaattcaagtaaaccaaccttgctatttaccaaacacattgaaagaccatgcttcttatgccttcaacagctactatcagaagttcaagcacagtggaggttcttgctactccagaggagctgccataacaacagaagtggatcctagtcatggttcttgtcactatgatttcattccctgatgacaaccgtgaatgaacacttaaaatacctgcagcaaaacctagagctcgtgcctttgtgtgtttgtgtcccaaattcccaatcaagcaatttttttggggcctttttcttgtattattgagagtgctgaaatcatacatggcccttgttcacggtcaaaggtcgaaaagtcataaaaaaatcctgtccagc

SEQ ID NO: 9173 - DNA, 531 bp, Glycine max
gcccgcgtccacccacacgtccgcccacgcgtcccggtaacctccttgcattgcacccggattgctaccctgcgccatgatgagctgggtcaggaaacccttctgaatctgttacttcataactacctacactacaacctatatgatcaggcagagaagttgaggtctaaggctccacgttttgaggcacattcaaaccagcagttctgccgttatctcttctaccttgggaaaattcgcacaattcagctggagtacaccaatgcaaaagacttgctcttgcaggctgctcgtaaagctcccagtgcagcacagggttttcagattcaatgtaacaagtgggctgtgatagtgcgtttgttattgggagaaatacctgagaggataatctttatgcagagaggaatggagaaatctttgaggccttactttgagcttactaatgctgtccggattggtgacttggagctatttaggaatgctacagagaagttggtacgactttcagtagagaccgaactcataatttga

SEQ ID NO: 9174 - DNA, 450 bp, Glycine max
  unsure (1)..(450): unsure at all n locations
nggttgatgtgagggtgaggcatagagttactctggaaggaagtgtaaatgggcagtgtgtgggtgtgctacttcccgagctgcaccatctttccctgtcgccagtgcaagctctccccaacgcaccttcttcaaccttctgcctctttccaaatctctcttctccgcgtacgggcttctcaaaccaccaccaccaccttcaccacaagaaccagaacaaggaaaagtcgaaggctcaagagcgactccgagatctgcaatgatatccgccaattcctcgattcgggtggcctcccggaggaccacattccctccaccaaagagcttctgctccaccgatggaatgacttggcaaacattgtcagaaggagagggcataaacaaattcaggagcttgtcacaagaagctcattgaatgctgacgttgatattttaagtgctgaaactagc

SEQ ID NO: 9175 - DNA, 584 bp, Glycine max
ggtactgctatagcacaatttggttccacgtttgttcaggaaattggtgttactaggggttgttgttgcaggggaacatatttttccaatgttgggttttgttgcacctcctccttggtattacaacttgcgtgctaataggtttggaaccattgcaagtacttggcttcttgggaatgccttgcagtcattcttacagagctctggggctttcgaagtttacttcaatggtgaactggttttctctaaactgaaggagggaaggtttcctggagagatcgagttgaaggatctgattaccaaaaagatgacaaattctatacgtgtcaatggtgtgtcagaattgacctcttagtgcctttggtggagacatattttgagctgtcataaattatgtaactgggcctgccattccactatgaagtaaaggttgatatacagatataataggattatcatgttgtaaggtttccagatgtatactggagtatgaactttctgtattgaaagaactaagtgattgttgaaggcaaaactcagttaatagtttgtgcagagtttgaatgttttaatttttttttttc

SEQ ID NO: 9176 - DNA, 1928 bp, Glycine max
tcggtaaattaatgatgaaaagaaagcatcgatggcagctcagtttgcagctgaagccactcttcgaagggtccatgctgctcagaaggatgatgacatgcctcctatagaggccattcttgctcctctggaggctgaacttaagcttgcgcggcaagagatagcaaaacttcaagatgataacaaagctttagaccgtctcaccaaatctaaagaagcagcacttattgaagctgagaagactgtacagattgccttggctaaggcctccatggtggatgatctccaaaataaaaatcaagagctaattaaacagattgagatttgccaggaagaaaataaaattttggacaaaatgcatagactgaaggtggcagaggttgaaaagctcacccaaactgttagagagctagaagaggctgtccttgcaggtggtgcagctgcaaatgcagtgagggattatcagcggaaagttcaagaaatgaatgaagaaagaaaaactctagacagggagttggcccgtgccaaggtaacagcaaacagagtagctgttgtggttgcaaatgaatggaaagatgctaatgataaagtgatgcctgtcaaacaatggcttgaagaacgccgattcttgcagggagaaatgcagcaacttcgtgacaagcttgctatagttgagcgcgctgcaaagtctgaagcacagttgaaagaaaaatatcatttacgacttaaagtgctacaggagagtttgagagaaacttctaacagtattaatcgcggcacctcagagggaagatgtgttagcaatgggccttctcgacgtcaatccctaggtggagctgataacatctcaaaactaacatctaatgggtttttgaagagatcaccgtccactcaaattaggtcttctgtgtcttcaagcacagttttgaagcatgctaaaggcacatctaaatcatttgatggtggtacaaggtcattagaaaggagtaaaattcttctaaatggaaaacctccaagttactcattcaaccagtcttctgaaggaaccaaagacagggaggaaaatgataaatggaaaggaaattcagatgataaaccaaatgacttcccaacagtggatacagaggatagtgttccgggagttttgtatgatttgctgcagaaagaggtcttagccttgaggaaagctggtcatgagaaagatcaaagcctaaaagataaagatgatgctattgagatgttagcaaagaaggtagatacattgaccaaagccatggaagttgaggcaaagaagatgagaagggaagtagctgctatggagaaggaggtagctgctatgcgtgtggagaaagaacacgagaacagagcaaagcggttcagcaatgtaaagggccctgtaaacagtgctcagcaacagctaatttctggaagaaatgtgacacggggtggattaacacgcagcacccaatgacagttagtctatgacagtggcgcttgggagtagtaatctttcataggcatcattcttttgcccttctctgttttttcccttgtgttttttgtccaattgagttactgctgatattagccatggattggggataagaaaacaattgcaggattcggtatgcatcttctgacctagtgttacgttctctgcttagagagagagagagagagagatcggctatgaaggcagccaatggaagacaatttaacttggactaacctttgactctttcagcatttctgagtggtgtggttgtataggtagctttatcccctcctttactccttataatttgtaatacgcaaatagtgtgattgtgatggttcaggcttgttcatatgtactagcggttgatccgtgactgtcatgcacggagtatatgtttggttgtgaaatgatatcaattcacaatgtttct

SEQ ID NO: 9177 - DNA, 573 bp, Glycine max
  unsure (1)..(573): unsure at all n locations
tggtgcttgggagtaatctttcataggcatcattcttctaccctctgttttttcccttgtgtttttgtccaattgattgtaaggttatgtaactggcatgccgaggaccagtgttactactgatattagccatggattgggataagaaaaacaattgcaggattcggtatgcatatcttctgacctagtgttatgttctctggttagagagagagagagagagagaccggctaagaaggcaggcaatggaagacaattaacttggactaacctttcactctttcggcatttctgagtggtgtggttgtataggtagcgagcggcccccctttactccttttttttgcagtttatatttgtaatatgcagatagtgtgattgtgatggttcagggtttgtcaatataatactagcggttggtccgtgtcatgcacggagtatttgcttggttgtgaaatgatatcgactcacaattattcctnnnnnnnnnnnnnnnnnnnnnnnnnnnnnnnnnnnnnnnnnnnnnnnnnnnnnnnnnnnnnnnnnnnnnnnnnnnnnnnnnnnnnnnnnnnn

SEQ ID NO: 9178 - DNA, 650 bp, Glycine max
ggagcatctttgcttgttaatgcccttagctttttactcctcttattctttgagctagttttagcatggatgctcatttttttcttaggaattttactgctgcttaactactccaagtaaaggtgcaaatcatgcatatacaaagttggaaaaagttgaccttgtaaagttgtgttatttcaggaaaagtttagtgatgttgtcaactggctcaaagcaaatgccactaaggcagaaaattcggctgctgatgctggtgttgccttttctgggaaaaagctcttgcctgaagtaataatcaatgaaaataaaccttctggagaaaaaactgggtctactcctgttagtactgctacaaattttactagttcttggagccctggattattttcaaacagtcaaggcatttttggatttgggaggtctcttctcacttttaaaaaaatatacccaataacttttcttctcataattcaaagtaactttagaatgaggtcacattggtgggaaaataaactgggtgcaattggtggttcaaagtgggcccctccagggggaatttaagccaaatttgggaacaggttccccctttgggcccccaaaaaaaaaaaatggttttttgctccaaaagcatttccaaaattttggcc

SEQ ID NO: 9179 - DNA, 992 bp, Glycine max
  unsure (1)..(992): unsure at all n locations
atgaaaatggctctgaggcagctggtacaactactgatgataatcactgggcaggttttcagtctgctgcagaggtgtcaacagctgagaagactagtcccccgaaagcagctgatagtactcccgggtctgcatctggaattgaggatcttttcaaagatttacctcctgtgactccaagcttgactccagaaaaaccacagaaagatgtgaaaaatgatatcatgcgcctctttgagaagggcaatatagtgtctccattttctatgcatcaacagcagcttggcatgctagcacaccaacagtctcttctaatggctgctgcagctaaatcttctggtggggatcctaggtatcctgctagcatacaacaacctagacccaatgttcctatccaaagttggccagctactggctattcaattcctggagtaatgcccatgggtggtcagggagagttgcaaaaacttgtgcagggtcagactaggaacatgaccccagcacattttgcagggagttctgttcaatatccaccatccagtttctatggtatgggacaagttcctcctccagttaacggtatgacaatgggagtgagtaaacctcagtcaggagctcctgcagtgtcatctaccacttcacagtctgcgaaggattatgatttttcctccttaacacagggaatgtttatgaaacagtgattgatcttttttgttgggcaatgccagctatgtcatatactaccatagaagattagttaaaattacagcaggtgcgctttcttttctcatttttcccttgacctgtccttgtggtgtaatccatttgtagagctagttcaggttttttctcgttcatttcaggtgattgcttcatttgtatccgtagttgtattcactatttatttatgcccaataaaattagggatatttattctaaaatgaaaatccctcccttggcnnnnnnnnnnnnnnnnnnnnnnnnnnnnnnnn

SEQ ID NO: 9180 - DNA, 759 bp, Glycine max
cagctgaaatggcacttttctgcttgtacattttatatatgcatcctttttcaccggtgtttatattgcagcaagagttttttcggaagctgatggaagtattcagaatgtgtgaagacttggaaaatattgatggccttcacatgattttcaaaatagtcaaagggattgttctgctaaatagtccagcgatttttgagagaatttttagtgatgactttatagtggacattattggtgccctcgagtatgatccagaggttccttgtgttcaacatcatcgtaaattcttaaaggagcatgttgtttttaaggaggccatacctataaaagatcccgttgtgttgtcaaagatacatcagacatatagagttggttttttgaaggatgttgttctggcgagagtcttggatgagggtattggtgcaaatcttaactccataatacattcaaacaatgcccatgttgtctctttgttggaggatgacagtacatttatccaggagttgtttgctaggctaaaatcgcccaccacctctcaagaatcaaagaagaacttggtttatttcttacacgagttttgtagtttgagcaagagcttgcagatggtccagcagcttcggctttttagggaactaatgaacgaaggcatctttgatgttgtcaccaatgttttgcaaagtcaagacaagaagcttgtgttaactggaacagatatcctcattcttttcttgaatcaagatcctaatcttctgcgat

SEQ ID NO: 9181 - DNA, 565 bp, Glycine max
ttttctatctatatatctatctatatatagatagatatatagatataatgtaaatatccaaaatgaatattatactatattagattatatatgaaatttatattcgtatttctttttgtatttaaaaatattcgttgaacctagttaattgaaattagtctaacgtttgtatttgttacaaaaaaagctttttgaattccccgtaaaaatagattgcgctaatgaaaaagctttcaatgttgtaaaatatcccttctttttccataaagtgttccgaatccttttttttgatatagaagtgcgcttttttggaactgccatataattagtatagcttttgattgttatagaattcgatgtgaaagacatttttatgaaaatatatttatctttaattagccatatattttatctatcttaattcccattttttactatttcaagtaaaacattgaatattataatactttttctaaaattttccaaacatagatattgtttattgtaataaaaaatactaaattagttaaaaaaacgaactaatgtttttgaaaaaaaaaaaaaa

SEQ ID NO: 9182 - DNA, 317 bp, Glycine max
ggggaaaaagacattaattcttccttcctcctaacctaagcggaggagtagtagtagtagtagtagtatcaattcccattctcattcacttctcccacactgttctattttcaagactctttccatagcacttgcttcactctctctcgctctctctcgcgaccagcaggaggtgccatggcgggtgcgatgggtatgaaggtcgacaagattcgccaaatcgtgcgtctcaagcagctgatgactcgctggaagcacatcagcctccgccgccgctcctccgacgagccctccggcgtgcgacgcccttcctccgg

SEQ ID NO: 9183 - DNA, 313 bp, Glycine max
gggccagtgatagttatcgctagctagttatgaccaatgctatgtatgctagtattatgaaaactcagctatgaagtattacacattttgttgtaaaatagaatgagttatttcttttagatgtgtaattagttttctcccagagaaccatggtattagctttttctactttagggcttttctagttatgacttcgataaccaggtttaagaatttagcattgctgttggggtggacctctatattagacctcgagattatatgagttgggtatttttaattttaagacctttttggtgcaaaacaatggtgg

SEQ ID NO: 9184 - DNA, 1564 bp, Glycine max
gccttgagtaccaagaccaacatctagaatatcacagggctatgagactgagagttttctcaatctacccaaagctggtaggaagtgcgcgaagcgtgttgatagcatatggggtgcttggtttttcttcagtttttactttaagcctgctttgaatgacaagtccaaggccaagattgtcagggacagcaacggtgtctcagggttcgataagtctgatctgaagctggatgttttcatggttcagcacgacatggaaaacatgtacatgtgggttttcaaggagaggccggagaacgcgctgggtaagatgcagctgaggagttacatgaatgggcattctcgccaaggggagcgcccgtttccgtttagtgctgacaagggttttgctcggtcccacaggatgcaacgaaagcattatagaggactatcaaaccctcaatgcgtgcatggcgttgaggttgtttccacacccaatctgatgaccctggatgaggatgatcgaaaaaggtggatagaactcactggccgagatttgaatttcacaatcccacctgaagcaagtgatttcagttcatggagaaatcttcccaacacggactttgagcttgagaggaccacctcccccaatcaagagtggtcccttaatgcacaccccgaagaagctgcttaatggatccggacttaatggatctggacttcatctatctaaccacagtaatggtgatgggttggacctctctcctgtcagcagcaaaaaaaggaaggactttttccctcatggaaatgaagaagaatgttacttggctgttaatcctccatccgatcgtattccagatatagaaatgcacccaactgagccacactggttgaatgacttcagcggggtgataaaaagtgtttatggacctgttacagctgcaaaaactatttatgaggatgaacaaggttacttgattattatcagtctgccctttgtagatcttccaagtgtgaaagtttcatggaggaacactctgactcacggtatcataaaggtttcttgtatgagcacatctcgaaagcctctcatcaagagacatgataggacattcaagcttacagatccatcgtcagagcactgccctcctggtgagttcgttcgtgaaatccctctttcaactcgaattcctgaagatgccaatatagaagcatactacgatgggccaggatctgtgcttgagatcatggtgccaaaacttcgtgtgggagcagaagagcatgaagttcgtgtttgccttcgccctcatcttggagggaatgatcttatgttgacttgagttttaggctcttattaaaattgttggggttgcaagcatggtccgaaaatcattgttttactaactttgtgcctgtgttatctacaatacaaaagtgcatctcacatttgtctccattttttcttattaattgcgatggtttttttggggtccataaatctattagcgtttgattgtaatcattctttatcttttaacatccatccctaatcatttatatgaaattattaaatctgaccttatgt

SEQ ID NO: 9185 - DNA, 920 bp, Glycine max
ctgtcgcgtgggcggacgcgtgggcacacctccttatacactcttctcctctatctaacaacacccaacaaaaataaaaaataaaaaaaattagggttttcaatttggggaaataaaaatagggggaaacattctagagagagtgtgtagaaaatatggttgtcgatgatatgacgctgtgcatcatcgtcggctatggaggttcctcttcttctcgtttctccgatgcttatcccaaaaggggttttaataaataatccttgaagatctctccctctctctattttcagaaaactgtttttttcttctttcttttctctcttatggatttgatggttttggttcagtgcttttcccctgattttggagggtttttggagttacctggaatagggttaaatataattcccctctagcgttttcgaaacctcttcctctcatacagagattgaagagatatatcactgtgtcactgtctctctgttatataatatagatagatagatagctaattagctaggtctggtcttatttatttattaatttacaaagaaaattagaagaactgttattattattattattttaaataggatggatttgttgattttttctctcctggactcaactcaatttgataaacctaggggtttgatggaggggagatatagtggggattgatatagacatggtgctataattgctgactccgtttgcaatgacaaggacacaagggattgtgtagataaaaaaactggaattaagggacgatgcgttgtggcagcaattaccaattacaccaaccagctcctcgagtatggcagtgacactaaatccaaatataatctgactcaatcacttttattcctttcacattttttgggagacgtccatcagcccctacattgtggctttttctc

SEQ ID NO: 9186 - DNA, 1005 bp, Glycine max
ctttcaaatcctcaatgtgtgcatggcatcgaggttgttccatcgcccaatcttatgagtcttgataaggatgagcggagaaagtggattgaactcactggacgagatttgaacttcacaatcccacctgaagcaagtgacttcagttcatggaggaatcttcccaacagagaatttgagctcgagagaccacttcccctgatcaagagcactctgaatccacacccaaagaagctgcttaatggatctgtgttgaatttatcaactcatctgcctagcctcagtaatggtaatgggactgtcctgtcttctattagcagcaagaaaaggaaggacttttttctttatgggaaagatgaagaatgttgtttggctattaatcctccatctgatcggagtccagatttggtaatgcacccaagtgaatcacactggttgaatgacttcagaggggtgatgaagaatgtttgtggaccatttacagctgcaaaaactgtttatgaggacgaacaaggtttcttgatcattatcagtctgccattcgtggatcttcctagtgtgaaagtttcatggcggaacactgttactcatggtatcataaaggtttcttgtgtgagcatatcttgcaagccatttattaaaagaaacgataggacattcaagctttcagagccatcgtcagagcactgccctcctggtgagtttgttcgtgaaatcccactttcaactcgaattcctgaagatgccaatatagaagcgtactacgatgggccaggatctgtgcttgagataatggtgccaaaacttcttccaggagcagaagagcatgaagtttgtgtttgccttcggcctaatgtggggaatgaactcatgttgaattgagatagacattagttaggcacttttgaaaaatatatgggtatgattgccagcatggtcggttaatcatttgttttagtgactttgtaccatactgtgttttctataatacaaatgcattgtgtt

SEQ ID NO: 9187 - DNA, 518 bp, Glycine max
aggacattcaagcttacagatccatcgtcagagcactgccctcctggagagttcgtccgagaaatccctctttcaacccgaattcctgaagacgccaacatagaagcatactacgatgggccaggatctgtgcttgagatcctggtgccaaaacatcgcgtgggacctgaagagcatgaagtccgtgtttgcctccgccctcatctgggagggaatgatcttaagttaacttgagataataggcacttaaaaaaattgttaggcattccagtatggttcgtatgtcattgtttttctaaccttgtaccatacactgttatttgcaatagaattgtgtgtcttatgtttgtctctagcaattttagctcactgactgccctggttctttttgttccggtgcatctgtattatgcttttgattgtaagcagtattgaacagctagttctcatgatttataagaatttacccaatcataccaatggaaaaaaaaaaaaaaaaaaaaaaaaaaaagggcggc

SEQ ID NO: 9188 - DNA, 910 bp, Glycine max
ctcttctcctctatctaaaaacacccaacaaaactacgcccgaaaaaaaattagggttttcaatttggggaaataaaaatagggggaaacattctagagagagtgtgtagaaaatatggttgtcgatgatatgacgctgtgcatcatcgtcggctatggaggttcctcttcttctcgtttctccgatgcttatcccaaaaggggtttgatggaggggagatatagtggggattgatatgatgaaggtgtttataaggttgttttgttgaaattgtgtttttgggatggcaatattgtacgaaccagcaataaaactcatcgaccagatgagctagcatgggcgattcttgtcttacttctttgtcaatggagaatcaccacccctccacgctcttgtcaatggcctcaagtgcatcttctcacgaggaactggatttggagatgaatcgccaaatcatactcactcgtccgcccgatattaacctgcccctctccgccgagcgcagccgccgccacagccgtggaattctgagccctgtgatattctggatgttggtcttggtactcaaggctacgagactgagagtttcctccatctccccaaagctggtaggaagtgcgccaagcggcttgatagcatatggggtgcttggtttttcttcagtttttacttcaagccggctttggttgacaagtccaaggccaaggttgtcagggacagcaacggtgtctcggggttcgataagtctgatctgaagctggatgttttcatggttcagcacgacatggaaaacatgtacatgtgggttttcaaggagaggccggagaacgcgctgggtaagatgcagctgaggagttacatgaatgggcattctcgccaaggggagcgcccgtttccgtttagcgctga

SEQ ID NO: 9189 - DNA, 416 bp, Glycine max
atccgagactaccacaccctcaatgcgtgcatggcgttgaggttgtttccacactcaatctgatgaccctggatgaagatgatcgaaaaacgggtggatagaactcactggccgagacttgaattttacaattccaactgaagcaagtgatttcagttcatggagaaatcttcccaacacggactttgagcttgagaggccacctcccccaatcaagaatggtcctaatgcacacccgaagaagctgcttaatggatctggacttaacggatctggtcttaacggatctggtcttaatggatctggacttcacctatctaaccacagtaatggtgatgggttggacctctctcctgtcagcagcaagaagatggaaggaccttttccctcatgggaatgaagaagaatgttacttg

SEQ ID NO: 9190 - DNA, 435 bp, Glycine max
gaccctcaacaacctaaaaaatattcactaagatttatttcccttattttattcatttattctttgttcctagtctttatcttataatttctcattgcttgcccggtaattcaagatcaacttggaaaatttgcaagatttgggatgaaatctggtcggatcttgctttgtgggatggggattttggtgggtcttatttcaatacaaagctcttcctctctcaatcccatctccctctcttcttcttcttcttcttcttcataacacaaacacaaaacataaacctttcttccaaccaaccttttttccaattcattctttgtttcttcaaaaatcttcaatccattttcaccttttcacaaatggggatggctgcagagtcacagtttcatgtcttggctgttgatgacagtctcatagataggaaactcattg

SEQ ID NO: 9191 - DNA, 431 bp, Glycine max
gaaccctcaacatattcactaagatttatttccttgattttattcatttaatgatttgttcctagtctttatcttataataattttcgcattgcttgcccggtaattcaagatcaacttggaaaatttgcaagatttgggatgaaatctggtcggatcttgctttgtgggatggggattttggtgggtcttatttcaatacaaagctcttcctcttcctcttccaaaaatcccatctctttctcttttttttcatcataacacaaaacacaaaacataaacctttcttccaaccaacccttttttccaattctttgtttcttccaaaatcttcaatccaatttttcaccttttcacaaatggggatggctgcagcggagtcacagtttcatgtcttggctgttgatgacagcatcatagataggaaactca

SEQ ID NO: 9192 - DNA, 833 bp, Glycine max
  unsure (1)..(833): unsure at all n locations
tactacagtggcatgaaaagccgaactggtggattgagtgtctcacttgctggtcctgatggtcgggtgataggtggtggtgttgctggacttttaactgctgctggccccatccagattgttgtaggaagcccgatgcaaaattgttgcaagacccaaaagaggaagtatcaacgtgaacaacagatagtggcggccacccctacttcagctggtccagaaatagtgacagcagcaatacctatctcacaagcaaatgctgctgatggtgagaactttctgatacctatacctatctatcagattccagaccaaaaccagagagaatctatcagtgtttcaagtgacaaacagaacctagatgctactcctgatgctgctgttacttggaatggttctgaggaatattcagaccagaggacttctccagacatcaacatatctttgccagatgaatagaacaaggtgatgcagaggctgacatggtagtaatgaatgaaactaacaccggaaatctgtcatgacaactactgggttatatgacatgatgtacagttgtcagaaattaggaaggattattattattattaaggcctcattattttttcttattacagtttctgttgaacatttataagtttttctttcttttctttagaggtggaagagattaccaaaagacttcgtagtaggctgtttattattctgttgggattgttcggtaaaattatttgtagttttcaacattttgcacatttgggaaacctctaagagtttttctcattatcatggatccaagaactatacataaaagttgcttttgccccnaaaaa

SEQ ID NO: 9193 - DNA, 693 bp, Glycine max
ggatctatgtggtgattcagaaacaaacgaaacccagtagacatggcgaaatcggcgtcgaattctctgatgcagagcctgaagcggttcataaagaagccatgggagatcacgggcccgtgcgcggaccctgagtacaaatccgcattgcccttggccgtggagtaccgcctcagctgccccgccaccgtcaaggagaagcccatcatccccaactccctcccggagaccgtctacgacatcaagtacttcacccgcgaccagcgccgcaaccgccctcccatacgacgcaccgtcttgaagaagcccgacgtcgagaagctcatgaaggaacagaccttcgccgtctccgactttccgcccgtttatctcaattccgccgttgaggaggacatcaacgctcgcggcggcggataccagtgactcacaggtttgtgctattgtgggatgacattattggccctgtcaactttctgttatttgtcaatggaaaggtctgtgtagtctttatcacagacctgtaatgaccgtccattttaaagaggtgtgtaaacattttacatcaataaagtgtagctggctggagttaaagtttaactatatgtttacttatttggggatgtgggatcaaaaagtaaattgattcaatgacgtgataatggttagaataatttcccctgcttattttgattg

SEQ ID NO: 9194 - DNA, 357 bp, Glycine max
gaacaatggcaacttcgttattccgcagcataaggagagcttcctttgctctcagattctcgtactctacctcgttttcggtctctcccaggtcagttgttgggaggactcagatgtgtgtttgttctccgttgaggcactgtgtcccggtgggagagcaaggttattggtggggtttgagaaatttgagctatggcagggtgaaccttgtgataacgggagggaagaccaagtttgagactcatgaggaagagcctccgaagaaggacaagtggacgacaaagaagaggttgaagatgcagaggaagagagagaaggagaagaggagagcggccaacagggaaggaccccgtcaac

SEQ ID NO: 9195 - DNA, 1971 bp, Glycine max
gcggaatcaaatattcctgaaaacaacgcattcctttcactgccccttcccaattcccttccctgattgtcaattggatcttcatgagttcaacaaccactggagcatacttcgtttcctgtgttgcgggaaacaagaacaacgacctcttctgctgggttttgctctgcttgctgccaaaatttttgggaactccatttgcctacatcaactttctcttgattcaggccattgacaggaatccatcggcggtggaggttttgggaaacttcggggtggttaacctatagtctttattagtttggtcatcatcagcagcagcatatttagatcccttattgttgagtggtgtgagaaatggtgtcctctcagttttctggtttgactatggctggctacaaaccgtctcagactcagttactctttcctgcaaagcttgttgatactgtgaacacagagcatattgagctggatttctctgatgtctttggtcctgttacgttagatttgaataacattgattccactaccagtgagcctctggaagaagtgaacgagctggtttatgatgacccgccagtgatttacactcgctcacattctctggttggcccttcaacttgtgttagtcaatcacttaagcttggcaagctcaccattcatgagactgaggattcattggaactagtggagcatgtcaatggagaggccattaaagacatcaaagaatcttcctttgttgaggaatcattgaaagatgaagatgggaatctcatgaagatccacagagttagcattgacgatttcgagattttgaaggttgttgggcagggtgcatttgcaaaagtttatcaggtgaggaaaaagggtacttctgaaatatatgctatgaaggttatgcggaaggacaagattatggagaagaaccatgctgaatacatgaaagctgagagggatatttggacaaagatagaacacccatttgttgttcaactcagatactcttttcagacaaaatacagactgtatcttgtgctggattttgtaaatgggggccatctgttcttccagctgtatcaccaaggccttttcagagaggatctagcacgcatatacactgctgagattgtttgtgcagtttcccatctccattcaaatggaataatgcacagggatctaaaacctgaaaatatcctactagacgctgatggccatgttatgttgactgattttggcttagctaaacaatttgaagagagtactagatcaaattcgatgtgtggtacattagagtacatggcacctgaaattattcttggcaaaggccatgataaggctgctgattggtggagcgtaggtattctactgtttgagatgcttactggaaagccgcctttctgtggcggaaaccgtgacaaaattcagcagaagatagttaaagacaagattaagctgccagcatttttgtcaagtgaagcacattcactgttgaaagggctgctacagaaggaaccaggtaggcgcttaggttgtggaccccggggtgttgaggaaattaaaagccacaagtggtttaaaccaatcaattggagaaagttggaagcacgagaaatccaaccaagctttaggccagaagtagctggtgtgcactgtgttgccaactttgagaagcgctggactgatatgcctgttgtggactcaccagctgccagcccaaatggtggaaacccctttaaggatttctcttatgtgaggcctgcagcctcttttcttcaaaggaataaccctgcttactagccagcttgaaatggcgttggcttaagatgccaacatgaaacattttcatgtgcccttgacttgtgtgaactttgcaggttgtgggttcattcacttattatgtgcaccttgctgcggctctctgcaaatgtattgagctgtcatgtatgcagaaaataaattactttattatag

SEQ ID NO: 9196 - DNA, 410 bp, Glycine max
agttggaagcacaagaaatccaaccaagctttaggccagaagtagctggtgtgcagtgtgttgccaactttgagaagcgctggactgatatgcctgttgttgactcacctgctgccagcccaaatggcggaaacccctttaaggatttctcttatgtgaggcctgcagcctcttttcttcaaaggaatagccctgcttactaactagacagcttgatatggcgttggctcaagatgccaatattaaacattttcttgtgcccttaggaattgtgtcaactttgcaggttgtgggttcagtcacttatttatgtgccttgcgactctctacaatttacaaatgtattgagctgtcatgtatgcagaaaataaattactttatttataagtggtatattctatttgggacat

SEQ ID NO: 9197 - DNA, 945 bp, Glycine max
gagataactgcggcctttagaccacatcaacaccacgacgagatctggatatcgtgttttggggcctgaattctagatcttgttatcggcttcgacgaaggagatctggttgtcgcggatataacgcctcgccgccgcgtcgtaagcacccgctgcctcctccaccgtgtcgaagccccagccagtggcagcaccgcccgatgcagtcgcgtatcttcgttaaccacctcccccgcgatcccttcctcgctccttggtagctcttgctcacggacgattgcgcgaaaatccctttctaaacaatagaaccttttcttagattctgtggaaaaagcttctcaatctttgacgaagataaacaacaatgtcttcacttgcggctgctagagcagacaacttttactatcccccagaatgggaaccgaatcagggttcgctgaacaagtttcatggtcaacatgccttgcgagagagggcgagaaaattagatcagggtatcctgattataaggtttgagatgccttttaatatatggtgtggaggatgcaattcaatgattgcaaagggtgtccggttcaatgcagagaaaaaacaagttgggaattattactcaacgaagatatggagtttcgctatgaaatctgcctgctgtaaacatgagattgtcattcagactaatcctaagaattgcgagtatgtcattattagtggtgcccagaaaaaaacagaagattttgatattgaggatgccgaaacttttgaattgcctgctgatgaagagaagggtaagcttgcagatccattttaccgccttgaacaccaggaagaagacttgatgaaaaagaaggaagctgaaccagtgatcgtacgtctccagaggcagtctgatgcaaggcattcagatgactattctcttaataagactctccgtgcccaacttagagg

SEQ ID NO: 9198 - DNA, 315 bp, Glycine max
cgcgaaaccctctttctaaacaatagtatcttttcgcttcaaatttcatttagatccaaaatttctgaatcagtgaagaatcttagattctgtgggaaaagcttctcaatctttgacgaagataaacaacaatgtcttcacttgcggctgctagagcagacaacttttactatcccccagaatgggaaccgaatcagggttcgctgaacaagtttcatggtcaacatgccttgcgagagagggcgagaaaattagatcagggtatcctgattataaggtttgagatgccttttaatatatggtgtggaggatgca

SEQ ID NO: 9199 - DNA, 585 bp, Glycine max
ggcttgaagggaattgtgagagcgtgtgccttttgcattctctctctaaatccaacgtttggagtgtttctctctcactcctctctgcaagatccgcaccccaaaccctagcaaacccctaccacagagggagctgtgaagaacaacaacacgcaccgtcaccaccaccctcgctcgcttcttctgatccagttggactagcttttggaaacaattacaatggcaacttcagagcagcaagtccctccccaaactcctgcagctgatattgttggcaatgcttttgtggaaattacggaaatggccgaagctatggccgtggtgactttaatggcaggggagaatatggctataggaatggcaatcggggagggttttcaagaggtgatgggtatcagagaaatgatcatatgggtaccggcggtggtcgcatgaatcgagcaggtgggtcggctgttaatccagcagtcaaaaccgcgggggttcgagttcctgcctctgcttgaggaactagctcaaggagtttggctggctgattgaaagtatatttcaatttgctgtgaatcaagcagttggagaattaag

SEQ ID NO: 9200 - DNA, 1565 bp, Glycine max
gaaggaattgtgagagcgtgtgctttttgcgttctctctctaaatccaacgtttggagtgtttctctctcactcctctctgcaagatccgcaccccaaaccctagcaaacccctaccacagagggagctgtgaagaacaacaacacgcaccgtcaccaccaccctcgctcgcttcttctgatccagttcgactagcttttggaaacaattacaatggcaacttcagagcagcaagtccctccccaaactcctgcagctgatattgttggcaatgcttttgtggatcaatactaccatatgttgcatgaaagccctgagcttgtgcataggttttaccaagatgtcagtaagcttggccgtcctgagcagaatggcataatgggtattacaaccacaatgtttgatattaacaagaagatactatcattgggttatggcgaactcagtgcagagattgtatctgtggatgcacaagaatcttatggtgggggagtcattgtcttggtcactgggtttatgataggaaaggacgacattaagcagaaatttactcaatgtttcttccttgctcctcaagagaaaggctactttgttttgaatgatgtttttagatatgttgatgaaaatggaatccaagggtctgctcatgatattggatctcctgcccctccggacactgtttccaatccttctgtgctggagacacaagtttccgagcaaatatctgtgacagctgaggatggtgatgaagaggcagtctacaatccagaaaatggtcaagctgcaattgaagaagaggaagcacctgtacctgaggttcttgatgaaattcctgatgattctcagatggtagctggattggcatctcaaattgaagaagttccaaagaagtcttatgcttatattgtgaaggtcatgaaagagggtgctgcgccctcttccactgtgacacctgtttctgtgaaatctgcccacaagagccaagaacagcagggtattgctgcacctccaccatctagcatatcagagacaaatggttctgttataaatactaatgaagttggaaacattcaagaagctgaagccgagggctattctatttatgtgaaaggtctgccaccaactgctacgcctgcagtcttggagaatgagtttaagaagtttggacctattaagagtggtggcatccaagttaggagccaaaagggattttcctatggctttgtggagtttgaagtggcaagtgctgcgcaaagtgcacttgaggcttctccaatttcgatcaatggccgtctcgtcgttgtagaagagaagagatcaactaatcgaggtagaggacgtttctcatctggcagggctcctagcttcaggggtgaaggtgcaagagggcgtggaaattatggaaatggccgaacctatggccgtggtggtgactttaatggcaggggagaatatggttataggaatggcaatcggggagggttttctagccgtggaggtgatgggtatcagagaaatgatcatatgggtaccggcggtggccgcatgaatcgagcaggtgggtc

SEQ ID NO: 9201 - DNA, 610 bp, Glycine max
aagctcggaattcggttcgagcaacctaattcgtcattgccgtcgcacggtgagactcgcaccaacaccagcacttcaaagaagacagaatcaagcagaacttggagttggagagagagaattccgaccctaattgtaaaatggaggacgagacagagactatggtggagaagagggagataatcaacaacgtaatgtgtcttttgacagaccctgatggaactcctttgggtgctcctatgtacctacctcagaatgctggtcctcaacacctcatccagattgttaataagcttctaaacaatgaggagaaattgccgtattctttctatatatcagatgaggagctcctcgtgccacttgaaacatacttgttgaaaaacaaagcctcggtggagaaggcattgcctatagtttgtcaacctcaagctattttccggattcgtcctgtgaatcgctgtacggcaactatttctggtcatgctgaagctgtactaagtgttgccttcagtcctgatgggcgacaactggcaagtggttctggtgatactgctgttcgattttgggacttgaccactcagacaccattgtacacttgcacaggacacaa

SEQ ID NO: 9202 - DNA, 387 bp, Glycine max
cgataccctcacccgcgcgcctctccttcccgcagcctccattaccggcgcatcctgcgtctccggcgccattgaaaccctaataatctgctaaagcatcaaactcagtcgtcgttgctgtcgaactcgaaccagtgagactcgcacgagcgaacaccagtgctgcaaagaagtgagaagcaacacccactagagaaaaaaaggaaaaaccctaattgtaaaatggaggctgagacagagactatggtggagaagagggagataatcaacaatgtgatgtgccttttgacagacccagatggaactccttttggtgctcctatgtacctaccttagaatgctggtcctcaacacctcaatcagattgttaataagcttctaaacaat

SEQ ID NO: 9203 - DNA, 422 bp, Glycine max
gggtgctaccttaattatagctctaacaccacacctctgcctctggatcaagcaccttcacagtcaccactgaaacaaaaacaccataataccaaaaaaaaaaaacagaaagaagaaagatctcttatctttctttttaactacccttcattcaaatccttttttttcttttccatgtctcgcactcccaactacgagttccaggaatggtggaacaagcagcgcgaaaagaacaccaataccaacaacctcgaccccctcgacgacagccttaaaaaactcgagtacggccactcctctccgccgccgttcacggcgctagacgtggaactcctccactgccgcgaactccgccacctccgaccacgaccgctccggcaggaaagaacgctcccgaagcgcacggcagctcacatgggtct

SEQ ID NO: 9204 - DNA, 625 bp, Glycine max
cccaattgtatggccgggcccatatacattatacagagtgagcccgattgcataaacgaagaccgtgcgtgcgtgtttggttaaagttaaacccttccattgcagttgttcgtctttgaaggttgttgccggaaatgaattctatggcggtgagacttgtgaagcatctccaactctctgcaccgacctcatcttcattcggtggtgtgccgagaagtggagcgtcatggtattcgacctctctatctggaggtgaatatcagccttcacaagataatgttgcacctaagaatgaagcattggatggtgaacttgatgattttcttggcgaaaaggccgagctacagttgcaaggtgtggatcccaagaagggttggggatttcgtggcgtgcacaaggcaattatttgtggaaaagttggccaagcccctgtacagaaaatactgaggaatggtagaaatttaaccatctttacagttgggacagggggcatgtttgaccagagaattcaaggaccaaaggatttgccaaaacctgctcaatggcataggattgctgtgcataatgatatactgggggcctatgcagtacagaaactctttaaaaactcttcagtttatgttga

SEQ ID NO: 9205 - DNA, 396 bp, Glycine max
gcgattagaaatatttataaagacggaggtgttggcgctttttatgctggtatctcaccaactctggttggcatgcttccatacagtccatgtttttatttcatgtatgatccaataaaggaatcttactgccggaccaaaagtaagaaatctctaagccgtccagagatgcttttgattggagctcttgcaggttttactgccagtacaattagcttccccttggaggtagcaaggaagcgcctgatggtgggtgctttgcaaggtaagtgcccgccaaacatggcagcggcactttcagaagttattagagaagaaagtctgaagggtctctacagaggatggggtgcaagctgtttgaaggtcactgcatcctctggtatcacctggatgttt

SEQ ID NO: 9206 - DNA, 470 bp, Glycine max
cccacgcgtccgattttttgtttcgatgctctctctcgcgaaacggcttcaggttcagcccctgacgacgccgtttctcctcgggcagctccggtgggcccgaacgcggccgaagtcaccgccggtggcgctgaagagggcggaggagcggtcggagtggtgggcggtggacggcgaagtgcacgagatcggcgatctcgtgccgctacgtgagcgcttcgtgattccccgagagaacatccccaacaagcgccgcaagcagctcagagaacagttcatgcgccgaacgcgcctcgttcttaaggaatccgagcatgatccttggtgcaaaaagtatatggagctgtataatgaactaagagaaaactgggagaggctttattgggatgagggttacactaaaaagcttgctcaggatcatgcaaactatgagtctgctgaagatgatgatggagatttctccccataca

SEQ ID NO: 9207 - DNA, 556 bp, Glycine max
caagaacaagaaggatttacccacaggtgcagtggtagaggcaaaacctcaactggttgggattcatgagcgagtaagaagtgacatcaatggtagccaaccaccaacatcagctgcctcgggcacatcagaaggaggcaagcgggtgccgactgcaacaaatcctaatgctgaagatgctgcagaccttttaagaatgtgtttgcagtgtgggattcccaagacctactccaatgcacgcggaatggtctgccctgtatgtggtgatcgccctccaaaggatgatacaagcgcagaatccaagaagaaaggatcaactgtcaaagataaggaaaaatctaaaaggatgaagggtcaatcatcccatgcaacctggaaaagtgaaacagagatgcatctaaggcaacagtttgattagcattatgtgttcttgtatgttaccagttacctggtagaatgtgatgtgtttaggactatgctgttaaatcaacaaattaacttcgtcgttatcaatgccagcaggtacaagttgctacatatggctctaaaattatgg

SEQ ID NO: 9208 - DNA, 487 bp, Glycine max
ggaatgataaacttgtaaatcattagcgatttcacacaataatttctaaatgaacagaaatcttaaataaatcactacaaatacgttccatttccatacaagttaaaccagttcttttgattcaaacacgggaagggtgaaaagttattaattagctattgtttcttgcttatcttgtctaaattcgacctattcctatgtgcagtgtgatccagaagaaccaggatcttgcgactccggatgcaatggtggattgatgaatagtgcttttgagtacagcctgaaatctggtggggtcatgcgcgaggaagactacccttattctggtgctgacagcggaacctgcacattcgaccacccgagcattgcagcatcagtggcaaacttcagtgtcgtctcactagatgaagaccagattgctgccaatcttgtgaaaaatggccctcttgcagtggccatcaatgcagcatatatgcagacatatatc

SEQ ID NO: 9209 - DNA, 395 bp, Glycine max
gacacacaacaaagttctcattttttctcattcctttccgaccatggcatcaccggcatccaacccccaaagcgccgagactaagaaaagccgtggccgccaaagggttgacattaagaaaatgagcaacgaggccaacctccaagtcacgttctctaagcgccgcagcgggcttttcaagaaagccagtgagctttgcactctctgcggcgctgaagtggctctggtggtgttctcgccggggcagaaggtgttctccttcggccaccccagcgtggatggcgtgattgagcgctatctcactggggtcgcaccgccggaggcggacaacatgaattacatcgatgtgcaccgcatggccaaagtggttgaccttaacgcccagctgactcata

SEQ ID NO: 9210 - DNA, 530 bp, Glycine max
gaccgtagcagatctcattcattcttttcttttctttccattcaatcacgccctctcttcccttcccttggcgcaatgaattccaacttcaatttcgatttcgatctcggcatcggatccaaccgtcccaaatcccttaacgaccagaaaaaccccaaaccaactccctattcttcctattccaccaccaccaccgcttcctattcctcctcccaacccaataatctacctgcatggacccaccaaccctcccccactcagaccaccgccttgcccggtggccccccctccatggtcggagacatcttcggcaagagctggggaacccctcaaccttcttctgcttccaaacacatcgggatcctcaataagaaccctaatcttttcggagatttggtaagttctgcttagggccatggttccaagaccaacgttcctcttaaaaatgctcccatgctttcgcccaataaatccagcttttcaatgggaaatatggctgattctttgcccaaaactggttccacgccgca

SEQ ID NO: 9211 - DNA, 458 bp, Glycine max
cagcaacctgggcagggcacctttatgaaactcaacattttaaaaaccgttaatttacagatttagcatatgccagattagcgtccgattttccaatccaccttcccttttaacgataccaaaaatagcgttctggagtccaagatctcattcattgtcctttccttcccttcccttggcccaattgagaaatgaattccaacttcaatttcgatttcgatcgcggcatcggatccaaccgtcccaaatctcttaacgaccagaaaaaccccaaaccaacttcctcctattcctctgcccaacccgcatggacccaccgacccgcccccactcagaccaccgccttgcccggtgggcccccctccatggtcggagacatcttcggcaagagttggggaacccctcaaccttcttccgcttccaaaaacatcgggatcgttaataagaaccctaacctt

SEQ ID NO: 9212 - DNA, 667 bp, Glycine max
tcgcccacgcgtccggctgttgttgttgttcatggtgttaagtgatagataacagaagggagagcagaacctagaaatcgcgttggttcgttggtttatgacttggagtgaaaccctaactaatattgaagatgagcattcggaggttgagtgccgaagaatcgcaaacactttactctctcctcagagcagagcaacgttcgctccatgagatcctctcccaattcaacgctgcaatcccttccacccgccatttcactctctcttcctatctcctcatcctattgcaggacaataaggtgctcagcaccactgagcggttaatagcttttgctctgctagttgaggcttattcatcccagaaaccggcttcaaatcccttcataagctttattgtaaatgcttcctgtaatgaagggtccgaaaaagttgagagggcatttattctacagctactaggtctcgatagctccaacagtgggaaagagtttcttaaacagtctgcatcagattatgtgaaaggatttgatcagtcattacatgagttccctcctctagatcagttgaagcagcagttttctgataaagttcatctagaaccataccgctgcttgtttaaagatggctctgtaaaaaatgtagtcccagacccagatgttcccccaag

SEQ ID NO: 9213 - DNA, 453 bp, Glycine max
  unsure (1)..(453): unsure at all n locations
tgataacagaagggagaagcaaaacctagaaatcgcgctcgttggttttgacttggagtgagtgggtgaaaccgaaaccctaactaatattgaagaagaagatgagcattcgaaggttgagtggcgaagaatcgcaaacactttactctctcctcagagcagagcagcgtccactccatgagatcctctcccaattcaactccgcaatcccttcctctcgccatttcactctctcttcctatctcctcatcctattgcaggacaataaggtgctcagcaccactgagcggttaatagcttttgctctgctagttgaggcttattcatcccagaaaccggcttcaaatcccttcataagctttattgtaaatgcttcctgtaatgaagggtcagaaaaagttgagagggcatntattctacagctactaggtctcaatagctcccacagtggga

SEQ ID NO: 9214 - DNA, 305 bp, Glycine max
gatgagtcatgagatacacttttcagttcatgaaacacaacagtaatcctcaaattctctctctattcaaagagaaaaaatcatcgtccacttgcaaccaacacaatttggtatcaaaatgggcctgtcaagtctcccagcaccatctgaaggagtgttatgtgtgcttcttgtaaacactgccttgtctatatccatattcaaaggcattgttaggacaattctacaaattgtcggtatccgcgtttcgtcgttgtctccttcaccagacatctcccgaaacccacctgagccattagaattca

SEQ ID NO: 9215 - DNA, 265 bp, Glycine max
cacttttcagttcatgaaacacaacagtaatcctcaaattctctctctgtaaataagagtttccattgatgaagttgacatagcaatttgttcattctgctggtttcagattcaaagagaaaaaatcatcatccacttgcaaccaacacaatttggtatcaaaatgggcctgtcaagtctcccagcaccatctgaaggagtgttatgtgtgcttcttgtaaacacagccatgtctatatccatattcaaaggcattgttaggaca

SEQ ID NO: 9216 - DNA, 805 bp, Glycine max
gaggaccaaacacaacatataatgaaatgaaataacccaatctgttctgttccaatttcctaacttgaaagccaaaacgaaacaaacggggttttggaaatggaacgagaaaatctaaactgggaaaagaaatgaaagcttaagcctttgagtctgaggtgaggtgactcaccgagtcgtggctcgctagctttttaataacattttcgtatatgtcaagttgaagttttttttttttttttttaaaaaaggttttaaaaaaaccattgtttgactcaaaaagcagagagaagagtggggactggagaatgaatagggagtgttggcgaagtagatctgaaaggtgaagaatttgagtaggtaaaacccaaagttttcaactttgaatcaaagggtcatcaaatgctttaacgttttggttttttctgccttccgacactctaagaaaatgccgcacccttctttccacaagcttcttctaccctccactgtccaacccaaccaacaactgaggcttccggataattttatgaggaaatatgggggtgaactctctccaattgttaccctctctgttcctgatggtagtgtctggcatgtaggattgaaaaaagcagacaacaagtattgtttccttgatggttggaaagagtttgttcaacgctattccattggtgttggatacttgttggtattcagatacgaaggaaagtcatctttcaatgtccatatttttaatttggctacttctgagataaactatcaatcagtcacacgaagcagtaatgaagggcttcacttcaca

SEQ ID NO: 9217 - DNA, 454 bp, Glycine max
gaagcaaggtatatagcttgagtgaagcatgtgaattggcatgggattttgaagtgcaagatggggtccctctcaaatggtgggggtaaaatgtcatgttgttatgttgatgatggaatgccgtatgtggaaaaagcaagcaagctggatggagtaggtcacggccaacgaagatagagatgatttggattcctcaattttggaagagaaatcgaccagaccattgatgtgcctgaattgtgtttacttatttgtttgtaccctggtgtttataaatctgacaaggttgatcctgaagtctaatcaaaattcgattggttttttcagaaggatgtggtggggaaaaaaagatggaggaaaggaagggaaagaaccatcttttcttcttttggggatgtaatggagtttacctacatgttctttctcctcatcttttctttttaggtattttaat

SEQ ID NO: 9218 - DNA, 1059 bp, Glycine max
acgagctggtgccgaattcggcacgaggagtggagattcagcaccgcgtggtagtgtagcccagatctaaactccgttggtgaattaaatgtttttttattcaatacaaaatttgctacgtcttatcaatttgtatattaggtgtggaatccaatccatgcatccaaattgatagcacgtggattgattacaagatgccaacgtctaaacctcttttccccaaagagaagaaaacataatagatatctcattctcatcttcatctgcatctgcccatgtttcttgtttctgtctgcaattttcaattccaactctctctcacatgcaattctccatccaacaaaagtttctcatcatttctgtttcccataagcaattaattaaaatactgaatttggtataatttctttctcaaatataattagttttacaattattttatttctttttccttggattgtagccggggtttcttgttgtgagagaaaaacctttattctctgttttgggaacatctggggtctcaatttagtggaagttaaattttgaaactttggacgaagatggcgaattgggtccaaaagaagatcactgatccccttctttccattatccgaagaggagctgaaccaaaccacttggctttctctgctgctcttggtgttacattgggactatttcctatatgtggtgtcactgtgttcctctgtggaatggctattgcattgcttggatcattttgccatgctccaactgtgatgcttgcaaactttattgctactccaatagagttgagtctggttgtaccctttctacgctttggtgaggttatctctggtggatctcatttccctttaacatctgatgctttaaagaaagttcttactggccaagcttcacgtgaagtcttattaagtgttgcccatgcgttattagggtggctggttgcatcaccatttattttgggaactctatacatagttcttttaccatgcttcaaaattctagttcataaattctcaagtgttcctttaagtccaaagaagccgctcaatccac

SEQ ID NO: 9219 - DNA, 570 bp, Glycine max
atagggttttggagttgggtagggtgaattgcaatttcaattaattagaattcaacgtttgcaaattgcatattgttcttctcttcctctcttcctctgactccatgtcgtcgataacgggcatccaggggcaacctcttgaggttacggtggtttcgtgctccaagttgaaggacacagaatggatttcaagacaagatccgtacgtttgtgttgagtatggcagcacaaagttccgaaccagaacctgcacagacggcggaaaaaacccggtattccaagagaagttcatctttcccctcattgaaggccttcgggagctcaatgtccttgtttggaacagcaatactctcaccttggacgattttataggaagcggaaagattcaattgcacaaggttctctctcaaggcttcgatgactctgcttggccacttcagaccaaaacctggcagataccgctggggaagtcaaagtcatattgcattacgcaattgccaatcatcaaaggcataaatcagtgtcaagccatgctccatcagcaccaccgtatgtggtaacaacaactcc

SEQ ID NO: 9220 - DNA, 750 bp, Glycine max
  unsure (1)..(750): unsure at all n locations
accggaaattcccgggtcgaccaacgcggtccgacggcttggaaaagaccaccaaaaggggggggagggggaatttaaaagaaagaaaaaaagaggttggtggtaaaacaaaagaatattattgaaacataaattttggactttctttgcatttggcagccacccccacaacgaaataaaacaaaacaagcacacaaccagagacacacacgcatagagagagacacgcatagagagagagagagagagaagcagaggaagaaggagaagaaggagatcttgagagatcaggtcgcaactcgtcatggggagagaagttacaggaatgcaagttgtggacaagaagccaaatggtgttataccagcttcaaatggtagttctaatgataaagtatgcttttctcctaaaatggaagcagctaaggttcaggcgaaggatcacaaggtaaatgaatgtaccaaaactaactcttttgaggagaaaagccatgagaagatggatggtttgagtgccaaaacaacaaactgtaatactgacttgcctgaggaggagattgagatttctgaagtgcagaaaatgggtgacagtaaaagttaagctcaccatctgcaagaaaagagcatactagtcancttgttacacatccatctgatcttgttactgaaagcatggttcccacatacagattgntgatgctgagctgatgcactgtctgactatcacaacacttaacatgcttactatctata

SEQ ID NO: 9221 - DNA, 577 bp, Glycine max
gtttttatttttatttttattttttcacctattgttatttcttcggttgatttcttgcattggttgggttcatgtggtttcatttctcttaaaaagctttgattttccgcgtcatggggagagaagttacaggaatgcaaggggtggacgggaagccaaatggcgttataccagcttcaaatggtagttctaatgataaagtgtgcttttctcctaaaatggacagcagctaaggttcaggcgaaggatcacgaggtaaatgaatgtaccaaagctaactcttttgtggagaaaagccatgacaagatggatggtttgagtgccaaagcaacaaactgtaatactggcttgcctgaggaggagatcgagatttctgaagtgcagaaaatgggtgacagtaaaaagttaagcccgcctgctgcaagaaaagagcatactagacaccttgctacacatccatctgaactgggtactgaaaagcatggttcccacatacagattgttgatgctgaagctgatgcaactggtctgaacttatcaccaaacactataaacatgctcttacctatctcatcaa

SEQ ID NO: 9222 - DNA, 398 bp, Glycine max
ggagagtgagaatatttttgaaagaaaaagaagggttttgataaagcaaaagaatattattgaaacataaattttggactttctttgcatttggcacccaccccacaacgaaataaaacaaaacaagcacacaaccagagacacgcacacgcatatagagagagagagagagagagagaagaagaagaaggaagcagaggaagaagaaggaggagatcttgagagatcaggtcgcaactgatcatggggagagaagttacaggaatgcaagttgtggacaagaagccaaatggcgtaataccagcttcaaatggtagttctaatgataaagtgtgcatttctcctaaaaggacagcagctaaggttcaggcgaaggatcacgaggtaaatgaatgtac

SEQ ID NO: 9223 - DNA, 387 bp, Glycine max
gattctgagtaatcacaaacacaactaagaagccaatccaaacgaatctgcggtgatccaaagaacctccactccccaccatcacatgtcacgtcgcccccacgcagcgccgccgccgccgccgcggtcactccacaagcaacagtcgtggtcgccggacatgctccgcgacgaggcgtggcagcggcggaaggacaacaaccaccccgtgaaccgccgccagcaccggctgagcaagagcctctcggaggacgacttggacgaactgaaggcgtgcttcgagctcgggttcgggttcgattcgcccgaaatcgacccgaaactgtcgaacacaatccccgctttggagttgtaccatgccgttaacaaacagttacaacaccacag

SEQ ID NO: 9224 - DNA, 1062 bp, Glycine max
caagaacatgctctagctgttgaacacctggcaccaagcttagctgctcttagaatggagctctgccccggatacatgagtgatggtaacttttggaagatatactttgttctcgtgcaccctagacttagcaaaactgatgctgctattttatccactccacaaataatggaagctagagcaatgttaactctggctttagacaaaagaagtaaggaaaagaaagaatctgacttatctgcaggagggaatgttccctcaaaagaggaggaacagcatctctttgtgccaagcactgttcaacttgaatcagcacctctccagacatctgctgctgaagctgccccatctgtggttgtttctaatgttgagatggagaaacatgccactcaaagtattgttccagaggttattgacaagtctgtggttaaagaagcaccagtaatttcatctgcagaacaatcatcatctggttcaaccaatagatttttggatgaatcctatgacgatgatgctgatgattggttgaaagaagaggatacttctgaaatggttggtcccagtggaacttcagttcacaccgggaatgacgaggatgtgtcattcagtgatcttgaggaggatgatggtgatgtacatgaaagttataaaaaaactagatcaggctctgattcttcaacaaaagactctcgagattgggttcagttaggtagaagttcgcctaactctgataaggatttaaactctgttgaaggcaaacatgttggctctgagcattcaagtgctcgtaattctatgaccaaggattccaatgattggcttaatgttgatgacattgatgtaatatgactatgccttggaatatgtcccagaggtaagtttttttttatttttaaatatgattctcttatattttgtgaatatctgcatatagtcgtgtactctacgattgacattctgaagaatgcgtttctgtaaataaaaccagtctccactgggcattgtgctatgtacggttatttattgcaccgtacataaactaaatcttctatttgatatctg

SEQ ID NO: 9225 - DNA, 714 bp, Glycine max
ggacgagagcagcaccgaactcgtggaataaatcacggcaccgtcccaccccgcgaaaccctaattgttcacacctaaaccctttccttcactgttttctttttccccttttctttttgtttgtttttcttcacttccaaggctccaccttctccaaatcaaaacagaggcttttttgttttgttttcttattctgctgtttatttattctccttgtcgaggaaaggacccaccccatcacccatgtaacaacaacaacaatccatcatcatctcctgggaacctgcgattcgaggtttccgaggttaatcgggtactccgagaaaaagaagaacaagggtctttttatttatttatttttcattttaaaaattgaatttttgggaggttgggtatggaagcagcacgagtgggtgtggcggttgaaggtgggcatggaaacaaatcaaacaatgtgaaaatgttgcagcagccgaagaatcagcaagcgcaaatgggaaccgtgtctcagcttctagcgggtggattagccggtgctttcgccaagacctgcactgctccacttgcacgcctcacaatcctttttcagctgcatggtatgcattttgatgtggcggcattgagcaagcctagcatttggggtgaggcttcacgtattgtcaatgaagaaggatttagagcattttggaaaggcaatttggtgaccatagccca

SEQ ID NO: 9226 - DNA, 501 bp, Glycine max
  unsure (1)..(501): unsure at all n locations
gactctaagccagaccagaacccctactctgtggccgggtcttcttcgttgggattaaggttgcaggtaatgctatggcgaacacccatgaacccaatctcatagacttctcctccgtcggtgaaccctcgaaggttctcatggacaactatgtgacgatactcacagaatttgtggcctccaacgatcaaggaaatcgatgaagtctcacttcaaggttcactaggtcctgatggcctctacatatttccacatcttgcacccaaagactatgcctcaaccacctgcttactttcaaattctagtgttgattatgttattacttcttcttctagttgttctaaaacaaagctactatttcattgtaaatccagttcttgatgttaaaacaacacctagtactagctctcanactatatngnaccttagaatttgtcatcctgatgctaatgtactaacgcttatgcttaatcattgtaaatatacccatagttaataaaa

SEQ ID NO: 9227 - DNA, 1090 bp, Glycine max
acccaagcgctcaatacaggcgtcagcaacgaacgagtgatcggtgaacaagcaaaattaagcacaaaagcccaaccctctctctcgctgctggtctcccccatttggcattcgcagatcgaatacgagtaatttcactgaatcttattgaagatgtttctcacaaggactgagtatgaccgaggagtcaacaccttttctcctgaaggccgtttatttcaggttgaatatgcaatcgaagccatcaagctgggatcaactgcgattgggttgaagacgaaagagggtgttgtccttgcagttgaaaagcgcatcacttcgccgctcctggagccaagtagtgttgagaaaattatggaaattgatgagcacataggttgtgcaatgagtggattgattgctgatgctcgaacacttgttgagcatgcacgggttgaaactcagaatcataggttctcctatggtgaaccaatgactgttgagtccacaacccaagctctttgtgatctagccttgcgttttggtgaaggtgatgaagagtccatgtcccgaccatttggagtatctctcctcattgctggtcatgatgagaatggacctagcttatactacactgatccatctggcacattttggcaatgcaatggaaaagctattggttcagggtcagaaggtgcagacagttctctacaagaacaattcaacaaggacctaactcttcaagaagctgagactattgctttatccattttgaagcaagttatggaagagaaggtcactcccaacaacgtcgacattgccaagagtggctccaacatatcatctttataccccctctgaggtggaagctgtgataagtcgtctatgattttctttttgtgactttctctattcaacatttgtgtttcctatcattcctgcctgacgtctaattattgagtattatgcggaaaccttttttggtgggtgatgtttacatgtgctacacttgtggccaagttgtacactgtacgagattctggtgtcatatttgctgcattcggtctagttgaaattgagtactataagggtttcaatgtttttgggaaaa

SEQ ID NO: 9228 - DNA, 591 bp, Glycine max
  unsure (1)..(591): unsure at all n locations
nnnnnnnnnnnnnnnnnnnnnnnnnnnnnnnnnngntggaagaaaaatcagtgaagttacctccacctataataactccataagataggaataaaagcaccctagaagttgtcctcaaggtagccatttacataaaactactagcaaataaatgccaaggtatctatatacagcgctaggatttcaaacagaaaggtagatggcataggaataagaaactttggaaacatatcttatctcagcagagacatatggctaaaagaaagatttgagaaagcaaatggggtgtgaaatccaaaaagaataattccttccttccaaaggcagcaaagcaattttatgttgttagacctgtacgcctgtacgtataataaggtgtccttcaaagtcaatttctgtctacaaactctgctggcaagtttagatcaaaaaaaccacctcctccaagaccctcttttctaggacgcttacgagaagagcatccactatcctctgaactccctgatccagatggtcgatcaagttcttctgttacaccagtattattgactttgttgttccagcaaactgaaagttctgatcggctcgagc

SEQ ID NO: 9229 - DNA, 423 bp, Glycine max
cccacgcgtccgcccacgcgtacgcacccaaacaaaaaaacaaacgcacgcttctcattctctctctactcgttcagaagatgtttctcacaaggactgagtatgaccgaggagtcaacaccttttctcccgaaggccgtttgtttcaggttgagtatgcaatcgaagccatcaagctgggatcaactgcgattgggttgaagaccaaagaaggatgttgtccttgcagttgaaaagcgcatcacatcgccgctcctggagcctagtagtgttgagaaaattatggaaattgatgagcacatcggttgtgcaatgagtgggttgattgcagatgctcgaacacttgttgagcatgcacgggtggaaactcagaatcataaggttctcctatggtgagccgatgactgttgagtccaccaccca

SEQ ID NO: 9230 - DNA, 552 bp, Glycine max
ctcaatttacgtctatttatttttttgttagttttgagaaggccccttgaacaagcaaaattaagcacaaaagcccaaccctctctctcgctgttggtctctcctatttggcattcgcagatcgattacgaagttattccactgaatcttatagaagatgtttctcacaaggactgagtatgaccgaggagtcaacaccttttctcctgaaggccgtttatttcaggttgaatatgcaatcgaagccatcaagctgggatcaactgccattgggttgaagaccaaagagggatgttgtcctcgcagttgaaaagcgcatcacttcgccggtcctggagcctagttgtgttgggaaaattatggcaaccgctgagcacatcgcgtgtgcactgagtgggattgatcgctgatgctcgaacacttgttgagcatgcaccggtggaaactcagaatcacaagttttgtgctgtcaaccttattgcagatattaaagagctgattagcttaagaccgatatgttttggtttattggggacaaaatcatatggtctc

SEQ ID NO: 9231 - DNA, 630 bp, Glycine max
ccctcgcgtccgcccacgcgtccgccggcaagatgagtttgttaaaaagcaggattggaagaatcctttgagtgtgggaaaatgagtatgtacggtagggatccgtggggaggcccgctggagattcacgccaccgactccgccacggacgacgagcgcagccggaatctccaggagctggaccgaggcgctttagacgagacccaacagagctggctcttgggcgccggagaacagaaaaagaacaagaaaacctacgtagaccttggctgcatcatcgtcagccgcaagctcttcatctggaccctcggcaccctcgccgtcttcgccttcctctccgccttcatcactctcatcgtcaaaaccgtcccccgccaccaccacaagcccccccctcccgacaactacaccatcgccctccacaaggccctcctcttcttcaacgcccagaaatccggaaagctccctcgccacaacaatgtttcctggagaggcaactcccggttgcaggacggcaagggtgacggcgtgccgcccgtcattaaggatctggtgggcggttactacgacgccggcgacgccataaaattcaacttccccatgtccttctccatgaccatgctgagctgg

SEQ ID NO: 9232 - DNA, 321 bp, Glycine max
gttatgtactagtaaatagtaattttattgtaaactatccagtacctgagagagagtagcatctgagtcttgtgtttagcgtaggggattgaaaatgagtatgtacggtagggatccgtggggagggccgttggagatccacgccacagactccgccaccgacgacgagcgcagcggaatctccaggagctggaccgaggcgctttagacgagacacaacagagctggctcttgggccccggagaacagaacaagaagaagacaaggtacgtagatcttggctgcatcatcgtcagcacgcagctcttcatctggacactc

SEQ ID NO: 9233 - DNA, 1075 bp, Glycine max
tttcgtccggtgatacagagagagagagagagttattatggtgactatggaagagaggccaaggagcccagaggcgaagctggggttgcgagtggaggatctatgggacattcaggaaccacagctaagtcctgatgagaagttcaatgcttgctttgaaagcatacctgtctctgccttccctccacctccttcaaatcaagaaattgagataaaatcagatgccaccctagccgaggcagtaaaaatacttgcagaacacaacattcttagtgcacctgtggtggacgtagatgcacccgatgatgccagttggattgacagatatataggaatagttgagtttgctggaattgttgtttggattctgcatcagtctgaacccacatctcctaggagtccatccagtggagctgctaatacggctgcagttactggagtagcttatgaagcattaggccttgaatctgctgcgacaacttcaggcaattttttcgaggatctgacttcttctcagctatataagaataccaaggttcgtgacatttcagggtcattccgctgggctcccatttctcgctctggagagatcaaactcatttttgaccatgcttttgctgctttccaagtacaagatgaagagtattcctgtggtggacttgggtgcaggtcgaattgacaacattattacacagtcttctgtaattcacatgttggcagaatgtgctggtcttcagtggtttgagagttggggaaccaagaaactgtctgaagttggtcttcccatggtgacaccaaatcatattatcaaggtttacgaggatgaaccagtgcttcaagcatttaaactgatgaggaaaaagaggattggagggttgccagtgatggacaggggtagcagcacggcaattggtaacataagcctgaaagatgttcaattcctcctaactgctcctgaaatctaccatgattatagatctattacagcaaaagacttcctgacagccattagaagctacttagagaagcatgaaggggcctttccaatgtcaagtgacctgattacatgcaataa

SEQ ID NO: 9234 - DNA, 857 bp, Glycine max
tattatgctcctttggcagtgagacatttttgagtgattatcaaatcaaagaactagccagtgggttagaactcactggcttacctttcattttggttctgaatttcccatccaatctctctgccaaagctgagttggagagagcattgccaaaagggtatttggaaagagtgaagaataggggagtggtgcacagtggttggtttcagcagcagcttgtgctgaaacactcaagtgtggggtgctatgtatgccatggtggctctagttcagtgattgaagctatggtcaatgagtgtcaactggtgctgttgcctttcaagggtgaccagtttttcaattctaaactcattgccaatgatttaaaggcaggggtagaggtgaataggagtgatgaagatgggttctttcacaaagaggatatactggaggcattgaaaactgtcatgttggaggataacaaagagcaagggaagcaaataagagaaaaccacatgcaacggagcaagtttttatcaaataaggaaattcagaacaaattcatcacagatctggttgcccagttaaagtctatggcttagtcttgtctcttccaatggaaaataaagtctaccaagactagaaagtataaactatagttcaaaatgatcatattatcatatatcaattgagatatgcgtggtcagtctcgttgttcttgtgattttgctttcccgttgtaggttttattctgtgtctcctttctcccgatcaattaatgcagttaggagattcaccttaaaaaagctaaaaattgcttttgtaacttgaagttattgtattcctactcattttggtcaagaccaagaagttgtctt

SEQ ID NO: 9235 - DNA, 469 bp, Glycine max
aaacaaggtcagaaatggaaatgttgataaaagggataacaagacgaagaggaagcgtgtccactccagaaacaggacaggggaatggcaaccatgtcccttacatttgcatttgcacttccttcaatcccctctctcagccaatgccatggccgtgctctttacgtcaagcccctccactgcactcccattcaacaacgccacgttggtgcagaggcaggtattgtttgtgagccttgcaatggaacggggtggttagtttgtgacttttgtaatggccaaaagaccaacgtcaaagccgaaaacaataaacgtatctaccgtagatgtccctcctgcaaagccgttggatatgtcttgtgttcaaagtgcaaggtcttcaaatgcgtcacttttcctaatttcaacgactctgagaactgaattcatcatcaactttcttttttcacattttcaatgccaaaattca

SEQ ID NO: 9236 - DNA, 447 bp, Glycine max
gttgaggttatggacatggtccagaatgttgggggtggtaagaggtcaacgtatgaccctgatgagcttgaagaagaacagcgagagcgacagaggaagaataaaattaatgtagaattccaaacctttgtgaatcgggtgaatgatctctggggacaacctcaattcaatggccttgacctggagtttgatcaacctcttagagagcttggcttccctggtgtgcctcataaatcttcagtatttatcgtacctacttctgcctgccttgttgaactgatagagactcctttccttgttgtcacgcttagtgagattgagattgttaatcttgagagagttggacttgggcagaaaaactttgatatgacagtagtatttaaggacttcaagagggatgtcctcaggattgattctatcccttctacatcactggatggcatcaag

SEQ ID NO: 9237 - DNA, 510 bp, Glycine max
  unsure (1)..(510): unsure at all n locations
gatctttatctggaatcatacacatggctagactccagtattactatcttcagtctgcacccttccgttttagccaaaattctgagagtttagtgactcatggctgccactatgatcaagttattattttaccttgccattttggttatcttgcttaccaattcacagggtgtgagttcaagttcaactagtgagcctacaatttcagcttctcctgctgttttgccttatgcgactgccccagatatttcctcatttttccccactccaagagccaatcaaccaatgagttctggtgctccttttggggccgacgcaccagcaccggcacccagttcaggagagtttgagggcaagatctcctctgcttcagctaggttgaattgtgcaggtgcccattgtggtgttctactatngtgtgccttctaaagtagcatagttgtgttgagcatgtaccatggactagtcttagggngtgtgaattcatcactaagcatgagcataggtctc

SEQ ID NO: 9238 - DNA, 739 bp, Glycine max
ctaatccaattcagacacgaaaaaaccaactacatcagctcatggctacccccaaccccaccagattctcccttgccatggagagaaccgggcaatgggttttctccccagaaatccccaccgatgttattgttgcagttggacaaaccaatttttctctccacaagtttattctggcggcgaagagtaactacgtcagaaaagtgataatggaatcagaggagcgtgacctaatgcggtcggagctgatgaagatgaaaatgttcatttccgatttgcagaagaatgttcacggaacgtcgtcgtctgggagggagaatattgggcccactaaaaagcccacgttcttctcgtccatgtccaagaaactgagcaagttgaacccgttcaagaatgggtctaaggacacgtcacacatcgacgatgcccctgtggacttgaccaagcccagaaagagaaggttctccatttcctagatttgctttccttagtcaattccaagctttgtcaaaaagaattttaaatttttttgaagtaattacgttttctctcttgattgttaatttttttcatgaaagtgccaatttgtaattaagaaaaaagtgagacgtgattggatttcttaaattagatttgttcatatctgtatgttaagatgtatttgatctggatatataggaacatcctagtttcaatatgaaccaatgagaattataataaagatgctttgagtcgtccc

SEQ ID NO: 9239 - DNA, 861 bp, Glycine max
ccgcccacgcgtccgcccacgcgtccggaaaaaacgcaactacatcagtccatggcaacccccaaccctaccagattctcccttgccatggagagaaccgggcaatgggttttctccccagaaatcccaaccgatgttattgttgcagttggagaatccactttttctctccataagtttattctggcggctaagagtaactacatcagaaaagtgataatggaatcagaggagagtgacctaacaagaatagagatttccaacatacctggaggacaagaagcttttgagaaagccgcgaaattctgttacggcgttaacttcgagatcaccgttcacaacgtggcggcgctgcactgcgccgccgtgttcctccagatgaccgacgagtattgcgacggaaacctcgccggaaggacggaggattttctctctcaggtcggcctctccacgctccacagcgccgtcgcggttctcaagtcctgccaaaagctcctccccttcgccgccgaggtcaacgtcgttgaccgctgcgttgaggtcatcagctccaaggcttgcagcgaggcgaatttcccaagccagtcgccgccgaactggtggacggaggagctcgccgtgctcgacgtggattcctttgcaaaggtgatcaccgcgatgaagcagcgtggcgcaaagtacttgaccgtcgccggagcgttgattacgtacaccgaacgcgcgctgagggagctcgtcagggatcagaccggcggcggaaaaggaatccggtcaccggaatccggagactccgattcggagtcgaaaagaagcgaacagcgcgagcttctgcaggctatcgttcctctctttccgacggag

SEQ ID NO: 9240 - DNA, 710 bp, Glycine max
gagcaaccaagcaacgcaggtttggggcataagtggtagttaacagcaagagagaggaaagcagaatgaagaaggcaagggcgttgagcgtggcagtgaacgtgttgtgtttggccatagtttgcagtgcgatcgagtcaccgcaacacacagtagtacactccgagtccgatttcgagatcaggctctatcgtacctctgtttggatgtccgctcctgccctcgacatttccttcgaaaaagccacctggaatggcttccacaggttgttccagttcacagaaggtgccaacttgaatttctctcgaattccaatgactattcccgtgttgacaaccgcggtccccggagcgggtcctcttcaatcccaaggctattacgttagtttgtacttacccgttaagttccaaggtgatcctccggtgcctcttccagaactcaatatcaagccctatgaattcagcagccactgcgttgcggttaggaagttctctggatttgccaaggatgagaggattgtcaaggaggctgaaaagctcgccacgagcctgagtaggtctccctgggctgagtccaagaccgggcgtggttactcgattgcgcagtacaatactccgatccggattgtcaagcgcaagaacgaagtgtgggtggacattgatgctcctgaattgggctgcaagtcggtcggtgttgccgcgcattgattg

SEQ ID NO: 9241 - DNA, 629 bp, Glycine max
aggggacccacgttaatacaacacaacaaacatacatagagaaattcactcatataaaaatcatcacttcaaataaagctagacctagaaagatccagaggtagctacggagagaaacaaagctcatggctggtttgcaaagatctgaggtgtctttcaggagacagggttcatcagggcttgtttgggacgacaagttattatcaggggaattgaacaagaacgaagacccaaagggtgctcatggtggtgaccttaaccttaaccttaacgttagaacaacaccacccatccagagaagtcgctccaacggcggctaccgcaccggaaaagtctcgccggcgatcgagcctccctctcccaagctctctgcttgcggcttctgcagcgccttcggaaaaacaggggaaaagggtcgtcgcgcaaagccccgtgcaaagcatcgatcaaggtaggttttttctggtcgccggagatgctcttcaacttgtcatgtttctacccagttttatagaagagtgtagggtttgagtttgagttcatataaggaaaaacagaattgtcaattgtagctctccgtttctcttctgagtctctgtttacgagttttagtttgtttttcgtttttc

SEQ ID NO: 9242 - DNA, 756 bp, Glycine max
gatccacgttaatacaacacaagaaacagacagagagaaattcacacataaaaatcatcacttcaaattaagctagagctagaaagattcagaggtagctatagagagagaaacagaggtcatggatggtttgcaaagatctgaggtgtctttcaggagacagggttcatcagggcttgtttgggacgacaagttattgtcaggggaattgaacaaagtgaacaacaacgaagaccaaaagggtggtggttctggtggtgaccttaaccttaaagttagaactacaccacccaacaccaccatccagagaagccgctccaacggcggctaccgcaccggaaaagtctcgccggcgatcgagcctccctctcccaagctctctgcttgcggcttctgcagcgctttcgggaaaacaagggaaaagggccgtgctaagcatcgatcaaggtaggttttttctcgtcgccggagacggtggttcatgcagctcttcaacacgttctgtttatgtccacttaagatttagggtttgagtttgagttcgtatatgggaatagagaagggtgaattgtagccctccgtttcgtctctgtttacgagttttggtttgttttcatgtttcaattgtcctctgtggaagaagagatgatgatagtttggggtgagttgggttgtaatcatgtgtatgtttgttgggtcaaccaggaattttgatctctgtccaaagtaaaatctccaataagatctatctttcgc

SEQ ID NO: 9243 - DNA, 463 bp, Glycine max
ctctctcgcaaaataaaaaataaaaaaattgcccattcaatttcaatttgccactattaatttctatccaaagtgaattcaattccctcttaatttcgtcatatgggtctcgaaatcttagaagaatttcggccaattacgcccataagaaccgttgttccaacggttagaacaaccttaaaacacgatctaggaacaacaacaacagcatcaaaggaggtgctaaacgaggatgttctaattgaagaagagtgccacacacccacatcaccctctcaaaaattaagcaccaacccattggtgtgccctccagctccaaagaaaccacgagtagtgccccgaagacacaatttagacccgccatcacaacaagggttcttcaaagttccccatgatctggcttcggtcttcgtcctacgcacacccaaccttccaagaagaacagcacagcaagctcttttca

SEQ ID NO: 9244 - DNA, 370 bp, Glycine max
ggtaacaaaaataacgtgacactgctaagagagtgagagaaattggcggcggcggtggcggcggcatagagtggaagtagtaaggatcaatggcagttccagggaggcgcaacggcatgaacgacgacgaagaggaattagacgacaacgcccttttcgaagaacaaggtgccgtcgaagacgacgccgatacccctcctcacctccgcgacctctccgccgccgctcagctaggcgacgtccacgccctccgtatcgctcttgataacttgactggtagtattgatgagccagtggaggatggggatacctgctcttcatttgacatgtctatatggccatttggcttgtgtccagctgctaatagaaa

SEQ ID NO: 9245 - DNA, 344 bp, Glycine max
gaacgagaaataccgtgacactgcaacagagtgagagaaattgcaggcggcggcacagaggggaactagtagtaaataaggatcaatggcggttcctgggaggcgcaacggcatcaacgacgacgaagaggagttagacgacaatgcccttttcgaagaacaaggtgtcgactaagactacaccgatgcgtctacaaaccttctcgacctatgcgtcgtctcttaaatcggcgacgcccacaccctcagtttcgcttttgataactcgactggtatttttgattagccagtggtggatttgtaaacggctctccaatagacatgtttatatggccattattttt

SEQ ID NO: 9246 - DNA, 525 bp, Glycine max
acggtgcgagagacacagaagggatggaaatttcgagattcctgaaattatggcaattttctatattcttcttcccaccggtcatcatcttttggctgtggggctgtggctgttgcaggttcttctccgaagcttcaaagttaacagagaaagaccctaacaacctaatcctccctcgtcactcattctccaccttcacttaacggtctcaaataattgaagatttatcgaagggatttgtttttgtttgtgtgctgtgttgaaagtgaaattaagcattaatgtgttgggagctatgagattgtattgtttagcttgtggtgagccttaattactgcgttggttagatataaaatgccatctaattacttttcaaggctcggagtttcgattcggagatcggttgtggggaaagaaggtcgaatccgggactctgctgaagttctcattgggcaacggaagttgtggtttggtagttctaagtattttcattctgtgcacagctcatattttgtggaactgcag

SEQ ID NO: 9247 - DNA, 447 bp, Glycine max
cgaaattatggcaattttctatattcttcttcccaccggtcatcatgttgtggctgttgcaggtccttctccgaagcttcaaagttaactgagaaagatcctaaccctaacctaagcctccctccctcgttcccttaacggtctctgaataattgaagatttgtcgaagggatttgtttttgcttgtgtgctgtgttgaatgtgaaatttaagcattaatgtgttgggagctatgagattgcattgtttagcttgtggtgaaccttaattactgcgttggtgagaaaataaaatgccatctaattacttttcaaggctcgcagcttcgattcagagatcgattgcggggaaagaaggccgaatccgggactctgccgaagttctcattgggcaagggaagttgtggtttggtagttctaagttttttcattctgtgcatagctcata

SEQ ID NO: 9248 - DNA, 580 bp, Glycine max
atctctcgagtcattaaaaactgccatagttgtgggcggaactaacattgaaaagcagaggttcgaactaagagcgggagttgaaatagctgtggccacccctggaagattcattgatcacttacaacaaggcaacacttccctctccagaatttcttttgttgttctggacgaggcagatagaatgcttgatatgggttttgaaccacagataagggaggtaatgagaaatcttccagagaagcatcaaacactgctgtttagtgcgactatgcctgtggagattgaagaattatcaaaggagtacttggctaacccagtgcaagtgaaggtggggaaagtgagtagcccaacaactaatgtttcacaaactcttgtgaaaatttctgaaaatgagaagattgatcggcttctagatttgcttgtagaggaggcatcacaggctgaaaaatgtggtcatccatttccattaacaattgtgtttgttgagaagcagacaaggtgtgatgaagttgctgaagcgttggtagctcaaggattatctgcagtttctcttcatggtggtcgcagtcagagtgaa

SEQ ID NO: 9249 - DNA, 445 bp, Glycine max
cgtaccatccaataagaccaccacacacacacacacacacatttcttcaaactcactcctttctttccattccctcactttcacacccacaagtcacacccacttggttccttcctccaccccattatttttttctctttttttcatccaaacatgtcctccacacacccaaaaaacccagcaacgacaacaacatccactactctcatcgtgctctcaattatactcctttgttttccgacaaccgcaaaaaccgacaaccctccatgcccttatccgtgttacccaccacccattggaacggttactcccaccactccttcaggtggttccactgttccaccagcaccacctcaacccggattactatatccaccaccttctgggaattacccttattaccccacaccaccttacggcggcggcggtggtgttggcagcaacg

SEQ ID NO: 9250 - DNA, 753 bp, Glycine max
  unsure (1)..(753): unsure at all n locations
gctccacagaagcagtagaaaacagaacttcgttgcaaaatatgggtgcttctgacaacaacaacaactttctccaagttgtcttcaataactttgatgttcttgctctgcccttggttacgcttgtttaccctttatatgcttcaattaaggccatcgagaccaagtctactactgatgatcaacaatggctcacgtattggattctgtattccattctcacaatctttgagctcacattcgccaaagttcttgaactgcttcccatttggccttttgccaagttgatattcagttgctggttggttctgcctcacttcaatggggctgcagttgtttataggaattacatcagaccattctatatgaacccgcaaatcccaattcctcaaaggctctaaatctggtattttccacaaaagaagtccttattcaatcagccagatgatgttctaagtgctgctgagagatacatggaagagcatggtacagaagcctttgaaagacttataagcaagaatgncagacaagctagagcaaggaggaatggaaattacatgatctttgatgatgactatagatattgaacttcgttaaggtgtcactttggctgttgctaatatttcaatatatttcaatacattgatgatgaccaaatatgttgaactttgttaatgcgtcactttggaagttactaatatttcagtagattattttgtggaatgaaatataaactacgtactaattattcgg

SEQ ID NO: 9251 - DNA, 478 bp, Glycine max
ggcagttctagagagagaaagagaaagatcatcagtgagagattcttcattcttcttctcattctctattctaaattcttatctaagctaacgatgatgatgaattagaaattcgtggtttccctaaaccaaactcgattcaccctctcattttctgaatttcaatggccgatcactcagattcttctcctctcgttcctccccttcccctcaccgacccttctgagatcgacctcgaagctggtccctccgaacaaatccagtgccgaatttgtctcgaaactgacggtagagatttcatagccccttgtaagtgcaaaggtacatcaaaatatgtgcatcgagaatgtttggatcattggcgagcaattaaggaagggtttgcctttgctcactgcactacatgcaaggctccttatcatttgcgtgtccatgttgctgctgataggaaatggcgtaccctgaaatttcgattttt

SEQ ID NO: 9252 - DNA, 286 bp, Glycine max
cagttctagagagagaaagagaaggatcatcagtgagagattcttcttctcctctattcgcaaatttaatctaagctatcgatggtggtgcaagacttagaattcattttggcacttgtaccctccgaatttcaatggccgatcactcagattcttctcctcttgttcctccccttcccctcgctgacccttccgagatcgacctcgaagccggtccctccgaacaaatccagtgccgaatttgtctcgaaactgacggtagagatttcatagcaccttgtaagtg

SEQ ID NO: 9253 - DNA, 546 bp, Glycine max
  unsure (1)..(546): unsure at all n locations
caaaggggggttcaaaaaattcatcctctcttctagggtttcttccgctcccaaaacaatctcgcctccaacctctctctctctctctctctctctctcttcaattttcgttgcattcgcagggcacttctccgctcgcaatgccgtttccggcgaaaccaacgcgggatttcgacgagtcggcgagtccgtcgaacaacctgtgggtggggaatctggcggcggacgtcaccgacgctgatctgatggagctcttcgccaaatacggcgcactcgacagcgtgacttcctattccgctcgcagttacgctttcgtgttcttcaaacgcgtcgaagacgccaaagccgccaagaacgctctccaaggaacctctctccgcggcagttccttgaagattgagtttgccagaccggtttgtcctcatctttttcctttcactttctctgcacatccctgtattcttcttcaaactaacatcctcttattattattattattaaaaatgttattatttctgcattctagattntggatcttttttctct

SEQ ID NO: 9254 - DNA, 862 bp, Glycine max
aggggctcctgcctttgggagaacaaaacagtgttcaactatctcacacttttctcctcctacgttgcaatccctctcatttcatggctcgcaagcctttcaaattcaatgaggatgttctcgagcaacttagaaatgggactgcgaaattcgaggttgtttcttccccggttccttcagttgctgctcctcctaaccggaacacgagcttgtttgggattgggaatagtagcactgtcttattcgccagaattggctcatcctttggtggacactctccagcaatgaagaaacttgagcatttttcagttcagaaggttacaggggatggacggtgtctgtttcgtgcactggtcaaaggaatggcttacaataagggaaccactctcaatcaacgcgaggagagagaaaatgcagatgaattaagaatggctgtgaaagaagctatatgtgaaaatgaaggtgaacgtaaattatacgaagaagccctcattgccatcacagttgacgagcctataaaacgttactgccagcggattgtgcgacctgatttctggggaggagaatcagagctattggtactgtcaaagttatgtaagcagccaatcattgtgtacataccagagcatgagcatagaagtggtggttttggatctggtttcattcccattgcagagtatggaagtgactttagaaagggttctagcagaaaagctgtgaggctattatacagcggtaagaaccattatgatcttctagtatgaggaaacatatgaacgaaggagaagcaagaaaatgagtgggagattcaaatgtcattttgtaacaattgtgttatgctagaatccacatattttgttcc

SEQ ID NO: 9255 - DNA, 471 bp, Glycine max
cgaggtcgtgttgcagaggccacaacgtttttcattagaaattttcagttccaccacattctctgaagaaacctcttgcactgtggacgcagcctccgccgcggggcattaccgccattgaagctgattcatgcttttttcaccgttcctcacaagaccaggtttgaagctattgccattggaaattaggacttcttttttgttactgaaaaattagagtagacaaaaaatgctcagacggaggctatctgttctctcaacatcaatcaccagaagctcaaattatagcaaacccagtctcggatacccatctatccaatctcatccctttcagctccctcactctcccagtgcttatcaaataattagtcctaatgcattcccggattttcaaggttttagagcttacagtcttctgagcttgaatgatctgagagataaggttcccagaaaacagccgacgaggaaggg

SEQ ID NO: 9256 - DNA, 505 bp, Glycine max
gaaggatccgcttttctcgcttcttcccttgcagatcctacaaagttttttcctaccctctctctctctctctctctctctcggaggccactgcttattgtgtcattttcattctgatttcaccacttatttgacaaccctttttccatttcatttttcttgtttttaaagttgagcaaaaggcataggcttaccaattatgggcaaggagtggtattttgctggaagatcatctaagagaggtgtaggaggaggtgctgaggctgaaacacaagccccttctggttgcatgtgtgctgtttttcagttctttgatttccatccttttcactttcccaacataaaccaacaacaccaacaagatcaacaagcctcttttaagccaccctcatgcacctcagaagaccacaccacagtctcaaaaggtgctgaagcacctaggaacagcttagaggcagaggatggtgatggtacagtttcatctctctcatcaaaagaagatgat

SEQ ID NO: 9257 - DNA, 370 bp, Glycine max
agggtggtattatatgacagtgttttggagacttggtgggaggttattactggctagtgtcctttatgatacctttttgggtgaacccagggtatccccagctgagaatcacatactaatttcttgaaataccgagatccatttaaggggttgacctcccccaacaaatgtttttccatatacacagacctggagattggaaccgtgccatatgcctaaggagcatggttatctgggaaccatgtcacaccatgctgtccagtggtacgatactagtgttttggaagaccattttattggttgagtggaccactgaggagaaaggttgaggactccagaaacaatctcatatgcttgggacttatgctga

SEQ ID NO: 9258 - DNA, 439 bp, Glycine max
gagactaattttacattggaatcttccttaaggtatgttgctgactgttctcaagctgtagttgtacacatgtaactctgtcaacattttcagaccaaatccaacgttgtttctggcaaaaatggatgcattccgtttatcacattcatttatgctcagcaccaacatccacagcccctcctctctctgcacccttcgttccctctccaccaatccccgcaacaggtggttcaaggtggaagccaccgccggcggcagccagaagaagaacaataacaaggccttcgacgcggcggcgttcgaggcggagcgacttgccctcgacgcagaggcccggcgaaccatggcggacgccgccgacccgaaggcctggaaatggataatccggaagagaatatgggatatgatggaagctcgcaactttgccaacaacccttcg

SEQ ID NO: 9259 - DNA, 1717 bp, Glycine max
ctctcttttaatctaaccctccctaccaacaacagcaaccctatttctcaccatatgatcagcatcaaacgcctcccaaccccaattccactccctcctcatacaaccctgtcccttctccctacagctactccggaccctcctccgttcctccgattccgacctacgaacctgcatacgaggctcccgtgaggcccgatcaaggtggaggctactttgacgacaggtaccgagccggatttactcggagccattccgatttgggatccgatttttacgggaagagcggtggtggcgcacatgatggatacggagatggggtgtatgcttatgaagggggcaaggtggaaccctacggggcgcgtggcacggcgccaaaatcgtcgacttgggcggcgtttgatgattacgggaggtccatcagtttcccctcgcagaaggaatcttcttctgtggggggtaagattgtgaaagcggtgcccaaggctgatacacaacaagatgtcaaaggtggcggcgtgcaaaagtttcgtgtcaagctgttggccgaaagtgggggtcagagcactatggatgttctctgtcagattggtttggatggaattcgtatgctggatccaaataccagccggacattgagaatttatcctcttgagaacataacaagatgtgatagaatcgattcatctacctttgcattttggtcaaagagccctgttgacattgagccaagacggatcagattgcaatctaatagttacactactaacacacttttggatatagtgactgctgcaaccatacagttcaaggaaatgggtggaagcaggtggcctgctgaagcagtgaaaccaaatgaacagcctacagaaagaaagaaaggttttggtgattggatgaatcttattaaacctgccaatgaagagaaggatcattgggtaccagatgaagccgtctcaaaatgtacagcatgtggtactgattttggggcttttgttcgcaggcatcactgtaggaactgtggtgatattttctgtgacaaatgtacatatggtagaattgctctgactgctgatgagaatgctcagcctgtacgagtttgtgaccggtgcatggcggaagtgtctcagcggctgactagtgcaaaagagtcatcaagtaaacctgcattgcagagtcatgaggatcttgcaaggaaacttcaggaggagctggagagaaatcgaaagacatcaggttccaagtctgatggatctgcaagacggatgaaggaagttgcatgtcccatttgcactgtccatctgcaggttcaggtgcctagctcgggttcagagacaattgagtgtggagtttgccagcacccatttcttgtgagcgctcattgagttcagataaacatgaatacggatgagcaggtgtcttcgtgtttcacaagtttaaaattcatttgttttactgagctatctcttgcacattaattatcaatgattgggattgccttccttttactattatttttgggcttgtttcatgtcctagttttaccttgcatgcatcttttttttatttttttattttgtgcttaaagcttggtgtgcttcgttagttgttcaattctcacttaaattcgtttatccgcttgcataaaatagacgctgaacacatagctatacatgtatatatatatgtgtagctatggtgaattcattatggtttc

SEQ ID NO: 9260 - DNA, 370 bp, Glycine max
cactggagtctcctccgttcctccgattccgacgtacgaacctgcatacgacgctccggtgaggcccgatcatggtggaggctattttgacgacagatactgctctggatttactcggagccattccgatttgggatcggatttttacgggaagagcgttggtggtgcttcgagatatgacggtgtcgctgatgatggatacggagatggggtgtatgcttatgaagggggcaaggtggaaccctatggggcgcgtggcacggcgccaaaatcgtcgacttgggcggcgtttgatgattacgggaggtccatcagtttcccctcgcagaaggaatcttctgtggggggtaagattgtgaaagcggtgccc

SEQ ID NO: 9261 - DNA, 416 bp, Glycine max
tggaaccatagaaacaaaatcatattttcaaacgatagccccaacaccagtaagatactagatgatgccattttcttttgctggagctgattgaggaacctggaaaaaggattcgacaatccttttcatcaatggtcaagccatatcagagaagggttttgtaattagtggaaaatagctccacagatagggatcaccaatatatacttagagttttggttctttaatccatcatgattagttttgtattagggaaccaaacctccacatgggagacttcattggtgattgtaaaaatcacagtacgacttgtactgaaacttatctaatatataatattatttttggcagataaaaaaaatggtttggaaagacattgtctattttcattttatgttttcacaaataattttaaa

SEQ ID NO: 9262 - DNA, 424 bp, Glycine max
gaaggtagatcccaatgcttttgtagccaggcgatcaaagaattcaacattgccagatcacagcccccttccagatgctttctgtaatgtggctgatgaagatatgtgggtgaaaatgaacaatggttatattgcggaccttgattcccttcaaactactcctcccaccaaccgaaaagttcagtcattcccgacaagtgatgcaactgttggttgtacaagtgaaattgagaagtatgaacgagaggttcaagatttgaggaaacaactggaactagctaaagaaagaataaatgaactcgagcaaaagcattcagaagaagtgccatcaagcaagcaattaatcgttgagacacccaaacatcaacaagaaacacgactaactcatgaattacctctgaggttatctgaatctgtgggaaac

SEQ ID NO: 9263 - DNA, 507 bp, Glycine max
tcccatcgcgtccgcccacgcgtccgtagagatggtaaaaaagggggtaagcaatgagccatggaaattttgctgttcccaatttgtttcggatctgtgttgacaaaccctaaccctgaggagtatgagtggttattgagattgaggaattgacgaaaaggaaaggaaagggggagatgtacctgaagaaaccgctatggagtgaaacagggaaagacgatggtggaagtgcaaagacagaagaagaggatcatggtgatggtgcagtgagtgaggtcgtgaagtcactgcagcaacagagagtgtatagagaagtcactcttgcactcagaactggcctcagagacgcgcgtgccgagttctcctttctccgtgttcgcgctctccgttccattctcaagttcctgcgttccgttgcggagtccggttcaaccatcgacctctttaaccaaacccaatccattccccaactccaagtggttccggtcttgttcatcactcgctcaa

SEQ ID NO: 9264 - DNA, 437 bp, Glycine max
cgaaattacgcgagcaaacagtttctgagtttcttctattttctgttcccaatttgtttcggatctctgttcacgaaccctaaatctgacgttaattcaccatgatctgaacacaacgtggttcccatctgatccactgcatcgtctttctcaattgtcgaaagatgagtacaagtggttaatgagattgaggaacttgcgttgtttgagcgaaacaaagcagagatgtacctgaaggagccgctatggagtgaaacagggaaaggcgatggaagtgcaaaaacagaggattatggtgcagtgagtgaggtcgtgaagtcactgcagcaacagagagtgtatagagaagtcactctcgcgctcagaacgggactcagagacgcgcgtgcagagttctcgtttctccgtgtccgtgctctccgttccattctcaagtt

SEQ ID NO: 9265 - DNA, 453 bp, Glycine max
ggatgaaatagggcaaggtgatggtttccccaacaagacagtaaggtgccatagcacttagactcaagaacattatttctttcccaagaaaaaagatggcgaataacgagaaagacgcatgttcttccttcaccgatttcccagaggacattcaggtgtgcatcctctcgttcctgggcccaccggagatcgcaaccctagcctgcacttcgaagcgaatgggctctctctgcgccaccgactccaagctctggttctctatgtgcgagcgcaggtggggctcctacacccgcatcacccagtgggcccaaggaaaaaaccccactctctccttcaagcacctctacaacaccctccaccgctgggagaatctcctcggcttctggcgccgaagtggaaccggaatcccttccttgctcttcttcgagtggggcgatccttcatcccgcttct

SEQ ID NO: 9266 - DNA, 386 bp, Glycine max
atggtttccctaacaacagagtaatgtaatgctggtaagggggaatgattccatagcgtggaagaatctaccaaactccaaccatctatatctcttcttctttcactcaattacaagatttgttccccaaaagacgcaagaatggcgaataacgagaacgagacatgttccttcaccgatttcccagaggacattcaggtgtccatcctctcgttcctgggcccatcggagatcgcacccctagcctgcacctcgaagaaactgggctctctctgctccaagtctccaagctctggttctctatgtgcgaggcagtggggctccaaaccgcataccaatggccaaagccgcatctctcaagaatctacaacctcacgtgggaattc

SEQ ID NO: 9267 - DNA, 428 bp, Glycine max
tctgctgggcagtcacacgaagcagtaatgaagggcttcacttcacaaattgtcttaaattttttgaagaaatggaaggtgaagattccattgaaatctcggattcatcaccctcccacctttcacccagttcattgcaaaatcaagctcttgctggatcagtagataaaatgatgcccggaaagagttataatacacctccagcattgcagaatctgttcaatggatctaaacctaatagcataaactggggagaaggtggtaatgcccattcttcaagaagtgccaattcactagataatcgattgaccagagacataggacttcagtttaatgcagtcgagtttaaaagatctactgaagaattgaaattgcgtgcttccatcgaggaaaggatgaaaaaaactacaagaaagaagcgaaaatca

SEQ ID NO: 9268 - DNA, 1093 bp, Glycine max
attggtggtgaagacttgcttcagaatatgatgcatcatctgctaccaaattctgaaaatctatttaagaaccatggggtcaaagaaattaaacagatgggcctgcttcgagttgcaacccaggatgcaattcgccagctttcctctcagaccatcgttcaggttgatgtagacctgtgagatggtttgaagatatgcaaggctgttaaccgggaggcgtttgaggaggtaaacagaaaggtgtttgagaaatgtgaaagccttatcatacagtgtttgcaagatgccaaggtagaagttgaagaagtgagatgatgtgataattgtaggcggatgttcttacatcccgagggtgaaaaatcttgttactaacgtatgtaaaggcaaggaactttataaaggcatgaatcctttagaagctgctgtttgcggtgcagcagtggaaggagctattgcttcaggcgtcaatgatccctttgggaacttggacttgttaactatccaagctacacctcttgccattgggattcgagctgatgggaacaagtttgtccctgtaattccgagggatactacaatgccagcacggaaggagctagttttcacaactactcatgacaatcaaactgaggcgttgatccttgtctatgaaggagagggtgaaaaggcagaagaaaaccacctattgggatatttcaagataatgggaatacctgctgctcctaaaggagttccagaaatcaatgtgtgcatggacatagacgctgcaaacgtgctaagagttttagctggtgttgtgatgcctggttctcgccaacctgcgattcctgttatggaggtaaggatgccaacggtggatgatgggcatggttggtgcgccgaggctctaaatagaacctatggtgccacactggatttagttactctccagaagaaggcatgaagtgatacactactacacaacatcattgtatttgtacctttttttttagttggtttcttgtgtttggttccgcaaatagaagttgatgtacatggcatgtctgatgtttgtcctttgcacctagaaataatggaaacaatgcgttccggg

SEQ ID NO: 9269 - DNA, 401 bp, Glycine max
caagattgtatctctaccaaagtctctgaacattccactctcaacattagaggctaggctgcctgaagtatcatcagctttgaagaaagaggaagaggaaggtggtgtagtttctggatcaagtgcacagttgtatgtagtatgcagaaggggaaatgattctcaaagggctgttcagtatcttcacaaaatgggtttcatttctgccaaggatattgttggtggcctagagtcttgggcccccaatgtggaccctaagttccctacatattagcagacacgttttgctgtgtagaaatattgcttttttcaagttatactgctggcttggaattatttctctctatttatattagtgatgctgatttcatttttccatttataacattcacgtttctttt

SEQ ID NO: 9270 - DNA, 347 bp, Glycine max
ctaccaaagtctctgaacattccactctcaacattagaggctaggctgcctgaagtatcatcagctttgaagaaagaggaagaggaaagtggtgcagtttctgggtcaagtgcacaattgtatgtagtatgtagaaggggaaatgattctcaaagggctgttcagtatcttcacaaaatgggtttcacttctgccaaggatattgttggtggcttagaatcttggacccacaatgtggaccatcagttccctacatattagctgacacctctagctatgttaaatatcactttctttaagaaaaaggatgccgacgaaaaaaaaccagcgcgccgctctagaggatc

SEQ ID NO: 9271 - DNA, 352 bp, Glycine max
gatttgaccgagtcggtgaagctgagtccgcgaaacgcgaaggcgtggtgcatgttgggggaaacctacgaagggaacaagatgggagaggaagcgaagaaagcttataaagaggctttggagttggagccacagttgaatgtggctcaagaagcgctcagcaggttgggatcgtcgtaatttggtgttgagtgatgtgagctttaagatgtgatcgatcgctttggttattgtatgtttaatttataactgttgtttctaatcttcgattatggagagtaattgaatgttaagtttgagcaagcaataaaatgattttcgccgaagaattataaaatttataaaaatttat

SEQ ID NO: 9272 - DNA, 960 bp, Glycine max
ggagagaagggaagagaagagggagaagacgaagaagaatccaaaagcaatcccatctgtgtgtttgcacatcggaagggagggctatcaaactctaagagcagtggttgtgttggatgctataaaaggccttcactgagtcccactgtggatgtgccatcgaaagggttggcaacacaaggtaacggagtgaggaaaccgagttcatcagaggatttttggaccaccagcacgcatgatatggacaacagcgctgttcagtcacaagggagcatctcttcagccagtctaacaaaccaagctgtggtttctcatgctggttcttccaaaagcagcaccaaccccactgaatttgtaaatcacggtgtaattctttggaatcagactcggcaacgttgggttggaaataaaaagcctgagaaccaaacacaccaattacaagatcctaaattgagttggaatgcaacatatgaaagtttacttgggagcaacaagccattccgtcagcctatccctcttgctgaaatggtagattttcttgtggatatatgggagcaaaatggcctatacgactgagatattgaagattgaggaagtgctgaaaataattctagttcttgcttgtaggaaggactattgggcatatactgcagtttgtatatcaattgtcgcatgcctatgaatatgatgaggaaaaatttgtgtcttgggaacatgagataactgtattatccttttgttaattgattgccttggctgcctctactatctcaagaggcaagttttggaaaactcttgcctttgttgacagccttttgcttgcatgtatgagtggctgcaacttttatttgctctgcctgcttttccgtgaaattagaccgaaattatgttgtgtaaatagtcaataactgagatatagtttctcatttggtttcaatgtttcatatccattaagatttt

SEQ ID NO: 9273 - DNA, 546 bp, Glycine max
  unsure (1)..(546): unsure at all n locations
cccggctcgacccacgcgtgcttctgctanaagaccacagaagtttacccttgcgttattaactcttttttttcccgcagcgtttatataatggaagagaagaggaagaagacgaagaagaatccaaaagcaatcccatctgtgtgtttgcacatcagaagggagggctatcaaactctaaggattgctctgaatcggtttcgtcttcttcgtttttcttcaaattcctcgtgacagatctaatctaatcagccttttgggggtgtttcagacattgcatgcatatgggagcagtggttgtgttggatgctataaaaggcctacactgagtgccacagtggatgtgccatcaaaagggttggcaacacaaagtaacgtagtgaggaaaccgagttcatcagaggatttttggaccaccagcacgcatgatatggacaacagcgctgttcagtcacaagggagcatctcttcagccagtctaacaaaccaagctgtggttcctcatggctggttcttccaaaagcagcaccaaccccactgaatttg

SEQ ID NO: 9274 - DNA, 415 bp, Glycine max
ggaagagaagaggaagaagacgaagaagaatccaaaagcaatcccatctgtgtgtttgcacatcggaagggagggctatcaaactctaagatctaatctaatcagccttttgggggtgtttcagacattgcatgcatatgggagcagtggttgtgttggatgctataaaaggccttcactgagtcccactgtggatgtgccatcgaaagggttggcaacacaaagtaacgtagtgaggaaaccgagttcatcagaggatttttggaccaccagcacgcatgatatggacaacagcgctgtccagtcacaggggagcatctcttcagccagtctaacaaaccaagctgtggttcttcatgctggttcttccaaaagcagcaccaaccccactggaattgtaaatcacggtgtaatt

SEQ ID NO: 9275 - DNA, 1167 bp, Glycine max
cgcgtccgcccacgcgtccgcttctctctctctctctctgctttacttgcttgaagcaatggccaaagccttggcatcagtgctgctgtttctcctcgtagctgtgagtaatgtgtttgctgtagagcttgaacttgaaactcttccaccctcttaccctcaccctcaccctgttcactcccccacaccagcacctcttcacccaccagcaaatgctcctcacccacaccaccaccaccaccaccaccaccctccagcaccagcacctgttccttcaccttctcaccacaattaccctcctacccctgcccctgctaagcctcctactcaccaccatcaccatcaccctcctgctcctgttaatccacctcctgttccggttcatcctccagttaaacctcctgttccggttcaccctccagttaaacctcctgttccggttcaccctccagttaaacctcctgttccggctcaccctcctgttaaacctccggttgttccggttcaccctcctgttaaacctccggttgttccggttcacccctttcctagaagctttgtcgcagttcaaggagttgtttatgttaagtcctgcaagtatgctggggttgacaccctcttgggagccacaccactacttggtgccgttgtgaagctccaatgcaacaacaccaagtacaagctggttcaaacaagtaaatctgacaagaacggctacttctacattgaagcaccaaagagcataaccacgtacggggcccacaagtgtaacgtggttttggttagtgcaccctatgggcttaaggcctcaaatctccatggtggtgtcactggtgctcttctcaggcccgagaagcctttcttgtctaagaggcttccttttgtgctctacactgttgggcctcttgcatttgagcccaattgccattaaatgcaagaaattatggatatatcatatttcaagttattttaagttatatgatagagctgtgttgtctctaatttgccttctttctggccttgttttgtttgtcttcatttttatttgtggttttgcgtttgtaggctctgggcttgaattgatcatacacaataatgagtgacagtacgtatgaaatggatagttctagtatgaaaaaaaaaaaaaaaaaagggcggccgccgact

SEQ ID NO: 9276 - DNA, 288 bp, Glycine max
agaactatccatttcatacgtactgtcactcattattgtgtatgatcaattcaagcccagagcctacaaacgcaaaaccacaaataaaaatgaagacaaacaaaacaaggccagaaagaaggcaaattgagaggcaacacagctctatcatataacttaaaataacttgaaatatgatatatccataatttcttgcatttaatggcaattgggctcaaatgcaagaggcttccttttgtgctctacactgttgggcctcttgcatttgatacaaattgacattaaata

SEQ ID NO: 9277 - DNA, 410 bp, Glycine max
ctggttcttgcaggttctctccttggcttcttagggcagatggggtcctctgctagagcaagccactttcaggaaccgtcaccgtctctatctttccgaacagactgatggcagtgttcccaatactcttgttaaacccacggttgctgcagagtttaatgaagaagctcgctctccctttttcaagaagtacaaaactgtattacatcctggcgaggtgaatagaatcagggagtttcagcaaaacagtaagatagtagctactcacacggattgtcctgaggtacttatatgggatgttgaaactcaacctaatcgtcatgctgttctgggggctaccacttctcgtccagacttggtattaactggtcataaggataatgctgaatttgctctggctatgtgcccaa

SEQ ID NO: 9278 - DNA, 541 bp, Glycine max
gatagaaagaaaggacggtggccggtggcggtgagtggtgtgtttgggaaagcgtaagagtaagaatggagggtggagaggaaggattggagatgatggtggactcaaaggacttacagcaacagagcaaagcgttggacaaactcactgaccgcgtcgaggatcgccaactcgattccactcgcgtccaagaggccatggcttccatcgctgcttctgccgaagctgatcgcaatgccatgcgcatcagggaaaaagaattggctgctgttaagataaatgcagcagatgttgatataattgcaaatgaactagagttgggacaaaaaggttgctgaaagaactttgcgtgagcataaaggtgatgcagttgctgctattcggcacttgcttcactagcgaggtgggaaggaacaagggtgaatgcttcagagagttatatttatgtgtatcagcgtatattgttcttcatcgaaattgaatctcaaatgtatactctgacctaattcattcagaaatcataactgtgttattgattggt

SEQ ID NO: 9279 - DNA, 659 bp, Glycine max
ctcaagcacaaagagtttctcccaccattgcctgaaccgattctctgaagtcatcagtggtgcctcacctgtgcatcagactttaactacttcaccatagccagcactgtgaattgtgaggggtctttttccaaaaccagaaagaaacccttccatttttcaccttggttcaccactaaagtgctgtcgtagcttctgctccatcgttctctcagttcactgttcaatctctccttgctcagtataaaagttcctcattttgttgcaaaaggttcaggtttacttcaaatcaatggctgtttcatatgttcacatgcttcaatgcaacaggggtttccacaagggtaacctctcctatcctaattgcagttacaaggcgaggaggagccaccgtttagtttttgcttctatgcacacaccagaacctaaggtagactcattactggacagtgtaaaatgggataccaaaggtttggttgtggcaatagctcagaatgttgacacaggggccatattaatgcaaggttttgccaacagagaagcaatagctacaactatatcttctcgaaaggccacattctatagccgatcacgatctacattgtggaccaaaggagaaacctctaataattttatcaatgttcacgatgtctttattg

SEQ ID NO: 9280 - DNA, 1159 bp, Glycine max
ggaaggtaagaattttcttactacttgagtttcctttttcttattgctttgcacttttatttgtgctcgtcttcttctcctttccttaccacagaagaatagtagcaatcagagactgaagacgagcttccccttgcgccgaagggccaccgatggttgaaaccgagatggatgcagaaactgttgcaaatgtggttccaccaaaggagactccaaatagtgtttccatttctcatcattcctcacaccctccccttaatgagaggattatttcatccatgaccaggagatctgttgctgcacacccgtggcacgaccttgagataggacctggtgctccaatgatcttcaattgtgtgattgagattgggaaagggagcaaggtgaaatatgaactggacaaaaaatcgggtcttatcaagatcgaccgtgttctttactcatcagttgtttatcctcacaactatgggtttatcccacgtactatttgtgaggacagtgatcccatggatgtcttgattattatgcaggagccggttcttccaggttgctttcttcgggccaaagcaattggtctcatgcccatgattgatcagggggagaaagatgataagataattgctgtctgtgctgatgatcctgagtatcgacattacaatgatatcaaggagcttcctccacatcgtttagctgaaattcgtcgtttttttgaagactacaagaagaatgaaaacaaggaagtcgcagtaaacgactttttgcctgcctcagctgctttcgaagcggttaatagatccatgagcttgtatgcggactacatagtggagagcttgagacggtagtcgttgatgaatgatgcacgtcaaggatttttaactgacggaccaatggaagatgtttgcttgaaaaaaggctgcattatcaatattatgtaggaataaaaaaaaacattttactttagctgcctcttagctcatgcatgttctacaaactgtgcttaatttcaaatatgtcatccctgcaatatcaaatttacctgcctcttatagcacatgcacaatccaatatcaaatgttttaatcttgtataattttatattctcaccctttctattagaaagagtgtaatggttttttatattattttatgttgctttttt

SEQ ID NO: 9281 - DNA, 628 bp, Glycine max
gatggcctgtgtctgtgaaacaacaaggagagcgggaacgcgttgcgtacacctcacatcctcctcctctacataagcgccctcgcatcccattctttgcagactcaacaagcattccactcacacctcatcgtttctctctctagatctctgtttcttctttttctccaaccttcgtttcaccaccacacttacattactttgtcgaaatggctccaccaattgagaccccaaacaaggtttccagctatcaacagtccccaaaccctcgtcttaacgagaggattctttcatccatttccaggagacacgttgctgcacacccgtggcacgatcttgagataggacccgaagctccaaagatcttcaactgtgtggtcgaaatagggaaaggaagcaaggtgaaatatgaacttgacaaaagaactggacttattatggttgatcgtatactttactcatcagttgtttatcctcacaactatgggtttattccacgtactatttgtgaggacggtgatcccatggatgtcttggttattatgcaggagccagttcttccgggttgctttcttcgggccaaagctattggtctcatgcctatgattgatcagggtgagaaagatga

SEQ ID NO: 9282 - DNA, 527 bp, Glycine max
tgtcttttaattgctgtctgtgctgatgatcctgagtattggcattacaatgatatcaaggagcttcctccacaccgtttagctgaaattcgtcgtttctttgaagattacaagaagaatgagaacaaggaagttgcagtgaacgactttcttcctgcctcagctgcctatgaagcgatcaagcattccatgaccttatatgcggaatacgttgtggagaacttgaggcggtagtgttgattcctgggtgcttggaattttgtttggttgtgaagacatacattacatgtattcaaaggctgctattataattacgattatgacgataacaaaagctttctatccttgtcgcgtgtgcattggtctcagggctgcaacatgcatattctacacatgtgcttagttttgagtgaatgattttttcatttattaatatcaaagttttattattgtagctcactctaccaaatatttggagcatatgggattcttacatcttatataaagcattttaacatttttacaac

SEQ ID NO: 9283 - DNA, 492 bp, Glycine max
atatcaagaggcttcctccacatcgtttagctgaaattcgtcgtttttttgaagactacaagaagaatgaaaacaaggaagttgcagtaaacgactttttgcctgcctcagctgcttttgaagcggttaagcgatccatgagcttgtatgcggattacatagtggagagcttgaggcggtagccgatgaatgatgcacgtcaaggatttttaactgacggaccaatggaagatatttgcatgaaaaaaggctgcattatcaatattatgtagggataaaaaaaaaacattttactttagctgcctcttagcacatgcgtgttctacagactacacgtgcttaatttcaaatatttcatctctgcactttagccacatgttttatccctggataattttatattccttagaaagggtagaaagggggccaaaaaaaaaaaaaaaaaaaaaaaaaaaaagcggccggctcaaagggatccaggctacggtacgc

SEQ ID NO: 9284 - DNA, 466 bp, Glycine max
ggggaacgagttgcgtacacctcacatgctcctgctcctcctcctctacctctgcataagcgccctcgcatcacattctttgcagactcaacaagcattcatttcatttcactcactcactcttcgtttcgtttctctttctcactctagatctgtgtttctctctccaaccttcgtttcaccacacttccatcacttgtcgagtgtagaaatggctccaccaattgagaccccaaccaaggtttccagctatcagcactccccaaaccctcgtcttaacgagaggattctttcatccatttccaggaaacatgttgctgctcacccgtggcatgatcttgagataggacctgaagctccaaagatcttcaactgtgtggttgaaattgggaaaggaagtaaggtgaaatatgaacttgacaaaagaactggtcttattatggttgatcgtatcctttactcatcg

SEQ ID NO: 9285 - DNA, 490 bp, Glycine max
gttctcaccttcatctcttctcttctcctctattttgctgtcacacacacactcacaagcattaacatctaacaatagtagcaagcagagccccgagatctgtgcttgaaccttcacttgtgtttccttccttctgcagacgagcttcaccttgcgccgaagggccacagatggttgaaaccgatatggatgccgaaactgttgcaaatgtggttccaccaaaggagactccaaacagtgttcccatctcttatcattcctcacactcacaccctcctcttaatgagaggattatttcatccatgaccagaagatctgttgctgcacacccgtggcacgaccttgagatagggcctggtgctccaacgatcttcaattgtgtgattgagattgggaaagggagcaaggtgaaatatgaactggacaaaaaatcgggtcttatcaagatcgaccgtgttctttactcatcagttgtgtatcctcacaatta

SEQ ID NO: 9286 - DNA, 1005 bp, Glycine max
acaggacacaacaggaaagagaattggcattaaggtcatttaaaagtggcaacacccccatattggttgcaactgatgtggctgcacgtggtcttgatattcctcatgttgcccatgtggttaactttgaccttcctaatgatattgatgattatgtacaccgaattggaaggacagggcgggcaggaaagaaaggcctggcaactgcgttctttaatgacaacaatgcatccctggcaagggccttagcagatctgatgcaagaagcaaatcaagaactgcctgattggctctcacggtttgctgctcgctcttcctttggtgggggaaggaaccgtcgatcaggaggaggccgttttggtggccgtgactttcgaagagagggttcttttagtaggggtggctctgattactacagtgcaggaaacaacagtagtggatatggcacttctggtgggtatggtgcaggatacggtcctggggtaaccagtgcttgggactgattttcaacctgatagcattatatactgtcctattgggtattaggtgcagacatacacctagggtgatttttctcccttttttgtcttctttttaagtttatggtctttaaatttatttttaccttggtgtttcaagcctattcattttgtgcggtttataatgctaatcactaaagggagatgtgggtgtgtatgtggcatcattaccgcatcagtagaggtcgtgcagtgtcagtaggtgttggcaatggcgattactaacttattaggagttctttaacaactttctgtactcttcattttgggtggttattttggtgggagaaaggttgtagaatacgctgtgggaaaggtggtggcatttctttacagtcgtatctatgtatctcttgatcatgtttctacccaacatatggtgtcatcttgatttccccattttggtgggctaaggttttgtaatattttagtggtgcctgaaatgaatgaaaagtattcttgccgg

SEQ ID NO: 9287 - DNA, 662 bp, Glycine max
  unsure (1)..(662): unsure at all n locations
taagtctgctaggctttgggatactaggtcattgactcttatcaagacttatgtcacggaacgccctgtcaatgcagttacgatgtcacctcttcttgatcatgtggttattggaggtggtcaggatgcctcagctgttacaactactgatcatcgtgctggcaaattcgaagccaaattctttgacaagattcttcaagaagaaattgggggtgtgaaaggccattttggaccaattaatgcattggcttttaaccctgatggaaaaagtttttcaagtggaggtgaagatggttatgtacggttgcaccacttcgacccagattatttcaacatcaaaatatagtgcctgatggtttgtggttaaaattaggtggttcctagaagttagcatttaattattctcaaccaacattttaattatatattggtaatatggaagagttttttttttaaatgaaattatgcatttttggcttatgttgtattaacattattatcatttttggttggagtggcactcttaattaaggagtttttcttcccacgtcacaggattttgacaatattagaagtatggcatatattangcgtgaattggaactctttttgtatgcacaagagctcattttgtatctatcggaaaatgttatgagctgggg

SEQ ID NO: 9288 - DNA, 433 bp, Glycine max
tcaatgcagttgcaatgtcacctctacttgatcatgtggtacttggaggtggtcagcatgcatcagctgttactactactgatcatcgtgctggcaaatttgaagccaaattctatgacaagattcttcaagaagaaattgggggtgtaaaagggcattttggaccaattaatgcattggcttttaaccctgatggaaaaagtttttcaagtgcaggtgaagatggttatgtacggttgcaccactttgacccagattatttcaacatcaaaatatagtgccgcatggtttgtggtcagcattaggtgtggttcctagaagttaacttttattttctttcacctaatgtttttgtaatgccgatttgatttcaaaatgctgtcatattggtaatatggaagaatttaatgaatgaaattatgcatttttagtt

SEQ ID NO: 9289 - DNA, 637 bp, Glycine max
gctgagagatgacaaccctactttgaagcccaaagtgcaacgtactttgcaaaaaccctaaaccctctctttctctctccgcgactctgtactcatcaatggcgacgcaatcgttagacgaagaaacaactaagaaagtcatacgacaggtcgagttttatttcggcgacagcaaccttctcaccgatggtttcatgaggaagagtatcactgaaagcgaagatggcatgattagtttggcgctgatttgctcgtttaatcgaatgcgaaaacaccttaatttgggtgatgttaagcccgatgaagtggcccaagaaaccgtgaatactgttgctcaaactttgagaaattcggcttcactcaaggtctccgaagatgggaaaaaagttggcaggaaaactgaacttccaaagctagaagatgttgagcaggtggagataagaacacttgctgtatcaccatttgaatatgatctgaagcttgaagatgtggagaaattctttggtcaatatgccaaggttaatagtgtccggcttccccatcatgttggagacaaaaagttcttctgtggcactgctcttgtagaattttcttcagaggaagatgtagaaaaggtcatgaaggaaaaattggtata

SEQ ID NO: 9290 - DNA, 363 bp, Glycine max
  unsure (1)..(363): unsure at all n locations
gaccaacagttttgtgagtgaagcctttccagtgtgcagctgcatctgcagccggttcaatcattcaaaattgtcaagttgtttggtttggagcaatcatcattgtccaaattgcaattttttcagaaggatagcaagaatttgggaagttgctgaagcaatagggagtagtggatacggtttaggatcattgttataataggcaaaattgatggtaatcgtacatagtggctaggaagggatataatggctactgctgcagttattggactcagtggaagaaagaggctcttgagttcatcataccattactctgatattatagaanagctttcttatggcagtgattttggattcacacac

SEQ ID NO: 9291 - DNA, 422 bp, Glycine max
  unsure (1)..(422): unsure at all n locations
attttgtcttggtacgcacttactgccctatatgttttaagcgagtttcatacttcacacgcacaccagaaacattgtgattttcaaggtaggcttttctccagaagatagaagatgtttggccaacttgagcatgagctagagctgcacgtgccggcgagtgaggcatgggatctgtttggtgcccttgaaataggaaaacttgttgcccaagagctgccggaattgtttcaaaaggtggagctaacagaaggagatggaggggttgggactgtcctcaaactaacttttgctccaggtgtacctgggccagctggttacaaagagaagttcactaagattgataatgagaagcgcataanagaaacagaggtagttgaanganggtacttggagttaggantcactctatttagagttcg

SEQ ID NO: 9292 - DNA, 558 bp, Glycine max
gacgaatttttatttattcaacgatagagtggaagcagaagtgaatgggaaattgaatttccatgagcggtggggttgtggttagaagagaagagaacttgagaagataacattctcgggttttgttttgttgagaattctgagcgtttgatttgatgatcataacacaatgagggatatttgtaggaacttccagcgaggcagctgtcaatatggagaaaggtgtagatatttacatgttcagcaacagcggaaacctaatgttaatgggtttggaggacagagcagttctcatcaacagcaaaatacaaatccctttggatttgggtctggctctggctcacaacaacagcagaagggtaatccttttggttttggcaagcataacagctcccagttgaatggggggcctcattctgagaacaaacccaaccaatacaagccttttgaaaacaaatggaatcgacagtcatccaaaccccagcagaacggcgtgaaatctgaaaacaaccccaaacaatcagaacatcatatatgcacagatcctgagaactgcaa

SEQ ID NO: 9293 - DNA, 347 bp, Glycine max
gtgagtggaatgagaagtgaatggaaaattgaatttccatgatcagtggggtggttagaacttagaagagaagagaactagagaagtgattttttgcaaagacaaagcgagggtttctattgttttgttgagaattcaattcaaagcttttgatttgatgatcataacataacacaatgagagatatttgtaggaacttccagcgaggcagctgtcaatatggagaaaggtgtagatatttacatgttcagcaacagcgaaaacctaatgttaatgggtttggaggtcagagcagttcttatcaacagcgaaatacgaatccctttggatttggctctggctcacaa

SEQ ID NO: 9294 - DNA, 1560 bp, Glycine max
caaccatttggttgttggctcttctacttcttcatcttccttaccctactatgctaacggagggtcagatccaattgatgacttccaacttcaagaccagctttctttcctgaatgatggttctccaactagtactgcttttgcacacaagaccaacccagatttgttttaccctactaacaactcagacttgtcttcaagtcctactactgctgttgaccctaccctttttccttcctatggttggggagggtctattcaccgtaggagttgttcagtcaatgatgcttgtttgggctctgaggaccctagttctgggttgggatggaagccttgtctttactttgctagagggtactgtaaaaatgggactagttgcaggttccttcatggtggacttggagatgctgatggtggtggtgctgctgcgatggttggctctcctggcaagattgagatgatggagcagtgccatgagctcttaagatccaaatcttttcagcaacaaagattggctgctgcttctcaactcatggcctcttccatttttccgtactccccaaagagcatgaatttcctgttgcagcagcaacagaatgatactcaaagagcggcagctgcagctctgatgatgagtgaggatttgcataaatttggacgatccaggcttgaaagaaatgatttttctttgaacagtcctggcatggtaaacccagcttccaggcagatctacttgactttcccagcagatagcactttcagggaggaagatgtttcaaattacttcagcatatatggtccagtccaagacgtgaggatcccataccagcagaagcgaatgtttggttttgttacctttgtttatccagagaccgtgaagcttattctatctaaaggaaaccctcattttgtgtgtgatgcacgagtgcttgttaagccttacaaggagaagggcaaagtcccagacaagaagctgcagcagcagcaggtagatagaggagatttttcaccatgtggtactcctactggattagatgctagagaccaccaatttgatcttcaacttggaggcagaatgttctacaatactcaagacatgctgtggcggaggaagctggaggagcaggctgatttgcagcaagctcttgagctacaaagtaggaggctaatgggtctcacaacttcttgacatcaagaagcatcaccagcgtgcactctccgccggaagcccaattccttcccccacccattctcctaacatgttcaaccaaaatcttgttccttcttttcacatcacttcagaggccccaaaggagagtggttcaacttctgctccagctggtactgcgtcagtttctactggtcaacagtcagtcaacatttctgttggcaaggaagtgatggtcaatggcgaggatggatatgatgaaggcaatggcaggcagagctctagtcatgacgattgtgccttgcaagaatgtttagagcataatctccctgatagcccttttggtggcgcgtggaagctatctggcctggaggcttcatggctcccttctt

SEQ ID NO: 9295 - DNA, 464 bp, Glycine max
ggcaccaaatttcgtgtttgaaactctcgtgtgtgtcgtttttgttcttgcagttaagagagtacaaattccatggcttctaaaatcgaaagcgagaattcaaccgatacttctccatcatcgccaaagaacatatacaaaggtccagatgatgggcagcagcggtttttgcttgaattggagtttgttcagtgccttgccaatcctacctacatccactatttggctcagaatcgatactttgaggatgaagcattcattggatacttaaagtatcttcaatattggcaacgccctgaatatattaaatttattatgtatcctcattgcctctattttcttgagctgcttcagaatgcaaattttcgcaacgcaatggcacatccaaccaataaggaactggcacacagacagcaattctacttctggaagaactataagaacaatcggctaaaacacatttt

SEQ ID NO: 9296 - DNA, 377 bp, Glycine max
gagtctcgatcagtttcattcattggaagatatgggaacattagaacaaattgatgcccctcaaacccggtcatcatcatcttcttcttcttccatcgatagcaacaaccacccttctaggactaggactccaccaccctcttccccttcatcaagtccctgcagaaacagaactgatttgagcactgacctcagacttggtcttagcatctctccttcttctcaatctgaatcacccttcaattcaacaccaagggaggaaagttttgactggccaccaattaagtctatattgaggagcacccttgtggggaaacaaagccatctgaaccaaagaccctctttgtttgtcaaagtctatatggaaggaatcccat

SEQ ID NO: 9297 - DNA, 560 bp, Glycine max
attcccggtcgacaacgcctgccacacgttcttaccggttccaaaaaactttccaaggggccagtttctaaagtggtggaagggcaatttctccttcattaatttatatgcctatgcctaagttttttcacaattggaatagccttgtcttctacactcccccaagctcttagattctaatccactgtggttttccaacctcacaatttcctcaaaacttggtgatgctggctagaacatctgtaacttcatcaaacaaaggaaaaagaagaagaaagaaagtacttctccaattgctattactgcttttctgacagcagattatgtgaaaccagaagagagaaccttgagaagtcaggactatatctgtttccttggcatcagtatcaattaacagctttctctaggctactattgtccattgttgtgctctacatataatctgttggaagagatcagttgaagtactacaacacagttgagtcccggcaattctataatgcaggcatcagagcaacatagaaattcaagtatgtactatcaaccattacaacaaattg

SEQ ID NO: 9298 - DNA, 1156 bp, Glycine max
gagagagtgtcatttgtatcgtaaatcttgtatagacagcacaaacgcagaaaccgcgaaattgtgcctaaaatcgatgacttcgcaaaatggtgacgagagccaccacccaccaccgcaagcgcaagctgaaaaggttactgaagttggatggtacgttcttggcgaggatcaacaacagattggcccttacgccttctctgagttgtgccagcatttcttgaatggatacctctccgaaaatacgtttgtgtggtctgaaggaagtagtgagtggcagcccttgtcctcggtttctgacctgtgggctcaaattaaccggcagggacctgattcttcaactactgtgtctgctcctgatgttgatgagtttgaaagatggcaaaaggagattcaggaggtggaggcacaggtggaaggttcggaatttggatccttatctggcaatgttggtggtactggggcaggagaagattctgagagaccttcgacgccacctgagggtgaagaaggatttactgatgatgatggaactgtatataagtgggataggagtcttagagcttgggttccccaggattatccaactggcagcactaagccttatggggttgaagagatgaccttcttggaagaagaggaagtttttccaacaatacctaattctgatgcctctgaaaagtttgaagatagtccaaaattgagtgtttctgtgcctcccttaaaggaagaagaaaataataccaatgtgatatcaggtggaaaaaggatgctttcagatcaacaaacagacaagaaggaagctaataaaccccctgatagttggtttgaattaaagattaatacgcatgtttatgtcactgggttgcctgaggatgttaccactgatgaaattgtggaggtattttccaaatgtggaattataaaggaggaccccgaaaccaaaagacctcgtgtgaagctctatgttgataaagagacaggaaggaaaaagggagatgctctggttacatatcttaaggaaccttctgtggctttggcaattcaaattttggatggagcacctcttcgccctggtggcaagattcctatgtctgtcagccaggctaaatttgagcagaaaggagacaagtttgtatccaagcaagtagacggt

SEQ ID NO: 9299 - DNA, 436 bp, Glycine max
  unsure (1)..(436): unsure at all n locations
agagcagaaatagagtccagggagaaggctggtcgtgaagcccatgaggctaaattacggatggcagcaatgtttcaagcagagcaggctcgggcagatttacagtctcatgctgaaatgatgtctcgagcacccatgagagggagtgcactagggtcccaaggcaatgacattgtgattggccacgacatgggagagcaggatcaggcaggtaaccccggtgagatgattaatggatggggaaacaatacacagagagatgagaaggagccatctgaagatttcttgaatgatgaagccgaaaaatggagatactgggacccaggatggctggcgtgaagttggtgaatttgatttgaatgctangttgatctcgacagtgattgaatgaaaccctttggagagtttaattacgtgtanggnattaatatcattt

SEQ ID NO: 9300 - DNA, 404 bp, Glycine max
tggggcacaagtttgttgagatagctagaagcaataagatgagaatgaaagtgcttgttttgtttgttgctacagttttggtagcatatgaatgccatggctcagactaccagaagttccctctccaaatgaaaactgggtttggtgggcaatacagcaatgaggtggcatgtgccagttggaggcttggcgtggaagcaaacaacgtagtcaagtggcaaactgttcctgcagcttgcggagagtacatagctgactacgttctaggagaccaatatagatcagattccaaagcagttaaccaacaagcttatttctatgctaaatccctcagactcaccaacagagatgtctttgtcttggacgttgacgacactactctctctaatctccagtattttgct

SEQ ID NO: 9301 - DNA, 410 bp, Glycine max
cccacgaatcaatacggatgcgacaagacaactggaagaaaagaggacattattctagagtcaaattaagatgaaggccattactatcattttgattgttctgcttgttctttccgttgggattgaaaatgaggggccattgaaagtgattgaagcaagaacctgtcaagataggttgggcgcgctaaactgtatacaagacgaatgtcatattagttgcataaaaaaacatggaaagttaacaaaagttgggtgcagtatgcctttatatgattgcatatgtctctacccatgttaataagtgtttgaccttcttcctacattgtccctatatgaatgtcaatttatttgtaccagacaatgatggaatcaaagaaaataaaattactttttgacaataaaaactttcc

SEQ ID NO: 9302 - DNA, 1279 bp, Glycine max
ccgggagctctcagctcactaacaccagctactactccctccccccaccccccactctctcacaaaatgtgccagggcctctccgccccatcgccgccgtgttcggcgcttctctccttcacgctcctcctcctcctcctctcggtggtgggcccggtttcggcatggcggccttggccccagagcaacaaaatgaacatcagcgattatgccttcggggactccaagaaatacgaggggtcctcggagttcgtgaagctgaggtaccacatgggaccggtcctcacgaccaacatcactgtccacaccatctggtacggcaagtgggagcggaaccagaagaagatcatccgcgagttcataaactcaatatccgcggcgaactcggcgcacccctccgtggccgggtggtggcgcaccgtacagctctacacggaccaaaccggggccaacatttcaaaatcggttcgactcggcgaggagaagaacgaccggttctattcccacgggaaatccctgacccgcttatccatacagactgtgataaagagcgccatcacaggcaaaacgagacccttgccgatcaaccctagaagtgggttgtacctcttgctcacggccgatgacgtgtacgttcaggatttctgcacgtcggtgtgtgggttccactacttcacgtttccctcgttggttgggtatactcttccgtacgcttgggtgggtaactcggcaaagttctgccctggacagtgtgcttatccgttttcggtgcccgcgtatatccctaaccggaaaccgtttaagtccccaaacggcgacgttggggttgacggcatgataagtgtgattggacacgagatggctgaactggcaacgaacccgttggcgaatgcttggtatgcgggtcaggacccctctttccccgtcgagattgccgatctctgtgaggggatttacggcaccggtggcggtggatcctacaccggtcaggttttcgacgctcgagatggcgccacctataacatgaatgggatcagacggaaattccttgttcagtggctgtggagccacgttctcaattactgtactggacctaatgcgcttgatcactgatcatctcctcaggaccagatatttcttcttctcttctttaaacctttgctttgggctttgttcttgtgggttttgtgggagtctggtaattttgttaaggtagttaagtttgttcattgatgcaaataatgtaattttattgttattgttatatcatagttattat

SEQ ID NO: 9303 - DNA, 411 bp, Glycine max
cacccactgaaacatgacgttttgtacttgggagctctcggctcgctaaccccagctacttctccctcatccactcacaaaatgtgccaggccctctccgccccatcgcctccgtgtacggctcttctctccttccttttcttcctcctcacggtggtgggcccggtctcggtctcggcatggcggccgtggccccagaaaaacaatatgaacaccaccgattacgccttcggggactccaagaaatacgaggggtcctcggagttcgtgaagctgaggtaccacatgggaccggtcctcacgaccaacatcactgtccacaccatctggtacggcaagtgggagcggaaccagaagaagatcatccgcgagttcataaactcaatatccgcggcgaactcggcgcacccc

SEQ ID NO: 9304 - DNA, 819 bp, Glycine max
  unsure (1)..(819): unsure at all n locations
ttttaaaacatatgctggaccttgntgctgttgattgttttaaagactcaaaaagaatggaccatgtggctaggcgtcatggttgtgcggcgcaagttgcttcagaaaaaggatttttctccattgttattaatcttcaagtgcctgcatcaacacactatagtatggtattttattttgggacaaaggagttagtttctggatccctcttgcatcgctttgttgatggtgatgatgagtttcgaaacagcaggtttaagctcataccatcagtcccaaagggctcatggattgtacgccagagtgttggtagtactccttgtttactgggaaaggcggttgattgcaactatattcggggtcccaagtatttagaaattgatgttgatattggttcttctactgttgctaatggagttttgggtctggttattggtgtgattacaacattggtggttgatatggcttttcttgtacaggcaaatacacctgatgaattgcccgagaggcttattggagctgttcgtatttctcatttagagctcaaatctgccatcgtcccaaaactggaaccagatccgtcatgactgaccgagtcgtttctgttcttctatacaaaatcatttgtttgcaatatgcaggtgtaccattttttttcccactgggatgtaggttcattggtttataattgggttcttctatgaaatcttataaggaaattcttctttccttctcccagatattgtagtaatgtagtttctttctcattcctaaggttttatacgtgaatatgttgtacacttactatgtttactaatg

SEQ ID NO: 9305 - DNA, 916 bp, Glycine max
cgaactgattgggttatgcatgaatttagacttgatgacaaggtgctggctgatgaaggcgtattgcagggtgtaccaaaaggagggtcctggtcctaggaatggtgcacaatatggtaaaccatatgaggagaaagagtgggaaacagatgaggaaattgattctgtacaatctgcccctgttgctgctgtttgtgcacctgttcctatacaacctagtgaaagccatatttccgttgctaattacatccatccctctacaagtggatgtgctggattgacctctgtatcatgtgtatcagaattgatgccatcttgctcgacacatccttcagcacctagcaatccagttggcactgtatcatgtgtatcagaattgattccctcttgctcggaaccacatcatttgccatcaaacaatccagttggctctgtttcatgtgtttcagaattcatgccctcttgctcggcacatccttcagcaccaaacagtcaagttggctctgtttcatgtgtttcagaattcatgccatcttgctcggcacatccttcatcaccaaacagtcaagttggctctgtgtcatctgcatcagaattgatgccctctttctcagaccatccttcagcaccaaacaatcaagttggctctgtatcttgtgtaccagaattgatgacctcttgctcggcacatccttcagctccaaacaatcaagttggctctgtaccttgtgtaccagaattggtgccctcttgctcggcacatccttcagctccaaataatcaagctgacgttggcattctaccttttcttgattgttccatagaagatgatgacacattggctgtgaatgaaaacaacagcattgagaacgttgatgatcctgatcaggcaaacaatgcagaacgtggaccatgt

SEQ ID NO: 9306 - DNA, 491 bp, Glycine max
gaaagcaaaacagatcacaacacaacacacgtgtgtgattgtttatgtgactgacacatacatactacacactattgaatcactcatctggtggttgcatccattcggcttcttccttctccactcctctctttcgctcctcgtcgctctccatattcatattcatggcgctctcatccctctttaaccattcccttctcttccatccactccaaagcttctactaagggagatggtggagcagtggaattgggtggtgatcaaacagagcttatatttttggggactggaaccagtgaaggggttccacgtgtcagctgcttgactaaccctttactcaaatgtgaggtgtgttcaaaagctgctcaaccgggtaataagaataggagacttaacacaagcatcctcattcgtcaccccaattcctcaggaacacacaataatattcttatagatgctggaaaatttttctatcacagtgctctccattg

SEQ ID NO: 9307 - DNA, 727 bp, Glycine max
cggacgcgtgggcggacgcgtgggcggacgcgtgggtttttattaacagcttttcaaatggcaccctaaccttaacctatgttttcaattggaacactgttgtctgttccaaattagacatcttttgttattattctttttatttctgaaaaaaaattcaatctttgtggattgatttatgtataattaaattattattacatacaatttgtgttgactcgtgagttcgtgttgttgcagaagcttctactaagggagatggtggagcagtggaattgggtggtgatcaaacagagcttatatttttggggactggaaccagtgaaggggttccacgtgtcagctgcttgactaaccctttactcaaatgtgaggtacataacattattcaacacaaccatgttcatgttattattgatgaatgaatttgacattatggaatggaatctttaggtttttttattggttttggtattatgattgttggttattgcaggtgtgttcaaaagctgctcaaccgggtaataagaataggagacttaacacaagcatcctcattcgtcaccccaattcctcaggaacacacaataatattcttatagatgctggaaaatttttctatcacagtgctctccattggtttcctgcttttgggataagaacaattgatgcggtcattattactcattcacatgctgatgcaatcggaggtcttgatgatcttaga

SEQ ID NO: 9308 - DNA, 453 bp, Glycine max
agtgcaaaaagaatatggatgctgcagcagaatcaactgctgccacagaagaagtaattgaacttttatttaaaacaatggaatctttaaatgttttgagagaaactattgtaaagggacttgaaagtggcctcaggaatgatgctccacattctgcaatagctatgcgtcaaaagtggcgcctctgtgagattggacttgaggattactcattccgtcttttaagcagatttctcaatgagtttgaagttatgggaggtgctcatcggctggctgaaagcattcagtcaaaaaatctaaactcatggaatgatccacttggagcacttattattggagtccaccagctgaagttatctggttggaagccagaagaatgtggtgctattgaaaatgagcgtcatcacctgagcaaaagaggccgttctgaaacggaaggaaatgtagatggtc

SEQ ID NO: 9309 - DNA, 652 bp, Glycine max
gaagaaagaatcagttccgtcatcagaagaatcgtggaatcttcatgcaatgcttcttcccattttcacactttgttaacacttaattttctgatcccaatctcgttaagcttcttagcaacaacacaaaatgagcgccatctctttcagttccatccattttcacacttggaaaaaccccaaggggtttggaaaggtgagaaaacaaccacatgggaagctacttgtaaagtgttccagccagagtgggaacccatcttcttcgcaaaatgcggttcgtgttggtgttgttggagctagtggctacactggttctgaggttctgcgactcttggcaaatcatccacagtttgggattgcactgatgactgcggataggaaagctgggcagccaatctcttctgtgttcccacatttgagcacttgggacttgccagatttgatttcaataaaggatgcaaacttttctgatgtggatgctgtattctgttgtttgcctcatggaactactcacgaaattattaaaggcctaccaaagcacctgaagattgttgatctttctgcagattttcgtctaaaagatctttctgagtatgaagaatggtatggtcagccgcatagagcaccagatttacagaaagaagctatatac

SEQ ID NO: 9310 - DNA, 516 bp, Glycine max
ggaagaagaagaatcagttccgtcgtgagacactgtcataacataagagtcgtggacgcggttggctgttgctgtctacggttccaacttccaagttacaagcttcacccattttataaaagttacggttcggttccgctgcattcgtgctttctagcaacacaaaatgagcgccatctctttcagttccacccatttgcacagttggaaaaatcccaaggggtttggaaaggtgagaaagcaacgagatgggaagctacttgtcaagtgttccagcaagagtgggaacccaacttcattgcaaaatggggttcgtgttggtgttcttggagctagtggctacactggttctgaggttatgcgactcttggctaatcatccacagtttgggattgcactgatgactgctgataggaaagctgggcagccaatctcttctgtattcccacatttgagcactcgggacttgccagatttgattgcaataaaggatgcaaacttttctgatgtggatgc

SEQ ID NO: 9311 - DNA, 506 bp, Glycine max
agggggatcttttcttccactactacaaaacatagtttttacgatggtgattcgactatggttttatcaaaaccgttgtcattttgaaggtagtgacatttttgtaattagtgtgactttttcaatgatggtttttgaaaaattgtctttgaaattggtaatcgatggcagttttggtatgacccatcattataagtttgaggttatatggttgttttgggatgttgtattttggtccctatatatggttgtcctggaatggaattaagtttttagaatgataggtgtgacttcgttatggtgatggatttgaggttagctcatggtgcttctagaagattcaagctttttattaagcaaggtcaaaattgaaaaccctaaaaatgaaaatttccaaatctgaatggaataatgtgccctaacccacatcgcacttatcgttgttttttcatcgtccttcttcgtcggcagctaaggcatcacatccatctattaatatcgaaccc

SEQ ID NO: 9312 - DNA, 441 bp, Glycine max
  unsure (1)..(441): unsure at all n locations
ggcgcatctatgacttaatacctaatttgccatagaagggctcgatcccagacctangcgcaagggaatttgtttaagtagggctcaagctttatttcacgtagctgactttaccgtcagctcaattggaatagtttttcgctatgttcgcaggcaagtgagacgatccatcaatgcccttatctgcttcgaaagaaccggtgtcatccaaacatggtgaagaggtggcaactggatcaataatagctgaaacttctactgtacagggttcggcttgcccaactgtccaagcttgagatctattttagaatatgcttaacacaacacatgcaattcgaacgttgttttcttggaaagatttgaaagtaactccgttgggttcaatgcccgctagtcccatgcatcctttctgttggtcaacaaccaaccacaagtcaatcg

SEQ ID NO: 9313 - DNA, 627 bp, Glycine max
  unsure (1)..(627): unsure at all n locations
agagcaccgnaatagaataaagtttaccatctccttcacgtttaggttcaacttgcaatctgttaattcacgattcaaaccctaatcccgcagttacaagtttctatcactgtcactgttctcaagtttctttaccatctttcaaattccattttcttcgaagtcatacacttttcactcaaataaaaatcaattaatcggagcagcatgttagggtttcgaaaagccaatttcagagcaggcttgaaaccctagattccacaaatccatgccagcttgatctcgcggtgcttccgtcaatggcgatcatcggcgatgcgcttcgccaggcgttcatgccgaagcgcgagtacgagagcctcagagaagaagacaaggcgtggggtaagcttcagagacccgtaacggtggcttccgtggccgtcatcgtgctcgcaatcgccgtgtccaccgttatcagtttgaaaatcgtgtttccgagtagcgatggaagaagagcgttttgcgtcgatcgaaggcttcaacctattcagataggtatgaaaggcggttccgattcggatctgtttcctggtgctttttatctcacggaccaggagattgctgattattactggatgcttgtgt

SEQ ID NO: 9314 - DNA, 597 bp, Glycine max
gactaatgaaatgtacaatggttgttctgatgattctgcttatgggagtgatgagaacagcactgacactgattcttatcctgctccaaaggctcacagcaacaggaacaacctcagtgtccagaaggggaagaagaagaagaaattgaagtcaaagaaaagcaaggcacatgagtgtccaatttgcaacaagattttcaggtcaggccaagccttggggggtcacaaaaggtcccattttgttggaggttctgaggaaaacacacttgtgataaggccaagtgctcctcctgctgctgttccttgcctcattgatctcaatctaccagcaccggttgatgaatagggagaaagaaatgttggtgccaaaatcctggttttttttttttttgcatcattttgaagcatcttctgttgaggtagctgaatgtctctggagttctgaaaatgtcttgtctttatccccatatgatgaaagcaatgacaatgttcagacaagtgggtaattggtttttgttcctaaggccttagatccattatttggtaggggtagcctttcttctcatgtttatgggatataagaacttactagtttct

SEQ ID NO: 9315 - DNA, 846 bp, Glycine max
gcacttggaatggtcttagttcgtttaccgaatgcttgatacattaataatttaaaaaaaaacgtaaaaaaaactattgagacaattatgaattccattgagtttcccttacttgatcaaacaaccaaaaattcagttatttcaactacattaaatgatctttcaaattggtcaagattatccagtttatggccgcttctctatggtactagttgttgcttcattgaatttgcttcattaataggatcacgattcgactttgatcgttatggactagtaccacgatcgagtcctcggcaagcagacctaattttaactgcgggcacagtcactatgaaaatggctccttctttagttcgattatatgaacaaatgcccgaacctaaatatgttattgctatgggagcatgtacaattacaggggggatgtttagtaccgattcttatagtactgttcggggcgtggataaactaatcccagtggatgtctatttgccgggctgtccacctaaaccggaggctattatagatgctataacaaaacttcgtaagaaaatatctcgagaaatatatgaaaatcaaatgagttctcaacgagagaatagatgttttacaaccaaccacaagtttcatattggatacagtactcatactggcaattatggtcaagaattattctatcaactgccatctacttcagagataccatctgacacattttttttaaagtacaataagaaatagcaattcctttttttttaatttcatcataatgtaaataggaaagactaataccaaattcattaaaaaattcaggagaagcaaaaaaatgcaaggtcgtttgtc

SEQ ID NO: 9316 - DNA, 625 bp, Glycine max
gggcatttctaataatatcaaggtgtattcctattttggcatttctaatttctggaattttagccccgattagcacgggaccagagaaactttctagttatgaatcgggaatagaaccaataggtgatgcttggctacaatttcgaatccgttattatatgtttgctctcatttttgttgtttttgatgttgaaacggtttttctttatccttgggcaatgagtttcgatgtattaggggtatccgtatttatagaagctttcatattcgcgcttatcctaattgttggttcagtttatgcatggcgaaagggggcattagaatggtcttaattcttgactatttagacaattagattagacaattagaaaaaaatattgagacaattatgaattccattgagtttcccttacttgatcaaacaaccaaaaattcagttatttcaactacattaaatgatctttcaaattggtcaagattatccagtttatggccgcttctctatggtactagttgttgcttcattgaatttgcttcattaataggatcacgattcgactttgatcgttatggactagtaccacgatcgagtcctcggcaagcagacctaattttaactgcgggc

SEQ ID NO: 9317 - DNA, 523 bp, Glycine max
caataatgacggcgaactatccacgcttagtggcataatgaaaactgagtatcgtattgccttgaggtcttcactacgacatgatttttcagaaggtgtccgagcagtgctggtggccaaggatcagaacccaaaatggaaaccatcaagcttggaggaagttgatccgagtgaagtggaagccgtctttaaacctttaggaccagaagttggggagttgagagtgtaattttggaaggaaaatgtactcttctcatttcttcaaatgcattatagaattgtaagcactgcataaaataaatagatggtgttttcattgggtctgacttccagttcaggaccagcgtgttgcttgtactgtcaccatatgataacatgaggtccatgtttttggaaaggtcaaatgatcatgttgcttccattatacccatttgggagaaatgaaggctagtttcctcaatcaacttctctaaatgttctcaataaattacgtgaattacccattaagaattttgcgcaaaaa

SEQ ID NO: 9318 - DNA, 592 bp, Glycine max
cccaaagttggatgatgctagagatgaggagaagacccaaaaaacaaaaccaaaacgccacgtctcttgtggttttcattcaataatacacctcttgtcggtggccgatgggtgagaacagagaaagacccttttattattattgaagtccaaacaacatacaagcatggaacaagatcgaaggtttgagctcatcgaccaagcaattcagaagcttgtacacgacaacaccaacaaagtccaagaatccctccataacaatgatgctcaataccaacaccctctttcccaccttctctctgtctctcagttgaaaatgttgaaaggagaagagatacttgagcaattcgaagcttctagttcttctgagccggtggcttctataactcaggaaacagaaagtgaaaatgaggatgctggggaaagtaagggaagtgaaaatgatgagataatcaaagaactgaagaagttgaagaggcagaacttcgtgactcattgtcttctttcggtgatgattgttctcactgtggcttggcaactatcggaggtttctcttattttgaaagtcaaagatggaataagccaccctttt

SEQ ID NO: 9319 - DNA, 1319 bp, Glycine max
ctgacaaactacaacaattttcattttgttcttgttctttgaattattccgtcgttcctaattactgctattacgagacgacgcagatttagttcggattgttcgattgcgatggctaggaagatgcttatcgatggtgaagctgaattggctcaaggtggtggagaagaagtgtcgaattttgacttcgacttgtttattattggggctggaagtggtggcgttcgtgccgctagattttcatccaattttggagctaaggtggggatttgtgagcttccatttcatccaattagttcagaaacaattggaggagtcggtggaacgtgtgttattcgtggttgtgttcccaaaaagattttggtctatggagcatcttttggaggtgatcttgaggatgccaggaattatgggtgggagttgagtgagaaagttgacttcaattggaagaagctcttgcaaaagaagacagatgaaataaacagattaaatggactttacaagcggatgttatccaattggggggttaaattatttgaaggcgagggaaagatagttggtccaaatgaagttgaggtgacacaattggatggcactaaattgtcctacacagcaaagcacatattgattgcaactggcagcagggctcaacgtccaaatattccaggacaggagttgggtataacatcagacgaggcactaagtttagaggatcttccaaaacatgctgtggttcttggaggaggttatattgcagttgagtttgcatctatatggcgtggcatgggttccacagttgatctagttttcagaaaggaacttccactgagaggttttgatgatgaaatgagagctgcagtggcaagaaatcttgaaggcaggggaattaatttgcatccaaggaccaatttgacacagttgatcaaaacagaggatggcattaaagttattacagatcatggtgaagagctgattgcggatgctgtactgtttgccactggtagggctcctaattctaagaggctgaatttagaaactgtaggtgttgagcttgacaacactggagcaataaaggtggatgagtattcccgcacaagcatacctagcatatgggctgtgggtgatgtcacaaaccgaatgaatctaactccggtggccttgatggaagcatcgtactttgctaaaactgtatttggtgggcaaaaaatcaagccagactacaataatattccctatgcagtgttcagcattccgccactttctgtagttggtctcagtgaggagcaggcaatagagcaaaccaatggcgatctgttggt

SEQ ID NO: 9320 - DNA, 272 bp, Glycine max
aaacagatttaaacaaatccagaatacgctgacaaactgcagcacttttcattttgttctcgttcttctttgaattattccgtcgttttctgctgcggcgtgcgtgcgccggcgaatatttagttcggattgttcgattgcgatggctaggaagatgcttatcgacggtgaagctgaattggctcaaggtggtggagaagaagtgtcgaattttgacttcgacttgtgtattattggggctggaagtggtggcgttcgtgccgctagatttt

SEQ ID NO: 9321 - DNA, 568 bp, Glycine max
tctcgatatagaaatatagcaatatccattgacaaaatcacaaatcacaaacataatgtgtagatcaattcatgcacccctcttgcttgttcttatgtgtttgatgaatggatcgaattttgcatatgatccttttgaatcttcccttagttttgaacctgaaccacatgtagacatcaacgtactctttgtttccttttacaatggtatggcccctaacaatccaaatgtgaacttgttctacaataaccaaaaagatggggtttatttgtcaccaggaaaaggtttctctaaattggacaatcttaacgggcgtaaatctgtagtaatgtattggaatgggaattgtgcttctttctttgcatatgatcccagcgcagaaggaaaccatcaaaagatctattggttaattaaagaagatggcatttatcatagttgggataacagctcttggcagaaaaggaaaagttggacattcaatcgttgttgaaacctctacttctcaagtaaaataatattttctatttctgtattgtcaataaatggtagttatttccggctagcttct

SEQ ID NO: 9322 - DNA, 503 bp, Glycine max
  unsure (1)..(503): unsure at all n locations
agtgaaggcgtgagcggatgcgaganagcgacagattggggagaagtacagtgttgtatgcaattgcattcctcacctcactctcattctcacacactgtgctccctctcttctcttctatttttatgtaatacacactctctcaaaccctaactctccaatcaatggccatcctgtcccaatccaccgccagcttctccttcgtctccactcggaccgattccactcacctaactcgcttcccctgccgcgtcaccttccgagcccgctctccccctctccgccccgccctcgtctcttcgcgcctcaactcctccaggtcccccgacgccggcggctccctctcgccggacaacggcggcggcgacgtcgcctaccagctccaccacgacttctctccgcggcgccgtcgccgcggctcgccggtcttcgtcacgctgccggtgaattccgtcggccgggagggccgtgtcgcgcggcccaaggcgatgatgttctcactc

SEQ ID NO: 9323 - DNA, 663 bp, Glycine max
acgccttccgccaacccttcctaccggttgcaaaaggccaccaaagggaggggaaccatttgtgggggttaatttggggaatttggccaattgaaatcgcatgttatgcttcaaaggaggaaatttcaagagcaatcaagcctcttgtggaacagtactttcctgtggaaactcaaaatccacacaagtttgctgtactgtatgaggcacgggcaaatactggtgttgacaggatggaaatcatcgatgctgtggcaaagtcagttcctggaccccataaagttgatctaaaaaatcctgataaaactatagtagttgaaattgccaggactgtgtgcttgatcggggtcatcgagaaatacaaggaactttccaagtataatctgaggcagttaacatctcgtaaagactgagccttccaggcaacccgtatagatgtcgttcttgcagcattataatggcttaacgtatttaggcttccccttaacttcatgttgatactctggtctgtgactgttgttgtcattttccaaagtgttgaagattagatgatgactcttgcagctagtcctttgactaagtgtagttagcaagttctcacaaatcaaacgggaaaagaaacccttacgcggcagtatagatccattaaaatatcatcatttg

SEQ ID NO: 9324 - DNA, 929 bp, Glycine max
gaattcttaatataataatagagattgtagaaattagcagtaactggtgttgagtagctttggtcccttgtttttgttgtgctatggcgcctgatgctgccgccgccaacggcaaaaagagaagacgctatcttcctcataacaaggcagtgaagaagaagggttcgtaccctctgcggccaggcgtgcaaggttttttcatcacttgcgatggcggcagagaacaccaagcctctcgtgaagctctcaatattctcgattccttttatgaagagctagttgatggggaacattcaagtgtaaaggagttacccagcaaacctttaaataaaaaaatcacgtttgcagattctgactcttctagtagcgatgatgatgatgatgatgatgaggaggaggaggtgcaggagggggatgaggaaaagggggacaaaaagccaaaattggatacttctaatgacgacaacaccagtcacgatgatggagtacctgaaaaatcagatcctcataaagttgatgaaccacacactcaggaagtagatgaaacttgtgataataaaggtgcgaatgacaatcttaagactactaaagggacagctgatggtctaccagctgtgaaacagtgctgcaaaacaaacgtgcctgcatgtaattttagtgacaaagtggaacagaagtctattgataagttaattgaagaagaattcaaagaattgggagacaagaataagaggcgctttgtcaagcttgattctggttgtaatggcgtagtatttgtccaaatgcggaagaaagatggagaccgaagcccccaggatatagttcaccggatagtgacatcagctgcatcaacattgaaacatatgtcaaggtttattttgagaattttgccaattgaagtctcatgttatgcttcaaaggaggaaatt

SEQ ID NO: 9325 - DNA, 358 bp, Glycine max
ggacgcgaacgcccacgcgtccggttttcgttctgctatggcacccgatgccgccgccgccgtcgccgccgacggcataaagagaagacgctatcttcctcacaataaggcagtgtagaagaagggttcgtaccctctgcggcctggcgtgcaaggctttttcatcacttgcgatggcggcagagaacaccaagcctctcgtgaagctctcaatattctcgattccttttatgaagagctagttgatggggaaaaggagttaaggagttacccagcaaacctttaaataaaaaaatcacgtttgctgattctgactcttctagtagtgatggtgaggaagaggaggaggaggaggagg

SEQ ID NO: 9326 - DNA, 458 bp, Glycine max
cccaggcgtcaggctgcgagaaaacgagagacggggagatgaaatggtatagtacagagaaaatgcaaggcgaggaacactacactattgccgacgccatgctgaagtctacccatgagaatggcatttctgtgagaggtcataacattttctgggatgatccaaaatatcagcctgattgggtgaggaccctatcagcctgcggatttaacgaaggcagcagcaaagagaatgaaatctgtgctttcaagatacattggagaactgattgcatgggatctgatgaatgagaacctccatttccacttttacgaggacaaattcggtgaaaatgcctctgcagtagcatatgcaacagcttatgaggctgatccagagccaaagttgttcctgaatgagtttaacaccattgaatatagtggggatgaggcttccacccagccaaatatataagaaac

SEQ ID NO: 9327 - DNA, 775 bp, Glycine max
aaaaagaaaaaaagggaatcacaaaaaaagcaaaacctcccaagataagttataattataaacaacaactaacaaaataacccccccaaaaatccccccttgggtttgttttgttgtcctaatgagttgttttacttctgaaaaatccaccatgtcttcccagctccaaatggttcctctaagcaaacttcgttaccaaaggctaaggcatgaaaaagggtgggatgatgaaagggaaaggaggtcaagaagctggttcaggtttagaagggttcccattaggagaaggtttagactcaaaattccaagcttgagaagactttggagaaaaagggctaggttggtttcttccatgagaatttcatatgctaaagtgttgaaaagattcaaggaaggtcaagtccattttggtgacctttttgctgggaactacttgttcatgcatgtcaaccctgcctcactcaagtgccttgaaagggatttgtccctctcaaaaattgcatagagcctttattgtgttattattttggttctcactatgctgcttgggaacttctgtctcttatctgctaatcagatcgggaaaaaatgttggattcgggagcagcgagattatttaaaattggggcaattaatcttctccttatgctagcggctttatatatgttgtttacatcaaattctgtcaactcaagatgtttgcatcatggtaattgtaattaattggtacattaattatatcgtatatatgtataccattaattattgtaatttt

SEQ ID NO: 9328 - DNA, 956 bp, Glycine max
cctcacctctttcctacactcagccaaaaccaaatccacttctccaactaatgggcgtgttcagcgaagatccgaatcccaacccgaacccgatcgtgatccgagaggtttgggcctccaatctcgaatccgaattcgaactcatccgcgaactcatcgatcgctacccttttatctcaatggacacagaatttcccggtgttattttccgaccacatgtggaccccaccaaacccttcaaccaccgcaaccgtccctccgaccactaccgcctcctcaagtccaacgttgacgctctcaacctcatccaggtcggcctcaccctcaccgacgccgccggcaacctccccgacctcgccggaaaccgctccatctgggaattcaacttccgtgacttcgacgtggcgcgtgacgcctacgctcccgactccatcgatcttctccgtcgtcagggcatcgatttcgcgcgtaacaccgccgacggcgtggattccacgtgcttcgcggagctgatgatgtcttcggggctcgtgtgcaacgacgccgtgagttgggtcacgttccacagcgcgtacgatttcggttacttggtgaagatcttgacgcgccgtaacctaccgacgaggttggaggaattcttgaaaaccgtgaaggtgttttttggggacaacgtttatgatgtcaagcacatgatgaggttctgtgacacgctctacggcggattggaccgcgtcgcacggtcgcttaacgtggaacgcgccgtagggaagtgccaccaggctgggtcagacagcttgctgacgtggcacgcgttccagaagattgttgacatttattttgtaaaggatgagcaccgaaaacacgccggtgtattgtatggactagaggtcttctgttaattacaaaaattattaaagcataaaaataataaaaattcatttgattgattgtttatt

SEQ ID NO: 9329 - DNA, 542 bp, Glycine max
tccgacggacacgcgtccatccacgcatccgtccaattccactcccaccgaccaaaacgcgcaacacgttgtaattaaaacgacaccgaaactaatgggcgtcttcagcgaaaacccgaatccggacccggttgtgatccgccaggtttgggcttcaaatctcgaatccgaattccaactcatccgcgaactcatcgaccactatccttttatctcgatggacacagaattccccggtgttgttttccgaccacacctggaccccacaaaaccctacaaccaccgcaacaacaatcgcaaccgccactccgaccactaccgcctcctcaagtccaacgtcgacgctctcaacctcatccaggtcggcctcactctcaccgacgccgccggcaaccttcccgatctcgccggaaaccgctccatctgggaattcaacttccgtgacttcgacgttgcgcgtgacgcctacgcgctggactccatcgatctcctccgccgtcaaggaatcgatttcgcgcgtaacgccaccgacggcgtagagt

SEQ ID NO: 9330 - DNA, 385 bp, Glycine max
gatccacatcaaaacacaagcaaatcctagaaattaagctcattgagaaacataaactatcttgacaaaatgaaacaagttttcgtagcattcttagctctgcaagttgtgttagtccttacaattatggctgcagatccagcagggaagggctacgattgtgaaaaggcaaaaaggtcactaaagtcttgcatggaatacctcactggtaatgttgatagcccttcagctgcatgttgcaatggtgtcaaggaattgaaagcatcagcaccaacaatagatgaaaaaattgctgaatgtcagtgcattgaagaagcactaactcccattcctaacttcaggcaggacagagccattgcacatcctaaggaatgtggtgttgatg

SEQ ID NO: 9331 - DNA, 1080 bp, Glycine max
aatttcgggccaggcctgacgcccacgcgtctgtctttctctctctcccgaagataaggcagagaagagaaggagagaggcttgtacctggagagaaaagaggagacaataatacatggggaagcagggtctaaacacggtggagcaacaatctgtggcaccgacagcatccaagtttccgttgagcttttgggaagccacggtggcttcaacggtggcgctggtttttgcggtgggtcttctcggcgtgtacctcaccatgcccgattccgattacagcttccttaaactccctcgtaccctcgaagaccttcaactcctacgagatgaccttgagagctatacaagtgactacactgcacaagtcttggtggggtactgcgtggtttatattttcatgcagactttcatgattccagggactgtgttcatgtcattgcttgctggagcactctttggagtctttaaaggtgtggctctggttgtgttcactgccacagcaggagcttcttcatgctatttcctgtctaaacttattggacgacctattctctcctctctgtgacctgaaaagttgaaattcttccaaacccaggtggctaaaagaagaaagggtttgttgaactacatgctttttctaagactgactccgaccctgcccaacacatttattaattttgcttctccaattgtggatgtgccttatcatattttcttcttggcaactgttattgggctgatacctgctgcctatgtcacagtcaaggctgggttggctcttggagagttacaatccgtgggtgatctctatgatttcaactcaattgctactttgtttctcattggtgtagtttcagtcacacccacactaatgagcaagaacgaatcatagcatttcagaagccaagaatctttgtgaatgaaggaagcccttgttctcctgacaactaatatcagctcagtatttgtacagatctccaaaacaaaaagaaaaaaaggaagaaaaagaacaattgcattgtgattctttgctattagatttattgcaaaatgctgcagtagttcaagacaagcatatga

SEQ ID NO: 9332 - DNA, 492 bp, Glycine max
ccttcaaccaccaatattctatgactctgtgaaaactctcgtctctctctctcctgaaggtaaggcagagaagagaagaagagaaggaaagaggcttgtccctggagaaaagaggaggcaaatacatggagaacgagggtgtaaacacggtggtggtggagcaacaacctgtggcatccacgtccaagtttccgttgagcttttgggaaaccacggtggcttcaacggtggcgctggttttcgcggtgggccttctcggcgtctacctcaccatgcccgattccgattacagcttcctcaaactccctcgtaccctccaagacctgcaactcctacgggataaccttgagagctatacaagcgactacactgcacaagtcttggtggggtactgcgtggtatatattttcatgcagactttcatgattccagggactgtgttcatgtcattgcttgctggagcactctttggagtctttaaaggtgtggctc

SEQ ID NO: 9333 - DNA, 591 bp, Glycine max
gtatgacatagctcaacaacgaattggatgggctaactatgactgttctttgtctgtaaatgtttcggtgactacaagtaaggacgagtacatcaatgcggggcagcttcatgtcagcagctccgaaatacacattctttctaagttactacctgtaagctttgtggctctctctatgtacataatgttggtatgaaaatttttatgtgaagtgttgggaatcaaagtcatcagtcaagataatgtaaaaataagttttcaacattaagcatgggaagaaagatcaagtgagaagacgaagatttatgttccaagtagcttggaagaaatgcagatttggatagaagctttgacaattggagatttcgatgaaaggttgagaagggaaaattttgacaaaattctgataagtggaaatttcgatggaagttcaaagaatgattagttgaaatatcatgattgtaagtacccaatttttgactgggtaaaaaggggatgataaacaaaagttgattaaaaaaactagttattattaaaatttctgaagtttgaataattttttatattatgaacctttatttttgtttgccc

SEQ ID NO: 9334 - DNA, 1102 bp, Glycine max
cttcctcaccacacccacaaatataacaagagatgatgatgatgatgttgtcgtcgtcatatgttacatgttccaattacctcggtggcaatcagtgaacaacgccaaatcttaaacttgttcttttgtttctcttttgtactactagttctgaacatggagctgttgtctctgagactcaccccttcaccttctgcttcgacttcatcgcttcctgcagcacttgctcactgctccaagctatgtgagtttcaaccgcggaagaagaagaaggtgtgtttcgacgcgcctaggcttgcggtgcggtgtgtgaaagcctcggcgcagcgaaccggtgatactatcgacgatggagagactcggactgggttcaccacacctgccatggaagtcaccacattcaatcgaaccactttcaccgatgctgctgactttcccgtttgggaaaagattggtgctgtcgtcagactcagttatggcctcgggatttatggtgccatggcagttgcggggagttttatatgttcaatcacgggaattgactctctggggggtttccatctatcgttagatgccattttggaagggcttggatatgcagctcctccaattatggcacttttgtttatactcgatgatgaagttgtgaagctatcaccccatgcccgtgccatcagagatgtagaggatgaagaactgtggagctttttctatgggatgtccccttggcagtttatactgatggttgcagcaagttcagttggagaggagctcttctacagggctgctgttcagggggcattggctgatatatttttacgaggcagtaatcttataacagatgttcagggaatggcatcattgaccggtgtgctgcctccatttgttccatttgctcaggcatttgcagctgtacttactgctgtccttactggttctctctattacatggctgcctctcctaaagatcctacttatgttgttgcacctgttttacaatctcgctctggtcgccaagatttgaaaaagctatttgaagcctggtatgaaaaacggcaaatgaaaaaaatctattccccacttctggaaggactgctggcac

SEQ ID NO: 9335 - DNA, 527 bp, Glycine max
cacagacacaaataataagagattatgattatgttgtcatatgtttcatattccaattgcctcggtggcaatcaatgaacaacgccaattctgaaacttcttctccttcttcttcttcttttgtttctcttgtgtacttctacttcttctgaacatggaactgttgtctctgagactcaccccttcaccttcgagttcgacttcatcgcttcctgcagcacttgctcactgctccaagctatgtgaatttcagccgaggaagaagaagaaggcgtgcttcgacgcgcctaggcttgcggtgcggtgtgtgaaggcctcggcggagcgaaccggtgatacgatcgatgatggggaggctcgtagcgggttcaccacacctgccatggaagtcaccacattcaatcgaagcactttcagcgatgctgctgactttcccgtttgggaaaagattggtgctgtcgtcagactcaggtatggtctcgctgagtgaattatacttacatcttattattaagaaggcattgcac

SEQ ID NO: 9336 - DNA, 499 bp, Glycine max
gacaatttagaacttcataatactgaaaacaaagtagcatagatattcaaggtaagatgggagagaagaaagttttggctcttgtcatgcttgttgtggcttatggtttggcagtaacaacattcactgcttgtcaacttcctccaacgtgcaatgggtatgagccattaatttaccaatgtgtgccttatttggttaatccaggcccttctactccaactcctcattgttgtgatggagcaagagtggcgattcatagagccaacaatgctcaagctattaagaatttctgtagttgtttggaggatgctggaccaaatttatattttcaaaagcagagtttggtactacttccagcagcctgcaatattaaaccttcctttgattttagtaaatgtgtatatggtgattaactgtgcaagcataaatttgcggataaattgataagtagatgtaatagaccccaatattttcaataaaatagagagagtattgttcg

SEQ ID NO: 9337 - DNA, 748 bp, Glycine max
tccacggttgtaggtgtgtgtgttgttgcacactctccacacttacacagagagaaaagagagagaaagaaaaggatcaaatagttaaaacctttggttctttccctccatagttccatttttccattcaacaacacaacacctcagacagacatcatggaggcaggttacaatcctcgtaccgtcgaagaggtctttagggatttcaagggtcgcagagctgctttgattaaagccctcaccaccgatgttgaagagttctaccagcagtgcgatcccgagaaggaaaatctttgcctttatggatttccaagtgagcagtgggaagtcaatctgccagctgaggaggtgccccctgagcttccagagccagcattgggcattaactttgccagagacgggatgcaagaaaaggactggctgtctttggttgctgtacacagtgatgcttggttgcttgctgtggctttttattttggtgctaggtttggatttgacaaggctgacaggaagcgactttttaatatgataaatgatcttccgacaatatttgaggttgttacagggatggcccagaaacaagggaaggaaaagtctttagtttcgaattatagccgtcccaagtcgaattaaacctttaagcccggttttgattcaaggtccccaaaaccattgcattccaaggcccgggccctttaagggtgggttttggaaaagggaacccaaattttcctttggggactttttt

SEQ ID NO: 9338 - DNA, 336 bp, Glycine max
gacgctatgttaatgtagttgtgtgtgttgtgttgcacactctccacactccacagagagcgcagaaaagggtcaaatagttacaacctttgcttctttccctccatagtcccattttttttttttccattcaacaacacaacacaacaccgcaacctcagacagacaaacatcatggacgcaggttacaatcctcgtaccgtcgaagaggtctttagggatttcaagggtcgcagagctgctttgattaaagccctcaccactgatgttgaagagttctaccagcagtgcgatcccgagaaggaaaatctttgcctttatggatttccaagtgag

SEQ ID NO: 9339 - DNA, 697 bp, Glycine max
ccacccgtccgaccacccctccgtccggttgctaaaaacaacaaaagggagagatggggtgatgaaaattcacatgccaggctacttcagctcgatcagcaagggtgtggcaaccattatggcctcttactccagttggaatggagtaaaaatgcatgctcaccatgatcttattactggcttcctcaagaatactctccatttcaagggctttgtcatttcagattttgagggtcttgataggatcacctctcctcctcgtgcaaacatcacttattcaattgaagcaggagtttctgctggcattgacatgttcatggttccaaagcattacacagaattcatagatgttctaaccatgttggtgaaaaataagcacattcccatgagtcgaattgatgatgcggtgagaagaattctgtgggttaagttcatgatgggtatttttgagaatccttttgctgattacagtttggccaaatatttgggaatccaggaacacagaaatttggctagggaagcagtaaggaaatcaatggtccttctgaaaaatggtgaatctgctgacaagcctttactgcctcttcctaaaaaggcgccaaaaatacttgtggctggaagccatgctgataatctaggatatcagtgtggtggctggaccatagaatggcaaggagtcagtgggaacaatcttctc

SEQ ID NO: 9340 - DNA, 1224 bp, Glycine max
gacaatagcagcacacacacttatcttcttcttcctctgattccattcatcattcattactctgatccgacggctgcgatcttctcgtttctccaatcgtacggccaggggtcctttgtctgcctcactcaccttcccaactttctctctctacttagagagtagcttctctggaacaccgagtatggagtccaacggtcatgttagagtaaagagaaatgatattattaaagaaaatggtcattcccatttgtcaaataatgatgatgaacatgatccatggactgcatgggcatacaagcctcgcaccatcacattgttacttattggcgcttgctttcttatttgggcaagtggagcacttgatccagaaagagatgcatctggggatcttgttacttctgttaaaaggggtgtatgggcaatgattgctgtttttcttgcttattgcctactgcaagctccttctacggttcttattaggccacatcctgcaatttggcgcttggttcatggaatggctgttgtttaccttgttgccctcacatttttgctttttcagaagcgtgatgatgctcgacagtttatgaagtttcttcatcctgatcttggcgttgaacttccagaaagatcttatggcgctgactgtcgtatatatctgcctgaaaaccctgcaagcaggtttaagaatgtttatgagacactttttgatgaatttgctctagctcatgttattggatggtgggggaaggcaatattgattcgtaatcaaccccttctttgggtgttatccattggttttgagttggtggagtacacttttcgtcacatgttgccaaatttcaacgagtgctggtgggacagtattattcttgacatcttgatctgcaattggtttggaatatgggcaggaatgcatactgttagatattttgacgggaaaacatacaaatgggttggtctaagccagcagcctaacataataggaaaagtgaaacgaacattaggccaattcacaccagcacagtgggacaaagacgagtggcatccactgcttggtccttggcgtttcattcaagtgcttagtctttgcattgtatttttgacagtagagctcaacacattctttttgaagttttgtcgcgtggatacctcctcgaaattcagttgttatatataggttgattttgtggtggctacttgcgatttcaacaattcgcgagt

SEQ ID NO: 9341 - DNA, 379 bp, Glycine max
ggccggcatgcagccatcacagtcacaggcccagcagcaacagccgtcagcaactggaggattttacaggccaccagacatagggttttatgggcaaagccattcatcaacacaaccagcaccagtacctaggcagtgagcgttattcaaacgtcaaaaatcaacagctaagattgctgccatctttgtatcaagttcatttaggaaacttctgtacaccaaggggaggctatgtagtaatgtaaatcagtagaaaattaaatgtggcaagaattctgtcatgaccatagtcgactgtgatcttcatgacaactgtgatcattagctgacaactgtgatcttcatgaccataatcgactactgtttaaatctgagtagt

SEQ ID NO: 9342 - DNA, 523 bp, Glycine max
actcgagccgaatcggctcgagcgaacatttcatactctattatcggccttcgtttcgttacttagttgtcatttcaattgttccgagatcaaccttggatcaggtttagggaatggctgcaatcttagctcgaaaatcactccttgctcttcgtgcgcgccaattggctgtaagcggtcaagggctgcacagctcccaatactatggccttcggttaagtgcacactccttctctaccaaaagagaggatgaggaaagggagcaactcgcaaaggacatttcaaaggattggagttctgtctttgaacgtagcattaacactctctttctcactgaaatggttcgaggactaatgctgactctgaaatacttctttgaaacaaaagttacaatcaattatccatttgagaaaggccctttgagccctcgtttccgtggtgaacatgcactccggcgatatccaacaggggaggaacgttgtattgcttgcaaactttgtgaggctatatgttctgcacaagc

SEQ ID NO: 9343 - DNA, 603 bp, Glycine max
attccttcttcttcttttttttccccccttttcgggtgtagttactaataaaccatatactacatactacatcaacagcaccgtcttactcgaagtatctgttttcaaatcttggattcgattccatcacttatagttctctcttctctttcttttcctttctttctccgccgaagatggcgccgcccacgccagcagttgaaggcgcccaggcgccgcaagggcggcagcaacagccgcaaggagggtttggcctcaccggaatcatacgcatggtcgttttctggtacttcgcttccaaattcttttcccccaaaaaacctaccgaaccttccgctctcatctccaatctctttcagaaagcacagcctctggatatgtggctttatctctccgagcacgagaagttcaatgactttggcagtgaaagttctcttgtatggcatgaaaccaatgttccatatgctgtttggggacctgagagtaccaggactcatactttgaagtatcatccgtcggagtctttgaagcataatgggagtctatatgctcatgttttctttgcacactctggcttttcgcctgacccaagtgatccggagt

SEQ ID NO: 9344 - DNA, 574 bp, Glycine max
gtaaatgattccttcttcttcctttttttccccccttttcgggtttaggtacctattaacccttttcctccttcctcctttaccacaacggcctaactggaggtttaagttttcaaacctgggatccgattccatcactgatattcctcttctctctctctattctctgccgaatatggcgccgcctgcgccagcagttgaaggcggccaggcgccgcaggggcggcagcaacagccgcaaggagggtttggcctctccggaatcatacgcatggcagttttctggtacttcgcctccaaattcttttcccccaaaaaacctaccgaaccttccgctctcatctccaatctctatcagaaggcacagcctctggatatgtggctttatctttccgagtacgagaagttcaatgactatggtagtgaaagttctcttgtatggcatgaaaccaatattccgtatgccgtttggagacctgagagtaccaggactctaactttgaagtatcatccgtctgagtctttgaagcataatgggagtctatatgctcatgtattctttgcacactctggc

SEQ ID NO: 9345 - DNA, 403 bp, Glycine max
ctcgagccgcggctcgagaaatgagttaagttgaagtttgtaacacccatccaggcagtacttgtggtttgtttgactaaaccctaggagtaggagccgctttttggttgcgacttgggaggaagaagaagaagaagatgtctgcaactgcaagtgcaactttgctaggcatgccggggccatgggcttacgactatcacgagccatctgatccctatacaactaaaattggaggactccctgactggccccctcccataaacaccgatttgcttcgctgcgccgagtgcaccggccaactatgtctggtggcgcaggtttacgctcccctttctcaccaccggactctcttcgttctcggttgcgtctcgcccaattgcggaaccgcttggcgcgttcttcg

SEQ ID NO: 9346 - DNA, 798 bp, Glycine max
attcatctattgctttacatgctcgtgagatgaacagagagtcaatcctactgaagaagttgcagaaagcttgctctgtcctggaaatatctggccctcccatggttcattttgaaaatgagtccttccagaatcacctcaactttctacaaaatatacatctccatgatcattttgtgcatgatgagatagagctagaacaagagttagttgctgtgtgtgaaaccgtattggacatatacctaaattgtgctggttccagttccacttttcacaagtctgataccatgccagcgccacatcgaaaactccctctgagctctgcaaagaaggaagagatagctgctaggacacctttagtcatctcagcattgcaaggattggctggtctgaaaaaggattcattcaggaggtatattccacggttctttcacttactggtagatctcgtgaggagggaacacacctctggagaagttcaacatgccctgagtaatatgttccgttcacctgttggccaaattataatggattgagttttagttttggcatactttggttttggacgttgctgaatatcaatcagcattttccttataagctaaagaacgagccattacatggtcatatcttgatttactcaccattgttgtgtagtgttactcttggttttttgtgattgtatgtgctattaatgtaaatgataaatttatttcaagcagaatactaaagtaccacagatagatagcgaagaaactaagttaggcagccgctggcagtctacgacttggcctaact

SEQ ID NO: 9347 - DNA, 1350 bp, Glycine max
ggcaagcgatacgaaaaataaatttcagttttttctcataatgggttccaccaatgccaataatgaaacggtcgcagagattccggagtggatccgcgtcttcaaagatggcaccgtggaacgcccacttgattttccgatcgtgccacccactctcaacactggactctcatccaaagacatcaccatctcacaccaccctccaaaaccaatttctgcacgcatttaccttccaaacatcaccaattcccagactaagaaacttcccatctacgtctactttcacggtggtggcttcttctttgaatccgctttctccaaacttttcaatgaccattttctcaagttggtccctcaagccaacattatagtggtttccgttgagtacagactcgctccagaacaccctctccctgcagcttacgatgattgttgggacgctctcaaatgggtcgcatcccattctactaaagacaccacccccaacaacactgaatcttggttgactgagcacggtgacttcaacagagtgttcataggaggagacagtgctggtgccaatattgttcacaacattctctcctttcgtgttgggcctgagcccttgcctggggatgttcaaatattgggctctattttggcccatccttatttctacggctcagagcctgttgggtctgagcctgttactgggctggaacagaatttcttcaatctggtttggaaattggtgtatccttcagcacccggtgggattgacaaccctttcattaaccctttgggtgctggggcacctagcttggctgaacttgcttgttctagaatgctggtgtgtgttgctgagaaggatggcttaagggacagaggggtttggtactatgaggctgtcaagaaaagtgggtggaaaggggaaatacaactctttgaagagaaggatgaggatcatgtttatcatttgctcaaacctgcactcaatcaagattctcataaggctgatgcattgatcaagctcatggcttcttttctcgtcaattagattgacttttcctagccctggaatggaacggtttttaacaataagctctgttgttttgcttttaataatgtggagggataaaatttggttctagttcccttattttctttgtcaaatgtttgtggtttaactaaatgtgatgcttttaggatcgcagacaatgttcttgcaggtctatttaggagagcaatatgtggtaaacaacgatgctatagtttaatgtgtcggtgacgttatttggtccacattgcttcattcttaattaaaatgttgcttgagtcctcataaatatataatgccaaatctcatgggcc

SEQ ID NO: 9348 - DNA, 590 bp, Glycine max
ggccgaccgacgcgttcgtactggtgtctataagactacataatggttctttttgctataatactacacaagcgtgctgttgcgagttgagttgagaaggaaaggctgaagaacacatagagagagagagagaagtgcagaaaaaatgagactgttcgatccatggcctgttttcttcaagagagaatggaagcggaattggcccttcttggttggattcgccatcaccggaactctcatcaccaaactttcccttggtctctctgaggaggaagccaaaaagtcgaaattcgtccaggcacacaagaggtgactttagaatggaagatttgcagtggctttgcacattgtattagatgtgtgaagagagcttttgtttgtaataaatgaagagagatgttgtatacactccatgttcctatttccattttggttgtttactttaatgtgattgagaaattcatactaagcagttctgaatcgatggattcacattatgattactttaatctgataattaatggggacttgggaatttgttttgcaataatgccaaattgctaacctaataaaatcgtagttaatcatgt

SEQ ID NO: 9349 - DNA, 315 bp, Glycine max
cgaaaaaatgagactgttcgatccatggcctgtattcttcaagcgagaatggaagcgtaactggcccttcttggttggattcgccgtcaccggaactctcatcaccaaactttctcttggtctctctgctaacgtccttctcctcctccttcttcgccaacctccaaaattggatttttgttctgagtctgatttcccttttcgcagaggaggaagccacaaagtcaaaattcgtccaggcacacaagacgtgactttggactggacgacttgcagtgactttgcacattgtattagctgtgtgaagagagcttt

SEQ ID NO: 9350 - DNA, 593 bp, Glycine max
ctcgaggagctcgagccgattcggctcgagctctctcctattcgtgaatttcggattaaccactataccaatgtttccaactcctcactctctgactttttcaacatagagagcattattcgatttcgtattgcactctctcatctcatctcccatctcattctagctaacatccccttttcttcttctcacttctctccaagtttttttttcacatttctctgtctgtctttgatctgcacacacaacatccctctaaaacattgagggataaaataaaaaacatgaagaaatttgtactcaggttagatttgccagatgacaaggcaaagcagaaggccctgaaaacagtttcaacactttcagggattgatgccatctctatggacatgaaggagaagaaattaacagtgataggaacagttgatccagtgaatgttgtgagcaaactccgcaagtattggcagacagacatactctcagtaggtccagcaaaggagcccgagaagaaagaggagccaaagaaggaagagccgatggaggagccagagaaggagggtgaagccaaaaaggaagaggagaaaaaggaagag

SEQ ID NO: 9351 - DNA, 368 bp, Glycine max
gatgtatcagcaattgagcatataatataactgttgcgagctttgagtttgactaactataaacaaaaaacttcactatattcaaatacccttttgttttgtgtacaaaatgtgtccactaacaccgagtgacttgctgcggattttcgagaaggtggacatgaatggcgatgggtttttgagccttgaggagttgaagatgctgctagagaagacagggttcggttatagcattgaggaattggagtctttggtgggaaagaaaagcctcgacttcagtgagttcttgttcttttatgaatctaggttgaagcagaacaataatggggagaaggaattaagggctagtgggggggatgatagtgatg

SEQ ID NO: 9352 - DNA, 446 bp, Glycine max
gacatctcatgcacgcgtagcgtaagctcggaatccggctctagtgttaattgaagaggccgaactgtgcagaagcagaatgtgcattcactcggggaactgaaaaatgtgggtatatattcatgatcttgatgagctcttcaattgttttatgcgacaacttaatcctctttaatcagaagctgcttttgaagtctttcgtctcgcgtggttcatccaactttgtgattcagttaagcagcaaaacgaggcgtcttaacgggttcatttcaaaagcggaaaagcatagtggccattcaaggaaaagcagttggtggcagaaattctttttcgaagatgatgggaattggcttggtttgagagacgatgatatggtagaggctgaggctgaggctgagggcgagggtgatagcacacactagttatctgagggcgacaagtttgag

SEQ ID NO: 9353 - DNA, 690 bp, Glycine max
gatacaacatggatccgtgccccttcgtgcggatcctcgtcggaaacctcgccgtcaagtccccggcatcatcaaagccctcttctttctccggcaaagtccacccttcgagttcccccttcttctgcaagatcctactccagggacttgattcgaattccacttctcctagagtgtccagtgtccctctgatatcagactccgacccacaccctcactccttcgccgcctcctttgatttctccaaagcccaaatcttgaaagcctcgaagaagcccctgatgaagatctccgtctacaagggccccaccactccctcctgcgtcttcacctccgccaaactattgggcaaagtttcaatacccctcgatctcaccttggccgagtcacgcccctgcaccttccacaacggttggctctccctttccaagaacaccaacccatcccagttacttcacctaacagtccgagccgagcctgacccgcgctttgtattccggttcgacggcgaaccggagtgcagcccgcaggttttccaaataaaaggcgacgtcaagcaaccggttttaacttgcaagttaagcttcagggacaaggacaaggctaacttcccttcgctaaacgccaaccacgccgccgagcgtaaaggatggtccatcaccgttcacgacttgtccggctctccggtcg

SEQ ID NO: 9354 - DNA, 821 bp, Glycine max
gaggaactaggaactagaaccttcatcaaacaaatttgtgagagaaagtgttcctcaattttgaagagcagagaaaacaacaaaggctaaaaggaagggaaaaaaaacaccaaatttgctaaacctttgtcactctactcactgcaactgcaacatcctctctttcccatggattaccttaaatctgcgcttccttctcaaataatgtcagaacgaggctccaatctggttgttatcaacccaggttctgcaaatgttaggattggcttggcttcacaggataccccttttaatattcctcattgcattgctcgccataccgaacaaattcctaactttactgttatagataagatgcttaatagtacagttacaactcaacagcacatcgatagggaaaaagcttatgatgttattgcaccgttattgaagataccatttctggacgaagaaggtcccagtaactctttcccccgtaagatgggacgtgttgatggacacaatcctcatattatcaggaaagatttgcccttcacctggactaatgtctatgaggaggccactaattcatctgtatcattagagacttcaagtaaagatgagactggtcagtttttggatccaaaagaaggtacacattcaaaggaacctaatgcaagtgaaagaaaattcaaagagttcatttgtggtgaggaagcattaagaatatccccaactgaaccatattgtttttgccatccaattcgcagaggacatttgaacatttcacaatattattccatgcagcaggtacttgcaagctctacatactatttgggact

SEQ ID NO: 9355 - DNA, 454 bp, Glycine max
  unsure (1)..(454): unsure at all n locations
gctctcactctccatataacatttcacattggcaacctttctcattgattccattgaacagagtgtgaacaggaagagatagatagagaggcaaagacaaacatgtaatgcaaatgcaaatgcaacaataatcccctttccttcccttcccttcccgacaaaaccctagaggagtacactacattacacactatctatcaactgtggaaattcaattaggaatgccgtttctgaatatgccataaacccacacccactttctgtgtcggcccccttccctaccaattttccctatttattttttcttcttctttctattattatgagactntccattctgcaaccccacccccacccccaccggataaagcgctggccccgcatcgacgcgtcgtccttccaccgccgcaaggacaaggtggtggtgatcatgggcgccaccggctctggcaag

SEQ ID NO: 9356 - DNA, 497 bp, Glycine max
cacagacagttacatgagatcagctattgattactttgaggtgacaagagcaaggccttctcttgcttgcaccctttctcatcacaacttggtctaggctttcctttcacaccactattttggatggggtgaccctgttctgtcagggccagtgtcactgccagagaaggaagtgattctgttcctctctcatggacaagagaggaggaacatcaatgtgcttcttggtttgcctgctcctgtcatgaagattttccaagatttgatgcagatgtaattagggtcatacatatattatatcttatgtgattatttttctaagcttattattattattattattattattagtctgttgtttcctggaagaaaaagaaagagtacttattctgtttatgaatttgttggtgctaatcaataattgaagccttatattttgttggtgaattaatttacatggaaaagtttcttcacttgaagaaacatttgggtgcttt

SEQ ID NO: 9357 - DNA, 431 bp, Glycine max
gatcctcagacatcgtaaaaccctagtaaaacccttgcgtgcttggaaatggcgctcaactcaattcttcgcaagtcgggttctttcgcgagggctcttgctgtctcgggtcaattgacgaagaataaccacctgggtcatcgcactttactctccaccgccatcagccagcaccagcaccaggattcgcttgttccaaggttccacttttcttctgtagcttccaagaagaaaccaacctccgatgagaaccttctccggctcatcgaatccgaaatcgaatgcgcccaagagaccgacgatcataacgcagctgaagaggttcgggtaattttccgtttaagataatcgatagtcccggacaacagactataacgcttgagagaacgtaccaagacgaggaaattaagggtgaggttcacatgccggat

SEQ ID NO: 9358 - DNA, 484 bp, Glycine max
ttcggctcgagattttccctttcgtcttgagagagagaatcggtgtattgcatctgaattggaggggctttggttcacagaaaataggaaaccaaaccctaatataagtcccaaatcacaatcacagcatcagaagagaggtctctcgccgattgttttgtatctgcagttcactccttacgaattccgagtatctccgtttgctgtggcctttcactttcttctctaatcagcgcgtagaaccacaacaacgcttcgcaggaccaaaagaactgttatagtgtgtacaaactgccggcgaatatggaagaagatgattatgtggagtatgtgcccgtggccaagcgtcgtgccttggaagctcagaagattctccaacgcaaagggaaggcctctgctgtcactgacgatgatttggagaaacaaagagtggctgaaactaagcccagtcttctggttaaagcgtcgcagctgaaacgagagc

SEQ ID NO: 9359 - DNA, 515 bp, Glycine max
ggataatttcacaccttatctatctaatatactatacaaaaagttcttatcagtgacagagtaaaggaggcataccgatgacgatggcgatgacggcgtcgcagttgcggtgcggttgggggtggaggccaacgccgaatcagcagcagcaacgacgtcgtatggttccggtggtgtgttccatcgctatagagaacgcgaagaacaaagagagagcgaaactgaagaagctcttcgatgaagcgtacgagaggtgccgcactgctcccaccgaaggcgtttccttcactctccaacaattcaccgacgctctcgacaagtacgacttcaacgccgaaatgggcaccaaggttaagggcactgtttttgccacggataacaatggagcttatgttgacattactgctaagtccacggcctacttgcctcttcatgaggcttgcatccacagaattaagaatgtggaagaagcaggcataatttctggcgtgagagaggaatttatgatcattgat

SEQ ID NO: 9360 - DNA, 583 bp, Glycine max
gttgttccatgctctctgaggcagaaagacattattaatagcaatcctattaatgctaataactctagcatcagtactagagtccgaatggaaggagtatggccttcttcaccacatttgaatgccactccaaaccttttttctgatcccaataacaacaacagcaacaacggcgtttcggcacgatcactgatctctggttatcctaatgttccatctagatcaagtgatggtcccacatgcgacggtgtggaagatgggaaaaagactgagaactcccttgattgctggttatttggagttaatttgactaacaattgtagcaacgttattactactccttcagagagggaacagagaggtccaagctcaacgtgttgttcttagtggccccaaagaaactattcctgcagctgcatgtgaaactgagaagggttagactcccaactattcactgtccaacaaagggcagaagcagattatttctgaggcatcaccaaatcagtggcagaacaggcaggccactgtactatccatgacgacgcggactaagggtgcaatgccaagggttcgcctttggccc

SEQ ID NO: 9361 - DNA, 517 bp, Glycine max
cccggctcgaccaagccgtcagccaagccttccttaaggttccaaaagaacaccaaaaggggaaattattctggtccgtggacgacataatggaaaccggaggcagaaaactgaaaagcagagaaacgatggcctttgaatcggtgacgcagtcagcacctcctccgagatcaagaggaagaatcaccttgctcgaaaaccccaaaacacccttcgcccttgctcttctctttgccgacgccgtcctcgtctctctcataatcgccttcgtcccctatacgaagatagattgggacgcttacatgtcacaggttaccgggtttctcggtggagaacgagattaccgcaacctcaagggtgacactggtcctctcgtctaccctgctggctttctctacatttactctgctttccagtatcttaccgaaggacaagtttaccctgctcagattttgttcggagtgttgtatatcgttaacttggcaatcgttctcgccgtctatgtcaaaactgatgt

SEQ ID NO: 9362 - DNA, 439 bp, Glycine max
gatctttagttggacgcgcaagcctacgacaaatttaaaaccctagtcgccgttgccatccaaccatcttctgtttaccgtcgtcgtcgtcccgccgttcctctgccgtcgtcgcacgaacacccagcagagagcttcgaagccacgcaggcgggaacgaccagccatcccagcgtcgtcgttgcagtcggaaggttgcaccacaccaggccgtcgcgttgtaaggttccaagctttttagacagctgacaagagacaacaagatatggcagagaagagcaaagagctgctccagtttgagcataaaggcacacccctttcttccttagaatccactcttcttgtttgtgataataaaacagaatcagacacacaaactacgagactcccccctcatggcacagtactcactgtgccatatcacccaatccaaatttta

SEQ ID NO: 9363 - DNA, 415 bp, Glycine max
cagaagggggactcgggttttctctcggagctccgtcgggtcacgggtcgcaaatccgggttgaccctgccacgtgtcttcattgacggaaggtacattggtggggccgaggagttgaggtggctgcacgagagtggcgagctcaagaagcttctcgagggcttgcccgcagtggattcccacctccgcgtgtgccacgtgtgcgacgatcataggttcgtgctatgcggggagtgttccggtgcgcgcaaggtgtacgcggagaaaggtgggttcaagacgtgtgcggcttgcaacgagagtggcctgatcagatattgcttgaagttggaaaagcctttataatccttggtagcctcaatgttttggagcttaatgggtggtctccgtgtttatcttgcaatttttttttatt

SEQ ID NO: 9364 - DNA, 419 bp, Glycine max
  unsure (1)..(419): unsure at all n locations
gccttcgttacggtgccaaaaaaacaaaaaaaggggaattgaagttttaataaaatcctcagataagattaaactatggttagagactaggggtatttaaaatcgaattaaattatatattatattgtcaaagtgataatcttgtattttaaaatgagcagattacctgattgagttcggaaagtgtaatcgattttacaatcatcttcttttgttagggtccttttgatttaaagatatgaaagtgaattgggatgacaaaagaggaaatgtttaaattaaaataaagtgttgaggaatgagatttgtctttttttgaaacttaaatgtactcaagtgtaattaaatcaaatttattattaggggtgtaagtggtttttggccaaaaannnnnaaaaaaaaaaaaaaaaaaagggccg

SEQ ID NO: 9365 - DNA, 576 bp, Glycine max
aagctcgaaaccacgcaaacgaaccaaacgcgtcaacgaaggcggcttctctctctcgtctcagcttttctcctttcgttcgctttcgcttttcgtgtcgccggtaaggcaattcgatacctctgaaccctaatcagacgcagccaccgtttagggtttccatcctcctctcatactttgcctgattgctttcgtgtttcgtttctctcttttcatttcaatttttgatacggtccgctgttgattgtattatatcctggaaaaagtaaagaacattataattggtttttgtcgtgtggatttttgaatgattgattagggttgtgtgaatcattgaaaaaaaattgaatcctccgttctgatttttccggagggttagggtttggaaatttggggatttttttagggtttgggtttgaaatacatttctcttcgattcttaattgcttattgagaagacttgtgcttgtgcttgtcaatcacatggaggcagggcgaaaaagcgtctccctgagaagagaattttgcaaatatggtcccaccaaggggactgatcaccatactaatggttctttc

SEQ ID NO: 9366 - DNA, 382 bp, Glycine max
tgttatgttttcgctacggtatttgggcagcggcggcgcgccgctcaggaaggaggtcgcccaggactttagagcccaattccccaacgtggaaattgggcagggctatggtttgactgaaagtggacgaggggcagctagagtgttggggcctgatgagtctaagcgccatggttctgtgggtcgactagcagaaaatatggaggccaagatagtggaccctgttactggagaggcattacctcctggccaaaaaggggagctctggttgcgaggtccaacaatcatgaaaggttatgtaggagatgagaaggcgacagctgaaacattggattcagaagggtggctgaagacgggagatctttgttattttgactctgat

SEQ ID NO: 9367 - DNA, 1272 bp, Glycine max
cggacgtgggttcggactctatctgtcatcgaccatatcactttggtcaccttcacagatacattcgtcgcattcatccatttaacttccacaaattcctacaaattctaaccaaacccttcactactccaaatcccacaacttctctcttttttttccctccttcttttccctttttctgttgtccgatcttctgcctcctagatcttggtatttgggattgatcacctggagttggaaatggttaaaagttatggagtgttctgatttgcgaaagatatcatgttgcagtgcttagaaggacttaagcctttatttgcgtccatattgcgatgttgtgacctggatatatataaccagccaagaggccttgaagatcctgaacttcttgctagagagactgtgttcagtgtaagcgaaatagaagcactttacgagctcttcaaaaagattagcagtgctgtaatcgacgatgggttgattaacaaggaagagtttcagttggcattgttcaagacaaataaaaaagaaagtctgtttgctgatcgggtatttgatttatttgacacaaagcacaatgggatactaggttttgaagagtttgctcgtgctctctccgtttttcatccaaatgcccctattgatgataagatcgaattttcctttcaactatatgatctcaagcagcagggttttattgaaagacaagaggtgaagcaaatggtagttgctactcttgctgaatctggcatgaacctatcagatgacgttatagaaagtataattgacaagaccttcgaggaagcagatacaaagcatgatggcaaaattgacaaggaagagtggagaaaccttgttttgcgccatccgtcacttttgaagaacatgacccttcaatacctcaaggacatcaccacaacattcccgagctttgtatttcattcacaagtagacgatacttgaagataatttctcccatggcttcttcctttgggctgcatggccacttttgtacaaaaaagggcatggcagacagccttgcttttaccttacatttgttatatctttgaataatgtattttgttttgtggattcttttgctgggattttactttcattttttcttcaaacttctagacacatttggttcccatttttcaaatttcaaaagcaagattccaaggttgtgtagagtttgttttaaattatgagtatgtcatgacctcagaatattttgaaattctttatggtcaaaacttgtctaccgcatgt

SEQ ID NO: 9368 - DNA, 463 bp, Glycine max
ggtactctagctgtcatcgaccatatcactttcgtcaccatcacagacacattcgttgcaatcatccatctcacttccacaaattcctccaaattctaaccatacccttcacgactccatcttccataacttcttcacaccctccgtcttttccctcgtctgttgcccgatcgtctgcctccaagatgttggtatttgggattgatcacctggagttggatatggttaaaagttatggagtggtctgatttgcaaaagatatcatgttgcggtgcttagagggacttaagcctttatttgcttccatattacgatgttgtgacctggatatatataaccagccaagaggccttgaagatcctgaacttcttgctagagagactgtgttcagtgtaagcgaaatagaaaagccaaaccttttttttttaaccccccggaaaaataggggccccccttttttccc

SEQ ID NO: 9369 - DNA, 793 bp, Glycine max
ggagagagagagaggctgaaacaaagaagtgaaaataacagcaaaaagtaggagctgcagcagctcccccgaagcttatctcagcggcagactctgaaagctgtttgagtagcctcaacccggagaatagcaccaatgggagaggaggaaaacaaaccagaggaacccatggcaaaggagaaaaacccagaggaagaagcaacccaagagaaaaaaccggagcaagagtccaaagaggaagttgctgctgctgctgctgctccgccaccgccaccgccaccgccaccgcccgagattgtgctcaaagtgttcatgcattgcgagggttgcgcccgcaaggttcgtcgctccctcaaaggattcccaggtgtcgacgatgttgtcaccgattgcaaatctcacaaggtggtcgttaagggagagaaagcggatccgctcaaggttttggagagaatacagaggaagagtcacagacaggtcgagcttctttctccgatcccgaaaccgcaagaggagaagaaggtccaagaggaagaaaagcccaagcccacacccgaagagaagaaagaagaggctcagattgtgatgacggttctgaaagttggcatgcactgcgaagcttgctctcaggaaatcaagagacgcatacagagaatgaagggagtggaatcagcagaacccgatctgcagaactcacaagtgagcgtgaagggggtgtacgatccagcaaagttggttgagtacgtgtacaagagaaccggaaagcacgcagtgataatgaagcaagagccag

SEQ ID NO: 9370 - DNA, 493 bp, Glycine max
ggagagaggctgaaacaaagaagtgaaaataacagcaaaaagtagcagctgctgcagctcccccgaagcttatctcagcagcagatactcaaccctgtttgagtagccgagaataacaccaatgggagaggaggaaaagaaaccagaggaacaacccaaggcagaggagaaaaaaccagaggaagagaagaagaaagaagaagcagcagcagcggaaaaaccaagcgaagagaaaaaaccggaacaagagtcgaaagaggaagttgctgctccgccaccgccaccgccaccggccgagattgtgctcaaagtgttcatgcattgcgagggttgcgctcgcaaggttcgtcgctccctcaaaggattcccaggtgtcgacgatgttgtcaccgattgcaaatctcacaaggtggtcgttaagggagagaaagcggatccgttgaaggttttggagagaatacagaggaagagtcacagacaggtcgagcttctt

SEQ ID NO: 9371 - DNA, 391 bp, Glycine max
cccaacacaatggaatcatgattttgttgtatattttttaaccaccctagacataacaatggaaacacgattttcgttttagcattgctacaatgaaatcacgatttcgttgaacataaatttgcgaaaaaaatacaattgtagtggggtaagggggggaaatgaggagaagaaggtccaagaggaagagaagcccaagcccaaccccgaagagaagaaagaagagcctcagattgtgacggttctgaaagttcacatgcattgcgaagcttgctctcaggaaatcaagagacgcatacagagaatgaagggagtggaatcagcagaacccgatctgaagaactcacaagtgagcgtgaagggggtgtacgatccatcaaagttggttgag

SEQ ID NO: 9372 - DNA, 1298 bp, Glycine max
gatctccttgttcctatactactgaattgataatgtttcatttattaggagtttttcactcttagttatatcatttgatttttctgtcacttctcttatttgattatttcatgttgctatctagtgaagttttcccggtcctggtcttgtatttgtcttcctcagaaataaatacctcatgtttagacttattttcaggggacaagctgagaaagaatttaaagtagaggtagaagcaattggtcgagtgcgacacaaaaatcttgttaggctgcttggatactgtgttgagggagcctacaggatgcttgtgtatgagtatgtagacaatggcaatctagagcaatggctgcatggggacgttggagctgtaagccctttgacatggaacatacggatgaacattatattgggaactgcaagaggattggcctatcttcatgagggtcttgaaccgaaagttgtccaccgagatgtgaaatcaagtaacatacttattgatcgccaatggaactccaaggtttccgattttggacttgctaagcttttgtgttctgagaatagttacgtcacaactcgagtgatggggacatttggttatgttgcaccagaatatgcatgcactggaatgctgactgagaagagtgatatttatagctttgggatacttatcatggagataatcaccggaagaagtcctgttgattatagtagaccgcatggagaggttaatttaatagaatggttgaagactatggttgggaatcgaaaatccgaggaagtagttgatcctaagctccctgagatgccattttcaaaggctcttaaacgtgctttgttgattgctcttcggtgtgttgatcccgatgcaacaaagaggccaaaaatgggacattgatacacatgcttgaggcagacgacctgttattccatactgaacaaagaactgagggagagtcttcccgttcctatcaaagtgagcacaaggactcaaatttagataagagaacaggtggaggtgtcattgataaaagtgaagatgctagtactagatggagatgattacaagctgataatttaatagaactacgtgcttagtttttggtctctatcagttttccaattcttgtgtctaagttaatttttaaaaatgaaagtagtttcttttttgtttttttattatatattattccactacgtgcttttttgttctttattatatagttttccactgtagtttcttaactatctatagtttcttttctgattcgttattataaaataaaaatatttatggc

SEQ ID NO: 9373 - DNA, 459 bp, Glycine max
gggggtgcaattgtgtgaggaaatatctctcacgagtttgtataaggagagaagcggacatgaagaagcaattagcatcaaggcgtttgctgatgtgggttatggtacatttgagcatttcaggagtgttgtccaagtccaaccacaccacaactacaacttctctgctgtgcgatggctccgtagaggactgcctcaacgttcaccacttggactcacagcttcccaccatctccagcacccacttccgcagaatcctcgctggagaaaaatgctgcagaggtaacactcagactgcaggtacaggtgatcccaataatcccaacttctgttcgaccgcaaccggttatcgtaagtgtggggccgcaactgatcctggtcaacccaaccgatgtgctgatccaaatgccttccacaggggttgccatatttaagctatttatgtattatttctaatgc

SEQ ID NO: 9374 - DNA, 640 bp, Glycine max
aagtatctctcaagattctgtagcagcgagaagcagagtagcggatatgaagaagcaagcatcaaggcactttcctgatgatgggttatggtaatatcgcttcacgcacatctcatcattgcagctgtgtctaagtctaatggcacaatttccgtgtgcgatggctccgtagaggactgcctcaacgtcgttcaccacttggactcacagcttcccaccatctccagctcccacttccgcagaatcctcgctgaaggatcatgcccctctgggactggaggtacaagtaatcccggtcccgccgcctgttcgggtctcagcggtcattatgttagtaatggggccaaacctggtccgggtacagacagccgatgtgctgatccatatgcctaccacaagggttgctattaaaataagctatgatcgccacaagctatttatgtattatttctaatgcttttgcttcctccctccctctatccactgttgttgtccaatgtctctattattgtgcatttttccgttattgcaataacaataactccgtcccctgaactggacaaattccggggaagagattctgaaccgtgtatatcattatgtgtatgcttttcttgtaaacgtgtatatgtatgctttt

SEQ ID NO: 9375 - DNA, 417 bp, Glycine max
  unsure (1)..(417): unsure at all n locations
gcagacgacagaagggggcgtagaatttaatttgagaaaatatatctgttacaagttgtatcaaggagaagcatagacatgaagaagcgaggatcaggcaggcgtttcctgatgtgggttatggtgatttggctccacgcacatctcagcattgcagctgaactgtccaagtccaatgacacggacactgcttctgagagttctgtgtgcgatggctccgtagaagactgcctcaacaacgtccaccgcttggactcagagcttcttcccaccatctgcagctcccacttccgcagaatcctcgctggaggagccaataaagtcgtttgtgatacactcaaatctgcagccttcttgtgtacgactatcaatggttatcgtcggtgtggggccagagttcctnccggtggtataccc

SEQ ID NO: 9376 - DNA, 944 bp, Glycine max
  unsure (1)..(944): unsure at all n locations
tcaagattctgtagcagcgagaagcagagtagcggatatgaagaagcaagcatcaagcactttcctgatgtgggttatggtgatatcgcttcacgcacatctcatcattgcagctgtgtctaagtctaatggcacaatttccgtgtgcgatggctccgtagaggactgcctcaacgtcgtccacttggactcagagcttcttcccaccatctccagctcccacttccgcagaatccttgctggaaaatatgatggagttaccaacgatgcactaattcctgataaacccttcaagggatgtaaaatcggagaagcttatcgtagctgtctggcccaagttgaaggtagagcgagaaactgtgccatctacaagaggggttgctaatgaatatctaaggttgtgatcgcgccgagctatttgcgtgttttaatgctgttaaagtaaatcgaaggtggtcaaacaacagcgtgccctgtctggaaagagtaaatcaaaggataggcgccttggatagatgattggtgcaggacataagtcaaggggattgtactaactttcccccctggtggcctgcgtctcccctatctctccagaacttgctcattagcatctcccccatcctagtcttaacaaactaccccttttagttcccagtgtttctatcattaagtcccctcagtgtgagtcggatttgttaggcaaacatgtctgtcaaacttgtagtcctcatgtcaataaacatgttgggtccccctttgctttagttccctctgaaatttggggttttagttgggtttatttaaccctgggctatttttattttgttccccttattgatgatttttttttaaaaaggacctgggtttttttaatgaaaaaatgtgatgtgtttttcctttttccnnnnnnnnnnnnnnnnnnnnnnnnnnnnnnnnnnnnnnnn

SEQ ID NO: 9377 - DNA, 342 bp, Glycine max
tgagaatagaatcccgcaagactttgtagctagcagaaatgaagaagcaattagcatcaaggcgtttgctgatgtgggttatggtacatttgagcatttcaggcgtgttgtccaagtccaaccacaccacaacttctgtagtgtgcgatggctccgtagaggactgcctcaacgttcaccacttggactcacagcttcccaccatctccagcacccacttccgcagaatccttgccggagtcatcaatcctgtgactgcacttacgaataatcccgccacttccgccggctgttcgatttcccacggttatgtcaagtgtggggccgaactggttcgggtca

SEQ ID NO: 9378 - DNA, 500 bp, Glycine max
gtctaaactgaaaaatatgccaaagttttattttgaatcaccaatggtcatgccaagtagagcaatgctaattcatttcacagtcttctaattatgcatttatttcaatcttgatcctctgaggcatgggtcacacttggcagagcacaacttaattttggtgagcctgataatgctattgaaagctttgaccgtgctctagctctcaagcctgattatgaggaagctcaagatgataggaaaactgcatcacgtcttgttaagaagagaacgcaactgcactcatctggcctgagtgccactcaaaatcgttatatggttggtgaaaaggatgaaaactcagtgaatgtacacaacatgtgtgaaagtgttgttcaatgatccaatgctgtgcatgttttggaactcgtcaaaaattaaaaatctcgtcaattttgcccaaaaacgtgaaagctataactattagcttctggttaaagatggaaagtcacatcgacaac

SEQ ID NO: 9379 - DNA, 1011 bp, Glycine max
caacgttacaagcatcagctatagttattcaatcagggttgagagcattagcagcacgaaatgaatataggtacagaagaagaacaaaggcttcaacaaaaattcagacacaatggagaagagcccaagctctttctgattacaaacagcaaaagaaagcaactgttacacttcaatgtctatggagagctaaagtggcaaggaaagagctcagaaagcttcggatggctgcaagggaaactggggcacttaaggaagcaaaggacaagttggacaaacttgttgaggagcttacatggagaatagatatcgaaaagcacatgaggacggatcttgaagaagctaaagggcaagagattgcaaaattgcaaaatgctttacaagaaatgaaagctcagttagatgaagcccatgctgcaattatacatgaaagagaagcagcaaaaatagcaattgaacaagcaccaccagtaattaaagaggtaccagttgtggacgaaaccaagctagagttattgacaaataaaaatgaggagttggagactgaagtagaagagctgaaaaagaagattaaagagtttgaagaaagttgctctgaaattgagaacgagaaccaagcaaggctgaaagaggcagaagaagcacagcttaaagcaacacaacttcaggagactaatgaaagattagaattgagtttgtcaaaccttgagtccgagaaccaggttctatgccagaaggctttggaagaatcaaaatatgaggttctctttgaagagttcgaaatcctcaaggatcagatagctaatctgcaatcagagaatgaatccctacggagtcaggcagcggctgctgctttagagcgtaaagttcatccaggaaagatagaaccagtccattcagcagctgctctagagcagaatgttcatccagaaagaatagagccaggccaagaagttgctgttgtagagatgatgcaagtgcagccaagagttattgccgataatacaactg

SEQ ID NO: 9380 - DNA, 545 bp, Glycine max
gatccatttttttgttttcttcaaacatcacaacaatgtctccattttctctcttcctcttcaccacattgctatcttttctcggcgccgccaacgcgcgactcaccttggacttctacaaggacacttgtccgcagttcagccagatcataagggacaccgtcacaagcaagcagatcgccagccccaccaccgccgccgccacgctccgcctcttcctccacgactgcctcctccccaacggctgtgacgcctccatcctcctctcctccacgcccttctgcagggccgagcgcgacgccgacatcaacctctccctccccggcgacgccttcgacctcgtcgtccgcgccaagaccgccctcgagctcgcctgccccaacaccgtctcctgcgccgacatcctctccgccgccacccgcgacctcctcaccatgctcggcggccccttcttccccgtcttcctcggccgccgcgacgccgaacctccctcgcctccgccgtatcctcccacctccccactccctccatgcccatctctcaaa

SEQ ID NO: 9381 - DNA, 500 bp, Glycine max
gagaaaactctaaagtctacactccgccgaattggaacaccacacacacagtgctgtcgtgtaattcccaaaataaataacgaacaagaaccctaattttcattgcaattgtgttggtagggagtgtagggcagattgcgtagaatcggaagatggaagaggaagagcacgaggtgtacggaggagagatccctgacgagggagagatggaaggagacattgacatgtccgccgccgacgatgacgccgccgtcaaggagctcgacgagatgaagcgccgattgaaggaaatggaagaggaagccgcagcgcttcgcgagatgcaagccaaggtcgataaggagattggcagcgttcaagatcctgctaattcagctgcttctcaggcaaacaaggaggaggcagattctcggtctgtttttgttggcaatggtcattcttattactcaggttctataattagccctgggaatctgggatgcttacattgtattttgtgt

SEQ ID NO: 9382 - DNA, 656 bp, Glycine max
ggaacaccacacacacagtgctgtcgtgtaattcccaaaataaataacgaacaagaaccctaattttcattgcaattgtgttggtagggagtgtagggcagattgcgtagaatcggaagatggaagaggaagagcacgaggtgtacggaggagagatccctgacgagggagagatggaaggagacattgacatgtccgccgccgacgatgaagccgccgtcgacgatgacgccgccgtcaaggagctcgacgagatgaagcgccgattgaaggaaatggaagaggaagccgcagcgcttcgcgagatgcaagccaaggtcgagaaggagattggcagcgttcaagatcctgctaatgcagctgcttctcaggcaaacaaggaggaggcagatgctcggtctgtttttgttggcaatgttgattatgcatgcacaccagaagaagtgcagcaacactttcagtcctgtggtactgtaaacagggtcactatcctgacagacaagtttggccagcctaaaggttttgcttatgtggaatttgttgaagctgaggctgttcaagaggctctcctgttaaatgaatctgaattgcatggccgtcaattgaaggttttgcctaagaggaccaatgttcctggaatgaaacaatatcgtcct

SEQ ID NO: 9383 - DNA, 973 bp, Glycine max
aagacttacataaatccttataacgatagttgagaaatgtgttcgcagtgctagcaagagtcaaaaagcttgaaaatcaaagacaccaaataagaacacatgtttttacctatatcgattgccggcacagacctgaccctttcaaacctctctctctctctctcatacaaagttccttccttcagctgcatcatgtaccctgctgcaactgcaagacattcaattcattaacaacactcgcattattcaaactccaaaccaacgcatgcatgatttcacaaattaacatgctttcccttttcttcttcctatcttcctcttttctaatccttttcttcttccgaaaaacctctgcacttcacatcctcaaccaatggttcctctccttcgaaaaccgtctccaccttcaccaatccttcaaaatccctcgctataatcttcactctcaggagaatagcctctaccggaaaatcctcacttacctcgattcccttccctccgttgaagattccgattacaccaacctcttctccggccccaatccctccgacatcttcctccacctcgaccctaaccacaccgttcatgataccttgcctcggcgccaagctctcctggaccaacgccgccgcagccgccaccggcggcgccgacgcgcttgtccttcgactaaagaagaaagacaagcgcagagtcttccggcagtacttccagcacattctctccgtcgcggacgagatcgagcagcgaagaaaaaaggatgtgacgatgtacgtgaactccggcgccggcgagtggggctcggcgccgttcacgcatccggccagcttcgagacggtggcgatggacgcggagctgaagaacaaggtgaagtccgatctggaacagttcgtgaagtcgaagcagtactaccaccggctaggccgcgtttggaagcggactacctcctctacggcgcgccaggcaccggaaa

SEQ ID NO: 9384 - DNA, 742 bp, Glycine max
gcgggaattgggtctagcgcaaaaacctttaaacatttttttaaaaatgtgtccacagcgctggcggcggtctaaaagctggaaagtcaaagacaccaaataagaacacatgtttttacctatatagattgccggcacagacctgacccttgcaaacctctctctctctctctcatacaaagttccttccttcagctgcatcatgtaccctgctgcaactgcaagacattcaattcattaacaacactcgcattattcaaactccaaaccaacgcatgccatgatttctcaaatgagcatgcttgcccttttcttcttcctcttctcgctcttttctaatccttttcttcttccgcaaaacctctgcacttcacatcctcaaccaatgggtcctctccttcgaaaaccgtctccaccttcaccagtccttcaaaatccctcgctataatcttcactctctggacaatagcctctaccggaaaatcctcacttacctcgattctcttccctccgttgaagattccgattacaccaacctcttctccggccccaatccctccgacatcttcctccacctcgaccctaaccacaccgttcatgacaccttcctcggcgccaggctctcctggaccaacgcctccggcgacgcgctcgtccttcgactaaagaagaaagacaagcgcagagtctttcggcagtacttccagcacattctctccgtcgcggacgagatcgagcaacg

SEQ ID NO: 9385 - DNA, 1518 bp, Glycine max
ctgtatcctgtggttaaggagagttttcagttgtatgctgatatgtgtgaggttttggctgtgttgcttgataagttctttgatatggactatgctgattgtgtgaaggcttttgatgcttacgccagtgcagcaaagcagattgatgagctggttgctttttacaattggtgtaaggataccggtgtggcgaggtcctcggagtaccctgaggttcagaggattaccaataagttgcttgagacattggaggagtttgtgagggatagggccaagaggccaaagagtccggagaggaaagaggaggttccgccggtggagaaggtagaggaggagccggccccggatatgaatgaaatcaaggcactgccaccaccagagaattatatcccacctcctccgcctgagccggagcccaagccacagccacaggttacggaggatttggtgaatctgagagacgacgcagtcactgcagatgatcagggaaataaatttgctttagcactctttgctggtgcacctgctaataatgcaaatggatcatgggaagccttcccgtcaaatggacagccagaagtgacttcagcctggcaaaccccggcagcagagcctgggaaagctgattgggaattggcattggtagagactgctagcaatttgtcaaagcagaaggcagctttaggtggtgggttggatcctctattgttgactggtatgtatgatcaaggaatggtgaggcagcatgtcagcactacccaactgagtggtgggagtgcaagcagtgtggcattgccgggaccagggaagactccggttttggctctccccgccccagatggatctgtgcagccggttaatcaggatccatttgctgcatcgctgagtgttccaccaccatcctatgtgcaaatggctgatatggagaagaagcagcacttgcttgtgcaggagcagcaggtgtggcatcagtatgcaagggatgggatgcaaggtcaatctagcttggccaaactgaatggcgctggatactatgccggaggtcctatgcccatgatgccttatgggatgcccccagttaatggaatgggacctccaaccgggtattatcacactccttactgataccccttttcaccttttttttcttttctgtgtcatatctataggttgtttcgtttattttttactacgacatagtgttttgccttggtttcaaatgatgtcatcttattcttgggatctgcacattagtacaacggggatgctaaggagactgggttgaagagacaaattcttgttgggttttgatgctgggagatgtgaaactcatccgtgatgtctctctgtattttgtaatagtagcattttcttctcgattttgtacttccaagtgattcttgcaccttaaaaacaaactattaactactgtaaattttattaaatgctggtgctgatgaacacgattggttataccaaaaaaaaaaaaaaaaaaaaaaaaaaagggggggcccccta

SEQ ID NO: 9386 - DNA, 612 bp, Glycine max
cttccggttttggaatgacctttatggatttcagttagacaccaatcgctggtatcctctggagttaagaaaggagaagtcgactaaagataagctaaaaaaaattgaacaaaattgtcctgatgatgtcaacaagataaatccagcatgtacaacaagagaagaaactgaggagtcagaggatgaagaaaacaacatcgacgatatatccaagaatatagcatcaaacatgtctatcgatgatggtgaaacacttaccaaatccgaaggaaaggccgaggaatccagtgctaaattggacattcaaagttctttgcctgaggtagtgaagccctgtggacgtattaatgcttgcatggccgttggaagagatacattatacatcatatggtggcatgatggagattaaagatcaagaaatcactcttgatggtttgtattctttgaaccttagcaaacttgatgaatggaagtgcattatacggcgtcagaatctgaatgggtggaagcttcagatgatgatgaagaaaatgatgatgatgaagatgaatctgacaatgatggttcaactgatgaggatgaagatgatgaggaagaggaggaggaagaggc

SEQ ID NO: 9387 - DNA, 770 bp, Glycine max
  unsure (1)..(770): unsure at all n locations
ggagcaccaactacctacccctttctttgattttgtgtcccaccctgcatcttagcagagccactctgatcactaaaatgccattgttaacttcctctttgttcaacatggttcctctcttctctcttcttttgttctcactcatgattcgttatagtacttctcaggatccaccttcacctggttactaccctagttccaaaattagtcccgttagctttggtgagggatttagaaacctttggggacctcagcatcagaaactagaccaagactcattaacaatctggcttgactcttactcagggagtggattcaagtcacttcactcttatcggtctggatactttggtgctgcgattaagcttcaaccaggttacactgcaggagtcataacatctttatacctttcaaacaaccaagactacccaggacaccatgatgaaatagacattgagttccttggtaccacgccggataagccatatgtcttgcagacaaacgtatacgtcagaggaagtggagatgggaatattatagggagagagatgagattcacctttggttcgacccaacacaagattttcacaactatgctattctgtgggaacccagtgagatcatattnnttagtgatgtgtcccaataaggagctatcctaggaagaggatgnccgttcccctcaagaggaaatgtatggttacgatcaatatggatgatcttcatgggctacagaagggagaaatacaaagctgattaaattaccaacc

SEQ ID NO: 9388 - DNA, 487 bp, Glycine max
ctcaagccggtttctttcttccttcaatgtaaaaccagggaagattctatttcatttccttgccaacttagagagagagagagagagagatggcaattgggttcatggaggtgcagcttgtgaaagcaaagggtcttcaagaaacagatatctttgctcatatggacccgtatgtactgttacaatacaaaggtcaagagcgcaagagcagtgtaattcatgagggcggcagaaatcccatatggaatgagaaatttgtattcagagtggaataccctggatcaggtgatcaatacaagctcaaccttagaatcatggacaaggatgtattttctgcagatgactttgtcggccaggctacaatctatgtgaaggatttattggcggaaggagcagagaacggatcagctgagcttcgacctcacaagtatagtgtggttcgagctgaccagtcttattgtggcgaaattgaagtcggtataacttt

SEQ ID NO: 9389 - DNA, 457 bp, Glycine max
gtctgccacaacacacagtagcacacagcgcaggaattgaaggagagatagagaaatgtggaagagagccttggtcggcgccgtgggtgctctccggcggccatattcgtcgggaggtggcggcatctcctccgccgtgaactcaatgctcctccgctctctaaaggatcactatcaagaagtcgccaaaatgaacatgccccctaaagtgagtcctccttcgccgttcacgatcgtgaagggagctctggactcgcacggtccggttctgaagcgcagctacggcgacgaagaggtgagcatctatgtcatgcggttgttgacccccgaggacgaggattccgccatcgaccagctcttcatccacgtcgatgtctccaaacctcagcagaacgaatccttgattttcctctgcggtttggacgaggtttctcttgggatttactctggttccatg

SEQ ID NO: 9390 - DNA, 812 bp, Glycine max
ggaaagaagaagaactgaggtggaatgagaaacgaagaagatgaagagagtcagtgcagaaaaccctagaaacaaaacatggcggaaaaattagcccccgaaaagcgtcacagcttcgttcacaacggtcaaaaggtgttcgagtgggatcaaacccttgacgaggtcaatatttacataactcttcctcctaacgttcattccaagcaattctactgtaagattcagtccaagcacctcgaacttggcatcaaaggcaatcctccgtatctcaaccatgatcttactagcccggtgaagacagattcttctttttggaccttagaggatgacataatgcacataacactgcagaaaagagataagggtcagacatgggcttctcccatattaggtcagggtcagttggacccctacggtattgatcttgagcagaagcgactcatgcttcagagatttcaagaggagaacccaggttttgatttttcacaagctcaattttctggaaacgtgtcctgatccaaggaccttcatgggtggaatccgatcagactgatgatcttggatgctgtaatttgtatttgtctgctctaagatgatgatcggatggcaataatctgttgtgggagttgtctcctctttgttagatgtcatttaattatggcagtcttaatgcgcttcctctaatctgttttgacatcttcccgtatttattaatctcttctctgacccttggcatttaaacatgtatataaaacatggagcattttttagccagacttggacaataataacttaaggtctgctgtact

SEQ ID NO: 9391 - DNA, 386 bp, Glycine max
ggcgcgaacgaaggggaaagaagaactgaagaggaatcagaaaagaagaagaagaagaagaagaagagagtgagggcaaaaaaaaccctagaaacaaaatggcagaaaaattagccccggaaaagcgtcacagcttcgtccacaacggtcaaaaggtgttcgagtggggtcaaacccttgacgaggtcaatatttacatagctcttcctcccaacgttcattccaagcaattctactgtaagattcagtccaagcacctcgaacttggcatcaaaggcaaccctccgtatctcaaccatgatcttactagcccggtgaagacagattcttctttttggaccttagaggatgacataatgcacataacactgcagaaaagagataaa

SEQ ID NO: 9392 - DNA, 449 bp, Glycine max
gagaatgatattgatgttggggaggaggttgtgcttatgactaccaagggtgaggctattgctcttgggattgctgagatgactactgctgttatggccacttgtgatcatggggttgtggccaagatcaagacggtggtcatggatagggatacttatcccaggaagtggggtttgggaccgagggcttccatgaagaagaggcttattagtgaagggaagctcgataagcatgggaggcccaatgagaagaccccccaggagtggcttaggaatctggttttgccaactggtggggatagcgtgattgctggcttggctgctgcgccggaacctgaggacgacaagcttcagaagaaggaggagggagatggggaagggaagaagagaaagcagcatgacagcacagatagcctggttgctgttcctgctaagaaggcgaaagtggt

SEQ ID NO: 9393 - DNA, 485 bp, Glycine max
ggagttggttggtatttgtttttgttgttggctgtgcgatcactcatctcacctcttctcatcaacgctgcgaaagacaatggagctgacaccccagcagctgagccaatacaacggcacggacccatcgaagccgatctacgtggcggtgaagggccgcgtctacgacgtcaccaccggaaaatccttttacggccccggcggcccctacgccatgttcgccggcaaagacgccagcagagccctggcgaagatgagcaagaacgacgacgacatctccccctccctcgacggcctctccgacaaggagatcggcgttctcaacgactgggagaacaaattccaagctaagtaccctgtcgttgctcgtgttctcaattaatcatatgataacctaagtgtattttgtactctatcatgtgagtggcatgatctctttctgtaaccgaactcaatcaccctttaatccctaataatattaataa

SEQ ID NO: 9394 - DNA, 449 bp, Glycine max
  unsure (1)..(449): unsure at all n locations
gaggtgaaggtggggtggaagaataaggataagttattgaaagaaaggtgaaagaatccattggtatgtgcgatcgatcatctcctctgcgaaatacaatggagctgacagcccagcagctgagccaatacaacggcactgacccatcgaagccgatctacgtggcggtgaaaggccgagtctacgacgttacctccggaaaatccttctacggccccggcggcccctacgccatgttcgccggcaaagacgccggcagggccctcgccaagatgagcaagaacgacgatgacatctccccctccctcgacggcctctccgacaaggacatcggcgttctcaacgactgggagaacanattccaagctaagtacactgtcgttgctcgtcttctcattaattggattctatctatcatatgacatcatctcaccctaataactaataat

SEQ ID NO: 9395 - DNA, 326 bp, Glycine max
cggctcgagcaaaaaacccaaatgcaggtttctccactaaaacttgggcgagtttcaaatttggtactttggcaccctccacgtagtagttctcaccatgtccgacactggaagaagtgccaacaacaatggttccaagcggagcctgccatcatgcacgagtgcaagggaaaatgagagcgaaaacagtgcaaagaaaccaaatttggatggcaaaggtgagaaattcggtgaagccgagacacccaacaagagcaaagtccaaaatcaaaatggtggaaaatcttccgcctcatgtttggaatctaaaagcttcaacaagcttc

SEQ ID NO: 9396 - DNA, 309 bp, Glycine max
gagtcaaacaatgtcctaaagaaattcaattgaaactcccaatttctgaacgacacactacactatactactattctatgccctttccccctttttcgtctctagggttactgcaactgctacaagaagaagcttccgcaatggagcgagaccgcgtcgtttcacagccagttgcggttatcgcttgcatcgcagtggccgtgttctacgtggccatcctctacgctcccaccgtgctccttcgtctcccacctcctccttccttcaaaacctacatgcttcgtcgcttcctatgcgccgtcgtttcgt

SEQ ID NO: 9397 - DNA, 551 bp, Glycine max
  unsure (1)..(551): unsure at all n locations
ctcaaatttgaagatgcctgattaccgatatgttcctggcgaaaacgcatgcttcatgaatgacaaaatgtcaaagattggaaaagatgtcacggtccgcttctcggtgataggtacaaagtggatggaagcagaaagggaatttcaggcattggtcagtttggaaggggattatctgggaccaatttcaactccggatatttagctacattttctttgttgccttgtcttctgaaatggatgaaatattttccatatgaagtcagttcttgtaattaatgataactctgtctgccttccttttagaactgtgatttccggcttgtgtacgggatacactagtgaaatctgggaccaatttcaactccggatatttagctacattttctttgttgccttgtcttctgaaatagatgaaatattttccaaancaaaaaatgggtggggggaaatataaagaaagataatataaaataccaactttactgtaagaggcattttaaatcgatcaaaatcattcatctcaaataaaaaaaaagggggggnnnnnn

SEQ ID NO: 9398 - DNA, 389 bp, Glycine max
ggggttgggttgggttgtcattgttggcatagcaacaagttgacactaatctaatcacctcctctgcctctctttgtattctacgatggacacgcgcggccacgatgaggaggagccaccgaaacctgtggttctgatcacaggatgttccacgggagggataggccacgcgcttgcacgcgccttcgctgagaagaagtgcagggtggtggccaccagcaggtcgcggtcgagcatggcggagctggaacacgaccaaaggttctttttggaagagttggatgttcagtccgatgagagcgtgcgtaaggtggttgatgctgttgtcgacaagtacggtcgcatcgacgtgctcgttaacaacgccggtgttcaatgtgtgggcccac

SEQ ID NO: 9399 - DNA, 269 bp, Glycine max
gttctaaaaaaggaatcaaatcgtatgttgctcaccattttatttctgtttcttattaaataataatatctggataaaagaaaatcctgagaaatataaaagcatcatgtgtatggagaagcacggccatgatgaggaggagcaacccaaacctgtggttctaatcacaggatgttccacgggagggataggccacgcgcttgcacgatccttcgcagcgaacaggtgcagggtggtggccaccagcaggtcgcggtggagcatggcgg

SEQ ID NO: 9400 - DNA, 1403 bp, Glycine max
aaggactctctcaggtgggcttcagagtccaagagctgatgtgccgaagaaagcgatattgcaaagaatcaattccaagaaggctacaaaatcctaccaattggggcaccaactttcgcatagatggtcaaccggggcaggacctagaattggttgtgttgctgactaccctgtggagcttagactacaagccttggaaatgcttaacctttctccaaaagttcctccttctccttcctcatacaggtttgtgggtggtcttgtgtcgcctatggccaatggcactagaattgacagtgatgagaattctgttcattgagctagtaactgatcttaggattatgaatgacgcttcctgcctagtgtagtaacactttaaggttttttctgctaagcttttaagttctttagttaaatgtaaaatacctgttctttgtgtttgtctctaaaaaaaaaaaaaaaaaactcgagactagttctctctctctcctcgtgccgagtccaaacttcaaagcaccttcactctcttaaaaacattctcttcaactcttttccattttattattcttccaaaactggaccttactttacccgaatctaaatcccaacccgaaccaaccatgttcggaccaacccaaaccgcttcccaacctccgaaatccactctcaaattcctctgcagctacggcggcaaaattctcccccgctaccccgacggcaagctccgttacctcggcggccatacccgcgtcctcgccgtcgatcgctccattccattctccgagctattgctgaagctggaggagctctgcggcgcctccgtgaggcacctccgctgccaattaccttccgaagacctcgacgctctcgtctccatcacctccgacgaggatctcgcaaatctcatcgaggaatacgaccgtgtttcgtcgctgaaaatcagagccttcctctcgccgcccacgccgcccacgccgcccacgccgccgagatcgccgaacaagttttccactgctccgtcgaaatcggcgtccatctcctcctcctccgcttcgtcatcgtcgtcgtcttcatcgtattacagccctaccggctccggtgaatctggccggagatacagggctccggcgctggtgtcagaccgctgcgtacatcagatgtcgccgccgccggcggcgtatccggtcggcgtggagaaatcgaaatcctccgggaggaatattcctctgccgcggtacggtggccacgtttatatgatccacaacgggaaccactggcaatagcgttacggtgtcgtttaaatggaatattggaatactggaatggaagtactgagattaggacgcaggtgttacttaaaaaaaaatgattttaaaaaaattaagttgatatagattataatt

SEQ ID NO: 9401 - DNA, 731 bp, Glycine max
tagaaacggcgtcgcagggaatggtcttatctggttaaggaccgactcttcactgaggaggaagtgacgatcgacatctggtaagaggctttaatcaaccaacgaacaacgatgtcgtggtttgcaaggacaatcgcaaactcactcagactcgacgacgacgacgacgaccacaatggcagtgacctaaaatcccctccgaagaaacccgattccgtatccacccccagtcctaccgcgcgcggcgtcaaagaggatttctccgagctcaccaaatccttttcccgccagctctggggcgtcgcctccttcctcgccccgccgcccgatcccctatctgaaaatcccgtcgccgatcccaatcccattcccaccgacgaagaagaagaagacgtaattgcaggtatccgaaacgatttcgcggagattagtggcaagttcaagaacgggatcttcaaaatctccggtaataagacggtatccgaattcaccaagatcgcttccagtttccttcagcttggatccgaagaggaacacgatctcgacggtgtcctcggagttacagaggatgtggttgccttcgccagaagcgtagctttgcatccagaaacttggctcgattttccccttcccgatgatgaggattctgatgattttgatttgtccgatgcacaacaagaacatgctctagctgttgaacatctggcaccaagcttagctgctcttagaat

SEQ ID NO: 9402 - DNA, 573 bp, Glycine max
ctcttcacttgggaggaagtgacgatcgaaatctggtaagaggctgtaatcaatcaaccaaagcaacgatgtcgtggtttacaaggacaatcgcaaactcactcaaactcgacgacgacgacaatggcggtgacctaaaatcccctccgaagaaacccgattcggaacccgttcaacccgattccgcatccacccccaatcccaccacgcgcggcgtcaaagaggatttttccgagctcaccaaatccttttcccgccagctctggggagtcgcctccttcctcgccccgccgcccgatccccaatccgaaaagcccgtcgccgattccaatcccaatcccactgacgacgacgaagaggaagatatcatcgccaggaatccgaaacgatttcgcggagattagtggcaagttcaagagcgggatctccaaaatttctggtaataagacggtatccgaattcactaagatagcttcgagtttccttcagcctggatccgaggaggaatacgatctccaaggtgtcctcggagttaccgaaggatgtggttgccttcgccagaagcgtagcttt

SEQ ID NO: 9403 - DNA, 533 bp, Glycine max
agagaaagcaagttagatcaaagatctgaatcgagatcggagaagaggaagaagaagaagaagagtatgggaacgacggtggcgggtctagcgccgggtctgtcacggaagctgaagaaggttctagaatctcggatcgatacgccagacctcttgtcttcgctcaacacgctctcttccttctacgatgacaacactcctcaggcgcgtcgcaacctccgatccaccatcgagaagcgcgccctctccatcaaccgcgaattcctcgacgcttcccacgccgcgcagctggccttggatagcgtggagaacgaggtcgatgcgctcgctgagtgctgtgacaggatagcaaaggctttgaatagttgtagtgctagcaccgctgacattatcggcaccacagagaggctcaaacaagagcttgaaactactacacaaagacaagagattgtagcatgtttcttacgtgattatcagctctcccctgaagagataaatgcacttagagaagaagagctgaatgaaaacttttt

SEQ ID NO: 9404 - DNA, 424 bp, Glycine max
ggatgcaggagaggatgaatggtatagggttttccccggcgggatacagtcccgtaatcccttcttcatcctgttttcctaaaaaattgagagtccagccgcaacgggccttgagctctgacccctacgttctggaactcgccgaaaccctagaagactccttcccctcctctccctccaccccactccctctccagaacctccgcctctcctcctcccaatccctcctctccactccatggccctcccgccgcgacgagcccttccgcttcaccgacctctccttcatccgccaatcccgcatcctccccgtctcccccaccatctccctcctcactcccacctcccaccttcccaacgacgtctacgtcggctccctctcctcctcctccccctctctcctccaacgagtctcccatttcat

SEQ ID NO: 9405 - DNA, 395 bp, Glycine max
cttgatgagttagccaagtgaagggtgaatcatctcctctcctctcttctacgatggccatggacagtgtttatgcttcgtctttaactagcaatttatatttatagatatgttcctcccctcttcttcttcattttcagccacccgcgccatttctacctcgcagtcgataggctccagttcaaaatgcaaacagtgattgaactggtggctcgacgtccatgcttcctcatcgtggtctgctgcagcacgcgcaacgacctcgactctctctgctctccccttcctttcgtcttctgctctgctctctctcaaactcattttcttcctcgtaatttacacgcgctacagtgttttcctaattcgctcttgtttactgcgtttccatttcccac

SEQ ID NO: 9406 - DNA, 421 bp, Glycine max
ggggatggtgaggggaggaagtagagagagaggatgaagggaagcagcaagaggaagacggagaaggagaagatagaggatgaagtggaagaaatgttgcgagcggcgcaagaccaaatcctcttaaatctcacccaagcccacatagcagcccgtccttctccggatcatgatcatgatctggatctggatctggatctggagcgtcgattccaggccctcaaaatgaaaaccaaatctcaacctcaagatgatctctctgccagattcgatgccctaaaagccaaatcatcatcttctgttgtcacagcatccaattccaacgcccaatttgattatgctgaagaagacccagaggctcaagttcagaaactcatccagtgggctaaggatgctgcacgtctcgattcttctccccctc

SEQ ID NO: 9407 - DNA, 1095 bp, Glycine max
gagaacagaatgagggtagtgcggtttgccggtgagatctgttgtttaagtttagtgctgcaatgtaatgtcttgctattgctatatcttttctttctcatagatagatttagatctataaactcccttcgttgctgaacgcggttaaggttatgatttatgaatgcgatctaattaaggcacaatgacaaggagacaagcaagttccacgagacgtggcggtctttcaagaatcttgcattccaaatccaaatcttctcctctactctccatatcccttgtcctatttgtagccatccttctcatcctttatgcttgtatcgggtcaggtatattgggaggaagaaaggatgtgattagcatggctgaagatgatttttcatgcacttttgaagttccaagtgcaattcctgttttgaagaatgcatatggtggcagcatgaaaaatgttttgcacgtaggccctgagagttgttcggtggtctccaaatttttaagagaaggggaaactgaagcatggggtgtggagccatatgacttagacgatgctgataggaactgcaaggctcttgtgcagaaaggcattatacgtgttgcagatataaaattccctttaccatacagggtgaagtctttttctcatgttatagtgtcagatgctttggattacctgtctccaaaatatataaacaaaactcttcctgagctagcaagggtatcttctgatggtattattattttcacaggctacccaggtcaaccgagagctaaaatagcaccattatccaaatttggccgtccagctaaaatgcggagttcatcttggtggaaacaattattcactgaaacaagcttagaagaaaatgaagctgctgtcaagaagtttgagcaaactgcgtcgaagatgtcctacaagccaacttgccaaattttccacctcaattcataccattgataatttgatatcttggaattagattaattgattattcaccatatccagaattttgtatttttttgtattcctatataaacatgtgagtataaatgtcacaatccggcaattctgttttaccagacatggacaagcctcgt

SEQ ID NO: 9408 - DNA, 843 bp, Glycine max
gtgctataatataaaaaggaaagtaagggatatgaaaataagaatgaatgaaaggcattagaaatcagtgaccggcgtgagagagcaaagatggtggttcttggcaccacctcaccttcaatttcctgcttgccgtcttcaactcaaaccgactacaaggcgcgtcgatactgttcttttccgcaacgcccacgcccacgcccacgcgcttcacgtttcttttgcggatcccctttcgctccaaatgccatccattctccttctctgtctgtgacgaatgaagcactgaatgttatgatttctggggctcctgcttctggtaaaggaacccagtgccacctcatcaccaacaagtacggtttggttcatattgctgctggagatttacttagggcagaaattgccactggaagtgataatggaaagcgagccaaacagtatatggagaagggacagttggtccctgacgaaattgttgtgatgatggttaaggagcgtctcttgaaaccagattcgaaagagaatggttggcttttggatggatatcccaggagcttatcacaggccactgcacttgaggctcttggctttcggcctcatatttttcttcttcttgaggtttctgaagatgttcttgtggagagagtagttggacggagattagatcctgttaccggcaagatatatcacttgaagtattctcctccagagacacaagaaatagccgcaaggcttacccaacgctttgatgatacagaagaaaaggtgaaattgcgattgaatacccatcatcaaaatgtggagtcagtcctttccatgtacaagacataactgttaagatta

SEQ ID NO: 9409 - DNA, 330 bp, Glycine max
gggaacaagctttttatgccatgacgttgattggttaatagtatatataaaaatcctagtacaaaaaaaagaacacaaacgttgttagttgccagaaccgaacaggagaacattgcaggcactaccagcagccatcttaaattttccccttttgggttttttcttcttttttttttgttttttttttatctcagtgttgggatgtttatgagtactatgtttatagtattattaatgtttatagttattgatttttgggttaacctttcgagggagggtcagacgggaagggagtgttgggaatgtaagatatatgttcaggtgtgatta

SEQ ID NO: 9410 - DNA, 553 bp, Glycine max
gaggcatactagaaaatctatctatgattatgagagcgtagttgaaagcaacgactgaaatcgagagggagacgaaaagtttagatcgagagagatgggaaaggagagtagcaaagatacggttccggtgacgcagtggctgaatcgaatggtctcagaaccttactacctcttccatttcttaaccttcttctcctatttcgtcgttcgcagctccgcaacccaaatcttagcgcctcatctcactcaccatctccttcgtcgcgaaatacaaacactgctagtgttcgcgatattggctttcatcaagggaataaaagaagaaacatgggaagcctttatagctgatgtgcttttcctggccaagatttgtctttttctcctagcctttacaatggatcgccgcttagccgtttggtatattcttgtatttttagtgatacatatgttaacacaacaacctccattccaaggactaggtacgtctagcaagctaacaccgttgcagttggaaagcctgctgacagagggaacaactacaagattgtggctg

SEQ ID NO: 9411 - DNA, 482 bp, Glycine max
ccacgcgttcattacagtgccaaaagaagaacagaaggggaaaagcaacaacggaaatcaaaagggagacaaaaagtttagatcgagaaagatgggattggagtgtagcaaagatacggttccggtgacgcagtggctgaatcgaatggtctcagaaccttactacctcttccatttcttaaccttcttctcctatttcgtcgttcgcagctccgcaacccaaatcttagcgcctcatctcactcaccatctccttcgtcgcgaaatacaaacactgctactgttcgcgatattggctttcatcaagggaataaaagaagaaacatgggaagcctttatagctgatgtgcttttcctgcccaagatttgtctttttctcctagcctttacaatggatcgccgcttagccgtttggtatattcttgtatttttaggtacgtctagcaagctaacaccggtgcatttggaaagcctgcttacag

SEQ ID NO: 9412 - DNA, 555 bp, Glycine max
ggtaacatagagaagattctccgggaagaaaaggccaaagtgaggaaattcatggacaagactctttgtaataactaaaatttttgaagtttgatagtagttaaatgaatttacataacccatgttacacgacgagtgaaattggatatgagtgtatgagcaaagccaaagtgatcgtgtggcagagcagcgagagagaaagctcttcttgttctgatgtcggatcatcttccgcgagaagtggtaaccgacatcctctcccggttaccggcgaaatccctactccgattccggtcaacctcaaagtcatggaagtcactaatcgacagccagcacttcaactcggtccatctcagcagatccctgagcttaacctccaacaccaccctcatcctccgcctcgactctgatctataccagacaaatttcccaaccctagaccctcccctttttcttaaccaccctcttatgtgttacagcaacaacatcactcttctcggttcctgcaacggactcctctgtatattcaacgtcgccgacgacatcgccttttgg

SEQ ID NO: 9413 - DNA, 912 bp, Glycine max
gtcagatcgtgtttgcctctctgtctgtcttcctctttctctctctctctctcaagtctcaaactaaatttgttagttcaactctctctatttctactttcttctctagtcacttccaacacttattcaatttttatctttcttttgctctttgtgcattataatcttctcttgtcattacaacccccccgttactcaaatcagaaactctcatttgaagctaacaaacaacaaagatcaacggatctatctaccttcagtcatggtgttttctttcaaccaacgcttctgggtttcttcttcgcttctcctcctcgcggtcctctctgtttcttctctcactcccactttcctttctgacaccgttttcgattctcaaccagcgcataccggtcggaaccttcttcaggctaaaaagggttgttctgtgaatttcgagtttttaaactacacagtaatcacaagcaaatgcaaaggaccccggtaccctcccaaagaatgttgtggggcttttaaagaatttgcttgcccttatgccgatgtattaaatgatttaacgaatgagtgtgcatcaaccatgtttagttacattaatctctatggaaaataccctcctggcctcttttctagtgagtgtcgtgaaggaaagtttggtcttgcttgtcctgcagtgccaccatcagcagtatcagcagatgacactgcaaatcaagctgtacactgtccatctctattgttgatgctcatagcctgcttcttaatcttgttattctgatatgtttctatacacaacttcattctttttctctcaatattgatgtataatcagttaccatttttctatatgtggtgtgtgaattactttttgcgcataaacaaaaaattggctatgtgcctggtagtttaagaaga

SEQ ID NO: 9414 - DNA, 596 bp, Glycine max
cttgtcattactcaaattggaaacattatttgaagctatcaaacaacaatctttcttctatcaaccctcagccatggtgttttctttcaaccaaagcttctgcctttcttcttcgcttctccttctcctcatggccctctgtgtttcttctctttctgacaccgttttcaactctcaagcagcgcataccgctcggaaccttcttcaggctaaaaaagagtttgtattttttttcctctgcctatgcttttggatctacccgattttattttttttttttgtcctgctaactgaatcaacctatatcttaaatattaaaagacccgatgggtgtggtttagttggtaattaacatttgttgagcatgtgagtttgctcacattacaaattcttggggagaggctaagagatttaaatgtgattaagcctcagactaaggattagtcaaacccaaagggttggcatagctgtgtgcaaaattctcttgggccagcaactgttgcgcaccacgagcagaattagtttaaggaccttaataacttaattaggatagttactggaaaaaaatgtcagagtaacagtgtatgtactttaca

SEQ ID NO: 9415 - DNA, 571 bp, Glycine max
gatccacccttcttgtctcaactctcaagtcatggcattttctttcactcaacgatttttcctttctccttcacttcttcttctccttctcctgattgctctctctgcttcttctcttactcccacttgtttttctgacagtgtttttgattctcaagcagcgcatgctgggaggaaccttcttcaggctaaaaaaagttgtcctgtgaatttcgagtttttaaactacacagtaatcacaagcaaatgcaaaggaccccagtacccacccaagcaatgctgtgctgcatttaaagagtttgcttgcccttatgccaatgctttaaacgattcaacgaatgattgtgctgcaatcatgtttagttacattaatctctatggaaagtaccctttcggcttctttgctagtgtgtgtcgccaagggaagaaaggtattactattaactgtcctgcttctgctgcatcgccaccatcagtatcagaagatgacactggaatgaaaactcaccagatacgtgtgtgacagtaatagtagtagtctattttccatgttgctatgttacatgtaata

SEQ ID NO: 9416 - DNA, 453 bp, Glycine max
gtttcaaacctgcaatgctccccccccccttggaggtcctcctccattgattcccaatatggatgtacatagcacgcgtgccgattttgaccaaagctaaacattagtctgatgatactgttttttcaccttgcacctgcaggttgttctgtgaatttcgagtttttaaactacacagcaatcacaagcaaatgcaaaggaccccggttccctcccaaagaatgttgtggggcttttaaagaatttgctttgcccttatgccgatgtattaaatgatttaacgaatgagtgtgcatcaaccatgtttagttacattaatctctatggaaaataccctcctggcctcttttctagtgagtgtcgtgaaggaaagtttggtcttgcttgtcctgcagtgccaccatcatcagtttcagcagatgacactgcaaataaagctttacactggtcatt

SEQ ID NO: 9417 - DNA, 1031 bp, Glycine max
ggctcgagaaagcaacggcgttgccattttccgtgtttaactctgctctctcagggcagtgtgtggattgaggtgtcgcacggtgggtgtagcagtagattccgcctccaagaaaagaaagagcaatgcaagctgcatcttcaggcatcggatacggtctaaaatatcaggctagatgcatatccgatgtgaaggcagacacagatcacactagcttcctcgctggcactctcagcctcaaagaagaaaatgaggtacatctgattcggctttcgtcgagtggaaccgaactcttctgcgagggattgttctctcatcccaacgagatctgggaccttgtttcttgcccctttgatcaacggatcttttcaaccgtctactctaacggtgaaacgtatggggcagcaatatggcagatccccgagctatatggcgaggtttaaaaattcacctcagctagagagaattacctcacttgacacagattctggcaagattaaatgtattctatggtggccatctggaagacatgataaattgatcagcatcaatgaggaaaacctgtacttgtggaatttagacgtttcacagaaaactgctctggtacaatcacaagattcagctggtatgctgcacaagttatctggaggggcatgggatccacatgatgtgagttctgttgctgcaacttgtgaatcgtatctccaattttgggatgtcagaacaatgaagaagactatgtcaatcgagtgttcccatgtatgcagtgttgattaccatccccaaaagcagcacatacttgttactgcagaacatgagtctgggatacacatttgggatctaagaaaacctaaagttcccatccaagagcttccaggacatactcattggacttggactgtcaagtgtaacccagagtatgatggaatgatcttgagtgctggtacggattcaactgtcaacttgtggcttgcctcaacaaatcatgatgagttaacaactgaaagacaagtcgattcatctgcccgatg

SEQ ID NO: 9418 - DNA, 593 bp, Glycine max
ctcgagccgcttttctattaagtagggtttcataatttttcatttcactgtgagcaaacaagatcttcagatccatgacaacaacgacaatgcttctgcgaacttcgtccacgccgattctcaattctcgcatccctcacccgaaggattcgcctcacgaacccgaaatccttcaccggagcccgcgcacgcgctcgctcacgctctccgcgtcgtcgagttcgctctcgccggtcgaagcttcgccgagcagaatgacgcgggcgctgtcggagacggatctctccgcgcgctccaaaacgtcttcgttcggctcctctctgttttccttcaccgagtcggacgaaggagacggagttggcggcggcggcggtgatggatgggacaacggtgacggcggagggtcggggttttgggattcgaataatgggaatgatagcacggacttgtattaccggacgatgattgaagcgaatccagggaaccctctgtttcttggcaactacgcgaggtacttgatagaggttcgaggggactatgtgaaagcggaagagtattgtgggaaagcgaatttggcgaatccgaatgatggg

SEQ ID NO: 9419 - DNA, 422 bp, Glycine max
gaagatcttcagatcgatgacaacaacgacaatgcttcttcgtagctcatccacgccgattctcaattctcgcatccctcactcgaatctcaaccccaaggattcgcctcacgaacctgaaatccttcaccggagcccgcggacgcgctcgctcacgctctccgcgtcgttgagttcgctgtcgcctagcagaatgacgcgagcgttgtcggagactgatctttccgcgcgctccaaaacggcgtcgttcggctccgctttgttttccttctacgagtcggacgatggagacgttgcggttgttgaaggaggcggagttggcggcggcggcggtggatgggacaatggtgacggcggatgttcggaggtttcggattcgaataacgggaacgatagctcgaacttgtatcaccggacgatga

SEQ ID NO: 9420 - DNA, 375 bp, Glycine max
tgattctgaaggacatttgtctactagccctaatcagttagatggtgacaaaagagctaccaatcataaatcagtgaatttggagggaagcctgttggttcagcacctgcaaaaaaagaagagagtccaggctttcaatgaagctcaagaagctctgatcaaagttctatatgagcaattcaaggatcacagaagatgcagttacatgatagccaatgcactggatgaggatggtaaaatcactgctgctcaagtctctcgaaaacttaagcaacttggtttatctcttcctcagaagagttctggaggcaaaatgcacccaaaggatgcagatctcatggatctttcaaatgataggattaatgaatctgatga

SEQ ID NO: 9421 - DNA, 556 bp, Glycine max
ggaagaaaagagttttggattttggtgctgtgagaaatttatagagagagaaagagagatgtgtttggtttgtggaataattggtgacttgaatcgttgaatgagatattattgagtttgattcagaaatgaacaaagacgaaagcgataggaacgaaaagaaagcgcaagatattaagctttggggagttttcatcttcggattaatcggcgccaccgtcactgctttctccctgtccaggtcgcaggcaaaaggaggcagctctttccgaacagcatttcaagaagaagcatggaagaggtacaataagcgattgcaagaggagtatgaggaggagatggagagggtggaacgaataagacgtatgcaaagtgtgtttaatagagaaagggataagcatagaagaaactacgagagctggaaggaaaatggtgccggtgcacatcatcaacatttccaaagagatgattggtattggaaggctgaagcatccttcagagagcagtgggccaatcaacatactcaaagagggagcgggaactattcgttatcaca

SEQ ID NO: 9422 - DNA, 411 bp, Glycine max
cggctctagtccatacgccaaggtgataaaggagagggtgagatgctttcgtctaagcttgctcaaactggcctcgtctatgctgtattgggcagttgtggaatacaaagatctttgaacatctcctttactacatttttgcaacacctacctctttctctctctctctttcactcgtcctaggtttgattatttcttccctcaattcccaacctcgcatctcccattattttattctcaaaccacgacaacaaatacacaacacaccccaacacacacacacaaacacaacacaaacttagtttctcaatttcttcctctcgagccaacccaagttaaattgaaaacaagagcaaaaacttaacaaaggtttggtcttttgatgtgagagtaagaatcagacatctgggt

SEQ ID NO: 9423 - DNA, 373 bp, Glycine max
gggggtgttaaggagacggtgagatgccttcgtctaagcttgctcaaactggcctcgtctatgctgtattgggcagttgtggaatacaaagatctttgaacatctcctttactacatttttgcaacacctacccctttctctctctctctttcactcgtcctaggtttgatttttccttccctcaattcccaacctcgcatctcccattattttattctcaaaccacgacaacagaagcacaacacacacttggtttctcaatttcttcctctcgatcctacccgagttaaattaaaaacaagaggagagaaaacaaaacagaacaaaataaaggtttggtcttttgaagtgggagtgaggaatcagacatct

SEQ ID NO: 9424 - DNA, 543 bp, Glycine max
attaatttgagtattttaaaaggaaagagagaagagattgttgaagttgaaggtgggatgctttcggctaagcttgctaaaactggcctcgtctatgctgtattgggcagttaggggaatacaaagatctttgaacacctccttctttattacctttttccaacacctactacctcttctctctctctctcactcgtcctaggtttgattttcccttccttccttctcccaatactcctccattattttattctcaaagtctcaacgcacactccagcttcattactacttgcctttttctttttcctttttctctgcccagctatatgcttgtgtaagaaggggaactactaagccattctaaagggagctggagaatgtggaatctgaatgactctcccgatcagagaaaggactatgaatctgaaggctgttcttcttctctgaatgatgataaaggcaagagagtgggatctgcttccaatcagtcctctgcggtggtattgaagatgggatcggaaggaagagacagtgaaagaggtg

SEQ ID NO: 9425 - DNA, 596 bp, Glycine max
  unsure (1)..(596): unsure at all n locations
ggtacggctgttataagactacataatgtctgtcttggtgtgaaccatagccatggctacttcatcaaccacattattgctatcatcactcatacctgcaagcatcccatcattcaactctggaaaccattcagtttttttgcttcaaaaccgttctttgaatcgacccaagaagagagtttccttcgttgttcaagcagccaagccccctattggtgtggaaattccaaaggtgcagcctcaatttaagcctccgtttcttgggttcactaagactgcagaagtatggaactctagagcttgcatgattggaatcattggagtttttattgtagagtttataataaacaagggcatacttcaagtgattggggttgatgttggcaaaggccttaatattcctctctgaacattatttttggctgtgctcgtaaatgttgtcatatataaagtcaatgttttaaccttttttcttattgatctcaagaacaatttttcaaattgccgtgtcatttgaaaatcttctgtaatctaatatctgttttgaggtatatttctgataaaaaaaannnnnnnnnnnnnnnnnnnnnnnnnnn

SEQ ID NO: 9426 - DNA, 634 bp, Glycine max
tctcgagagcacacggcataaagttgtcaacatcgctcctctcattcttccccccaaagaaaacatggctcctctcccgccagtgtaagctagattattagttttttagtgaggtgctgctgaaatccctaattcgactttccacttgattacgatcccttcacccttcttaggatggcaaatgctgcagaagatttctcccaattcgggatttcaaaggaggaaaaggataagcttgttggggaattgattaggtacatgcttttcaaaacccatcaaaattcagggtgccccattaagagagaggaactcactcaacttgttacgaagaactatcatcagcgtaaccttcctacctttgtgatcaatgaggctaaggagaagctttcctttgtatttggctatgaaatgagggagcttcaaaggacccaaccttcttccaaagcccggacacagtcctcccaacaaagtgttgcagattcgaaatcatatattctcataagtcaacttcctcctaatgtatatgaaaaatatgttgtggatgttaatactgcgcatctatccggattcacttttgtcataattagtattgtatatcttgccggtggtaaaattccagaagaaaatctatgga

SEQ ID NO: 9427 - DNA, 253 bp, Glycine max
gggatgcagaactcaaaacctgtgaacgcaagagcgttgaaggaacgtccaacgtgggagtcggtgtcacacaggtgctatgaacattctcttcaactgacacaagttgaagaatttcagctaaatgggtttagaatttttatccttgtttcagctggaaacatagagattgctatggcttattggcattacatttgcagtgatcttaactttccagtacctcgagtttccatatggaactgttctactctct

SEQ ID NO: 9428 - DNA, 470 bp, Glycine max
ggcgctctttcaattttctctctcttcccccaattttcccagaaaattcatccaacattttctaggcagccaaacacttcccaccatgaacagatccgctctcctcgctgcctccgtcgccgccgcgtcggccaccgctgcttccctttcctcctccgcaaaactctctctccaggacggtggggctcagagagaccacggcggatcctcgccggcggcgagttcggcgtcaacggagaagttcgcgccgcggttcgacgggttgcggttcattgaaacgctgattactgcgcacagatgaacgcgcggtgttcaaacgcgcttttggggttttttttttaccctaatcttttttgatcttgcactgtctaaaaaattgaggaaaattaataacgtgggagatgtttaattgtttttctaatgatgatttgccatttgggcttttgggttgaggaatggacagaaaattg

SEQ ID NO: 9429 - DNA, 353 bp, Glycine max
ggtgccacattgtcatattttattattacctaagcttttgtcacttagaacaaatttttggtcagttttgaaaaatgggttctggaaaccaggaggtatcaatgttggtggagaatggtggtggtgggaacaacaacgtgaagggattgctgagcaaggaaatgagacatggcagaacggcacataacatgtcatcttcttcgttgcgcaagaaatctgacctaactcttctgtctaaggttcattctgacaccctcaagaatttgttggtgaatttgcaagatgttattctgggaaccaagctctctagtattttccctgccattccccttgccattgttgctcaaagctat

SEQ ID NO: 9430 - DNA, 413 bp, Glycine max
aagacacagaaggggatcaaatgtgtgtggttccagttttttgggtggcaaagtggcagctgctgccaacaacgtcaatctccagaaccgaattctattttcattctcgtattagattatatactacacatgttgtaggcgtttcactttgtttcctcgtactcttcgaaaattcggtgactcactcgctctcatcgacttggacgatatttcgtggacaagagttccactttcccgcagttctcatttatttcctaaatggagctcaatgaagatcctggaccaattgataattatgttctttatgatcaagataatcatgtatcttcagcagtttgggatggacatgagcgtggtgtacttagatgccatgaacacacttcaatgcttggatagtggaagctcacacctaa

SEQ ID NO: 9431 - DNA, 1075 bp, Glycine max
aagggaacaaaggctttgaatttgattgcagttgagttagctttcactttcagtgtgagatcttcgtctcttctcttgcttccttcttcaattcatctccgaaccgcgtttctatttttgactcttcccctctctctctctctctactcagtaagaatgtatactaatattggtatgccaccgggggtacctcagcatcatcctcaacctccaacgagctcacaacctaatctgttcgggaatgcatttaattctgctggttcaggactcattcgaggtggattgggtgcgtatggagaaaaaatattaggatcaagctctgagtatgtccaaagcaatataagccggtatttctctgatccccaatactactttcaagtgaatgaccactatgttaagaacaaattaaaggttgtgttgttcccattcttgcaccggggtcattggactaggattactgaaccagtgggaggtaggctctcttataaaccaccaatttacgacataaatgctcctgacttgtacattccattaatggcatttggtacctatgttgttcttgctggcatctcattgggtcttcgtggaaagtttagtcctgaagctttgaactggttatttatcaagggattggttggttggtttatgcaaacagcactgcttaaagttactttactttcattaggcagtggggaagcacctctattggacattatagcgtacgccgggtacacttttcctggcttgtgtttggctgtttctggaagaataatatggagttactcctactactttctgatgctgtggacctgcttatgtatggcagtgttcttggttaaaacgatgaagagagtcctttttgcagaagttaggagttatgattcaagcaaacaccactatctcttgctcctcattgctttggctcagttcccattgttcacatggcttggaaacattactgtcaattggctaatatagagtgacagcatttacactgtacttggaagcacttggtgattttttttggttgttaactttggcgagcagtaatacatgggcttctgttttttttagt

SEQ ID NO: 9432 - DNA, 417 bp, Glycine max
ctcgtcccaattaccgtttttgcctctgctgtgggttccttctctgttctcagatctcactcagttccttcgccggagccatagttcttgattccctcaccaccgtgattcgtctttccaaacttcttttcacttcgagtgagaatgtatagtaatgttggatcccaacccggagtacagcagcctcaaacaagtttgcctccaaatccttttgggagcgcgtttaatgttgctggttcaggactcattcgaggtggattgggtgcgtatggagggaaaatattaggatcgagctctgagtatgtccaaagcaatataagtcggtatttctctgatccccaatactactttcaagtgaatgaccagtatgttaagaacaaattgaaggtggttttgttgccattcctgcacaggggt

SEQ ID NO: 9433 - DNA, 286 bp, Glycine max
gactcactgtccaatccaatgtgtgactatcaaactccccttttcccatgaaaccctcttccaccaccgtcacatacccctaccgccatggccacactccacaacaaccaaccaattccccgtccagcgccgccgtttccatccaatccgcctaccgcgcccaccgcatccgcgtcctctaccggaaaatcgccgccgtcgatgccgaagccgatcggctgcagcgcctgatccagcggcaggacacggtggacgccgtgcgcgccaaccacctcgagaaactgcg

SEQ ID NO: 9434 - DNA, 363 bp, Glycine max
gcatctcctaacattgctcaaaaggtaggtctcggtttcgttatttccactgtgtatcgttgttctcctcttacgttaccaactgtcgttcagacgaaggatggaggttgttttggcgtcgtcgtccgtcgacggcggaatagggtgctgggaccttcacaccggcgcggagccgctccgctacaaatcttgcacctccccttctcacggactcatctccgtcggtgctcgcttcatcgcttcgtcgcagcttcgtgatgatcccgcagccactggctatgttctcttctggtcctggtccaagcctcaagctgacgtgtagagttttcctgctgaacaaattaaacctcttgctactaatca

SEQ ID NO: 9435 - DNA, 1300 bp, Glycine max
tgtctctgcaattcggatgatatcaaggactaaaaaccaccaatcaaaaaccatgaatgctaagagagaaaagggagagtgctttgaaaatgggaaagtttagttcaagttacagtacttctgattttgttcactttggagttctacttccctttcttctgttatcacagttgttctttcaacttgcatggtgtggctccatagtaaagttccttcctggattagagggaccccttccttttgttcttgaaaccgggtatgtgggagtgggtgaatcagaggatgtgcaggcattctactacttcattgagtcagagaacaatccaaaggaggatcctctcatgctttggctcactggtggccctggttgctcagctttctctggccttgtcattgaaataggtccaattgcatttaaaaatgaggaatacaatgggagcctgcccaatttggtcttgaggccacactcatggacaatggttagtagcattatatttgtagacttgcctgtttccacgggcttcacttatgccacaacagagtttgctactcaacgaagcgactggatacaagttcaccaagtccatcaatttcttaggaagtggttgattgaacatccaaattttttgtcaactgatgtttacattggtggcgattcatactctggcattactattccagcaattgttcaagacatttctctaggaaatgaaaaagggctccaaccatggataaatctccagggatacctgctgtggaatccagcaacaactcgaaggcatgaaaactatcgaatatcctttgctcatggaatgggacttatttctgatgaactatacaggtcactgcaaaaaaattgtaaaggagagtacataaatgtagacaccaaaaatgtattatgttctagaaatatcgagacattcaatgaggttacatcaggacttagtatggtcaatattttggacccgtcatgtgattggcttgatactgaaacatcttggaggagatctctacttaagaaatatccgagaaagaatttccttaatactcatctcaaattgccatccttaaactgtcggagttatgcatacttcctctgcggttattgggccaatgatgatagtgttcgcagtgcactgcatatccgtaagggaactataggaaaatggcgtcgctgtaccttcaatatacctaacaaggaggacatctcaagcagctatgagtatcatgtaaatctcagtagaaaaggctatcgttcactgatatacagcggggatcatgacatgaaaattcctttctt

SEQ ID NO: 9436 - DNA, 462 bp, Glycine max
cccgctcgcccggggaagctcatcctatataaaggcctcagtctcgtattagattcgatcacaaagaaacagcaagaggttttgagggtgaaaccactcttaatttgaagccatggtctcgtttcacaaggcgctggccgagagtactccaaagccagaaattcatgcagaattcgaagcatcatcaaagaaaagaaagtgggaagagccattaaccgaagtttcttcaaggatcaaatagagaaaaggaaatccgtctttgatatagagcttcaccctgagacccctttttcttcagataaatggcgtcaatacctcactattcagtcagggttgtattggaaattaaagccacaaccatggcatgatcttcatgttaattaatctttgatccttttttttttctgtgtgtagtcagggcagatacagttgtgtaacacaagaacaacaacagagaacccc

SEQ ID NO: 9437 - DNA, 474 bp, Glycine max
acgcgtcaagccaaacgtccggccaagccttcgcccaagccttcgtaacggtggcaaaaaaacaacaaaaggggaataaaaaagaaacaacagaaggtttgaagggtaaaccactcttaaattgaaaccatggtctcgtttcacaaggcgctggccgagagtactccaaagccagaaattcatgcagaattcgaagcatcatcaaagaaaagaaagtgggaagagccattaaccgaagggttcttcaaggatcaaatagagaaaaggaaatccgtctttgatatagagcttcaccctgagacccctttttcttcagataaatggcgtcaatacctcactattcagtcagggcagatacagttgtgtaacacaagaacaacaacagagaaccccaaaaaaagctcccgaagaacaccttcttctcatcacatgagttttaaacctgagctaaatttgatgtgtgaatcaccgagg

SEQ ID NO: 9438 - DNA, 620 bp, Glycine max
ggcgtgctgattctgtgcttttcccccaaaagaagcaaaaccactgtcactcgaacaagaacaagaagatgaagattaacgtcaagactctcaaggggactcactttgtccttcaagtgaaccctcaagacacggttgctgttgtgaagaagaatatagagacagcgcaaggtgctgatgtttaccctgctgcgcaacaaatgcttattcatcaggggaagaataaggtatcaagtggagcctcatctgcgccctcaaacctgggaacccaacctcaaagttctttgcctcctacttcatcaacatctcaacctcctgcatcggctgtaggacagggagaatccaattctgagcagagtccagttataactcctcccactattgctgtgcccagtatctatgatcatgcagcatcaaatcttatggcaggaagtaatttagaaacaactattcaacaaattctagaaatggggggaggaaattgggaccgggatactgttaccggtgctcttcatgctgcatttaacaatcctgaaagagctatggaatatctttatcttggaattcctgaccgagctgatgtaccagcagctgccgaatccctgataactgggaaagcg

SEQ ID NO: 9439 - DNA, 401 bp, Glycine max
ggaaggcgtgctgattctgtgcttttcccccaaaagaagcaaaaccactgtcactcgaacaagaacaagaagatgaagattaacgtcaagactctcaaggggactcactttgtccttcaagtgaaccctcaagacacggttgctgttgtgaagaagaatatagagacagcgcaaggtgctgatgtttaccctgctgcgcaacaaatgcttattcatcaggggaaggtgcttaacgatgccacaacccttgaggaaaataaagttgttgagaataattttgtggtgatcatgttaagcaagaataaggtatcaagtggagcctcatctgcgccctcaaacctgggaaaccaacctcaaagttctttgcctcctacttcatcaacatctcaacctcctgcatc

SEQ ID NO: 9440 - DNA, 857 bp, Glycine max
gaacgcacactgaagaatagcagcaagtagtagctcttgacccttctttccaccttttctggtccctccctccagaaatggcttctaattccattcttcttctttgtatctttcttgtggttgccactaaggttttttcctatgatgaagatctcaagacagtggttcctgcacctgctccaccagtgaaggcaccaactcttgcccctccagtgaaatcaccatcttaccctccagggccagtgaccacaccaacagttccaacacccactgttaaggtaccccctccccttcagtctccagtagttaagccaccaacaccaacagttccaccacccactgttaaggtaccccctccccctcagtctccagtagtaaagccaccaactccaacaccaacttccccagtggtgtaccctcctcctgttgctccatctccaccagctcctgtagtgaaatcaaacaaggattgcattccactatgtgattataggtgctcattacactcaaggaagaaattgtgcatgagagcatgcataacctgttgtgaccgatgcaaatgtgtccctcctggaacttatggtaacagggaaaagtgtggcaagtgctacactgacatgctgactcacggcaacaaattcaagtgcccatagaagaagcctaatatctagtaacttacctaagcttttttgttaatcaagtttgaatcatgagtaatgtggtttgagttgctagtgtatttaataaccgagagtgataatcataattgtacaagctatcgtgttaatcaaaatagtcaacactgtttgtgttgtctataggatccatttgtggtccatgaagaagtttatattcat

SEQ ID NO: 9441 - DNA, 906 bp, Glycine max
cccacgcgtccggaagaatagctagtactagctcttgacccttcttcccacctttttctggtccctcctagaaatggcttccaattccattcttcttctttgtatctttcttgtggttgccacaaaggttttttcctatgatgaagatctcaagacagtggttcctgcacctgctccaccagtgaaggcaccaactcctgcctctccagtgaaatcaccatcttaccctccagggtcagtgaccacaccaactgttaaggtgccccctcctcctcagtccccagtagtgaagccaccaactccaacaccagcccctgttaaggtaccccctccacagtccccagtagtgaagccaccaacaccaacatccccagtggtgtaccctcctcctcctgttgctccatctccaccagctcctgtagtgaaatcaaagaaggattgcattccactatgtgattataggtgctcattacactcaaggaagagattgtgcatgagagcatgcatgacctgttgtgaccgctgcaaatgtgttcctcctggaacttatggtaacagggaaaagtgtggcaagtgctacactgacatgttgacacacggcaacaaattcaagtgcccatagaagcctaatatctagctagtaccttattacctatgttttttttttttgtttaagtaattaagtttgaatcatgagtatgtggtttgagttgctagtgtatttaataaccgagtgatcatcataaattatactagttatcgtgttaatcacaatagtcaacactgtttgtgttgtctataggatccatttgtggtccatgaaaaagtttatattcatatgattaatataaggaagtatttgctgtacgaaattcaggactataattaatatgaatatgcccttgt

SEQ ID NO: 9442 - DNA, 608 bp, Glycine max
caagcctccaagtttacctcaaaacacagttaaaaaaagaagaagaaaaagttgcgtaaatcgtagtaacaataatgagaaaatgcgaattaaaaatgggataaaggcggcgagcatgaacgtgatcgcgagtgagttgaattgaagacaacttcagaatcagatctggtgtggtgtggtggctgttactgttagcacttagcagcgatggccaaagcgtcgatattcatttacatactcgtcgcagcggcgcttctcttattcctctctcattccccggataagcactccggccaccgccaccgccgcctcaagctccgctccaacttcaccctcgccccctcgcgccaccacgccgtcgccttcgaccctctcgtcgctgagctcgagcgccaccgcgaggacaaggagtgggagaagcagataatccaccaggcccttcccgaactggagtcggacccggccccggcccacgagtcccagcccgagtgggaggacttcatggacgccgaggattacctcaatgacgaggacaagtttaatgttaccaacaggttgatactcttgttcccgaagatcgatgtggaccccaccgattggttcgtgac

SEQ ID NO: 9443 - DNA, 768 bp, Glycine max
gttggccaaagaaaatcacatcttcaaagaatggaagccaaagtttatacgggtagagatatgatgacattgtgcaagaaagatagttgtgattttagaaagttggacaaagagagctatgaagttaccagatgctgatcttgcagtacatcattcataactctcagtgtttggatccaagtgtcatatatttgtccagaaactatggaaagaaaggggtagggatgattattattctcctgagcgatcaagatcttattctaggtctctctctcccagtggtgggaaggactacaggaagtcccctcgtcttagggagaatggtcggagtcctaatgacaagaaggatcagacaccccgcagatccgagagtcctagggacaatgattgcagtccttcaaggtctcattcacggtgatacattccacgctgatttgcgagcaagcagagattggaaggtggtcaattcggtttttcctgtgaccacacactgtatctaaaactttgacattttgaaagatacaaaaatgtagctaagccaagtctgtgatgtttatattagtattcggtaggtgacaacccatcagaaggtagtttgacttgtgtcattttggatgactttttcatcagtttacaaatttttggatacttgttcatgaatcatgtctttataacatgtttggtccatctttatagcttaaacgctacttcaaagttaaagtttaaagggagagttttaaaattaaaatagaaagtatttcttaattc

SEQ ID NO: 9444 - DNA, 506 bp, Glycine max
cgttcgccacaatgcacttccccattctctttctctttctcctaccttcactcttcaagctttcacattcaaccacaatactagtagatggatcttccgagtggaagagccccacagtttccatcggtgactccatcattttcaagcacaagcaacactacaacctctacattttcaagaacgagaaagccttcaagctctgtaacatcactcaagccactcttctcagcaacccctacacatggcatccatctcggcctggttttttctactttaccttccacaatgggtcactcaaggcatgccaagattctcaaaagctagccatagaggtagcttcttcagcaatggctccagaacattctccagtggcaacaccagctccttcttctggtggagaggtgccatcttctccttcgtttccgtggccttttcgtcctggacaagaagcttcttcacctggtcctgcaccacaagcacaagcacaagcaggttcgccagtgaca

SEQ ID NO: 9445 - DNA, 443 bp, Glycine max
cggggcacatatacaacgaagctgtcgcgtcttccgcggtgcgaagaaccaagagggagggccacgtgttggtggcgttcttcggtgacagcagttacgggtggttcgagccgtcggagctcatcccatttgacgcgaatttcgcggagaaatcgcggcagataagttctagaaacttcctgaaggccgtggaggaggccgtggatgaggccagtagaagatgcggccttggattggtttgtaggtgtaggggccccgggaattttcgcccaaccgatgtggaagggtattattctgttcaggtgccggattatgagcctggagtgtattctaatgctcagatcagaaaggccagaagtgaatttggagctgcggaaatgctttcttttctgaagcaattggcattgaatccacatggtggtgatcagagaagcattggtttc

SEQ ID NO: 9446 - DNA, 404 bp, Glycine max
caaaggggaggtcaaacaacttaatgaatcgatgggctcgtgtgggcaaggcttccaagtgtacattattggccatttccaacaattccaattgatctcaattctcgcagtcaccagtgttagaactataagagtacctaatcaaatagtgttttgaccaaagaggtcgatttagtttagttgccgttatgaacacgaacatgaatgttattttgcgtctccagttcctatgtttctttcgtttaagtactttgttcactaaagcatctgcaataaatgtggaaacatatgaatctgatagaataactgatcttcctgaccaaccttcaagctcctcagtatcacacttttcaggttacatcactgtcaatcgaaaacatgggaggacacttttctactggtta

SEQ ID NO: 9447 - DNA, 877 bp, Glycine max
agctcggaattcggttcgagtaatcatccctctttctcttcaatactactctcaactcattcttctctctcaaaaaccattagaaacgaaaataaccaaataacaagaaagaaacaatgaacgacttgttctccggttccttctcccgcttccgcagcgaccagtcctccccggaccgccaccacgacatcgagatgggcgccaccgcctccggcggcggtcgcggcggcgaggtgaaccttgacaagttcttcgaggacgtggaaggcgtgaaggaggaactaaaggagttggaaggtttggctcagagtctaaggagcagccacgagcagagcaagacgctgcacaacgcgaaggcggtgagggacctgcgcgcgcgcatggacggcgacgtctcggcggcgctgaagaaggcgaagctgatcaagctcaagctcgaggcgctggagcggtccaacgccgcgaaccggaacatgcctgggtgtggaccgggttcgtcctcggaccggacccggacctccgtggtcaacgggctcaagaagaagctgaaggatgctatggagagttttaacgagattcgccagcttgtgtcctcggagtaccgcgagaccgtgcagcggcggtacttcaccgtcaccggcgagaatcccgatgacaagactctcgatctcttgatctccactggtgagagtgagactttccttcagaaggccattcaagagcaagggaggggtagaattctggacaccatcacggagattcaagagaggcatgatgctgtcaaagagatagaaaagaatctcaaggagttgcaccaagtgttccttgacatgacagtgttggtgcaacatcaaggtgagcaattggatgatattga

SEQ ID NO: 9448 - DNA, 749 bp, Glycine max
  unsure (1)..(749): unsure at all n locations
cttccggccaaccacccaaccccaaccattccccacaccctcccctcttctttttcattggcaattcttcaccattattctgcaatatgttgctactcatcactcactctcatcaccaacattttttaacagtcatttggaattatatcaccttacctctgatgttttaaaaatcttcatcatttgctccctctccacccttaaactggacatgctcgattctgtgcttctggcgcttttcttgccgtgcctcggcatgagcgccgttttcatcgtctacatgtgccttctctggtacgccaccaaccaccactccgaccccgcgctaccggccaagcctgtctccgacaccgggctctccccttcccagctcgacaagctccccagaatcaccggaaaaggaccttctcatgggaaacgaatgcgccgtctgcctggaccagatcggaacagagcaaccggctcggctggttcccggttgcaaccacgccttccatttggaatgcgccgacacctggctctccgagcaccctctctgccctctctgcagagccaaactcgaccctgcgcttttctcttcctcccaaaatccatgctgaacctcttttaatttgtttcttcaatgtcttctcacattgttttttttccgatcaagcaccggagcgaacgcagtgatgccgactntagtaattagtaattttcactgctgatggttgattaggagttctcttctcggatgccttctagat

SEQ ID NO: 9449 - DNA, 501 bp, Glycine max
gattagggagaagaagagtaagaaggttaagaataatggtaatgatgacggtgtgagtttggaagggactaggttgagtggtactaagcatggtgttgatggtaagggtgtagagaaagcttcggctaaggtggaacgaaatgggaaggttggtaatggtaatgttggtgtgaatggtggtgctgctgctgctgccaagcgtttcaaggctgttgatctggccccggcgaatgctacaaaggatgtgtatgcttccatcttcacttcgtcgaggaagtctgagtttaaagaaacttatagctgtaggtctcttcctcttggaagaaaccgattcaggtgtctggtatacagttgtctctactgttttattgttatccaatgtactgaattctagtttgtgcctttgtggttatataagtgattgacttttcctgtgatggatttactggtttcgttcccatcagattattatcattaatctaacttaggaaggagttttgc

SEQ ID NO: 9450 - DNA, 566 bp, Glycine max
ggtaataaggctgtgttttgtgacaatggtcagattcatgatcttgtcatagaatgtgacacctcaggggtgtctgatccgtgccttataattcgcatagatagcaaaaccgtgatgcaggtgaagcggctcaagtggaagtttagggggaatcacaccatcttggtggatggacttgcagtggaagttttctgggatgtctataattggctttttggtacatcccttggaaatgctgtctttatgttcagaacatgcatctccgaggaaaaattgtgggttggtcaacccctttctgatgcaaatgtggtgcagtggtccttctctcagaggttttctgagaccaagtcgcaaggtctcggcttctcacagattttatacgcgtggaagaacgactagagttgtggaaatccaccatactaacagaccttttagtgagttgtgattttacccaggatctgattgttttactacacttgattaaagatgagtacttttgcttgtatcgcttctacccttaaaattcataccctcaatacatctgtgcatttgaacagatcatgagc

SEQ ID NO: 9451 - DNA, 940 bp, Glycine max
  unsure (1)..(940): unsure at all n locations
ccccggtgtatttttttaaattttttaatgaattttagattcatacaaataaatgctactatatttaaaatttggaagattttgagtatactgagtgttgctgcttttatctaactccttattgaggaaggcatttgccaagaggttcggagctgttcaaaatgagaggggcaaaaagaaggacctgtctcctcaagatgctgccttgttgatccagatcagctttagagcttacttgatccgtaggtcaaaggctctccgtgcccttagagaactggccattgcaaagtctaaattaaaggaaatcagagcccagttcaataacttttcctaccgacgtcatgtagctcgtgatgcggaggaacgccagcggttttctgagaaaatcattgtcttgctccttactgttgatgccattgagggatctgatattatggtaagatctgcgaagaggtcaatggtggatgagctggaagcaatgcttgatgtggtagatccccagcctggtggaagatcagcatcgctctacttcaaaagaaggacatttgatatgcctgatggagtcatcaggaaggaaatagaagaaggggttgcacaggttgtgcaaatgcttgaagaagcagagaatagtagtgaagcatgaccgtgagatcaagaaagtaatatctatctgtttatttcgtgttttccttctgctgttgtagtttgtttgcagagacgtattttagtctaagatttcaagacttctaaattaggctttccatccaatggtatttgttttgctgaacttttggcactttctgaacgaaaagattggcttgtgttagagctgtgttatttaactaacgactcagaaccttgttcatttgtccctagcctttgcgctgcatcttatttctctgttcaggtaaaaaaaantaaaaaaaatagcatataaaaa

SEQ ID NO: 9452 - DNA, 551 bp, Glycine max
gattgcacgagcgagtatgaagttcccgactcagtagcccagtcacacctaaacaaaaccctaacgaaaccctgcggaggaaaacgtcgtcgcagcaaccttcacattagcgatggccattgttctccgtcttggaagcagaagcagaagcaaagggaaccacccttcttctcatatcgtgttcttctccacctccaattccaattccaactccaactccaactccaattctcctttctctgacctcttcagtgaaatcaaaaacaatttcaaagaatcctctccctctccttcaaacaccccgcgctcctcgaatttccgcgacgagatcaacaaaaacctccatgaattccgcgcccgggccaccgcgcctccgccgcagcagcagcaaatctcgttccagaaaatctaccaggaaaacatgaaccggaacccgcccaactcctcttccttcaacttcaattccattcgcgacagcctaaaaaacatcaagcccgccgcccagaccacccaaatcctgtcgcgcccaatgccttccaccaccagcggct

SEQ ID NO: 9453 - DNA, 426 bp, Glycine max
gtcagatgttttgggacactgaggtatctttctttttgaggatacgtcgctccagaggacagatgaagatagagatttcactatggggctgttctgtgttctcttctttgaattgaaccttcccatctctttcttctcacttcccccccctttccttttcccacttttgaattgccttttcctttccagaattttattctaccaagatgcatgtttttgtcatgtaatgcagattttcacgaggcggttttcttgtgtcttgaaagactgtgtctgtgactgagtttttctttggtaggtttcttcacttcaccgttcccacttgcattattattattcaaagaccccagtagcagcatttgcatttccctcacgctgcacccaatgggcagagccataaggtggttgaaggggttgtttgggata

SEQ ID NO: 9454 - DNA, 806 bp, Glycine max
agaggtctgaaggtggatggcacgcgtacgtaagctcggaattcggttcgggctcgagcccttctctctccaccatgcaccaagccatttcccacagaagcttcatccccataggagcacgtggcatgccacacgcaggaggaatcaaagaatccaatggcacctatccatccaaagctgccacaatggtatcggagaacgcggtggtaatcattggaaaacggggatgctgcatgtgccacgtggtaaaaaggttgttacaaggtctgggagtgaaccctcccgtgtacgaggtggacgaggaccacgaagccgccgttgctctccacctgtccccgcagggcgccgaaacggtgcagtttccggcggtgttcctggccggcaagttgttcggagggttggaaagagttatggccactcatatctcaggtgaattggttcccatcttgaaggatgctggtgccttgtggctctgactctcactttagctacctacatctgctctttcttttcttttttttaaacctaatttctcgagtggggaattaattatataaagcgatattaattttcttaggttcaattccctccttttttgtgttttacttttctattcctgcgtctcttagctgggcaagatgagaaactgcgttgttaataactccgttgtgctgacaagcctggatgagagattttgtacattttgtttcaattagttgatgtcgacgtacaagttcatcaattggatctcaagaatttactgcaaaatgatgtcaattatgcttctagaaatgttcttctcttct

SEQ ID NO: 9455 - DNA, 820 bp, Glycine max
ggaagttcaacatactaagtaggagagttaaaaatgggtctagagagccactctagaatttgaaaataacacctttatatatataatgatagataatgttcaattctactcataatcttattgctctaataaacagttactcaaatgtcgcagtctctgcacgtaaagacttcatcaacatttatacgacttcacttttttttttttttgaaggattatacgacttaattcactgagtagctcgagtggtggggtagcaatatattggaccagaacataactcatgaatatacaagcaagttagccggctcaagttcaaaataagaatttttaccatgatactatgggtcaaaacataacaagagaggggagcatctcagctcaggatttcatggatgtaacttccgggaatgtgttgaccgcgtcggtgacgcaataccgcgtcacccacaataacggtgacgtacaattgcgtaactggcgttgacgttacagtccccactcttcccccttatttatattttcacctctatcctccactaatcctctcctcccccacacacgtctttctctctccaccatgcaccaagccattccctaccgaacctccatcctgaccggaacatgtgacatggcacacgccggaggaatcaaagaattcaacctcgccaatccatccaacgttgccgcaatggtttcggagagcgcagtggtaatcattgggaaacgggggtgctgcatgtgccacgtggtcaaaaggttgttgcaaggtctgggagtgaaccctcccgtgtacgaggtcgacgaggaccacgaagcc

SEQ ID NO: 9456 - DNA, 390 bp, Glycine max
gacattgatgttgtttttgaattgttttgtttgggggttttgttctgtctctctcttgtgggtcataacaattggtttttctaatgatttttattgatgctatcaatttggctaaagggtgatccttcatatccaaattcgaaacccagtttgagattttagaatttgattgagttggattcgttttcattggttgttggagtgtgaagaaattctgtcttcagttaatggacgctcttcattctcaaatgtgatcaatacgatgtttccttgcatgtcaagagtttataattgatatgtttcctaaaatattaaataaaacaatataaatgatataggcatgtgatctgtgacatagttctgtttgttaaaattgaggctgatatctgt

SEQ ID NO: 9457 - DNA, 463 bp, Glycine max
gttgtgtttgtctttgtggcctctctctctctctcagccgtcgcagtctctgccaaacactcgctcatccaaaattatgatcatttctgtgccgtaaattcgccggtaacacgagatctcaacttctcgcgccgttttcttttccccctttaaaaaaagtacaagttcaggttaagttagggttccatggcttcggagacgaaggtcgtgaatctggctgaggaagccaagctcgccagagaaggtgtaacgactccctcatatgcttttaccaccatctgcaagtccctcgtcgctggtggagtcgccggaggagtatcacgaacagcagttgctccactggaacgcttgaagattttgctacaggttcagaatccacacagcattaaatacaatggaacaattcaaggtctaaaatatatatggagaactgaaggttttcgtgggctgttcaaaggaaatg

SEQ ID NO: 9458 - DNA, 324 bp, Glycine max
ctcgagccgattcggctcgaggttgttgtgtttgtggcctctctcagccgtctcagtctctgcctaacactcgctcatcctaaaatatgatcatttcttcgccgtaaattcgccggcaacccgagacctcaacttctcactgccgttttctcctccctcaaaaaaacaacgttagggttttcatggcttcggagacgaaggtcgtgaatctggctgaggaagccaagctcgccagagaaggtgtcacggctccctcctatgcttttaccaccatctgcaagtccctcgtcgctggtggagtcgccggaggagtatcacgaactg

SEQ ID NO: 9459 - DNA, 550 bp, Glycine max
ggagtttgcattttgtagtcactagtcacaatttgttggaggagaagagatggtttggccaattaggtccagaataagttctcttctctgttctaaggcacctttagttggttcatacatctatgactcatgtgggtgcttacgcttttctgctccaaccagctcctccataacaaggcattggccaaaaattatggattgggtacaaatggaccgttgccgtgcagcagcatcgttaccttcgatcaaagagaaacaaccagaaagtcatagtaatcgtgtcagactcggtcaagaaatcaaaggtcttgatgaagggaatatggctgaaattgatagctatcaaaacttgtttggtttgatgaaacagaggtttctgagtttcaagagccaaaaatatatacagaaaagagttggagcattttgaagctcttgctgaagctcaatttcctaaggtgatagcaaacaggttacctagcccatttaattttcttgtagtacaaaactatcacattttagcttaatttattgggtatggtggtctttaact

SEQ ID NO: 9460 - DNA, 425 bp, Glycine max
gaagagaagaaaataaaagctaataccattcattccgtttccttcattcattctctcaacaaacactctctctctcaatctccttaccttgcaagcaccccacccacacactgtccaacgttaaccgatcaaaaacccatctctgtctacctttgtttgatctcaaagttggctctcacaaaaacgtgaaaaaatttcattcccgtgagattctcctccaccgatgcagattgaatttcaggaatcctgggtgtctacgatacgtttgagacctgagatttgctagtcagttatatttttgagaacagtttagatcttttcttctgcaaagtttgggcactgcataaggtttggcagtgcccatgggatgccacaaccagcggaaccccaactgtccaataccataacatacctgaccaccaatt

SEQ ID NO: 9461 - DNA, 547 bp, Glycine max
tcgttttttcgtccgattcattctctcaacaaaactctctctctcaatctccttaccttgcaagcaccccacccacacactgtccaacgttaaccgatcaaaaacccatctctgtctacctttgtttgatctcaaagttggctctcacaaaaacgtgaaaaaatttcattcccgtgagattctcctccaccgatgcagattgaatttcaggaatcctgggtgtctacgatacgtaatcacccttttccatgtttttattcattcgatctgtgatgatcataatgtcactcatcggaaacttgttgatcatatgattttgttcttccttcccctgaatcccctgttttttcttttaccttttttttttctggttgcgtattcagcaagtgtacttgatgaattggattaaactgataattctacgatctgggaaagtcatacccaaaatacaaaaatcaaaatatattataaaaaaatgtttttttttcacctatccttgaataattggttgcaaaagcggttccatttacaagcccctgtttctggg

SEQ ID NO: 9462 - DNA, 747 bp, Glycine max
gtaggccacagtcacacacagcctttgcctttgcctttgctgttcagtgctcccactcccagtccgggccgaggcagaaaatatcggaaactaacctttcacactcacacatccatcgtcatatctgaattggcaactcattattaaatcaattacgaaaacgaagaaacccaacaaaacaatggtagtagcttagctaattgcctaattgaatgaatctcaatggaacctcctctcatcaacgactccacattctcttccgctaacccttccttgtccgagatttggccctctcattttcccacagaccacactcccagtaacaagagacacctctccccctcgactgattgtggcagcaataaacatatcaaatcatcaggatcaggatcccaggatcaaaacggtgccttgaaggcgggtgaagtggacgcgacttcagtagccggtaacaagttacctgaacaaacggcgaaacctagttcttccgagcagccacctaagcaagactatatacacgtgcgagccagaagaggccaagccaccgatagccacagtctggctgagagagctagaagggaaaaaatcagtgagaggatgaaaattcttcaggatttagtccccgggtgcaacaaggtaattggtaaagcatttgtgctggatgagataattaattatgtccagtcactgcaacgtcaggttgagttcctttcaatgaagcttgaggcagttagttcgagattgagc

SEQ ID NO: 9463 - DNA, 374 bp, Glycine max
ggcggtaggcgcagtacgccactgtccacaccacaccccctttgctgcttccaccactccctaaccttcgctctcacacactctctttcatccatcgtcatctctgaattggaaactcattattattaaatgaaattacgaaaacgaagaaaccaagcaatagtagcttagttaattgaattgaatgaatctcaatggaacctcttctcttcaacgactccacattctcttcagctaacccttctttgtctgagatttggccctctcatttcccctccgatcacactcccaggaagaggcgcctctccccctcgagtgattctgccaccaataaacatatcaagttatcagcaccagaatcccaagatcaaaac

SEQ ID NO: 9464 - DNA, 408 bp, Glycine max
gaatgaaagaaagaggcacatttcagcccttattcagtgctttaccaaactcactcatcatcctccagtctttcaatttcatcccttcacttctttccacaaccccatcatcttttccctcttttcttctctctcaggcggagaaagaaatggagtgtttggaagcagcgttgaagagcagtttcaggaaagacatggccctcaaacaaacgttgttcctagaggagttctcgtcctcctctaacgttcaaaacgtcgtcgcttcctccgacgacttgttcgctgacgacctcctcaacttttcactcctcgaaaacaacaccaacaacaataacaacaacgaagaacccgaccaacaactcaacaaccacgactccaccacccctcagaacaaccaggaaaattaca

SEQ ID NO: 9465 - DNA, 556 bp, Glycine max
ggagtgtgtcttttggattcgatcacttcgacatctcccattgacgacgcgcttgccctagcagcagcttctctcctctgccgtttgccgtgctccgcgctcctcgtccgtttgtgcctgagctcccgtccatgccgcccatgtaacttccgttaccactcacaaaggcagataacgtggttggccaatttcataaacttcaaaaacctccacctcaggctcaactatctgactcaacttcagagggatcacatcgtgagcttccttcgcttaacattgttcgtagtgctttggttaaggtcatggatgttccactgccacgggataaattggctttagatttgattgataatgagccctcccctgcaaacacgagcaacagcaggatatatgtaattctggtggcaactggaagctttaatccacctactttcatgcatttacgcatgtttgagcttgcaagagatgcattgaattcagatggctactgcgtaattggaggttacttgtctcctgtgaatgatgcatacaagaaaaagggcctaatatctgctga

SEQ ID NO: 9466 - DNA, 1321 bp, Glycine max
atgatcgtcagacaaggattgaaggtgctgaaatcaacaagagccttttggctttgaaggagtgcattcgtgctttggacaatgaccagatccatattccttttcgtggaagcaagcttacagaagtgctccgggactcctttgttggaaattcgaaaactgttatgatctcttgtatatccccaaatgctgggtcatgtgaacacacacttaataccttgagatatgcagaccgagttaaaagtctatccaagagtggaaatcctagaaaggaccaggccccaaatcctataccaccaccagcaattaaagaggtttcatccacatcttcacttccagctagtgttggtgcagaggattttaataatggtcaacgtcaagaggtaaaaacaatggacatgagcaggaaagttgtcgaaaaggaaagttctttgtacagctccgctgctgatgttgacaaacaatcaagtttttcttctagttgtcaattcaatgggcgagaggaaaaaagctcagcttctgccccaatggacagggaaaagtttgaagtaaagaattcttacggtggtgattctaccagtcagaagatgaactcttattccatagatgttacaaatgagaaagtgcaaagggtgtctcccccacgcagaaaagggactaaggaggagaaatctgaaagatctgtaaattgggtaaaacgggatgccaatggttctgatcattccactgcaagctccaagcagcagagcacaggaaattataacattaccactggatcggggcagtctgaaacagaatcctcttctaatgtgaatatcagcgcaatacttgaggaggaagaagcactaattgctgctcataggaaggaaattgaagacacaatggagattgttcgtgaagaaatgaaactactggcagaagtggaccagccgggaagtcttattgacaactacgtgacccagttgagtttcgtgctttctcgcaaagcagctagtctcgtcagtctccaagcacgccttgcaagattccaacatcgactaaaagaacaagagatactaagtagaaaaagagtgccccgttgagaggctccgtttctcttgttcagtgatgacgtgtatgttcttgatgtcatttctccgtgtttgttagcgatatagttttaaaggtttttgttcattttataaaaaaaaatggatcttttgttgggtattcaaattaaatttactcaaatgtatatttgtcccttctgtgatattattatgcccaccttattattgcctttgcaaattggatttaagtgtaaattattttttattccgcc

SEQ ID NO: 9467 - DNA, 351 bp, Glycine max
tggtgggtggagcgtgcgaagggagagggggtcagtcaaggtcagcatagaaagactccctctcagttccgacgaggcggcgactctgcattcccacccacctaacttctctctctttctctctctagggtttcgccatttatccctaattaagctaatttcaatttcatttttaaggctgtgtttgaaagtgtgttcaatgggtactccggaattcccagatctgggaaagcactgtgctgtctcggattgcaagctcatcgatttcttgcccttcacctgcgattgctgcgaccaggttcgtccactttcctctctcaatctcaatctccattagacccccagcatccg

SEQ ID NO: 9468 - DNA, 496 bp, Glycine max
  unsure (1)..(496): unsure at all n locations
catttttaaggctgtgtttgaaagtgtgttcaatgggtactccggaattcccagatctgggaaagcactgtgctgtctcggattgcaagctcatcgatttcttgcccttcacctgcgattgctgcgaccaggtgtattgtttggaccacagaagttataataaacatcagtgtacaaaagctgacaagcaagatgtcacagtagttatatgtccactttgtgccaaaggagttcgcctagttcctgatcaagatccaaacataacttgggagaatcatgtcaacaccgagtgcgacccatcgaattatgagaaagtcacaaagaagaaaaaatgccctgtccctgggtgcagagtgatattagtattctcaaacacaattaagtgcagggactgcacagtagagcattgtttaaagcatcggtttggacctgatcataaatgtcctggtcncacaaaggtggaatcaagtttttcattcatgaatcttttgaatgg

SEQ ID NO: 9469 - DNA, 1359 bp, Glycine max
agcagagcaattcctctgctctatgctgggggatgattctgagattaacttggctgttgttagagacgttctttgtcagtgtggatatgatattgaaacggcctcagatgtattgcttgatttgctgcttccacaaatgacaaaccgaatactgatagacatcctaactacagagtggacaacattgatgatgagaggttctttgctgaccccaatgacagtttgatagacaggagatcagagtgcacatctctttcatcggaaggttatctttctgataatccatggccttttggaaggaaatatgtggaggttctcaatagttctaaagctgattctgctattagcccaggatgtacaaagtctgaaattcctcagaaggtgttggaatctttgtttaatattcccaaaagcactgaacatgacaaagataccatgaattggagaaatgtagtaaagaaaatccagtctttgggacctgggttcaatgtttctccgcatgttgcagaatcccagcaacatacgtgtgctaagggagatgaatatcatgtgtttagggaagattcaaagcagcaatgggattcagtgaaatcttattatacgaaagctgcaacagcatataccaaacgggaacgagcttatgctgcatatctttctgaccagggtaaagaacaaactagattagctcagaaagcagacactaaggccagccatgacatatttattgctagaaacaaaggtatagaaaatatgataactattgacttacatgggcagcacgtgaaacaagcaatgagaatgctgaaactacaccttctgtttggatcatatgttccctctgtccagactctaagggttattacaggatgtggatcacatggtgttggaaagtctaagctgaaacaatcagttataaaccttttagatagagaagcaattgaatggagggaagagaaccagggaactgtgttgattaaactcagcagatggagagagtatagctttctggacaccagcagtgacagtgacagtaatgattaagcatgtctaagtgcatcagcttgttgtaccatatttagatcaatcgcctggcgaaaataaataaattagagctgtgacattgacatgtacattattttgttagccaagctagaccttgggacattttgggtttatcatatcatgtagagcagaacctgtagctcaattgaatctggttgtatgagtcagaattgcatttcttgattaggctaatgacccagctgtgtacatacatgaatatgtatagatcatgtttgattttcaggattttatgtttaatttctccatactgttatttaaaattgtgttgtgggtgat

SEQ ID NO: 9470 - DNA, 670 bp, Glycine max
gaaaacaagtagggaataacgtgtaggaaactacattggttttacgacacgacttgaatcacaaactaattttatctgaaatatctctttcatagaacggagaaagacacgatgcaggaagcgacgaaggtgataataatcggtgccggaacttctggtatcgccaccgccggttgcttaacgaagcaatcaataccttacataatgctcgagagagaagactgtttcgcttcgctgtggcagaaatacacctacgatcgtctccaccttcatttgaggaagcaagtttgcgagttaccgcacttaccgtttcccaagtcttaccctcactacgtgcctcggaagcagttcatagactacttgggaaactacgttaaccactttgagatcaagcctctgtaccagcgtgcagtggagttggtggagtatgatggatggaaagggatttggagagtgaaggctcagaatagaagatctggtgagcttgaggaatacgctggaaagtacctggtcgtggccagtggcgaaaccgccgagcctcgtctgcctcagattcaaggcttggagagtttcaatggaaaagtgattcactcaactgcctacagaaacgggaacgagtttaagaataaacatgttctggttgtcggatctggcaattccggcatggaga

SEQ ID NO: 9471 - DNA, 409 bp, Glycine max
gacgaaaaagcgagagtaataatcaaagtgcctcgagctgtgaaatcaccaacacggaatcaaatcaacacatttgaatggaaggagagaaagacgagtgcgggaggaaccttacgtgaaggtgacaaaccgccgcgatcgcgtagttgtcgttgacaccgcagatgctggtgtcgtgatttggaaattacaaaaaattagggtttaaaccttctttttgatgaaacggtgactttaggagacaataagaagcaactcaggtttaagaaaagcggtgagtttaagtgaacagatctcggccacacattttatccaacggtttagctttctcaaattgcagacgattcgttcccgttcagtggtggtggcccactggcggctatcttccatgggtaaaacataaaaccat

SEQ ID NO: 9472 - DNA, 426 bp, Glycine max
gaaacaggagagcaaccaaagctatacgttggagtggaggtgaggggtgtgtgtctgtccgagggaacaataaagggcaaacaaacaacaaaacaaaggaaagaaaagatgttacagttcccggcgtatatgacgcagtacccattgtccacgatgaccattccgacgtcgtttctgctacccgctcagtggccccagccccaaaacgaagaactccttctcgccatggaagagtccgatttcgaagaaaagtgcaacgagatcaggaagatgaacagcaacctaattgtgataggaaaaaccactaacgaaaatgataaggaagactttgacaatgaggcagatgacgatgatgctgacaatgcacaggaatctgagggcgaagaatttgagcaagaaactggttgagatagctgcacatcagca

SEQ ID NO: 9473 - DNA, 599 bp, Glycine max
ggtgctttggagactgcaagtgcaaccttgcttgcagctctcaaagctgcaaaaatatttgctgtattctctgctgcacattagcaccattcactcactcactgccccaaaaccacatgctcttccacatccctatataacctcttttcaatcttcataatcatcatcatcaccaccaactccaactcaaactctccaaaacctgccacttcaaccttcctatatattccttccctcactctcttctgcttctatcatctttctgagaggcttgttgacacacaaaaaatgatcaccttaacagacttctaccatgtgatgactgcaatggtgccactctatgtggccatgatactagcctatggctcagtgaagtggtggaagattttctcccctgatcaatgctctggcatcaaccgttttgtggcactctttgcagtgcctcttctctccttccacttcatagcctccaacaacccttatgagatgaacctgaggttcctagctgctgacacccttcaaaagatcataatactagtcctccttgcagtttggagcaacatcaccaaaagggggttgtttggaatgggccataacct

SEQ ID NO: 9474 - DNA, 711 bp, Glycine max
gtaaccataagttcttatgggctgtgagagtaccaagtaatgtagccaatgctacatataggggtgaacaaaaacacggggacgccgttagtagttcatgccatgtgggtttttggagagaaccaaagagaaaggcatggtttttccttcatgggcaccccaaattcaaatccttagccacagttcagttggagggttcttgactcactgtggttggaattcgatccttgagagtgtgctaaagggtgtgccattcatcacatggccactgtttgcggagcagaaaatgaatgcgattttgctatgtgagtgtctcaaagtgggagtgaggccaagagttggtgaaaatggtttggtggaaagggctgaaattgtgacggtgataaagtgtctaatggaagaggaagaaggtaagaaaatgcgtgaaagaatgaatgagttaaaagaagctgctactaatggtctcaaacaagatggggcttctaccaagaacttttctcgggtagcattcaagtggaaaaatttggcataggagaacaagttttattgaatgctttgatcaggatcttggtttaatttattagttattaccttctttttttttctgtttctgctttcctagtaagtaattctgtggagtattgtactagaatttctgatctagaacgagatcataatgataatttgcactattaggctcgtgttgcagcc

SEQ ID NO: 9475 - DNA, 522 bp, Glycine max
cggctcgaggtagaggatcagtgacgttgtggcaatggtgtgtgcaatctcatcatcaccgttctcaactctctcgtttcggcgtctcgtcgtacgcaatgcgacgccgtctccgtgcaagccgcgtgccgttaaacccttaacggcacttccgagcgcggggcggaggcagttgctgttttttctgacggcgacgacggcgttgacggcgagggaagcggcgtccgtggcgcaggacattcccttgttcgggatacggaagagtctgaagaaggtggaggaggaagcggaggagattgtgaaggagggatttgaggctgcggacaaggggttggtggcggcggagaaggggctggagacggcggagaaggggctggtggcggcggagagggagattgaggaggcggtgagttttggggggttggcgcaggcgggagcagtggcgggagcggaggtttttgggattttggttgcaacggcggtggtgaacggttattttgggcctgaagctcaaaaatcgtg

SEQ ID NO: 9476 - DNA, 871 bp, Glycine max
gaagaatatagtgttaaagagagcaagttctgtttaacacagacgagctgtggtagcagctagcgggtgaaggtttttgcgccgcgccttatatcacaccgtcgtccgaaagcgtcgttgccgtgaaaccctagaaagaaacgacgacgtaaatggaggtggagcccgtggagccgcagtcgctgaagaagctaagcttcaagtctctgaagcgcgctctcgatctcttctctcccatccacggacacctcgctactcccgatgccgaaagcaagaaaatacgcactagccacaaggtgagcgtggagtatggtggaatcaaaagcactgccaatcaacctcctcctcgtcaagttagttctgccacccaggatccagggccctctaacactctggctcttccaggtcccggagattccaaggattctcagaaaggaggaccccaaaatgccttggttgttggtccaactatcccatccacaacaccgaatgatactggctttcagaacaaaagtacagcggttgtttcagcctctggttcatctgaaagaaatttatcaacatctgctttgatggaaagaatgccaagtaaatggccacgtcctgtatggcacgcaccatggaagaactatcaagatatgggacttggcaagtggagtattgaagctcacattaacaggccacattgaacaagttagaggtcttgctgttagcaacagacatacttacatgttctctgctggtgacgataaacaagttaaatgttgggaccttgaacagaataaggttattaggccttatcatggtcatctgagtggtgtttattgcttggctcttcatcccacacttgacgttttactaaccggatgac

SEQ ID NO: 9477 - DNA, 644 bp, Glycine max
  unsure (1)..(644): unsure at all n locations
ggtcaaagcttcggaacggttgtaagaggcacccaganggggggaccttcaggttcacattgagacagcaagcctaaaggaaataaggaataatatttctatctaaatggtgaaccgcatctcaaactatgttcctctcttcatcattttgattgttttggtaacagggcaaaaacaagtggaaggatataaatgtttgacagatatgggtttatgtgatgaacgtatcacctcgagtgagtgtgatcttagatgtaaatcccattataatgatggagaggggcactgtgataacatgaacatctgtaattgtattcaccattgtgtctctcctcagccaaataaagacaccgagcctataaggaagtgcacaagtggccttggactttgcagtattgatcactgctatgatgattgttgcaattcaaaatgtgctaaacaattcaaagagggtataggacattgtgaaattgtgggttcgatgggtaccatcttatgtacctgtgattatgtctgctgagtttataaaaaattatggcatattttatatctacaggttgagtatcgatctatttactatttacctctgggataaatatgtcatgaactgaaaacaaaataaattaatgcccaatttcttcccc

SEQ ID NO: 9478 - DNA, 398 bp, Glycine max
ggaacatcaaaatcacattgagacagcaagcctagaggaaataaggaataatatttctatctaaatggtgaaccgcatctcaaactatgttccgctcttcatcattttgattgttttggtaacagtgcaaaaacaagtggaaggattgacatgttcgagatatttcggtttatgttccgacacgagaagttgtgatcttaggtgtaaagcccgcaataagcatgcagaggggcgctgtgatgatgacttcaactgtacttgtatttacccttgtgactctcctcagccaaataaagacaccgagcctataaggaagtgcactagtggccttggactttgcagtgttgatcactgctatgatgattgttgcaattcaaaatgtgctaaacaattcaaag

SEQ ID NO: 9479 - DNA, 2184 bp, Glycine max
cccacgcgtccgccgttttcatttttcttcatttaatttaatttcctcctttttttttgggggtaaaagaaagaaaacatttccattttttctcagatctgcgaaacctcgttgccccccgaacatgggaaactgctgcgccacgccgtccacggacgaaacggcgaacaagaagggcaaaaagggaaaaaaggaaaaccccttcgcgatcgattacggtttcaacgccgccgccgcgaacgggtcgaagctcaccgttctgaagtccccgacgggccgcgagatcgaggcccgctacgagctgggccgcgagctgggtcgcggtgagttcgggataacctacctctgtacggacaaggagacgggggaggagctggcctgcaagtcgatctcgaagaagaagcttcggacggcgatagacatcgacgacgtgaggagggaggtggagatcatgcgccacttgccgcagcatccgaacatcgtgaccttgaaggacacctacgaggatgacaatgccgttcatcttgttatggagctttgtgagggcggggagctcttcgaccgcatcgtggcgcgaggccactacaccgaacgcgccgccgccgccgtcaccaagaccatcgtcgaagtcgttcagatgtgccacaagcaaggtgtgatgcatcgggatctcaagccagaaaactttttgtttgcaaataaaaaggaaactgcggctttgaaggctatagattttgggttgtcggtgttctttaaaccaggggaaaaatttaatgagattgttggaagtccatattacatggctcctgaggtattgaagcgaaattatgggccagaagtggacatctggagtgctggagtaattctatacatcttactttgtggtgttccgcctttctgggcagaaactgagcaaggagttgcacaagcaatcatacgatctgttgttgatttcaaaagggatccatggccaaaagtttctgataatgcaaaagaccttgtgaagaagatgctagatcctgacccgaggcggcggcttactgcacaggacgtgttagatcatccatggttacaaaacgcaaagaaagctcctaatgtttccttaggagaaactgttagagcaaggctcaagcaattttctgtaatgaacaagcttaagaaaagagctttaagggtgattgctgagcatttgacagtagaagaagctgctgggctaaaagagggattccagcttatggatacaaacaacagaggcaagattaacattgatgaattacgagtagggttgcataaacttggtcatcaagttcccgaatcagatgtccaagctcttatggaagctggtgatgtagatggggatgggcacctagattatggagagtttgtagccatttctgttcatctaagaaagatgggaaatgatgagcatcttcgcaaagccttccaattttttgatcagaacaaaagtgagtatattgagattgaggagctgcgtagcgccttatctgatgatcttgacacaaacagtgaagaagttatcagtgcaattatgcatgatgtggacacagacaaggatggaaggataagttacgacgaatttgctacaatgatgaaggctggcacagattggagaaaagcatcaaggcagtattcgcgagagaggtttgccagtctgagcctaacgttgatgagggacgggtcattgcatttaaacaatgaaaaacaataacggtagatgactactttagaaatgccaatttttactttggaaaggaaaattcgataaagaagtctattttttaattttaactctcttcattgtaattcttttctctaataccccatttttgggtgaaaaaagataggatattggccccagcagtgttgtctgtgatttgaagtatgtctttttttggtttgttgaggttgtggtaggagataggagagagggttggagggactggacattgaacaagttttcatttgtggctgtaaatatgttaaattatcaagctttatgtgtaatctgccatctttacgcaaaccgtgccccatgaataatgtctaaaatcttggtacacgattaagaataatcatcatggaaatcaattttaacaatttgtggggatacttttggtagaagaaaaaaatatttaataggaaaaattacaagtgaccttgaat

SEQ ID NO: 9480 - DNA, 719 bp, Glycine max
gaattagaattagaatataagatagtagaaaagaaagggaataaggaaacccttcttcacttctacctctaatctaggaataggaaaaagatgggcagcactagtgcgagtgccctcaggctatcgtcgatggtcagcgtgtccccgaattgcaattgctcatcgatgacgcttatgaagaagacggcgatggcgatggcgatggctcctttttcacttgcaatgaaaatcaaaagcaaaaggggtggtattaggtgcgaggtggctattaatgcggtggatgaggagtcgaggacgtcaccggaggagacgaagatcggagcgcgtgtgaaggtgaaggaggcgggtttgaaggtgtaccacgtccccaaagttggggagcttgacctaacgggtctggaaggcgagatcaagcagtacgttggcctctggaacggtaagcgaatctccgccaatcttccttacaaggttcagtttctcaccgacatccccggtcgtggtcctgtcaagttctttgcccacctcaaggaagatgaattcgactatctttagtcactgtactgcactgcactgccctgcacgtcactgttgtttaggtgtccctgtacttgttggtaaaagcaatggtatccttcggcaaatctgtcttttgaacctactatgattttactgacctcgaaaactcaactcaacaatgatgttttgtgcactttcatgtt

SEQ ID NO: 9481 - DNA, 752 bp, Glycine max
aataaatgaaattttgggaggttcaaacatcaatttgtatatccaattagaattagatagaaaagaaggggaataaggaaacccttcgcctcggtgcgcatccaatccaatctaatcaacaaaagaagagtagagcgagagtggaatagaacaaagaagatgagcggcgccagcagcactataaggctatcgccgatggtgagcgtgtccccgaattgcaattgctcatcgatgatggtgatgaagaagacgacgacggcggtggctcctttgtggatgaaaagcaagagcgctaggggtggtattaggtgcgaggtggctattaatgcggtggatgagtcgacgacgtcaccggagtcgaagattggagcgcgtgtgaaggtgaaggcgggtgtaaaggtgtaccacgtccccaaagtagccgagcttgacctcacgggtctggaaggcgagatcaagcagtatgttggcctctggaacggtaagcgaatctccgccaatcttccttacaaggttcagtttctcaccgacatcccagctcgtggtcctgtcaagttctttgcccacctcaaggaagatgaattcgactatctttagtcactgtactgcactgcactgccctgcacgtcactgttgttgtatgtaatcaattttaatccccctgaattttttacttatgtattaccttctgtttcaagccgatagatgcctactaaaaaaaaaatatgaattcatcttatgcagtcaaaaaa

SEQ ID NO: 9482 - DNA, 594 bp, Glycine max
gacgatcaccaattaaattcttgatcataagctgaagagtccaaatccgagcaacttgaactaattgtcgaggacgccttcattgccacctatgttatgcatcctcttcaaactcacactcttcatacataattagatacattggttgcgcgctcttcctcgtttcctttgtctttctctttcggctttttccatcccttcctttctgcatgcagtgatgctgtgataaactgtgttagagcaacatcatggaacttttcaacatgtaatgattaagaaggaagatcattcatttaactgattaatggcactgatttccgagctactggctaacacaatactcttggtgatgaggcatttttctctacttagactggcatgcttgtttggtatcagaatcgcattaactgtcatatatacttggacggagttgatcgggacttcaattagcttccatgcaaacataatattaagaatgatcacatggacatttgggcttatctccctgcctgcaagagttgtgaatgcctttcaaagggagaggcagctggaacaaaaactacatgaaatgcacatagagttggagaatctagt

SEQ ID NO: 9483 - DNA, 263 bp, Glycine max
tttctttgcacgctcttactccgttcctttgtctttgtctttctctttcggctttttcttctgctccactgtttctatcccttcctttctgtatgcaatattggcatgcttgtttggtatcagaatcgcattaactgtcatatatacttggacggagttgatcaggacttcaattagcttccatgtaaacataatattaagaatgatcacatggacatttgggcttatctccctgcctgcaagagttgtgaatgccttcaaag

SEQ ID NO: 9484 - DNA, 276 bp, Glycine max
atctttctttgcacgctcttactcgtttcctttgtctttgtctttctctttcggctttttcttctgctccactgtttctatcccttcctttctgtatgcaatgtccttttctctacttagattggcatgcttgtttggtatcagaatcgcattaactgtcatatatacttggacggagttgatcaggacttcaattagcttccatgtaaacataatagtaagaatgatcacatggacatttgggcttatctcgctgcctgcaagagttgtgaatgc

SEQ ID NO: 9485 - DNA, 477 bp, Glycine max
gtggatagattaaagccaaacagcgccgatgccgaagggggggcatggagttggttcatcacagaacataatggaataccaacaacagaaacaacaatggaagaggtcacaaaggacaaaaccctcttcttcttcttcttctcacatcaacaatctcgatgatggttgtcttatgcacattttcaacttccttcctcctattccagatcgctttaataccgccctcgtttgccacagatggaattacttggcatgtcatcctcgcttgtggcttcgggttgatcgatcagttaaagagttatctgaacccggtgttttcccaaacattgaaaccgctgtatctgcttcaagaccaggtgataccattttaatagcagctggtggaactcatcgtgttgcaaacattcaaataaggaaaccactttgcttaattggtgcaggtgaagttccagatgacacaacacttgtttgttctcg

SEQ ID NO: 9486 - DNA, 518 bp, Glycine max
ggtcagcgtcaaaaccctgtctaagctccccaaaacgcaaaacccgcggcaccatctcattttcatttcccgcccaacatggcagacaacaaaaagcgccggcgaaaggaccccgccggcgacgagctccccttcaaaaacaagctgaaaccggactccgcaatcatggaaaccctaaagcagttctccgcctcatcctcctcctcctccgcctccgtctcacaaaccctaaccctccaggacctctccctccccttccgctgccgcgaggtggcggacctctccctctcctccgtgcagtccaacatcgagtccctcattctccggatcgcccactccatcctctccggccacggcttctccttcgacgtcccctcccgctccgccgccaaccagctctacgtccccgagctcgaccgcatcgtcctcaaggacaaatcctcccttcgcccgtttgcgaacatctccactgtgcggaaatccgccatcaccgcccgcatcctgcagctcatccacca

SEQ ID NO: 9487 - DNA, 380 bp, Glycine max
ggaggagaagaaaatgaagcagggaaaaatatttgactttgatgatggcagctcgcagtctttgcaggctactctctcgctctctctcttcttccaattcttctggagctgcttctctgcttcactcactaggaagaaaccctggagggtggagaaacattaacagatttagcacggctgcagcagttgaggaactaatcactccacaagtttcaatacgttacacacagaacctgataaatgggcaatttgtggatgctgcatcagggaaaacatttccaacatatgatccgcgctcaggagaagtgattgctaatgttgctgaacgggatgttgaagatatcaaccgtgcagtatcagcagctcgcaaggcctttgat

SEQ ID NO: 9488 - DNA, 405 bp, Glycine max
aaacgaacgaagacagcgaaggagctacgctgcgagatttagaaattgaatccctaatttcgaggttccgactcctgtggagtgatcatatagcgaattttgtgttagcgaatcaatttgcagagtaaggaataaggatgggaaaaaaccaagcctacaaagctatgcagagagccaggctcggcggcgcctccgccggccccgacgaggttgaagacggcatggtggatggttcatttcattcaccagaatggcatgcagctcgtttggctagccttaacacctctcacaccattatctgggaggagtacaaaatgaagcaaaaggaagaagaattgagaaaaggggaattggaagcagatgcagataggatgatgagagagtacagagctcaactagatgctg

SEQ ID NO: 9489 - DNA, 353 bp, Glycine max
  unsure (1)..(353): unsure at all n locations
cccacgcgcccgcgaagacagcgaaggagctacactacgctgcgagatttggaaattgaatccctaatctaatttcgaggtccaactcctgtggagtgtgtgtggtgctttcaatctgcatgatcatatagcgaatttgtgtttagcgaatcatatttgcagagtaaggatggggaaaaaccaagcctacaaagctatgcagagagccaggctcggcggcgcctccgccggccccgacgaggttgaagacggcatggtggatggttcatttcattcaccagaatggcatgcagctcgtttggctagccttaacacctctcacaccattacctgggaagagtacaanaagaagc

SEQ ID NO: 9490 - DNA, 1348 bp, Glycine max
aaggattttctcgtttggaagaagtcctagatgatcttgctcttgatattccatcagctaaaactcagtttcagtcattggtgcctaaggcaatatcagaagggtggcttgatgcctcatttttgaaaccatctagtgaagatggggatatagtagttgaagatgaaaaggtgaggaagtataaaaaagaggttgtaactataattcatgaatattttctttctgatgacattcctgaactcattcgaagtcttgaagatcttggggcacctgagtataacccaatatttttgaagaagcttatcactcttgccatggaccgaaagaacagggaaaaggaaatggcatcagtactgctatctgctcttcatatagagatcttctcaacagaggatatagttaatggttttgtcatgcttctggaaagtgctgaagatacagcactagatatattggatgcatcaaatgagcttgctcttttcttagcacgagctgtgattgatgatgtattggctcctctgaatttagaggaaattagcagcaagttgcctccaaaatgcagtggtagtgaaactgtgcggatggctcggtcactcgttgctgctcgtcatgctggtgagagactattgagatgttggggtggtgggactggatgggctgttgaagatgccaaggacaaaatcatgaagctcttagaagagtacgaaagtggcggggttgtgagtgaagcttgccaatgcatccgtgatctgggaatgcctttctttaaccatgaggtagtgaagaaagctttgattatggcgatggagaaaaagaatgatcatatgctagatctactgcaggagtgcttcagtgagggcctgatcaccattaatcagatgactaaaggcttcacccgaataaaggatggtcttgatgatctggctctggacattccaaacgccaaggagaaatttggcttctatgtggagcatgctcagtcgaagggctggcttctaccctcatttgattcgcctgccacagatgcctaattacccccggcggcagctttttgaggacgtttgtgtcttattgtttctctcatgggtgttgtcctttagctcccactgaatgctgaatctgggaccgttggacttctaatgatccttttttttttcctgttccttttacttactctttcttccctgaatcatctcaccgacagagtttcctgttatctcaggcattgtataaagttggtcttattccagtaacagctttttaggatgatgttgttgccccaagaggtattttagaagggcatatattgtaaaaaaaaaaaaaaaaaaaactcgcggcacgagctcgt

SEQ ID NO: 9491 - DNA, 370 bp, Glycine max
ggggtcggcccgatatggctggctttttcttcacaaaggatatattgaaagggaagcagatatctgttttcgagggtcccaatggacgatcagttgcgagggactttacttacattgatgatattgtgaagggatgtttgggggcgttggatactgccaacaggagcactgggagtgggccggcccagttgcggctctacaatctgggcaacacttctcccgtggcggtgagtaagctggtgaggatattggagaagttgctcaaggttaacgccaacatgaaactcttgccaatgccgcccaatggggatgtttttttcacccatgctgatattagcttggctaataaggaacttggcttcaaccccac

SEQ ID NO: 9492 - DNA, 410 bp, Glycine max
gaaagagtgaaattggaaattgcatttgaataatgatgtccatattccggcaatacaccttggacgactcattctcgcaagtgttggtgtccccgaaattcctgaaggagtaccaaatagccctgaccttcgcaagcgactacgacgacgacggcgtccccaccaacggggttttccggccaacctgggacctaaccaaggtgaccccggaatcaatcacgcgattcaaggataagaaccccgacgtggacatcaaagtcttcatcagcatcggcaaccgcggcacccagcaccccttcaaacccctcaacaaccaaacctggatccagaacgccaccatgtccctcaccagcctcatcaacaacctccacgtcgtccacggcatcgacgtcctctacgaccacatcgat

SEQ ID NO: 9493 - DNA, 490 bp, Glycine max
gggggaaacaaaaacaaaacatttcgtccgaaactaatataacgtgttcctccttggaagaagccatagccataacatagccaccagaaaacaaaacccaccttagttattaaaagaaaagaaaactacataaaattaagctttgttcggtggtgaccatggggagcaccgactcatcaagcggttcacaacaaccgaacctgccacctgggtttcggttccaccccactgatgaagagcttgtagttcactacctcaagaaaaaagcagcttctgctcctcttccggtagccatcatcgccgaggttgatctctacaagttcgatccatgggagctacccgctaaggccgcgtttggggagcaggagtggtatttctttactccgagggacagcgaagtatccgaacggcgcgaggccatacagggcggcgacatctgggtattggaaggctactgggactgataagcctgtgttgacttctggtggga

SEQ ID NO: 9494 - DNA, 436 bp, Glycine max
gagggaggaagtggaacacaaaaccgttaacctatagccccacgagaaaaagaagaagaaagaaagttgaagtggtttgagttagctgagaagagggtgctccattaagggccactctcatcaaacactttgatcatcaaatccatttaagtgaattggttgaatctgccaaaacgggtctccctctgtggatgcttggtttgggtgcggacctcttgtgggccgacatgaaccgtctcctcgcctttctcttccaccagggagtgttggatgagcaattcttgcagcttcagcagctgcaggatgagacctccccaaacttcgtctccgaggttgtcaacatttatttccacgaatccgaaaagcttctcagaaatctcagagctttgctgatggagaaggagttttctgactataagaaaatggggatacattt

SEQ ID NO: 9495 - DNA, 547 bp, Glycine max
ggaattcggtcgagcaaaacttgccattttcacaagtatttttggggtcattagagattcttcttcgggtggttttgacagataggtcattttgtgccgtgcatggtgatggtcttctctgattgaaattccacacactgcctcctctctccaatttggtacaccggttagatggtatgccgcagttgtgtaaggtctttggttgttcaagctggaaccttcgccaacagagtgagaatcaacggatttgggaggagtttgcaggcagttcagagtttttctcattggccaattcgtgaatacaagacaaccacaaggatgatggttgatacgggttctatgtcaagggctggaccccttgttgatacgatgccagagaaagatgatgatggtcggtttgccagtggagggtggaaaagtgacgatggaagacttagctgtgggtattcaagttttaggggaaagagagtgacaatggaggatttttatgatattaagacattgaagattggtggccaatcaatatgcttatttggaatatttgatg

SEQ ID NO: 9496 - DNA, 536 bp, Glycine max
cgcttttgccaaatctcgctatgcttctcttctaacctctcaccctcgctctctttctctctagggtttcgttctcattctagattcccacatagaaactgtttctgcgttatttgattcttctcccaacctttccttgatccggattaagattcctggcacgtttttgaaccgatccacttcatatcggatccgaattcgaacattcaacatctgattccgcaattctctccgaattttgctttgaatttgcttttcgaatagatgattacagttccttagacagttcaattattaaaaaaaggtacatcatttagatggtatgccgcagttgtgtaaggtctttggttgttcaagctggaaccttcgccaacagagtgagaatcaacggatttgggaggagtttgcaggcagttcagagtttttctcattggccaattcgtgaatacaagacaaccacaaggatgatggttgatacgggttctatgtcaagggctggaccccttgttgatacgatgccagagaaagatgatgat

SEQ ID NO: 9497 - DNA, 519 bp, Glycine max
gaggcaaggaagaaggtaaaagtggatggcgttgaatttgactgggtacatggtactgcaagtgtctctattatggctatggcagtgacagtgacaccctaccctttcttttggtttggctcaaaaggaaaaatccaacactctcctaggcacaacaccattgactacactgcaaccctctttcacacttgtgcgttgaccactttaaacttggacgtttcgcgtcacgtgccataccaatgctatgaaatgaacccattacccatccttgccgctgccatatatatacgtgcgtttcctagctaccgacctaccatgaatctgtggatctcttttctttggattttatcattattgtcattattactgatatacgatcacataaatcttattacctagcgtacgtgtacagaaaaaagaaatgttgaatccaaattgtattatgggtgtgcttgattttattttttcttaaaattattttaagctaaacccgttaaatatataatttagttcctgcgc

SEQ ID NO: 9498 - DNA, 502 bp, Glycine max
cccacgcgtgcgcccacgcatccgtaatattgttgataatgaaattaatgagagaagagaggaggaggctagtgatgatttgtttagtactggaaccagtgtgggccgggtttcggattttaacaagagtagcggtgtggtgagtgtgagtactgatagcgaagagcttagtagtagctacaaagagagtgataagttgatgtctgggactgttttctctgagattgtggatccaaagccacgttgagagaatcaaattgatctcaagaatgaagacctaatactactagggctagcttgaggctcgcaagttatgtgtttagtttcataatatatagttgtaatattacaatgtctgtgtacagaaatcaagttgcttctatctcttgggaatctagacaagtgcaaaggttaattggttggtaagtcataaatttcaatcatttttgtaaccagcctatgtgttacgtgttcaatcattattataacattttttttgtcc

SEQ ID NO: 9499 - DNA, 526 bp, Glycine max
gtgattgtgagaaccgtttactgcttcaaaactgatgagagggggaatgagaaggctggggaagtgatgaagaatgctttgaggaaggttcttgtccactattaccctcttgctgggaggcttactataagctcagagggtaaactcatagtggattgcacaggtgaaggtgccttgtttgtggaggctgaggcaaactgttccatggaagagattggtgacatcacaaagcctgaccctgggactcttggtatgcttgtttatgacattcctgaagcaaaacacattcttcagatgcctcctttggttgctcaggtgaccaagttcaaatgtggaggctttgcgcttgggctgtgcatgaaccactgcatgtttgatggaattggtgcaatggaatttgtgaactcttggggagaagcagccagggacttgccactctcaatccctccagtgctagacagaagcatgctcaaggcaagaaaccctccaaagatagagcaccctgcacaagaatttgctgacattg

SEQ ID NO: 9500 - DNA, 440 bp, Glycine max
gaaattgtgttggagcaaaataccatcatgaagctaagaagcattctccttattgtgtgggctttgtttgctctcttgagccacgcttatggggaaatccgtttttgccaaaaagaaatgacgttggatgggtcatgtccacttgggacttcaggggaaagctgctttctggaattcctgaatagattgggagcaagtgccatgcctatgaattgctcttgcaaagatgatccttcccataataaacgccaatgcacttgtaatgttgtgtgtaacacatgagacaattttgcctctagagtgcacttcagtccaaattattcataaaataaaaaaacgtgtactgatcttgtaatttctctacatatgttgagaattttaaaagcccatcacctaatgttccagttattatagttaatgatattttcaatttgttaccc

SEQ ID NO: 9501 - DNA, 1378 bp, Glycine max
gatcatcatatcatgtcttatacaactgatgaagtgatcaacttgtaatgtaacacttttgagttgcattgttgcatcaccgcaagtccacaacatggctgccactgccgctgcaggcatagcttccttgttttcttcttctattaacagtgtcaaatgtcttcgttcctccaagaactgctccattatagacccccttataaccacagtgccctcaaaccgtggcatgtttgtgtcacacttggtggaacctttgtccattgggggtgccattaattcgcacaagttgtgggggcctagaatttctgctgctgttgcacaagaagaggctgttgttgtggctgatgatgaggtagatgatggtgctggtttagttgaagaagagaaagtggaggagaatgaaggagaagtagttgcagaacaagactctgattcctctgccaccaagctttattttgggaatttgccttatagtgttgatagtgccaaacttgcagggctaattcaggattttggtagcgcagaactaattgaggttctttacgacagggatactggaaaaagtagaggctttgcatttgttacaatgagttgtattgaagactgtaatgcagtaatagaaaatcttgatggaaaagagttcctgggcagaaccttgagggtgaacttctctagcaaaccaaaaccaaaagaacccttgtaccctgaaactgaacacaagctttttgttgggaacctgtcatggtcagtaactaatgagatattgacgcaagctctttcaagaatatggaacagtggttggagctagggtcttgtatgatggagaaactggaagatcacgtggctatggtttcgtttgctattcaacaaaagctgagatggaagctgcccttgcagccttgaatgatgtggaactagaaggacgggctatgcgtgtaagcttggctcaaggaaaacgtgcataaggttaatagaaatttgggaaggcttagatgttcaacaatggtgccatagaaatgagaagaggatgcacttgatgtaattttctgaggaattccttttcatttcttgtggtttataaattatttactcccactttcgaaggatctgctgacccgaatgttatattttgtgcatttttgctgatactaacattggcctatttattgcctccttcttggctcaccgagccatacattgaatcacatactctattctgtgtaacatttgctatgaaataatcagcaaaggtgtaaagtttgtaccatattgaatacaaacttcaaaatacatattctttttgctgcaaaaaaaaaaaaactaaaaaccaataaaggaaaaagggggggcccccgaatgtggtgctccgtccccgggg

SEQ ID NO: 9502 - DNA, 451 bp, Glycine max
tccacgcgttcgcccacgcgtccgcccacgcgtccggttgctttacatcacaacatcaacatggctgccactgctgctgcaggcatagcttccttggtttcttcttctattaacagtgtcaaacgtcttcgttcctccaagaactgctccataatagaccctctcataacaacagtgccctcaaaccgtggcatgtttgggtcacacttggtggaacctttgtccattaattcgcacaagttgtggggacctagaatttctgctgctgttgcacaagaagaggctgttgttgtctgtggatgatgatggtgctggtttagttgaagaagagaaagtggacgagaatgaacgagaagcggtggcagaacaagactctgattcctctgccaccaatgctttattttgggaattcgccttatactgttgatagtgccaagcttgcatggttaat

SEQ ID NO: 9503 - DNA, 347 bp, Glycine max
gacagactcaggaaccaatagacaaatatctattaacaagacaacgcaacgcttctctttctttctttctatccctacttcgcctctgtttcatttggcccattgtttctcacaagccacactctttgtttgaagcttaaactccctctaagccccatccttaatttactcaatctcatcaatgtttcatcatctggattccattccttgagtctcatgctggatatgccaatcctttcatcctcatttctgatatccttgtgtgcatgatcacatcttttccaaggattttaaaaccatgggtagaggtagaggaaagggtaaaaactaactgttaccaattttga

SEQ ID NO: 9504 - DNA, 355 bp, Glycine max
gacagactcaggaaccaatagacaaatatctattaacaaaacaacgcaacgctcctctttctttctttctatccctacttcgcctgtttcatttggcccgttgtttctcacaagccacactctttcattgaagcttaaactctctaaagcccaattctttattaatttactcaatctcaatgtttcatcatctggagttcttcttttgagggctttagcagattccattccttgagtctcatgctggatatgccaatccttgtatcctcatttctgatatccttgtttgcatgatcacatattttccaaggattttaaaaccatgggtagaggtagaggaaagggtaaaaaacta

SEQ ID NO: 9505 - DNA, 1910 bp, Glycine max
gatatcaacaactcgtccttgtattaaaaactcaatatcaaattctttgtcccacaaaagatggggttcactcccacaagtactgcaacatgctttctcataatagcacctctggttgtgctatggtgttggaagctactaaagtgggtgtggctgaggccaaagagattggagagagcattaagggcacagggccttcaggggaatccctacagcctcttgattggggacactaaggaaatgtacacagtgctcatgcaagctgccagatctcaacaatctacaagttcttttctctctaaggataaggatgcagcaccacatatcacaacctttaaccatcacattgtcaacaaattcggcaagaattcatttttttgggaaggtaccaaaccaaaagtggtaatcactgaccctgagcaaatcaaagaagtcttcaacaagatccaagactttgagaaacccaagttgagtcctattgtcaagttgttgggctctggacttgcaaatttagaaggcgagaaatggcgtacacatcgaaagattattaaccctgctttccatttagaaaaattgaaggttatgttaccaatatttcttgaatgttgtgacgatatggtttccaaatgggaaaggttgttgtcttcaaatgacaaatccgaaattgatgtgtggcctttccttcaaaatttaacatgtgatattatatctagaacagcatttggaagcagttatgaagatgggaaacgtatatttgaacttctgaaagagcaaactggacttatgatgaaattgcagaacgcttacattccaggatggtggttgctgccaacaactacaaataagaggatgaaaaaaattgatactgagatacgagcattacttaaaggtgtcatcaacaaacgagagaatgcaatgaaggctggtgaagtcttgaacaatgacttgttgggcatgcttttggaatcaaaccgtatggaaatacaagatcatggaaagaataacattattgcaatgactagcctagaggtaattgaggaatgcaatgcattctacatagcaggacaagaaaccacatcggttttactagtttggacaatggtgttattgagtagatatcctcattggcaagaacgtgcaagggaggaagtattgcatgtttttggtaaccaaaagccagactataatgggctaagtcaccttaaaattgtgaccatgattttatacgaggttcttaggttatacccacctttaatttattttgctcgagcgatcaagaatgatgtgaaacttggaaacctttccctacctgcgggagtgcaagtttccttaccaatactattgattcaccaggatcgtgatatttggggtgatgatgctacagagttcaacccagaaagatttgctgaaggagtagcaaaggcaacaaaaggccaagttgtgtttttcccatttggatggggtcctagagtgtgcttaggccaaaattttgctttattagaagcgaagttggttttgtcattactcttacaacgcttctcatttgagctttctcctacctatgcacatgctccagtcactgtgctcactcttaatccaaaatttggtgctcatatcatcttacataagttgtagtgtcatctattaatttgtatcctgcacacctaattatctccattcctttcttatgttctaatctcttgtatttatagagggaaacctctttattatattgaatgctatttttatttcctaaaaaaaaaaaaaaaaaaaaaaaaaaaaaaaaaaaaaaaaaaaaaaacacaaaaaaaataaaaaagataaaaaaaaaacaacgataagactaaaaaaacaaaaaaaaaaaggggcggccgttctaaaggacccaagtttacgtacccgggcttgca

SEQ ID NO: 9506 - DNA, 386 bp, Glycine max
cggtcgagtaggggcgctcggatctagaactagatttttttgggaaggtaccaaaccagaagtggtaatcactgaccctgagcaaatcaaagaagtcttcaacaagatccaagactttgagaaacccaagttgagtcctattgtcaagttgttgggctctggacttgcaaatttagaaggcgagaaatggcgtacacatcgaaagattattaaccctgctttccatttagaaaaattgaaggttatatatacactttaatatatgttttgtttgggaatcactttttcttagcatgtttgattccatatcaagttttattgaattatgttttcattaccttgcaggttatgttaccaatatttcttgaatgttgtgacgatatggt

SEQ ID NO: 9507 - DNA, 1112 bp, Glycine max
gattcttgaaggatgcttcttcaattccctttccttctttcttagctttgaagaccaactcatttcaacttaacccatcaaaaccatcgctctctattttcgtcctttctacctttctccgatcccaatccctaatctttctctcttcaaactctaattttttcatctggggagatcggctgacgaatcgagaggatccgatcgctcgcgagggactagggtttcaatcgatcgcatcacacacaacaatcatgtttagccggatgttcggtaaacctaaacaggaaaccaatgctgttgccactttggacaagctaaacgagacacttgaaatgctggagaaaaaggagaaagtgctccttaaaaaggtggcagcggaagttgaaaaggccaaagaattcacaagggggaagaacaaaagggcggcaatacaatgtctgaagaggaagaggttatatgaacagcaaatagagcagcttggaaatttccagttgcgtattcatgaccagatgatattgttggaaggtgctaaagctaccactgaaacggtagatgcattaagaactggagcagctgctatgaaggctatgcaaaaagcaacgaatattgatgatgttgacaagaccatggatgagatcaatgaacagaccgagaacatgaaacagattcaggatgcattgtctgctccaattggtgcagctgctgattttgacgaggatgaattggaagcagaacttgaagaactggagggtgctgagttggaagaacagcttcttcagccagcaactacagctccagctgccccagtgcaggtcccagctgggcggcaacccactcgccctgtgtcttcgaagcccactgctgaggaagatgaattggcagctttgcaggctgagatggcactttgagcaagtcccttttctcagctgtgacactattgatttatgctatctattcattaatctggtctaatttggtggtattgcaattaaggtggcagttgaatgaatggtttgtgtgtgcaccaatttcttgttaaatatcaacctttgcacagttgagttcacttgtataataatagtttggaatgaattccctaaagttgcttgtca

SEQ ID NO: 9508 - DNA, 651 bp, Glycine max
aataaatatccctaatttttcaacggtgttagttcatctccacttttcttcaacaccatccttctctttctttttatttttatatttttgtcaattgttcgattcttttggtgttccagggagatcgattgataccgtcccgttgattttccaattcgacgaataagggtatcacatctcttaatcaaccatgtttacccgaatttttggtaaacctaaaccggaagtcaatactctaaccgctttagacgagttaaatgacaaacttgaaatgttggagaaaaaggagaaagtactcctaaaaaaggctgctgcagaagttgaaaaagccaaagaattcactagggcaaagaataaaagggcggcaatacaatgtttgaagaggaagaggctatatgaacagcatgtagagcagcttggaaatttccagctgcgtattcatgaccagatgataatgttggaaggtgccaaggcaaccacagaaactgttgatgcattgagaactggagcagctgctatgagggctatgcaaaaagcaacgaatattgtggagtgctatttatgttttaaaatatttagtgattagtgatttaactcattaacattttctgtatttcttatgtctcaatatcatgctctgacttataatat

SEQ ID NO: 9509 - DNA, 353 bp, Glycine max
atcgctttgaacaccaatacaacacgcctaagccaaacccaaatccaccgctctttattttcgtcttttctacccttcccggatcccaatccctaatctttctaccactctcactccaaaaatctctaattttttcatctgggaagatcggttgacgaatcgaggatccgatcgcttgcgaggaactagggtttcaatcgatcgcatcacacacaaacaatcatgtttagccggatgttcggtaaacctaaacaggaaaccaatgctgttgccactttggacaagctagacgagacacttgaaatgctggataaaaaggagaaagtgctccttacaaaggtggcagcggaagt

SEQ ID NO: 9510 - DNA, 543 bp, Glycine max
gacccaacttgtagtgcaagagtattcgatttgattgattgtattacagtgtcattttccttcataaccgatttctattttatgattgtgcgcaacagttcgcagactcacaatggccgcaatatccaactccttatcactgaagcacagtttctctctgagtcgagctcctccttcttcctcttccatcaaattcaaattcagaagatgttacgccgcgttcgccaatgagaatcgcgagtacgtgatcgttggcggcggaaatgccgcgggatatgctgcgcgcactttcgttgagcatggaatggctgatggtcgtctctgtattgtaaccaaagagccgtatgcaccttacgagcgtcccgctctgacgaaagcgtatttgttcccgccggataagaaaccagcacgccttcctggttttcacacttgtgttggatccggtggagagaggcagactccggggtggtataaagagaatgggatagagatgttgtatgaagatccagtaaaagatattgatattgaaaagcatactttgac

SEQ ID NO: 9511 - DNA, 455 bp, Glycine max
ggacctccaagggagaaaacgcaacacattagacgagtacatttctaaaattcagaagacgtaatgccctttcgacctcttctagagccaccttaacattttccattcaataattaaattatcatcattattataataaactttacctataaacgcatccatgccttccccttcagttcgcagactcacaatggccgcaatatccaactccttatcactgaagcacagtttctctctgagtcgagctcctccttcttcctcttccatcaaattcaaattcagaagatgttacgccgcgttcgccaatgagaatcgcgagtacgtgatcgttggcggcggaaatgccgcgggatatgctgcgcgcactttcgttgagcatggaatggctgatggtcgtctctgtattgtaaccaaagagccgtatgcaccttacgagcgtcccgctctgacaaagc

SEQ ID NO: 9512 - DNA, 961 bp, Glycine max
gctactagcattagaatgagtctttattcatattctactactttcactttggaaaccatatcttgagcctccagggaatccaaaggaggagggttatctatatagagaagccatgatccagtagtattcataatcatatatactaaagccaagccaaatatttgtacccaaaaacaaaccatatacatgtcgagtttgagtttcctaaagttcaattatagcttctcatggaagccctccgcttcacgcaaaaatgtagtcaagaagaacagcttcatatcaagacagacatcgaatgaaggacaaagtttccttccaaaagaagaggaaatgaaatgggtgttccagaaatttgacaccaacaaagatggcaaggtttctcttgaagagtacaaggctgctgcaagggccttggatagggccattggggaagctgaagcagtgaaagcgtttagggtcatggacactgatgaagacggcttcattgacttcaaagagttcatgaagatgttcaatgaagagggtaggataaaagaaactgagatcaagaatgcttttcaagtgtttgattcgaacggcgatgggaagattagtgctgaggagttgtcccaagttctcaaaaggctaggagagagttgcagccttagtgcctgtaaaaaaatggtcaaaggagtggatgggaatggagatggttttattgacttgaatgagtttacgaggatgatgatgagtgggaagaaactaggctaagtattaggactttggaatataaaggaccgaccttgtttagtgtttcttaagtttgtgtcttataatatttagtttctcttctttttttgtgaagtagattggttatagatagtttggttaaatgtatggtgattaactgactgtcctgctttgttagtaatcgggtgcaatgttctgatataaattactatagggcaaatgttttgttttt

SEQ ID NO: 9513 - DNA, 885 bp, Glycine max
acatcctcaccagtcttgacttttagaagccttctaaaggaagaaatttgaaatccaacaaatatttcccaaattgcacatatattctatttctggcgatactcttgtagaagaggctgtccttgagaaacataggggtgctattagtgtcatacgttattccccagacctttcgatgtttgcatcaggggatgtcaatcgagaagctgtagtgtgggaccgtgcctcccgagaggtgaagctgaagaacatgttgtaccatactgctaggataaactgccttgcgtggtcccctgatagccttaggattgctacaggatcactcgacacatgtgtcatcatatatgaagttgatcagcctgcatctagtagaattaccataaagggtgctcatttaggtggggtttatgggttagcatttactgatgaatatagtttggttagctcaggtgaggatgcttttatccgtgtttggaggatacacccctcccttgactgatcaaggtcagtttggaagataagtgaatttgggaaatatttgttggatttcaaatttcttcctttagaaggcttctaaaagtcaagactggtgaggatgtgcttatcaccataagttggtcatacacaatcctcttgcaaatttcaagcctcggtttggtggtcactcttgacattggtggtataaagttggggccattttcttgctgccttttataagtcgctgctttttgtgagttttgatatctagactatgttggttccggtgtacatcactatttgtcttggtttgctctggaatctaaaagcaatttatgagaccaaggatttttaatagttgcgtcaattgtcaaaaggatcttgtgaacatttcaggggatcaatata

SEQ ID NO: 9514 - DNA, 485 bp, Glycine max
gtggattcaagggattggatatagtgaaaaactacaaaggaaggaaaattctcaaatcaaatgcttagcagctgtagaagaagagattgttacatctggatttgataataagataaggcgagtttctttacatagggatcagtgtggagatactgaagccattgatataggaagtcaaccaaaggacttgagtgttgcacttctttctcctgaacttgctctagtttcaattgattcaggagttgtcatgttgcgtggtaccaaaattgtgtcaaccataaatcttgggtttattgtgacagcatctgctgtctcacctgatggaagtgaagccattatcggtggacaggatggtaaattgcacatatattctgtttctggtgatactcttgtagaagaggtagtccttgagaaacataggggtgctattagtgtcatacgttattccccagacgtttcgatgtttgcatcaggggatgtcaatc

SEQ ID NO: 9515 - DNA, 907 bp, Glycine max
gcaaaaacaaaaccttaacccaaccggaccgggtatcaaaggcagagaagagagtaacaaggttgcttcgaacagtttagaatcatgtcttggtgcaccattgagtccgatcccggtgtgtttacagaactcattcagcaaatgcaagtgaaaggagtacaggttgaggaactgtattcattggaccttgactctctcaacagccttaggcctgtttatgggttgatttttcttttcaaatggcgtccaggagaaaaggatgaccgagtggttatcaaagatcccaaccctaacttgttttttgctagtcaggtaattaataatgcttgtgcaacccaagcaatcttgtccattcttatgaattcaccagacattgacattggtccagagctgacgaaattgaaagaatttaccaagaatttccctcctgaactcaaaggtttggccatcaataacagtgaggccatacgtacagcccataatagctttgccaggccagaaccttttgttcctgaagagcaaaaggttgctaccagagatgatgatgtttaccacttcataagctatctacctgttgatggggtactgtatgagcttgatggattaaaggagggtcccatcagccttggtcagtgctctggtgggcaaggtgatattgaatggttgaagatagtgcagcctgtgatccaggaacgcattgaaaggtattcccaaagtgagataagattcaatctcctggcagtcatcaagaacaggaaagagttgtatacagctgagctgaaggaacttcagaagaggagggagcgcattttgcagcagctagcagcatcaaagtcagacagactggtcgacaatagcagttttgaggcactgaacaattctctctctgaagtgaatgctgggattg

SEQ ID NO: 9516 - DNA, 769 bp, Glycine max
gagcgtgccacgtgcccccactgtcaccgtccagacccaattttccgtccaagttcattttcccggaaaatcttcttggaagattcccctgttttttccttgcaattgggcactgtaaaaagggatttttttttttttattttcagtgtggagcatctgggaaaaaatggcagcaccaacgccgattcagaaaactgaagaggagtggaaggtcattctctcccccgagcagtttcggatccttcgccagaaaggaactgaattgaagggtacaggagaatataacaagttttatgaagaaggaatttacaactgtgctggctgtgggactcctctttacaagtcttcaaccaagtttgattctggttgtggttggcctgctttctttgagggttttcccggtgccatcgatcgatcccctgacccagatgggaggaggactgagataacttgtgcagcatgtggtgggcacttgggtcatgttttcaaaggagagggattcaagaccccaactgatgaacgccattgtgtcaatagtatttctgtcaaatttgttccaggaaatgctagttcttcaatatgaaaccctacatttactctattggaggtgtctattgaaagattgtcttgtttgtagtcttttatagacagttagctctgaaggataaaatccttttctttgtttagtcttttaccttgcctttctgtttcatcgagtaaagatttggtaggtctgcatgaatcatatataaatcagcatttcttgatt

SEQ ID NO: 9517 - DNA, 1186 bp, Glycine max
agagaatgaattgttgaaagaaatcgaaagaagggaggagaagggtgtcaatggcagagtgtttgggtgtttcagtttcaactcttggctcattctctcttagtaggcccacaatcttttatcgatctcccattaatatctctctctttgcctctcaatctcatttccctgctgctgcatttggttatttgacaccttccaacccacacctgtacgccgctgtctcctccgactccaaggccgctacttcgctagacctaactcaacccgatctcgataatagcggcggcggtgctaacggaaacgctaacggcggcggcggtggtggaggaggcggaggaggtgatgatagcaagggcgaggaaggatcggacggtgacaagaggaaaatggctctgttgatgtctcagaaattcactctagcttatgctgcactcgtcggagtgggtggtgtaatgggttatctaaagagtggcagcaacaagtcacttttggctgggggtttgtctgcatcactgctgtattttgtttatactgagctacctggaagccctgttttcgcatcatctgttggccttggcatatctgctgcacttcttggggtgatgggttctcgtttcaagaaatccgggaaggtctttccagcaggtgttgtgtcacttgtgtccctcataatgactggtggttacttgcatggaattatgcgtagtgcgcactaagtaacgaaggtgggattgtaggatagcatcctgtaaacttcgctgaatgcaatctcctcctactgttatgaagcttgtgtttttgtcttttggacccatggtgcttatgttggtcatacatgtagactttcgttgttaaataaggacaccatcggattgcgttcgaccactgtttacaggcattattgttagttgttcttctcgactgctatagtatgcaatgttctgcgaaagtcgtatttgaggagttgcaatttttcaatagttactgcagcaatgcaaggaaaaagtgagagaaatataataagagaaacctggaccaattctttcttttattttacttttttggtttatttctctctcactgcattgttgcaagtttgcaagcttaatgctgttaaatatgaaatggatacctttattatgccaagatatcattagcatttgaatacggaatctttattgct

SEQ ID NO: 9518 - DNA, 634 bp, Glycine max
  unsure (1)..(634): unsure at all n locations
aaaagcgaaagaaacggagaaggtcaatggcagagtctgtgggtgtggctgggttcggtgtttcaggctcattctctcttactaggcccacaatcttttctcgatcttccaataatatctctctctttcgctctcaatctcatttccctgctgctgcattcggttccttgacacgttccaacccacacgtgcacgccgctgtcacttccgactccaaggccgctacttcgcttgacctaactcaacccgatctcgataatagcggcggcggtgccaacggtaacggaggcggcggtggaggtggaggtggaggtggaggtggaggagaaggaggaggtgataatagcaagggcgaggaaggatctgacggtgacaagaggaaaatggctctgttaatgtctcagaaattcactctagcttatgctgcactcgtcggagtgggtggtgtaatgggttatctcaagagtggcagcaacaagtcacttttggctgggggtttgtctgcatcactgctgtattatgtttatactgagctacctggaagccctgttttcgcatcatctgttggccttggcatatctgctgcacttcttgnggtgatgggttctcgtttcaagaaatcangaaaggtctt

SEQ ID NO: 9519 - DNA, 527 bp, Glycine max
gatgtctcaaaagatatccctccctttgattgcatatatctgagaatcacccttttattgattcaaactttggaaatctcaatcttcacccttatgattgaaattaacatgaagcatcaaggcaagcttagagtgtttcttccaaatatgataatacttgtaaccatccttctccattcaacaacatggattagtgcacaggaagttgaggatgaaagtgagtttgattacataaaagggagtgagaagggtccctcacactggggggaactgaagaaggaatgggaaacatgtaagagtggcaaaatgcaatctccaattgatttgtcaagccacagagtgagagtggtgccaaagttaggggagcttaagaagtactataagcctcagaatgccactgtcaagaacagaggccatgatattgagctgaaatgggagggagatgctggatcaataaacatcaacggcaccgagttttttctgcatcaatgccattggcattcaccttcagaacatacaatcaatgg

SEQ ID NO: 9520 - DNA, 664 bp, Glycine max
gaagtttctcttgccttgcctggcagcttcccaactactaccaatatgtgcttatgtactttggtctcagtataggatatatgttctcagtgcctcctccaaagcactaatatactttcacttaccaaatcaaatggatactgaaatcgatgagagcaacgacgaggccgatatcagttttgatgcaaggagttatagttccagactgaacagtatgataaggagtgatactgagtcaatttcgggagcatcccaagtctgtagttattctttcagagtggacagtgcaatagcatccccgctcggtagttttgcttccagagaacacagtgcaataaggagtcagactgcgtcaattttgggagcatcccctgtccatgagggagctgctgcagaagcagaatcactcctcaaaagaaggagggaggtggaggaagatgtaattcaagaactcatggaaagtgagtcacgtcttaaggttgtttccataattggaagggaagggttgggtaagaccactcttgcccgtaagatctataacaacaatcaagtgcagctgcggtttccttgccttgcatgggtttttgtgtccatccattacagacccacggaaatttttctcaaccttctcaaatgtttaaagtcatccacatctgaatttgaa

SEQ ID NO: 9521 - DNA, 653 bp, Glycine max
gaatattttattttaataaatatataatataataacttttcccaggctttttctccgctttattcagactttggttcttcgggtcctaatccgtaacagaaacaggggatttcgcagttgtggagtagatctgagttgtgagcaatagattctccaaatttggcggcaatgggtgggctcaccgctgaagatctgtcgaccatcggcggaatcgccaccgtgtcgcttctccattccttcattcccactcactggcttcctttctccattgtcggtcgcgctcagaaatggactctctccaccactctcatcgtcactgcacttggagcaattttgcacgtaatatccacttcactgcttggtataacggcaattaccatggcaaacaccattgctggtgaagaaactgtgcataaggttgcttcacttttgcttgtatttctgggtggtagttatataattctgtttctgatgggaaagggtggccatagtcattcacacaaccaacccatggagaaaatggctgtagctggacttattctcgttcctgcattgtctccttgtgctacaacactcccggtctttcttgctgttggaaattcctcttccatgatggtgcttgccatcatagtactactattcagcacaataac

SEQ ID NO: 9522 - DNA, 479 bp, Glycine max
  unsure (1)..(479): unsure at all n locations
cggacgcgtgggcggacgcgtgggttgcagaagtagagaaaagttgaagaaggaatctcctaagactgaaaaaaacccaatggatttgaattcctctccttccaacaacacaattgccgtgaatggaacaatccccgtcgcttccacgttcgcaaccgccaccgcgccgtcggataaccctccgccggcggacagctccggcgaccggaaacccatcgccctgtggccggggatgtaccattctccggtgaccaccgccctatgggaagctcgcagcaatattttcgagaggcttctggaccctcccagggacgctcctccgcagagtgaattgctcacgagaaccccctcgcagagcaggaccagcatcttgtacaacttctcctctgatttcgtgctcagagaacagtatagggatccctgggatgaggttcgaattgggaagttgctcgaagatctngatgccctcgctggaacta

SEQ ID NO: 9523 - DNA, 617 bp, Glycine max
cccacgcgtccgtagaaattagggttcatatctcatttcctctgatttcatctcagatttcgccttcgttcgtatcgaagaagagaagatggggaaacagattgtgccggtgaaatcagtgatctacgcgctctcccctttccagcagaagataatgccgggtctctggaaggacttgcccacaaagattcaccacaaggtctccgagaattggatcagcgccactcttttgcttggtcccctcgtcggaacctacacgtatgttcagaactacctggaaaaggagaagctgtctcacaggtactgaactcatgcaagagctgattggataaccttctagtttgttgccttgatcttgtttagccacccaataatgtgacactgttgaaacttgctctaccgtttggttttgatatgtctgagtttgagcgttttcaacttcgacagtgtttattgatggtctacttcattaatccatattactttatagtttatattttgaaagacaatttatgtgttgtcaataatgccagagttagtttggcatgttaaactcaagaatgcttgagttaattttatcattttttaattcaaaacaagcattcttaattttcgcc

SEQ ID NO: 9524 - DNA, 362 bp, Glycine max
cgcagtcgtattggactggaataggcacagagagaagatccaattccaatcccaaccgaacaaactagaaattagggttcatatcccatttcctcagatttcatctcagatttcgcattggtttgcgttgcgtggttggttttgcggtatcgaagaagaagatggggaaacaggttgtgccggtgaaatcagtgatctacgcgctttcccctttccagcaaaagattatgccgggtctctggaaggacttgcccacgaagattcaccacaaggtctccgagaattggatcagcgccacgcgtttgcgcggtccccgcgtcggcaccgacgcggatgtgcaaaacgatctggaaaaggagaag

SEQ ID NO: 9525 - DNA, 484 bp, Glycine max
cccacgcgtccgattctcccctttcgtcaccatgccaccgacactctcactctcactctcactagtgttggtggtgctgtttttcgcccccgtggacgcgcattttccggcgaccggcgagcttccaacgttccgcgaggcgccggcattccgcaacggaagagaatgccgcaaccgcgcgcggagcgactccgtgatccacatcgcgatgacgctggacgcgacctacctccgcggctccgtcgccggtgtgttctccgtgctgcggcacgcatcatgtccggagaacatcgtgttccactttatcggcaccacgcaccgacggacggagctccgtcgcatcatcaccgcgacgttcccgtacctctccttccacctctaccacttcgatgcgaacctcgtccgcggcaagatctcgtactcgatccggcgcgcgctggatcaaccgctaaactacgcgcgcatgtacctcgcagatcttctt

SEQ ID NO: 9526 - DNA, 681 bp, Glycine max
gaagccttatccaccctcaatctcttccttcccaacagttccacacgttttctttactcctcaagcccttcagtgccatttttttctagaaaaaaactgtttccagttttattcaatccacaactgaaaacagaggactctgtttttgtgctgagaaaacaaaaaaatggcttccctttatgatgtgcttggtatttcagtgggtgcaagctgcatcgaaataaaggctgcttacagaaagctggcaagaacataccatcctgatgttgtggccatgaatcagaaggaaagctcagcgaaccaatttatgatgatccattcagcttactcaactttatctgacccagagaagcgagctcaatatgacagagaaatctatagatacagaagatcagcaaatatggaagcaagaaatcagacattttcctatgctgggaagtgcagggaaatgggaaacagaccaatgttgggagcagattcgtggtatcatgttactcatgtacattattattattacaccattttgttcttttttttcttcttttcttttaagtttttgttatgtcattcatttatgttatccttcttcacaatactatcctagactgtatagttccaccatacttactggatctcctgattcaagccccatgtgattttatgccacgctgatttgatccg

SEQ ID NO: 9527 - DNA, 484 bp, Glycine max
  unsure (1)..(484): unsure at all n locations
gacgcccttgatcaagcttcgcttcacgggctgggatgtgactttgccctacgagaacaccctcatacacaccgcctacggcggcatggcgtgcttggcgatggcggcggcgccgaataacgtgaactcggtgctcaatgtcattgccaactatcagcaacagaaccttagagttttgtttgataccgttagtaatagggttggcatagcgcgtgagctttgtaactagctagttgaacgtgtgtaatttttgtttgtcttcttaattggtacgtttgtatttgtttgtttgcttgtttaatttcctatgttgttttgctttttggaccttgttcaaatgggtgtggtgaataagccgtgtgggcactgatttggttggctttggagtttgcagccttttctcaaaaataagatgtgtcgtgttgtgtaaaaaaaaaaaaaaaannnnaaaaagcggccgctccgctgtataggatccaaggtt

SEQ ID NO: 9528 - DNA, 552 bp, Glycine max
gaggatggagcagagctgcatgctcttccctgcaaccatcatttccattcgtcgtgcattgtgaaatggctgaagatgaatgcaacttgtcctctctgcaagtacaatattctcaagggaaacgaacaagtgtgacagaaaacgaagaacctaccaagtcccaactgggtgtttcaacaactgttgtgtaatatgtatatataatttcaagacaagaaagagtttacttccctactcgctgggttttgatggttgtttcgtttagctgtttctgtagagaaaagatatatagagcatttattgacgaataagttagcaactgtagtctacttagaattatttcgtcctttgttagattcagagatgtccaatttgtaggttgttcatttcttttctgacggaaactggattgtttcatttgctactggttgagtaatcgtaggctttattaagttgattgtgttacattaatccatctatgtatcttgtttatttatggactatggtatgaactttcttattttaagatgtgagtttcttgattacgctatg

SEQ ID NO: 9529 - DNA, 436 bp, Glycine max
ggtggcaccacgaggaaggaatcacccaagtttcgtccttgaccatatgtgaagtcatcgctcatcagctgctcctatctgacacacattcatgtcatcatctgcattcattcccaataccatctctctctctctctttctctctgcttccttcacttcaatggcttccaaagagatagccagagagctccctcctctcctccgcgtctacaacgacggaaccgtggaacgcttcctaggttccccgcacgtgccaccctccctcttagaccccgaaacattagtctcctcgaaagacatcgtcatctccgaaaacccctccatctccgcgcgcgtgtacctcccgcccaaactcaacaactcccaccaacaaaagcttccgatctttgtttacttccacggcggcgcgttctgcctcgaatccgcgttctccttc

SEQ ID NO: 9530 - DNA, 466 bp, Glycine max
ccctcgcgttcgcccacgcgtccgcttgtatatccataagttttggaaaacagaagaaaaagagagagagagagatacaaaagagaaagtgaaaattagaaactcttgtacttggttttatgccaaattagggactcttttggttgtcaattagatcacaaagatatggaggttgccatggaactggaagatgatctattttttgctgatttgagcaaggaaattgctctactaattatggatgaagatgaagatccacttgcttcttgtcctcctgactctcttcaggctttttctggggcaattcatcctcctccacagtttgctttcatctttgagcatgctttgagaagagaaagcaaagggacaggtgtatttatccctcaggcaacacagccaagaaggaagcagaggaaaggaagggctaataattcatatgcaaaacatcaaaagcagtctcaagata

SEQ ID NO: 9531 - DNA, 494 bp, Glycine max
gggataagaatctttgggacaaatattcatttttcgcctatatgcatatgaaataattagagccataacttactgtttttgatgagatgagaagagacggagagagaataaggcccatccacaaccatatccttaccttttttttcccctatataaacttgtatatccataagttttggaaaacagaagggaagagagagagagagagaaaaaagagaaagtgaaaattagaaactcttgtacttggttttatgccaaattagggactcttttggttgtcaattagatcacaaagatatggaggttgccatggaactggaagatgatctattttttgctgatttgagcaaggaaattgctctactaattatggatgaagatgaagatccacttgcttcttgtcctcctgactctcttcaggtactttactactttcatttcttccaacacatgccaccacacatactactttttttttccttcttcttcttctt

SEQ ID NO: 9532 - DNA, 526 bp, Glycine max
  unsure (1)..(526): unsure at all n locations
gacctccaacacatcatctccttccttcaccttcttcccatacacccaaaggaaaaatcttccatctccactttcttttcaatggccactctctttaacttcaactccacccttcgcccctcttgttatcatccctcctcaccctcctcatcttatccccacttctccaagacactctccacaactttcttgggccacaccgtaaccctcaaatatgctgccacttccgcaagcatccctccccgttcactctccgctcacatgtcatgggacggtcctctctcttccgtcaaattgatcattcagggtaaaaatctcgagctcactgatgcagtgaagcagcacgtggaagacaaagtggggaaagcggttcagaagcacagtcacctagtgagagaggttgatgtgaggctttctattcgaggaggaggtgaatttgggcgaggacccagaactcgtaaatgtgaggtgactttgttcacgaaaaggcatggantggtgcgggctgangaggatgctgaaagca

SEQ ID NO: 9533 - DNA, 748 bp, Glycine max
ggagattttgtggttactgaagcacaaaacaaagaagcattatgttactaaaatatcttattgattaatatttaatttaataatgtatatttctcaagtcaattcgtcgtaaacattaaacacgcgcttcgagctattggcgattgcaattgtcttttctcgattctcatatctcgatattcgagtcttgataacttattagtaattctccgatcgccgccgcgaactggactcaccttcgccggagtcgtgtcgttttggacggctttgtcgtttgcgttcttcactcatgtcgtttgtatcttcgtttcactagggaccaaagtacgatggattgaacttgtgtgcattaatcgtggaatcagtgggcttctactaacgttggttcttctggtcatcctataaaagctgacttgctttgctgattaaatatgacacagctggaccatctctcctactgttttaatttccatactgccacaaactccggacatagcttcataattggattcagtcagtgtgtgaagttccattcatcttgttattgaagctgctgatcagttaacttggcaattaccaagtaaggcggaaaattttttagaatgccacacatggaagatctttccatggcatgtactaacatatatagcccctagcggatacttttttttgtcatcaactaagggctatattcatttgctctttctgtaataaactaatatttgatcgttatagttttgaaggttcc

SEQ ID NO: 9534 - DNA, 631 bp, Glycine max
ggtggtcagtttagtcacggtggtggcgtgtgctaaaatggcgcgcgcgagcatcgatttcgtaacgtaaccctacctataaggtagaactgttattgaaccaaaattaaccttgtgttgtagcgtttctttcactctcactcactcgctgaattgaaatttgaaatcctagaagagaagtacgatgtggaagtggttgttctctcgggagccagcgccgccgccgccgccggtggttctggtaccgccgctcttcgacttccctcccctcgccgcgcgcaaccgcatgctccattcctcctacgacgtcgttttcggcaagctcgccctcacttcgctcttcgaggactacttccaccaggccaggaacttcaccaccagaatcatgctcaagccgatcgaggatcctcacgtcgatctcattgcaaccgtttcgggtcctcttgatcacaagccaaaagacagtattgccggagatgcattgtttcgctggcaaagtgatgttaatgatcctcatacgtttatggacctttatgtatccacgtctaatccgattttgcagatgagatcgtgcgcttactatcccaaatatggatttggggcttttggagtgtttcctctgctgttgaag

SEQ ID NO: 9535 - DNA, 584 bp, Glycine max
tttaaggttatgagagcaaaggatagacgatagagtatagagagcaacataggaagtgaagtgtaggtaagtgagagccatgaagggttatgagccccgttcaagctcttcatgtgcagcttgcaagctattgaagagaagatgcataccaaattgtatttttgcaccttactttaggtctgatgagtgcaagaagtttgcaaaggtgcacaaggtgtttggagccagcaatgtgagcaagattctgattgaagtgccagaagagcagagagaggacacggtgaattctctggcttatgaggcaaaggaagatggtggagcttcaacatgatctggcaattgcaaaggatcgtcttgcgcgttgtcacgctgctgctgctgctgctactactactatcccttctcctgatatcttgcatgccaatgttagccttcccccattccctgacttttgcacttcttcaagtgatttcaatgatatcttttgccacagttcttcgtctcaattattaggccgacatgaaacggtggatgatttcaatcaaatcccatatatattttgaatgttatgaattatgatgtat

SEQ ID NO: 9536 - DNA, 538 bp, Glycine max
gatgagagcaaaggatagaggatagagtatagagagcaacataggaagtgaagtgtaggtaagtgagagccatgaagggttatgagccccgttcaagctcttcatgtgcagcttgcaagctattgaagagaagatgcataccaaattgtatttttgcaccttactttaggtctgatgagtgcaagaagtttgcaaaggtgcacaaggtgtttggagccagcaatgtgagcaagattctgattgaagtgccagaagagcagagagaggacacggtgaattctctggcttatgaggctgaggcaaggctgagagacccggtttatggatgcattggtgccatagctctgttgcaaaggaagatggtggagcttcaacatgatctggccatcgcaaaggatcgtctcgcgcgttgtcacgctgctgctgctgctgctgccactactatcccttctcctgatatcttgcatgccaatgttagcctttccccattccttgacttttggacttcttcataggagttcaaagatatacctttgcc

SEQ ID NO: 9537 - DNA, 503 bp, Glycine max
ctagtcctagaatgacaagtagaaatgatgcatggactccttcacaatcaggaataggagaggatattcaaggaatggatgatttgaaccttgatgatccaaatccggctcaggattcctcttcctctacacagaaagttgatgaacgtagtaaggaacaggtggaggattttgatcttccggatttcgaggttgtggataaaggggttgaggttcaagagaaggaagaagatggaggagaggaagctgaggaacctgtccaggaggaatcaacttcaagtgaggttgtcaaggaagtagtgcttgatcatgtgcaccttactagattgtcagagcttgattcaattgctcagcagataaaagctctcgagtctatgatgggagaagatgataagtttacgaatgtagaggaagagacagaaccacagaggctagatgcagatgaagaaactgtgactagggagtttcttcagatgcttgaagatcaagacaacagtgattac

SEQ ID NO: 9538 - DNA, 379 bp, Glycine max
  unsure (1)..(379): unsure at all n locations
attatcttcagatagttcacatgcagtagaatggattggtgatgtagtacaacttgtagatgagaaaaagtattaccaatcttgctgtgttgatggagtaacatataggctgcagggtcatgctcttttccccaccggccatgggaaactaactccttctaaactccagtctatgtgggaagattgcaaaactgggttaaagtgggttaaggtgacaaactgctactttcctgatgatttgcctgggaatattggtcatccgtgtatatctgaggtcaacgaggtttatgaatctaatagtgatagaactgaaatggctagctctattcgagggccatgtgaagtcctcncatctgataaatttaaacaagagaatgac

SEQ ID NO: 9539 - DNA, 553 bp, Glycine max
gctcgacgagtacctcagtgtgagcgttctgccatactcctgcgttcaatcgacttcaccatcttcttcttcttctgctgtctcccccatagatggattggcaagggcaaaagctagcggagcaactgatgcagataatgctgcttgcatttgctgtgattgcatttgttggtggatatgtcatggcttctttccaaatgatgattctcatatatgctgggggtgtggttttcaccaccttgctcactgtccccaattggccccttttcaatcgccatccacttacgtggttggatccaactgaggtggaaaagcatcccaagccacaaccatctgtcaatgtaactcaaaagaagaaacccgttaagaagtaggttttttttattataaaccttttttgggggatgatatatctttgaagtacttgatgctttgacagtaatttgcagttcttaacctcttcccccttcagtggatattacagtgtacaacaatttatttgctttcttttagacattacttatagttgtgtagttttgttggtttggccaaa

SEQ ID NO: 9540 - DNA, 356 bp, Glycine max
  unsure (1)..(356): unsure at all n locations
tctctctgtatatactactgcaccctactatgccttttgggggacagagatgaattttatattctctgactaaggttgaagaaaaccccctttttcccctttggcttgaggattcggcagagtatagagtacagaggagtgtgtaaagaaacgcaacttgggggttgggttgttcttttctttgttattgtttttttttttttaatgtatgttgtgttttgaaataacttgccatttggcaactctagttagaaacaatgtttgatgtataagtattagtgtataacttgaatgttctctttttcatgaatccaaaaagctgttggtttgttgcaaaaaaaaaaaaanaaaaaata

SEQ ID NO: 9541 - DNA, 391 bp, Glycine max
gaatcgacgtttttatttatttatttttcgccgttctttgttgcgagcttgtgtttctatctatcgctggcctctttggtagtattttcaatcttcaaaaggtttagggttttacgatttctgaatctcaacgacgttttggcgcttagaatggaagaagaacaatctgtgaacggcacgatgtctgggtccaaaacgacgcaggagttggcgatggaagggcaggagtacttggaagaaaccatagagaacgctttccagatcctctcttccatgaacgacgagctctgcaaccccgttttatggtctacctctccctccacctcccccaaatgccgacgccacttccgacaactccaaccaccacgccgacgccagtgccgcctctgcc

SEQ ID NO: 9542 - DNA, 881 bp, Glycine max
gcttcgttatcccgacattaatttttgtacacacacacagattcccctctttcgaatttcgatactttgatcagatccacaacactccttcatccatgacgcttggctcttcaggatccagtgtcgtggttccaaggaacttcagattgctggaggagcttgagaagggagaaaaaggaataggagatggcacagttagttatggaatggatgatggtgatgacatttacatgcgctcttggactggaaccattattggtccctataatactgtacatgaaggaagaatttatcaattgaagctgttttgtgataaagactacccagaaaagcccccgagtgttcggtttcattcacggatcaatatgacttgtgttaatcatgaaactggagtggttgaatcaaagaaatttggtcttcttgcaaattggcaacagaggtttaccatggaagatatactgacccagctgaagaaggaaatggcggcttcacataaccgcaagcttgtccaacctcctgaaggtactcactattagtgtccaagatcacaccgatattggatcatattgcatttgcagtatgcaatatatagtatgtattactctggatccttctaaattcaagaacatactggggaatgctcgaaagagcttcatctttacctccatagagttgtttgttgcaatacattgtcaactttgttgaagggatgctctctgattggtcctaaatattgaaagcaactcttaaagtagcgttcttttcttattataacagtttttcccgttttgaccttgcttctttcttaattcacttgctttctgacttttactttagcggaggccccataaaaaagtgacaaatgctgtttggatgtgtgg

SEQ ID NO: 9543 - DNA, 608 bp, Glycine max
cacacttcttctttcatcattcatcgcctttcaccacgcacgcagatcctttattcctataatccttccttcgctctctccaaatttcgactctttcgatcagatccgcgacacccaccccaccaaaaccttgcgcaacccatccatgacgcttggctcaggaggatccagtgtcgttgttcctaggaacttcagattgctggaggagcttgaacgtggtgaaaaaggaattggagatggcacagttagctatggaatggatgatggtgatgacatttacatgcgctcttggactggcacgattattggcccccataatactgtacatgaaggaagaatttatcaactgaagctgttttgtgataaagactacccagaaaagccccctagtgttcggtttcattcacggatcaacatgacttgtgttaatcatgaaactggagtggttgaaccaaagaaatggtatcatttataattttccacatgcttttgttttataaatagttcttgataagtgcatgctaggacatataaactgtgctaataacagtgttttccattttaattttacaatggtgatgattcgagatgtctgttattagagatct

SEQ ID NO: 9544 - DNA, 827 bp, Glycine max
ctttcatcattcatcgctttccaccaggcacgcagaagatcttcctataatccttccttcgctctctccaaatttcgactctttcgatgcagacccgcgacacccaccccaccaaaaccctgcgcaacccatccatgacgcttggcttaggaggatccagtgtcgtggttcctaggaacttcagattgctggaggagcttgaacgtggagaaaaaggaattggagatggcacagttagctatggaatggatgatggtgatgacatttacatgcgctcttggactggcaccattattggcccccataatactgtacatgaaggaagaatttatcaattgaagctgttttgtgataaagactacccagaaaagcccccaagtgttcggtttcattcacgagtcaacatgacttgtgttaatcatgaaactggagtggttgaaccaaagaaatttggtcttcttgcaaattggcaaagagagtacaccatggaggacatactgacccagctgaagaaggaaatggctgctcctcataaccggaagcttgtccagcctccggaaggtacctacttttagcatccaacaagatggtatagatgtcggatcgtattgcatatgctgcatgcaatatatagtgtgtaatgctttgtagatccttccttctgaattcaagaacataggggaatgccccgaaaagcttcatatttccatctccatggcttcagagttgttttgttgtctttgtcaccggtgctgaaggggactgtttgattgaaatattgtgtgggtcaaaaatttcgaaagcaactctttcaagtagtattttca

SEQ ID NO: 9545 - DNA, 555 bp, Glycine max
cgaagacgggttgaatcagctccatcttgtgacacttctcatgtttatgattatgagaaaattcagtccgttttattggcttaataactaattatctgtgtgacaagatttatagacttgaatgaaacaggttgaaccaaagaatttggtcatcttgcaaattggcaaagagagtacaccatggaggacatactgacccagctgaagaaggaaatggccgctcctcataaccgcaagcttgtccaacctcctgaaggtactcactattagtgtccaagatcacactgatattggatcatattgcatttgcagtatgcaatatatagtatgtatactctggatccttctaaattcaagaacatactggggaatgctcgaaagagcttcatctttacctccatagagtttttgtgcaatacattgtcaactttggtgaaaggatgctctctgattggtcctaaataattgaaggcactcttaaaagagccgtcttttcttaataaaaaaaaaaaaaaaaaaaaagggccgcagaaaaatgaaggcccttgtttcttt

SEQ ID NO: 9546 - DNA, 401 bp, Glycine max
aattcgagcgggcgctcttctttttggggctcatgtgtgtttgttgtaactccaacacacaccacactttctcccccttctggcgccagaagacgacagaggggagaaaaaggaatcggagatggaacagctagctatggaatggatgatggggacgacatttacatgcgctcttggactggaaccattattggcccccataatactgctcatgaaggaagaactcatcaattgaggctgtgttgcgataaagactacccacaaaagcccccaagtggtcggcttcattcacgaatcaatatgacttgtgttaatcatgaaactggagcgggcgaaccaaagaaactgggtcctcttgcaaattggcaacggagggtttaccatggaagatatactgaccc

SEQ ID NO: 9547 - DNA, 277 bp, Glycine max
ctcgaccgaatcgttcatcattcatcgctttccaccaggcacgcagattctctccttccttctctctatccaaattttgattctttcgatcaaacccgcaacacccacctcaccaaaaccctacgcaacccatccatgacgcttggcttaggaggatccagtgtcgtggttcctaggaacttcagattgctggaggagcttgaacgtggagaaaaaggaattggagatggcacagttagctatggaatggatgatggtgatgacatttacatgcgct

SEQ ID NO: 9548 - DNA, 263 bp, Glycine max
gtcatccaagaacctgagttagaccaacggaatgtgtatctaggtaattggggttacaacacccggaaagaaagagagggtgctgcagctatccccagaattcatgttcttgggctctccgacttcagcaagaagttaaaataggggtcttcatttcattggattgtcaactgtcagtcattgaaccacatatttttcttccaactcatttataagcaataacaagtttcaattgaacacaatctttcttctcagaaattctc

SEQ ID NO: 9549 - DNA, 345 bp, Glycine max
gagagaaacctcttagctgacacgatcggagatcgttgacaagaacagcaaggtttataagcgaaaaggcgatttgagaaagatcgtcaccgaaagcctttcctctctcggttacgattcttccatttgcacatcgaaatgggacaaaaccccaacctaccctgccggtgaatatgaatacatcgatgtggttgtggaaggtgagaggttgataattgatatcgattttcgatcggagttcgagatagctcgatcgacgggaacctacaaggcgatccttcagtctctgccgttcactttcgttggaaaatcggatcgactctgccagatcgtcgccgccgtgtc

SEQ ID NO: 9550 - DNA, 362 bp, Glycine max
gattactcattacatttcaaagtcccaacctgtggtgcgtctatatcgattcctttggtcattgccaagggataataaacaaatacaacaaagcaaactatcctcccaagtttagcaaagaaagttctaaatttgtcaccagttgccaatcaactctgaacaagggtgtctttttccttgagggttcacacattctcttcttgggagggttctgattccgaggttgaaaaatgtctgctgctgtgtcctccacaacctctcatttagaggaagagcttaaaaacaacaacaacaacaacaacaacgttggtggagaatcagaccagcccccttacaatgagggtgccaactctgatgttgct

SEQ ID NO: 9551 - DNA, 686 bp, Glycine max
acgaaaccttggtggttggttcccctttctctgtcctcactcgtgtgcgcgtctatcccaaagagagtgagcgagtcagtactgagtagggtttcaaatttccaatcggaatcggaaaaaatgggcggcggcggcggcgatcacggccatggacacggacacggcgatttcaggaacaaggtctggagtatgagcggtggcccttactgccgtcccaagcactggaagcgcaacaccgccattgccatggtcggcgtcgttctcatctgcatccccatcgctatgaaatccgctgaactcgagcaacggccacatcaccctgttcgccccatcccttctcaactctggtgcaagaactttggaactaaagactataatgatccatgattcatcaattgcataacttgagtggatgttcacatcatgtgaagcaaactttatttgttaaatgctaagaatatgaacagctttaaagattgctgttgttgatgttatgcaagacttggatctaggatcatcatgtagtgacatacttttgttttttgggcaatggacatccatttaaaaatgtgaaattaaataagtgcttatttctgattttttattttatttgagagcttgttgaaaccgatgttttttactataataatggtaattgtgcttttatcagtttatctaaaaaaaaa

SEQ ID NO: 9552 - DNA, 417 bp, Glycine max
gactcgagtgcgcgtctatgccaaagagagtgagtgagtagggtttcaaattccaatcggaagaaatcggaatcggaaaaaatgggaggtggcggcggcgatcacggccatggacacggacacggtgatttcaggaacaaggtctggagtatgagcggtggcccttactgtcgcccaaagcactggaagcgcaacaccgccattgccatgttcggcgttgtcctcatctgcatccccatcgctatgaaatccgctgaactcgagcaacgaccacatcaccctgttcgccccatcccttctcaactctggtgcaagaaccttggaactaaagactataatgataatgatccatgattcatcaattgcatcactggtgttcacatcatgtcaagcaacatttatttgttaaatgctgag

SEQ ID NO: 9553 - DNA, 456 bp, Glycine max
gtttccattgccgcgacatctgaattcctccttgtcactcataatcaccaaatagaagccataaacaaatgaatgccatagcagcagaacaagtgctggagccatggcacaagctagacgacaaagtcgttttggtgacgggtgcttcctcggggctcgggcgagatttctgcatcgacctcgccaaagctggctgctgtgtcgtcgcggcagctcgtcgcctcgatcgcctcacttccctctgccacgagatcagccaccgatggccctcgaacgtcggtatccaccgcgcggtggcggtggtgcttgatgtcgccgccgatggccccgccatcgacagggctgtgcagaaggcctgggacgcctttggccgcgttgattccttgattaacaacgctggtgtcagaggaagtgttaaatcacccttgaaattgtctgaagaggaatgggatcatg

SEQ ID NO: 9554 - DNA, 789 bp, Glycine max
cgattcgggtgtgcataagggggcgttggggcttatgctgaactctgtcgttttggcattgatgtcgttgacggtggaaccgttgggtcgtttcgttgggggagttaagtggctatggggaatcgtaaacgtaattctcgccgtttgcatggcaatgacggtggttatcacaagggctgcagaacatgaacggaaaaacggcgtttctgctgttgggcatccctcagttggtgtgcaagtggctgcattgactttcttctccgtccttggtgttcctcttgctattactttcagcgtcccttttgcactggcatctatatactcctccacttcaggagcaggccaaggtttatccttgggtgtcctcaatgttgcaattgtcgtgccacagatgatagtatcggctataagtggacagtgggataagtggtttggtggtggcaacttgccggcgtttgtgttgggtgccgtggcggctcccgtgagtgccgtgttagcggttgttctgctgccaacaccaaagccagcagatgtggccaaggttacttccgtcactgctgggagtttccattagtatatattatagagttttacatgcatgggacaatattagatggagacttttaatttaaatttggtgagtgtgtattatttaggtattagacccatcaaataactctttagggtgggcttaagttttatccttgttttctctaataaatatatgtacaccaacattaaaaaattataaatccatcaaatgcttcgtattgccattttggcaccccc

SEQ ID NO: 9555 - DNA, 691 bp, Glycine max
  unsure (1)..(691): unsure at all n locations
gcagacagtggggagaagccatttttattgcggtcagcagaagagcttgaaccttttcttgtaggtacaaatacgaggcaaggatgcaggcaatgaccaagccaacttacactgcaattgttcaacatgccaagaatggaaaacctgccctcgtatttgtacctacaaggaaacatgtccgacttacagctgtggatctgattacatactcaggtgcagacagtggggagaagccatttttattgcggtcagccgaagagcttgaaccttttcttgacaagattactgacgaaatgttgaaagttactttacgggaaggagttggatacttgcatgagggattgaacagtcttgatcatgacattgtgactcagctatttgaagctggctggatacaagtctgtgttttaaacagttccatgtgttggggagtgactttgtcggctcatttggtagttgtgatgggcacgcaatactatgatgggcgagagaatgcacagacagattaccccgttactgatcttctgcagatgatgggttcatgcagcccgtcttttggtagacaatttctggaaaatgtgtcatcttgtgccatgctcctcgtaaggagtactacangaagttcctatatgaagcattcccggttgaaagcccatctcatcacttcttgcatgataacttgaacgctgaa

SEQ ID NO: 9556 - DNA, 396 bp, Glycine max
ggacattgagtgttccatccatcccttcttcatcttctacttctatctccctacatactcattcaaacagacatgaaaattatggaatcattagctcttatcttctacagtactcttgttttagctacgatttcagttccagcaactaactccagaatcatccatcaaaaaaacaatgccaatctgattgaagaaacttgcaagcagacaccccatcacgacctttgcatccaatacctctcctccgaccctcgcagcaccgaagcagatgtgacagggctggcacttattatggtcaacgtaatcaaaatcaaagcaaacaatgcattggacaaaatccaccaactgcttcagaaaaaccctgaacctagtcaaaagggaacactgagttcgtgt

SEQ ID NO: 9557 - DNA, 1269 bp, Glycine max
cccacgcgtccgcccacgcgtccgaggctcccaccacctcccccttgtactgaaatctccattctccaaaactgcttcaactcttctcattctctctatctctctctctgcctcacactggagtaccctcttcaatttccttcaaatccatcaaataagtttctcttataccctctgaatattcttcatcatcatcatcattaatcatggctcttttgatgtattttgtgctttttcttgccctcgctggccattcaagtgctctttactgtgtatgcaaagatggtgtgggtgatcaagctcttcagaaagcaatagactatgcatgtggtgctggagctgactgtacccctattctccaaaatggagcctgttttcaacccaacactgtgaaggatcactgcaactatgctgttaatagctatttccagagaaagggtcaagctcagggaagctgtgatttttctggtgctgccacccctagtcaaacaccacccactgcagcatctacatgtgtttacccctctagtcctagcaatgctggaacaggcaccacagcaactccaacaaccactacaccaacaacaggcacaccacccaccaccttaactccaaccacccccactactaccactccaggcacaaccaccggtaccagcccaaccactggcactggtaccggcaccggcaccggcaccaccataggtaaccctaatgtgtttggaatgagtccaacatcttcaactggaacaggaggaggcttcaatgacccaaacaaaggagtggttcatttgcaagacataagcatgttgctagtgtctcttgttatcaccttcttgctagtaatgttgagggtctaataataagtggtacagttcttgggaaaaaaaaaacacttttggggctgtttgttttgatgtgtggatgagattttgccacactgtacaagggtgttcttgtaatttcatcacttggaatcatccagaagcaaaaccccccactttagcctcctgtttgtttttgttctgttcctacttctaagaaaagagagaaaaaaagaagtgttagggaatttggttccttttcagtggtgaatatttgataatatagctactaatggggtggaacctgatcggtttccatttgtatattatctatctatcactatgagaggcactattttttatttatttttatttactgagccttgctagttgctaccttgtattatttatatgttaatatgtgatatttacttgttttttactt

SEQ ID NO: 9558 - DNA, 544 bp, Glycine max
gtcttgtcctagaaaaaacgcattattcttttcatctgtctttctttttctttctctctgcctccatcaggatcattcaatttacctcaaaataaacaattttctcttgttatggctcttttggtgtatcttgtgcttttcctagccttcacttatcattcaagtgctctttactgtatatgcaaagatggtgtgagtgatcaaacccttcagaaagcaatagattatgcttgtggaactggagctgactgtacccctattctccaaaatggagcttgttaccaacccaacactgtgaaggatcactgtaactatgcagttaatagctattaccaaagaaagggtaatgctcctggaacctgtgattttgcaggtgctgccacaaccaatgcaaatccacctactacatcatctggatgtgtctacccttcaagtcctagcaatgcaggaacaacaccatctactggttcaccaccaggcacaacaccatcaacaggtggtacaacacccacatttgcaataagtccaacatctacaactggta

SEQ ID NO: 9559 - DNA, 415 bp, Glycine max
gacagaagggggcaacaagatggacaccacaaggaagtcttcagtcgcactgacattcttattggctttcttcatcattgcatcagatatgtgtatggaatcagaagcaaggggacccattgtgcatgttcattgttttagggacgatgactgcaaatatcgtccttgtagagctaaatgtggttgcgtatgtagtaatagctactgtacatgtgtattttcttttatggataatgttcttactcatgcacccacaaattgagtaacgaggtcttgtcatgcaatcaccaagtgagaatgagaacaataaaggattgcatcttaattgtgtatgaaaaatcttaattttactatatcttcaataaaatttatgcttataaaaaaaaaaaatattaaaaaaggaaaataatttttt

SEQ ID NO: 9560 - DNA, 809 bp, Glycine max
cagggaaatactttttacctgttctatgagacgaaaaattcaatcactatgcaaggtgatattggagtttcaaaaagtactgataagggagcaacatggcagcagttgggaattgccctgaaatgaggattggcatctgtacgtatccttatgtctttgagcatgatggccagatatatatgatgcctgatgggcagccagtggggagatcttcgtctctaccgtgcaggtaacttccctttgcagtggaggttggaaaaggtcgtcatgaaaaagccccttgttgattcttttgtcatcaatcatggtgggaggtattggctttttgggtcagatcatagtggttttggcacccagaaaaatgggcagttggagatttggtatagcaattcacctcttggtccttggaatcctcacaagaagaatcccatttataacattgataggagcttgggagctcgcaatggaggcaggccatttaaatatgaaggaaatctttatcgtatgggtcaggactgtggtgatacatatgggagaaagttgcgtgtttttaagatagaaactctcactattgatgaatacaaagaagttgaagtacccttaggctttgttgaatcaaacaagggtcgaaatgcttggaatggggctcgataccatcacttagatgtgcagcacctgccatctggtgggtgggttggtgtcatggatggggatcatgttccttctggagattcagtccggcgattcacggtttggttgtgcttctgttgccgtcgctgctatactcattgtactattgggtgtgctac

SEQ ID NO: 9561 - DNA, 972 bp, Glycine max
  unsure (1)..(972): unsure at all n locations
gaatgaatggaaaaggatctaattagacaatgacgttatctcggactgtggatgagtgaacagcataaaagcacaacttgactgacatacgcaaccaaactaaagataaataaaattcaggaaaaaaaaaaaaaaaaacatggtggtgaaggtgtatggtccaacctatggatcccccaagagggtcctggtgtgtctgattgagaaggaaattgagtttgaaacagtgcatgttgatctcttcaagggagagaataaggaacctgagttccttaagctgcagccatttggatcccttcctgttattcaagacggtgattatactctctatgaatctcgtgcaataatcagatacttagctgagaagtataaagaccaagggactgacttattgggaaagacaatagaagaaaagggtctagtggaacaatggcttgaagtggaagctcataactttcacccaccactctacaacttggttattaatgttctgtttgcgccattaacgggggctccttcggaccaaaaagtgatagaagaaagtgataaaaagattgagaaggtgctggatgtttatgaggagaggctgtcaaagagcaagtacttggctggtgacttcttcagccttgctgatcttagccacctcccatttggtcactatattggtgaaccaaaaccgggagaaggaaaatttgtcagagacagggaagcaatttgatggcttgggtgggatattatagtaacagaactgctttgggcagaggttctttagctatataaaaaacccgttcttaattaggtcgtctccccaccttcccaaaaaaatgggggggaggatgccttttaagtttttatacctggtttggaaattaaaggagcttttccagaggggaccccggggggttttttggaattgtttctttttatattacactttgggtggaaaataattaaatattttgagcaggcccn

SEQ ID NO: 9562 - DNA, 821 bp, Glycine max
  unsure (1)..(821): unsure at all n locations
ctattgggaaagacaatagaagaaagggtctagtgnacaatgcttgaagtggaagctcatactttcacccaccactctacaaactggtttataaatgttctgtttgcgccattaacgggggctctttcggaccaaaaagtgatagaagaaagtgatanaaagattgagaaggtgctgnatgtttatgaggagaggctgtcaaagagcaagtacttggctggtgacttcttcagccttgctgatcttagccacctcccatttggtcactatttggtgaaccaaaccgggagaggaaatttggtcagagacaggaagcatgtgagtgcttggtgggatgatattagtaacagacctgcttggcagaaggttcttcagctatataaataccctgtctagttagttcgatctaccccaacattccaagatggtgtgagggatgtgccttcagtgttttctgatacctgtttgagaatataatggaggctatctgcaagatgtggacctgtagttttttttggatttggatcttttcctcttcttgaataataacattggatggtgaaaacataaatttaaaattattgagcagtgtgattagttgttgagtccattagttataacttgttatctaagaagcctcttgtgttgagaagtaataataaatatcagtatttacatgttataagtttggatctcgacattaatacagagtaagccattttgaaacttgtgcttgccgagtttggtgggggcaaccacacagttttggaagataagtttttgtatatttgacctatgaagtatggatgtatgttttactt

SEQ ID NO: 9563 - DNA, 325 bp, Glycine max
aaaatactatttattaaaaagaaaccgagaagaccgccttagctgcattcacgccatggactcactttaaccttctctcacactcaccgctgccaccaccgccttccaccatggactccgttccgtttcgcgatggtaacatacacaccattctcgactcccgttatcttcactctccactggatgttaatcatagtttgcacactcattcctcgctgattcggaggctttctcaagaaagggagttagagggccacactggctgtgtcaatgcggtggcttggaattccaaaggttcgttactgatatctggatcagatgatca

SEQ ID NO: 9564 - DNA, 420 bp, Glycine max
gatggtagaattggagtgtaacagcctcagctgcaatggatgacattcacattcacgcgacggtgcactgagtgagtaattgcctactttaaccttttctcaccgctgccaccaacgccctctaccatggactccgttccgtttcgcgatggcagcatacacaccattctcgactcccgatattttcactctccgctggatgttagtcatagtttgcacactcattcctcgttgattcggaggctttctcaagaaacggagttagaggttggtaacgtatcttaatttaccgctacaccatggtattgccatatgttagtaggaaatcggagtagcatccatgtgattatgtgaatattcttcatatacatgtttctgtgtgttttagtatgcactggaaattaagaaatgcaaaattgc

SEQ ID NO: 9565 - DNA, 431 bp, Glycine max
cggaaagagagagagaagctagagagagaaagagaccaaactaattagtgtagaagaaacagagagggagtgagtgtgtgtgagagagagagagaaagagaaagagagagaaagcagagaaaacccgaagcagttttctcactctttttaatcggaacctctcattccgcgttcagattgcgtcccccatttggtccgtacaatggagcggtacgggcgggccagcgaagggtcgcagtctgatccgtcgccggaatggactttggccgccggcgccgacgccggcctcgaagagtcgtcgtggcaactcggattagccggtgctgaatcgtaccctatgcgtcccgacgaggctgattgtatctactatttgagaacgggattttgcggttacggcacacgctgtcgtttcaaccatcctcgagaacgtg

SEQ ID NO: 9566 - DNA, 370 bp, Glycine max
  unsure (1)..(370): unsure at all n locations
gaaacaagcttaggattattggagagacgcagaagagtaaagatcgaagaatggaagggtcttcaccatccattgaagaagagagaacagccactttctatgtgtaccatccttgctattttcttcaacaagcactcagggctctcttgaagtgtgtaggtattgatgagtctgaaaacacaatgggttcacaggccaataaacaagagaaaagctcactgccacaaactccttctgcagatgatcctattacaaactctccaacccacaaaagcttcccagatgctgcagattcaccttccacaactaatcanaccattatcattgcaagtttaatggcaacgcgtggcagtcgagggtctaaaattag

SEQ ID NO: 9567 - DNA, 455 bp, Glycine max
cctcgagccgaacggacaagaatatccctcaagacattggaataagacaaaccctatccttggtctgttccttcattcttattgtctccccgcatcgtacgccgccgacacagcttcgaatcgctgccaagtgctaacaaacgcctctgagtctctgacaccaacgcaactctctctgctcacatttttgaaggagatggtgaacgtgatggagtggcagaagcagcgttggcaaccgaatgggaacgcggaaatgatgtacgtgaaagtgatgaccgacgaacagctcgagactctgcgcaaacagattgcagtttacgcaaccatctgtgaacaactcatcgaaatgcacaaaaacatctcctcgcaccaagatcttgcagggattaggctggggaatatgtattgtgatccattgttggggtctggtgggcacaaaatagcttcaaggcagc

SEQ ID NO: 9568 - DNA, 425 bp, Glycine max
gaactcaagtcattagcattcttctttgactttttggtctaaaaccggtttctcttgtcacaccaaatggaccgacccgccgccatattttccgacaccgtcaacctcaacggcacggtgacgcagctgtctctgctcgccgacgggaggctgtggtggccggagggcggtcaacgcaatttgagcatcgagaaagaggttctcgggttcaccggcgacggtcccgatataaggctcaaaacaatcgtggaaaccgaagatggatgctgtggcggtgcaagcagagcaaaactagtccgaaacgacgtcgtttttcggccatcgtccgaggaaacgcataagctctggtgccagaagcttggcgaattcatcgattctctcggacgacccaagggctttttggtttttgtaatccattcggggga

SEQ ID NO: 9569 - DNA, 476 bp, Glycine max
aaatttatcgactatgtcactgatgttaggcacatcaaatatagctaatgatgatttggaatatttggaaatgctttttttattaagcttccagtcttttatttcccaaatgattcttgacctttgaaatttatgtagcatattctagacttttggtttaaaatttgaactttaaggtaggggttcttttggttaagttggactgcaatatcaggctacatgactttccgttaggcttactttatttgaaaatatgaattgccgtttctctctccttgctaaataatatacttcacattgttgactacttgacttgactcattaaccatttattggtgttgcacagatatacaaagctcagaggaatgtaatactgtgtgttacagcatgtcttctctactggtaaagtaacaatttgagattggaatttatttgtcctttgggaatggaatggacttagttattatctgtctttg

SEQ ID NO: 9570 - DNA, 783 bp, Glycine max
  unsure (1)..(783): unsure at all n locations
cttaacccctaagaaaagtatcgaaaaaagactcatagtccatcacccagcaagaaaaaagaaaatcgaagaggaagagcaaggacacaacacaaagaagcaaaagaagacatggcgttgcagtggctgattctcacttacgtggtcgcagctgaggctgccgtggccattctgctaacccttcccacgcccaaactcctaagggaccgtttcgcctctctcgtttccctcattcttcaacccgcgcttttcattgtcccctttgcggggttccaactccttgatatatactggaaaaatgagcatcggttgatgtgtacctctgaagtttgtactgctgcggagagagatcgatatgagaaatctatatacaaagctcagaggaatgtaatactgtgtgttacagcatgtcttctctactggtctatcagccgcatttgcaagtatcagaaggaaatccagagtctggaggaagtggagaagagaatcaaggcccagtagattcctttagtcatgattagtggattgaggctactttagttgagtctagtagggacatgccaacatgatgtaccaaattatagagtgtgatatactcatgtgattcagttctagactttcaaattccaatctttctttatcatactgtttggatctgctcttgacttgtatgttgtttaatggcttttagcctatatcagtgaaatatttttcttttttatatctnnnnnnnnnnnnnnnnnnnnnnnnnnnnnnnnnnnnnnnnnnnnnnnnnnnnnnnnn

SEQ ID NO: 9571 - DNA, 1096 bp, Glycine max
cacacacgccatccaatttctgtctttgatatttttaattagagagagaaaaagaaaaagaaaaaacaaagagagaaagagagaagagaggagggtgtgtttctgggttttggaaatttcagcccccatcgaaaaacaagaagccccaacgatagtaatcatcgaaggaatttgaaaggtcgaaacttgagcatctgggatcgcgaaattggggtttttggttaaaagggtataatcttcggaactgattgatggcaaaactgtacgtgaaggcggtgccaccggcggatctgaacaggaacacggattggttcacgtaccctggcgtttggaccagttacatcctcatccttttcttttcttggatcctcgtactctctgtcttcggttgttctcctggcatcgcttggaccatcgttaatctcgcacactttgctgtaacatatgacttttttcactggaagaaaggaactccatttgcagaggaccaagggatctacaatagattgacttggtgggagcaggtagacaatggaaagcagcttactcggaacaggaagtttctcacagttgttcctttggtgctgtacttgatagcctcacacacaacagactatcagaatccaatgttcttattcaacactgttgcagtgattgtgctggttgttgcaaagttcccccacatgcacaaggtcaggatatttggaatcaatgctgataagtgaaatgttgctgtggccatgacacttggttaccactacctcctacctgctcaagagcctcttgtccttttgttctggaaaaaaaggtcacacctttgtatagaaggcagaactggaaggatactcaagtaatgttttgttgccaactgctttttaagctgcttctaaaagtattattaaacaaataaatatgttgagtttttttctgtacagtggagaagtatatgtatctgactatatcggtgcttttaaaatgtacatttcttttctagtcttttttcctttatttgatgccttagaactgtgagatatacaatgatgatcctttccgttggtattaactttttcttttggaaataatagtcctttttgat

SEQ ID NO: 9572 - DNA, 434 bp, Glycine max
tgtttccactatcattatttgcccattaaaaatcaatttttagctctcattttcatttttttgcaattcctccacacacaccatccaattcccgtctttgatattttaatcacagagagagaagagggtttgtttctgggttttggaaatttcagcccccatcaaagaagaagccccataatcttcgaatcgaaggcatttgattgaaaggtcgaaactttagcatctgggatcgcgcaattggggttttttttggttaaaagggtatcttcggaattcatggcaaaactgtacgtgaaggcggtgccaccggcggatctgaacaggaacacggagtggttcacgtaccctggcgtttggaccacttacatcctcatccttttcttttcttggatcctcgttctctccgtcttcggttgcttccccggcatcgc

SEQ ID NO: 9573 - DNA, 577 bp, Glycine max
agttagagagggttggaggagtgaggtgtgtatactaaagaatataagatagaagattggggttagggtttgatcggacgcaatggctggcaccggcatccacccataccaccagcaatgggctccggcggctgccgctcctcctcctcctccggcagccgcgggcggtcctcctcctcaccctggggaggaggttcgaacgatattcataactggtcttccggaagacgtgaaagagagagagctgcagaatctgctgagatggctgcccggtttcgaagcatctcaactgaatttcaaagctgagaagccaatgggttttgctctcttctccgcaccacaccaagcactcgccgccaaagacattcttcaggacatgctcttcgatccagacaccaagtccgtcctccacactgagatggcaaagaaaaatctattcgtcaaaagaggaatcggagctgctgatgcgggcggtgcttttgatcaaagtaagcgcttaaggacagccggggattatacacacactggctatacaagtccgtctccttttcatcctcctccgcctcctgtgtgggga

SEQ ID NO: 9574 - DNA, 925 bp, Glycine max
actcgagccttactagggttttagaagccagcagcagtaggcaaaaatgtcgagttccatgatgacgctctcaaggaggctctattgctctctgcttcgaacccccaatgcatatcgccacttctccaccgatcaccttttcgactcggacgaggccgactcagcacccgacccacccgcacccgacgccgttcaagaagaagaaaagttcgtcatcgatcgccccctcgagaatggcctcgacgttggcatctacagggctattctggtagggaaggcggggcaggctcctttgcagaagaagcttaagagtggcacctccgtcactcttctctccgtcggcaccggagggattcacaacaaccgcaggcctcgcgtcgacgagaaccctaaggactatgccaatcgctctgccattcagtggcatcgtgtctccgtttatcctcagaaattgggagaccttgtcaccaaacacgttgttcccggttcaatgctgtacgtggaggggaacctcgagaccaaatgcttcaccgatccgataaccggcattgcccgccgaattcgagaaattgctgttcgacgaaatggtcgcattgtatttttaggtgaaggcggtgatgctgagctgcagacactgccaaaagacctgagagctgttggctattactaacgttagatgcttgaaatgggaacattgcatttagttcataatggagatttttctattttgtaattatactctgattttttaccgcaaatttggaattatttcgcagacatttgtcatgagggaaactctaggtttgagcgatcttgtagtttctacgtgtaattcataatcagggaatatagagctcaaccttcctgattttgtatgttggtaaacttgtggtagggcaagtatttcaattttctctttggtttt

SEQ ID NO: 9575 - DNA, 414 bp, Glycine max
aaagaatgcagtgcggcgcggcgagtggcttacatataagttattacgacagagggtgtaagcgaaacacccattcaacattttctctgtctatctctcgttgtagcgtagcgcagcagttgaatttggaaaacaagatgtctcaccgcaagttcgagcacccgagacacggttcccttggctttctcccaaggaagcgagcttctcgtcatcgcggaaaggtgaaggctttcccaaaagacaatcctagtcaaccatgcaggttgactgcctttgtgggctacaaagctggaatgacccacattgttagagaggttgagaaacctggatcaaagcttcacaagaaagagacatgtgaagctgttactatcattgaaactcctccattggttgttgttggagttgtgggatatg

SEQ ID NO: 9576 - DNA, 1064 bp, Glycine max
caaatatgatgatgacagtcacaaatatgacgatgaagatgaagttgatgatgagtatcgagaggatgagcatgatgacctttcttcctcctacaaatctgattctgataatggacctgacttgtcagataatccttcctggttagagaaaatacagagaactgtgcggaatatttttcaggctgttaatttattccaggctccagtgaaccagtcagatgctgctcgtgttcgcaaggaatatgatgaatcaagtgccaagttgtcgaaattacagtctagaatatcaagtctgaagctatagctaaaacatgattttggtccagcaaaggagttttattcattctatgatcattgcgttgagggcatggagaacaagtacacttacaaagtctgcccctataaacaggcttctcaggaggagggctattccaacacccgtttggggagctgggacaaatttgaggattcatacagagtaatggtgttttctaatggtgataaatgctggaatggtcctgataggagtttgaaggtcaagctaagatgtgggttgaaaaacgagattactgatgtagatgaaccaagccgttgcgaatatgtagcagtattatctaccccagccctttgccaagaggaaaggctgaaggagttacaacacaagctagacttgttgaattcggaaataccatcaaaccatgatgagttgtgaacaaccgggatggagtttaacaggtagtatgatggttataaagcaactgaggaagtggtgccctaagttttgtatgctagagcttacacaaatataatatcgggggaggttagggagaggctagaagctgattcgacttggggttggtaatccttgtggttgtccgagtttgcaacattctaatatgcctcatcccattgcacatttttcctttattgaactcaattacgaaatggtctgtgtgcctctccttgaaattgtccattccataccaaaggatggatatttatactatgcaagatactggacagtcagaatttcttgagccaaaattatttgttggaatgagttc

SEQ ID NO: 9577 - DNA, 1201 bp, Glycine max
gtaacagtctgtgtctgtgtgtgtgttcagtttaacaaatggatcaagctgtccactgatctgtaaccgtggtggactcgacaagacaacaacaatattcagaacattaacaagaccacaccacaccatgagcgtcatcgacattctcaccagagttgattccatttgcaaaaagtacgacaaatacgacgtccaaagccaaagggactccaatctctcctccgacgatgcattcgccaaactctacgcctccgtcgacgccgacattgaggccttacttcagaaagcagataccgcttccaaggagaaaagtaaggcatccactgtggcgatcaatgccgagattcgtcgaaccaaggctaggttgttggaggaggttcccaagttgcagagattggctatgaaaaaggtaaaggggctttcatcacaagaatttgctgcccgtaatgatttggctcttgcattgccggataggattcaagctatcccagatgggacccctgcagcatccaaacaaactggaagttgggcagcttcagcctcacgtcctggaattaaatttgattcagatgggaaattcgatgatgaatacttccaacaaactgaacaatcaagtcaatttaggcaggaatatgaaatgcgtagaatgaaacaggatcaaggtttggatgtgattgctgaaggattggatacattgaaaaatatggcacatgatatgaatgaggaactggatagacaagttccactgatggacgagattgacactaaggtggacagggcatcttctgaccttaaaaataccaatgttagacttagagatacagtgaaccagcttcgatccagtcgaaacttttgtattgatattgttttgttgattataattttgggaattgctgcttatttgtacaacgtgctaaagaaatgatacggcatagaagaccattagatcaatttgtatggcttatcagtatttcttgtattttcttggtaatatcgtggtgtgactcgtgtctgcttctttttaaaacaatatttttggacttgttcctgcaacttgagagatgcacttgtcctttatcaacagatctatatgtcgccgtattatgtcaaacagtgtagatttgtatttatacttgtgtaatatactaattcaatgtttgccttgaggatatttcaagtaatctattttcatttagagcgg

SEQ ID NO: 9578 - DNA, 605 bp, Glycine max
ttaactttcccctttgaaatcctttctcagttctgcgccaactgaaacgcagatcgaactccgccgtagccatcatcaccgatcgaacttcgcaagacagagatcaaattctgattccgacacagtaacagtatgagcgtcatcgacattctaacccgagtcgattccatttgcaagaagtacgacaaatacgacgtcgataagcaccgcgatgctaatgtctctggcgacgatgcctttgccagactctacgcctccgtcgacgccgacatcgaggccctacttcagaaagcagaaagtgcttccaaggagaaaggtaaggcatcagctgtagcgatcaatgcagagattcgtcgtactaaggctcggttgctggaggaggttcccaagttgcagagattagctgtgaaaaaggtaaaggggctttcatcacaagaatttgctgcccgtaatgatttggttcttgcattgccgcatagaatccaggcgatcccagatggggctcctcctgtgccaatacagactggaggctgagcagcttctgcctcccgtcctgaaattaagcttgattcagatgggcgatttggtgatgaatacttccaaca

SEQ ID NO: 9579 - DNA, 484 bp, Glycine max
ctcgagccgcaattttcccacacactttacagcaacagctgttaactttcccctttgaaatcctttctgagttctgcgccaactgaatcaagcagatcgaactccgccatagtcttcatcgagacagagatcggaatctgattcccaaacggcaacagtatgagcgtcatcgacattctaacccgagtcgattccatttgcaagaagtacgacaaatacgacgtcgaaaagcaccgcgatgccaatgtctccggcgacgatgcctttgccagactatacgcctccgtcgacgccgacatcgtggccttgcttcagaaagcagaaagtgcttctaaggagaaaggtaaggcatctgctgttgcgatcaacgcggagattcgtcgtactaaggctcggttgctggaggaggttcccaagttgcagagattggctgtgaaaaaggtaaaagggctttcgtcacagagtttgctgcccgtaatgattt

SEQ ID NO: 9580 - DNA, 532 bp, Glycine max
aaatgttagacttaaagacactgtgaaccagcttcgatccagtcgaaacttctgtattgatattgttttgttgattataattttgggaattgctgcctacttatacaacgtactaaagaaatgatatgtacaaaggctgatggatgttcgaatggtttgcctttacttgtattttgagaatatcgtctgattttattttttttatctctaccgttgtgaaaatttcctgcgaattgagaggcgtgcccttgtgctttataagcattcctgtgtatgcagtcatgtcagataccattagtatgttaaatagttgctgtgtattttatacacttgttgttttggtgtatattataatgagtttaatgtcaatgtcgtgacagtctatacatgttgggttgtgattagatgattttgtaaaactttttgcactgggttgtgattagatgattctgtaaaactttttgcactgggttgtgattagatgattctgtaaaactttttacactattaatgcatgcataaccctttttct

SEQ ID NO: 9581 - DNA, 447 bp, Glycine max
tggatgagattgacactaaggtggacaaggcatcctctgtccttaagaattctaatgttaggcttaaagacgcagtgaaccagcttcgatccagtcgaaacttctgtattgatattgttttgttgattataactttgggaattgctgccttcttatacaacgtactaaagaaatgatgtgtacaaaggctgatggatgttcgaatggtttgccttgtattttgaggacatcttctgatttttttattttatttctaccattgtgaaaatttcctgcgacttgagaggcgtgcccttgtgctttataagcagtcctgtgtaatgtgtatgcagtcatgtcagataccattagtatgtgtatgttaaatagttgctgcttattttatacacttgttttggtatatgttatagtattataaattgacgctgatgaattaggaattatatt

SEQ ID NO: 9582 - DNA, 314 bp, Glycine max
ggaagctgttggagttcatagttgttacaggctggacggtgtaagagtcttgtgtgttcagtttaacaaaccgatcaagctgtcgtgtggtgtacccactgatctgtaaccgtggtctcgacaacaacaacaacaacaacactattgttcagaacataaaagatcccaaataacaagaccacacaccatgagtgtcatcgacattctcaccagagttgattccatttgcaaaaagtacgacaaatacgacgtcgaaaagcaaagggactccaatctctccgccgacgatgcattcgccaaactctaagcctccg

SEQ ID NO: 9583 - DNA, 697 bp, Glycine max
ctcgagccgaaaaataggaaaaagaaaaccctttggatttgcgtcgccgcaagcattgcagagtgacagcagcagcagcagcagcttggtctgaggttagagatggttagccaaaggcagcgacttgctcgaaagcgatacaaagcggaacaccctgagctctttccgaagcccgagcccacaccccccaaagaccccgagaagaagaaaaagaagaagaaaaacagcgctttcaagcgcaaaaggcccgagcccaagcccggctccagaaaaagacaccctctcagagtccccggcatgaagcccggcgagagctgtttcatctgcaaggccatggaccacatcgccaagctctgccccgaaaaagcagaatgggaaaaaaacaagatatgtttgcggtgtcgacggcgcggtcatagagctaagaactgccctgaggtgctagatggcgccaaggatgccatgtattgctataactgtggggaaaatggtcactctctcacacaatgtcctcaccctctacaagaaggagggacaaagtttgctgagtgctttgtctgtaatcaacgtggacacttgagtaaaaactgtcctcaaaatactcacggcatttatccaaagggtggttgctgtaaaatttgtggtggtgtgacacatttggcaaaggattgccctgacaaagggaagagtggatctg

SEQ ID NO: 9584 - DNA, 823 bp, Glycine max
ctcatatacataagagacagttgagaatgagactgtgtgaatgaatgaacacaacacaagtacttacagacatacatactctctcaatttctctctcttcttactttttctctccaaaccttacatgcacaaagttgtgtacccatggaatttgcttgcttagactaatcaaccaagttttgcattttgtgtaaccaaaactctatctctttattttttttcttctggggttggcaaagtcagcatgcaagagcaagatttctaggctggttgatggtttgagttccaaaaaattggactttttgttgaattgaaatttgggtcggtgaaaggggtgttatgaagaacgaagagcaggctcgtagtttgtttggaatttcactctctgacagacccagatggcagcaattcctcatttgttcatcagggttcttctttggatatcttgttaacggcatctgtgaggaatatgtgtataacaggctccatttcagctatggttggtacttcacatttgttcaagggtttgtgtacctgtgtctgatttacctccaaggcttcacaagcaagcaaatggtgaatccatggaaaacctatgtgaagctctctgctgtgcttatgggttctcatggcctaacaaaggggtctttggcttttctcaactaccctgcacaaatcatgttcaaatccacaaaggttctgccagtgatgataatgggtgccttcataccggatctgagaaggaagtatccgctgcatgaatatatatctgcaatacttcttgtagttggtttgatcttgttcacactagcagatgcacaga

SEQ ID NO: 9585 - DNA, 376 bp, Glycine max
gaaggaagaaggaggcgtaagggacgagcaacaccctacgacatcgaaaggttcaagatcatggaagaaaagcgcctctccatgctccgcgcgctaaaaaaagcgatcccattcaaccaaattacgtctctctcgttcccttcccttcctcttggcccccaaaattctgtttcacaatcctaactccgaaaccaacaatggaacaacccccgaagcccgaaactgtgcccgaatcccacgtcccgaacggccactccaccaccaccaccgccacaaccaccgtcacaaacggatcgggatcggaattggaatcccaggtcccgaaggaacgcgccgcatcgtcgtccggcagcacgaaaaaatcggtgcactggag

SEQ ID NO: 9586 - DNA, 1018 bp, Glycine max
tgctagatgtcttgttttaattgataattgatagtcaaatttgacccgcaaattgtttagagatgaagacaagaaaaaccaatgagtgtgtatcattttgttttagtcattgtcttagtatatttaacattttctgaatccgaactgaggagtagcaaaactgacatagttcagtcttcagacttcccattccaatttccaagtttttcaaagaaggtgagtgatgagcatggagcatttgccaggagaattggtgtccaacgtgctctcaaggttaccatcgaaggtgttgcttctatgcaagtgcgtgtgcaagtcctggttcgatctcataaccgatcctcattttgtttccaattactatgttgtctacaacagtcttcaaagccaagaggagcatctcttggtaattcgaagaccctttttttctggcctcaaaacttacatttctgttctttcttggaacaccaatgaccccaaaaagcatgtttcttctgatgttctaaaccctccctatgaatacaactctgaccacaaatactggaccgaaatcttgggtccttgcaatggcatatactttttagaaggcaatcctaatgtcttgatgaacccttcattgggtgagttcaaggctttgcctaaatcccatttcactagcccacatgggacttacactttcactgattatgctggctttggctttgaccccaaaaccaatgactacaaagttgtggtgctcaaagacctttggttgaaggaaacagatgaaagagaaattgggtattggagtgctgagttgtatagcctcaattcaaactcttggagaaaacttgatccctctcttctccctcttccaattgaaatctgggggtcttctcgggttgtcacttatgccaacaattgctgccactggtggggctttgtggaagattctggtgcaacacaagatattgttcttgcatttgacatggtcaaagaatcgtttaggaagataagggtaccaaaagttcgtgattct

SEQ ID NO: 9587 - DNA, 402 bp, Glycine max
gaggagctaaatggcaattaaagagataggagaggggcattaaagtgaggaaaagtacttacaagttttgggtccatgattcatcgtgcgtatctaaaacatcttcaaatctatctttgaccgtcgtactctttttaattttggctcatcatcacccttcgccttttcgccgctgttgcagactctgctcaaaatacacaaacaacagccaccacactttcattcacccaccaccctcttacaatacaatatctccattttgcccttctttcccccctcatctctataaatattttaatctctctcccatttcattcattaagcatacactcacacttttctttctcatcctctcattcattactctgatccgacggctgcgatcttctcgtttctccaatc

SEQ ID NO: 9588 - DNA, 568 bp, Glycine max
ggactagagaagaagagtgatatggcttgtaattctatctcccaagcagcttcaatgggcacacaaatatgcacccaaatagcttccatattctcaaagcccacccatccatacccggccccactagaccttttagtcaccgaactcacctccgttgcctctcaaaaaggcaacgtttttctatacggcgtgggccgcgagggcctcatgctcaaggccctctgcatgcgcctcttccacctgggcctctcggcccactttgtcttcgacatgaccacaccccccatagccgccggcgacctcctcatcgcctctgccggccccggcggattctccaccgtcgatgccctctgcgcggtggcgcgctccaacggcggaagggtgctgctcctcacggcccagcccgagacaggctcgtgcgtgaaacacgccaacgctgtggcttgcgtggcagcgcagaccatggccgatgatgatgcggacgcagaaagggacgcgaaatctcggccgttacttccgatgggaagtgtttacgaagcagctctgtttgttctgtttgagatggttg

SEQ ID NO: 9589 - DNA, 344 bp, Glycine max
ctcgagccgaaataaacctaaaagcccaacatatctatccatccccaacagtaaaagaagaaaccggattcatactctctccctcccctctgtctctctttaccaccggacctgcttttaaagcttgttcttcctctttcacatgaagacactagtcatggacacaacaaactcatcaacccctcgacctcaacctcaacctcaagactcatcctcctccaagaggcacttccactggaccaacaaggttggaaatgaagacccccaactcctccccacttcagaaacaatgtccaaaatcatagaagaagacacaaacacaatggaagaagaagaacaacaag

SEQ ID NO: 9590 - DNA, 136 bp, Glycine max
gatgagcttgagtaaacttatatgatatatatttacgttcattcacagtatgtaattaagatgtctcaattgtaaatttaaatacttgaaaatttttatcatatcacatattttagggtatgttgtccattggttg

SEQ ID NO: 9591 - DNA, 1942 bp, Glycine max
acttgcattataatattatatgataatagggccttcttaggagtaccaaactaacacctcaaaaagacaaaagagaaaatgttctcttaagcaagaacagcagtgactactggaatcccccatgccttgccattgcttattgctacatagccattacacactcacatatatgcacatggataacataccaccaacttaactcacaacagggttgccataaggcaaaaatatatgggaagcctaacatgctccaagtctcttgccatccacaagtcgcttccagtacaaagcaatctctttctgagtctctattgcactcttaaccttctcactagtctcactagtctcactagtgatggctgtgatatgagcaactttggtagtgagggggctaggaagtgtgtccaagagcttcacaaccttctctatgtcagcagcaagtctctcggccaagccacggctgaaatcctccctgatcaccacccggaggaccgctatgtgttgcgcatctggtggcattgtataggccggaactatccacccgaattttctcagatggtctgctatctcaaacactgtgtgttgactactgtctttcaaggagaaggctacaagtggcacaccgatatccttggagatgatgttaaaccgacctgttctctcgattccttccttcagaactcttgcattctcccagcaattttccatgatatttttgtaaccctcaaagccaagccgaatcaattgataatattgagcaataatttgactagatcctttggagaaattcaatgtgaaagtgggctgatcagatccaagataatttatgtgaaaaacaagttcatctggcaagtcatctttgctcctccatacaacccaaccaacaccagggtagacaagaccatacttgtggccactaacattgatgcttttcaccaacggcaaacggaagtcccactctaaatcaggatatagaaatggggcaataaaccccccactggcagcatctacatgaattggggtatcccaacctgtctcattgttctttttagtaagaagttcatcgagaagcttcacatcctcaaactctccggtcatagttgaccccaaaatggctgcaacacagatggtgttctcatctaccatttcaactgctttcgcagggtccatcacatagtatccttctttgagtttcacttccttgagctctacctcaaagtaccttgcaaatttttcccaacaaacctgcacattagccccagttactatgttgggcttatcatatggtttgccttctgcttttctctttgtctgccatttccttttaaaagctagacctgccaacattattgcctccgatgaccccacagttcccacacctactgcagtctcatcatcacttataggagcatggaatagatttgctatgatattaacacaccggttctggagctcagtggtgacaggatactcatccatgtcaacatagttcttgttaagtgaagccattatgagcttgtcacactcaggctccatccaagtggtcacaaacgaggccaagttgagccttggtgcaccatccaacatcaactcatcgtttattatctgataagcagcatcttttggtatggatttctccggcatcttgaactttggaataggttcacgcacatatctggaagcaaaagtatagtttaggctctggtcttgttcatctgggtgtgtggcagtggatgtgagaaccatttttggttgcttttcttttcttctgagccaattgtctaggtgtgaaacgctgaactgtgaagagacagggtcaccacttatattagaagatgagaattttatcttctttgggtagaatccaaaaggataaattccctgcaatctcggtaagaaaactttctcgcttagtgtatcatttttttaactgtgtggtccc

SEQ ID NO: 9592 - DNA, 398 bp, Glycine max
ggaccttggcgcatgcttcaggttaattgggatgaacctgaagtcttgcagaatgcaaagcgagtcagtccttggcaggttgaacttgtttcccttccatttgcacttcatacagtatactcccctaacaaaaggcttagatctgaccagggttctgggctgttaagtaatagggagggagaccccttctttcctatgacagggttccctaactcgacaatggaacacatgacagggttccctaactcgacagtgggacacatggataaatcattgttgagttatgatacttttcctgctggcatgcagggagccaggcatgatctattttctccatcaagtttttccaactttttaaatgataagtcctatctgtatatgggtagtggttcatttgg

SEQ ID NO: 9593 - DNA, 850 bp, Glycine max
acagggggggggaagaagagataggggtggtggcaatgtgttaccaatatcatatcatatattctttcatcttcttgggttagggttctacacttgcaatctcctttcacacccacccacccttcaaccatttcaattccttccctcacccaaaccgcactatcgttcttcgacacggtcctgtttattaagcggtttggataaaagaatagaagcgtaaaatggccttcgtagcacatcaacctcagggtttgtttgtgacatcttcctcgaggcgtttgccatggagcaaaaggctgaagttgaagcagtgtttaacaaaacatcacatgattggaagaactgaccggcattgcctagtaaagtggaatgcttgtttaagtttagggcctccttgcttttgtgtatccaagttcaaacctttaaggatttcaggcttcaaaggcagcacccaaaatgatgattcaggaatcagagctaatcggttgaaggcacccaatacttctgttagattaggagagagcggggaggctcacaatgttccactgtcttatgcatctgaaacaaatgatagtattgcaacatcatctgctattcatagacttttcaataaatggctgacaatgttgcgcacgcaaccatcaagccaagaagtggagaaattttttgaagaacctacatcagcaggaattttaccaaaaactcaacaagggactcaaattaaggaaagccgtgcggttttgaaggtggcatggtcccattttctggccctcgatgcaacaataaagattcctttgctggtatttgttcctctctacctggctgttaatgtaaaatatggtgctgaagt

SEQ ID NO: 9594 - DNA, 378 bp, Glycine max
  unsure (1)..(378): unsure at all n locations
ggtaagtaaaagatctcgaacgtagtatgtaacttctccacagcgcagagccgagcagcgttattatttttatattattattacaagaaatgggagttggaggcacactggagtacttgtctgatctaatgggcagtggccaccaccaccacaagaagaagaagaagcagttccaaaccgtggagctaaaggtgagaatggattgtgatggttgtgagcttaaggtcaagaacgctctctcctcactaagtggggtgaaatctgtggagataaaccgaaaacagcagaaagtgacagtaactgggtatgttgaaccaaacaaggtgctgaaganggcgaaatcaacagggaagaaggctgagatttggccctatgtgc

SEQ ID NO: 9595 - DNA, 294 bp, Glycine max
gtccaattagggtgaattatgctaatgaaagacctcgtggatatggtggtggtggcggcggctttggtccatatggtgctgtaggtggcggtggttatgaaggtggtggtggcagcggttatcgtggaaatgtttctgatggttatggtggtggcaactatactcgaaatgatgggggtggttatggatatggtgcactgcagttatggatcaggcggcaattacggggacagtcgccctggcaataagtactcgggatgctatagtggtactaacagttgacattttggtgat

SEQ ID NO: 9596 - DNA, 398 bp, Glycine max
gatatcgaaaaagttttgaaaagaaaaaaaacgctctgtctctctcctctcgttgctgccatagttctctactcgttctctctctctctctctagtctataccacacaagcttcgaacttgtcagcaccccattttgcgtttccaggggaatttcaaaaccctaattttcgttttcggagttctctaactcctcgctggaaaactgaaaccctagggttttccccctttttggttcttggcgtctaaatttgcttcattttcatgatttgtgtagcgatttcttccacttaagatgactaagggtacctcgaaaccggggggtactggaagcggtggcttccacgcggttcacgcggagcgtgacctagaatcgaattgggaagttgacctcgccaag

SEQ ID NO: 9597 - DNA, 647 bp, Glycine max
cagtaaggggcacatcagtattcatatttcatatcatataagatagcaaagcctataacccatggagtcaaacaacatgccagacttgaacggtgtcactaagaagactaaaggtcgacaaaaggtccacacacatctccactacttgtctaaccaaattgctattgagaagaagcgctcaaaggatttaaatcatttagcgaaggttgcagaggatcagttctggtgggctaggcctattgaaagcatgaccaattcccaacttgacaagtataagaagatgttagaggagtttaagagacaactcaaagaaaaacgtgggaacctcaactgatgatgccctatttaaagttttagtcaatgttttttaatttaatatgttttagaatgagcactagcttaatcaaattaatgtttggggtgtggttaggattgattatctaggacttatgttttcgttatgttgaatagtcttcatcatgtgttggtaaactatgtttcctttatgttgtttctttgctttgttagtggagtttgtaattgtgatgtagtttctacatgatgtagtgtttgaatgaaagggcatcttaaatacataaaaatccaattctattagacactccaacctttcgaacattggttgggcc

SEQ ID NO: 9598 - DNA, 373 bp, Glycine max
ggagtatttcagaagctcgctgcttcgctgattttgaggcatgcaagaagagagaggagtcgtactgcacaagtttcacacttcctctcatgtttttactgcatttgggactcttcactcttctcgacatcttcatctctgtcaagtttccatagcacagagacaaaaccgggtgctttgagataataatgctgaggaagaggaacaggtcagtgcagaaggatcaacacctcatgtgtgaagccaattcggagcactattctcaatctcatcatgctttggtggggcgcaacaacatcaagggacactcaattttcaatgtcccttgtctgtttgtgggtcttggtccaaaagggttgttggattctgattc

SEQ ID NO: 9599 - DNA, 504 bp, Glycine max
caaacgttctccgtttagcacagaaacgaacaccaccaacgaacaccgtgattcctctcgccgtagatctgttccatttcgccgttcatccatggccgacgacttcgaattcgccgacaaagtccctccttccttcgatcgcgcgggttcaaaagggttcaacccagctttaattgttctcctgcttgttggtgggttgctgttgacattcctcattggaaactatgtactctacacatatgcacagaagaccctccctcctagaaaaaagaagccagtctcaaagaagaagatgaaaaaggagagactgaagcagggcgtctctgcacctggagagtagaactttttcctcactttatattctgtgatgttaaattgtactcttttagaaaaaatttctcgttctgtggtctctggagtttgttaatctttatcttagtcatgtgttttactgactgaaatctcgaccacataaattaagtactttgttaaaatatttggaac

SEQ ID NO: 9600 - DNA, 793 bp, Glycine max
  unsure (1)..(793): unsure at all n locations
caagcttagtgacactatagccaatacaagagtcaatgttgcagatgccattagagaccccattgtttttcccccttggttagataaatccgttgctggtttctagaacgctcttcttcaaggcgtgccgcaaacttttgcatccgaatccccgtttgttttggcagaagccatggccgatgacttcgacttcgcagataaagttcctccttcgttcgatcgcgtgggaaatgtgatcaaggattctggatccaaagcgttcaatccgggtttaattgtcctcctggttgttggtgggttgcttttgacattcctcattggaaattatgtgctctacacatatgcacagaagaccctccctcctagaaaaaagaagcccgtttcaaagaagaagatgaaaaaggagagactaaagcaaggtgtctctgcacctggagagtagagtttgtactcagtttttgttctatggtttaaattgtactatttagatgaactttctcgttctgtggtgttttgcattacgttgattttcatcgttctatatactgtgtattactgatagaaagcttagccacataagtgctttttttttttttcggtgaaggccactaagtgctttggtaatgtaggggactggctatttaccggttaaatcatcattttgcttccccgcnnnnnnnnnnnnnnnnnnnnnnnnnnnnnnnnnnnnnnnnnnnnnnnnnnnnnnnnnnnnnnnnnnnnnnnnnnnnnnnnnnnnnnnnnnnnnnnnnnnnnnnnnnnnnnnnnnnnnnnn

SEQ ID NO: 9601 - DNA, 466 bp, Glycine max
ggtagtatattttttttaactaaaaaaaaggcactgcgtatggatttggtttagggtttagggtaaatccgtggctggtttctggaacttttgcatccgaatctccgtttgttttggcagaagcacaggttctccgcgtcagccatggccgatgacttcgacttcgcggataaagttcctccttcattcgatcgcgtgggaaatgtgatcaaggattctggatccaaagggttcaatccaggattaattgtcctcctggttgttggtgggttgttgttgacattcctcattggaaattatgtgctctacagttatgcacagaagaccctccctcctagaaaaaagaagcctgtttcaaagaagaagatgaaaaaggagagactgaagcaaggtgtctctgcacctggagagtagactttgtactcagcttttgttctatgtttaaattgtactatttagatgaact

SEQ ID NO: 9602 - DNA, 420 bp, Glycine max
gcaaaacgtaaaggagagagagaaagaagagaagatgaaacatagtgcttcctccactgatattctctgcttctccattccctgaaccaaaattttcaatttttaatacatataaacttctggggttgtttgttgttgtaaaagttgaaggcttttggggggtgtctgatccattaggatcatcatcattcatcagcacatggcaaagccaggggtgttggagtctgatccaggggtgatggtgaagaaggccaaagagttgaagagggagcttcagaggttggtgaagtctagtgtgcatgatgacgattgcagcactgagaccattgatcaggccaaagagactctctgtgttctcaaggagttgaagctcagaaacaggtcttcactgtctctgaagcttcacaacaagagtgtcgc

SEQ ID NO: 9603 - DNA, 559 bp, Glycine max
ggtgtttggaggtggaaacttagggtatgatttctgattccccttccttctcgctcgttctctgctttaatccatcaactatccttctaactcatatttcttcactgattcaagatacgatcaagtttccttatcatttgctcctaattacgtttaccctatacacacttttccagttattcaccaaaaccaacaaataacaaatttcaggttgttggagaaattgttctgttggggggatacgatgtcgatggagaaggaagcttcaagctccacacctacgcgcaaattgtcgtgcactgcatgcttcgacgctgtctatttctgctactcgccggttcatcaaatgcagcagtattacaggcttggtaaatttgacaattgttccggcaaatggaaagcgatggttgattgcttaatgctcaagaccaaacccacatctcaagtccaggaagttctggatactgaagagaaatcaaagtttaagtcacatatctggacctttcggacaccagaagaagcttcttactactggcaagaactttatggtcatttggat

SEQ ID NO: 9604 - DNA, 651 bp, Glycine max
caaacgacgtttggcatagcatcgcattgcttttgccagcacacagttgcatccttcatccaattcaaaacgaaattgacacaaactcaaacagatcgaaaatccataatgttgttgcgtaaggaacaataaaaatctcccatttgtgttttcttctcttcacgcacaccaacaaaacctctctctcatcggaatctccaaaaagaatggacaacaaaacgcagcagtccgagagtaagcaaaacgacaacgacgaggaagttgcgccaaaacgacaagaccctaacccgtcgtctggcgggtggggcttttcaccgctctcgtttctctccgatcttcagaaggccgccgctgttgccgccgaagagatctctcgcaatgctgctgtagttgcagagactgcatcaaagagcattgcagagttgcaaaacgaagatgaagattcagaaaaagagtatgaaggagatgaaggatctgcagctgagaaggaaagtgacgatgagggttccaaactgcgtaaatctgctctggaaagattggagaaagctagtgaagagtcacttcttagccagggtttgaaggtttttgataactctgtggagacttttgcttccgcggcatggagtgctttaggaaatgcatggagagggg

SEQ ID NO: 9605 - DNA, 823 bp, Glycine max
cgggggagcgaagtgaattgaaattgaagtgactcggggtgagttgactcagcaatggcggaagaggtgactcgggtgatggtggcggtgaacgagtcgagcattaagggataccctcatccttcgatcagcagcaaaggggctttcgactggaccatcaacaagatcgttcgcgacaacgtctctgccttcaaccttctttttcttcacgttcaagtccccgatgaagatggttttgatgacatggatagtatctttgcttctcctgacgattttaagaacatgaatcagagagatagaattagaggagttcatctgctggaatacttcatcaataggtgtcatgaaattggggtggtttgtcaagcatggataatgcatggtgatcccaaagaagtaatatgtcatgaagtgaaacgactaaggcctgatcttctggttgtgggtagccgaggtcttggaccttttcaaaaggtttttgttggcactgtgagtgaattttgttggaaacatgctgaatgccctgtcattagtatcaaacgcaagccagatgaaactcctcaggaccctgttgatgactgatatcttgtcatacaccagacattgaagatagatcccctatggtcccatgctttatgtagtaaaaagaagaaaagaaaagaattgaatatcattcaagattagtatatggagattttcaatgtaggaataggagcaggaaatccaacttttgatgcttttattgcctttgttccttttatctagtctgtaattctatgatgtgccgatttcttttagtgtacaaatctatctgcttaagtcc

SEQ ID NO: 9606 - DNA, 1513 bp, Glycine max
agagagagagagagagagagagagagagagagagacatagagagagcagagagagagagcttgatgattggagggtttgaaatttctttgttggggacaagctcgtgtggcgacatgcatgctgctgatctggtgccgaattcggcacgaggttcactcacgataacagagcaacacttttcccttttcattcaccactcgcctatttccttcgtctcttttgtttcgtcctttccttcaccacttttcccttttcattttcaggataacaaaacaacactccttgcaggattaaacttcacttcaattgaactaacctatctgtgggttttttgtagattgattcaattcaatggcttcagtaatgctcagtggaactgaaaagctcactctcagaaccctaaccggaaacggcttaggtttcactggttcagatttgcacggtaagaattttccaagagtgagtttcgctgctaccactagtgctaaagttcccaactttagaagcatagtagtacccaagtgtagtgtctctgcttcgaggccaacctcgcagccaaggttcattcagcacaaaaaagaggcgttttggttctataggtttctctcaattgtgtatgaccatgtcattaaccctggccattggaccgaggacatgagggatgatgcccttgaacccgctgatctcaatgacaggaacatgatggtggtggatgttggtggcggcaccggtttcaccactcttggtattgtcaagcacgtggatgccaagaatgtcaccattcttgaccagtcaccccaccagctcgccaaggccaagcagaaggagccactcaaggaatgcaaaataatcgaaggggatgccgaggatctcccctttcgaactgattatgccgatagatatgtatccgcaggaagtattgagtactggccggatccacagcgtggcatcaaggaggcatacagggttttgaaacttggaggcaaagcgtgtctaattggtccggtctacccaacattttggttgtcacgtttctttgcagatgtttggatgcttttccccaaggaggaagagtatattgagtggtttcagaaggcagggtttaaggacgtccaactaaaaaggattggcccaaaatggtaccgtggggttcgccgtcatggcttgattatgggttgttcagtgaccggtgttaagcctgcatctggagattctcctttgcagcttggtccaaaggaagaagatgttgaaaagcccgttaatccttttgtgtttgcactgcgcttcgttttgggtgccttggcagccacatggtttgtgttggttccaatttacatgtggctcaaagatcaagttgttcccaaaggtcagccaatctaagagatattagtagttagtgatccttttgatactttatcagtgtcttcttcaaagtttcatcaaatgtactctcaattaagagagatttgatcaaatgtcaagtagtttattacgtaactgagctcagatttg

SEQ ID NO: 9607 - DNA, 294 bp, Glycine max
ggttccttcatctctttcgtttcgtccttgccttcaccccaaagcctattttcccattttccccttttcatgataacaactctccatgtagggcaaacttcacttcaattgaactaacttgtctgtggctttttgtagattgattcaattcaatgggttcagtaatgctcagtggaactgaaaagctcactctcagaaccctaaccgggaacggcttaggtttcactggttcggatttgcacggtaagaacttcccaagagtgagtttcgctgctaccactagtgctaaagttc

SEQ ID NO: 9608 - DNA, 594 bp, Glycine max
ggaatctcttattccctctttcctttcattacccaataaaatcgtagaaatccaatcccatctctcatgaacaatcaaccaagaaaacagtgagcacagttcagttgcacaccttctctgtgcttcttcttcgatgttcaattacaataacaccaactcgcttcatgaaacaccccactccaatttcgccctgtcacaatcgcatcactcatgcattggccactgtcacataaccgcgatcgctggatacgacaccctttcgttctagggtttcccctccaccactatggccatcagaggcgtcaatttcaaatggttcgatggctttttcttgtccatgctcgccaccagcatagctattgtggcaattaattggaagcggtaccaatcttgtactcaccctttgcacatatggactgtggttgactacgctgctgttttcactttccggcttttgatgtttgttgataacgggcttgcttcgggaatgggcttagattttgggtggccgcagagatatgctcgtttctgtggaagagtagttgtactttcaattcttgcattgcttctctatccatttctttgggcttggac

SEQ ID NO: 9609 - DNA, 882 bp, Glycine max
ttgcccattggtaacattgagcattttcgcactgagaagttgggttacgctgatcttgtggaagagttttctcttggggatgggaagattgtgaagattactggtattaaggagatggggaagaccaccactgtgcttgtacgtgggtctaatcagcttgtgctcgatgaggctgagcggagtttgcacgatgctttgtgtgttgttaggtgtttggttgccaagaggtttctcattgccggcggtggtgcccctgagattgagctctccaggcagctgggtgcctgggctaaggtgttgcatgggatggagggttactgtgtgagggcattcgctgaggcgcttgaagttattccctatactctggctgaaaatgctggtttgaacccgattgccattgttactgagctaaggaatcgtcatgcacagggtgagataaatgctggaataaatgtgaggaaggggcagattaccaacatcttggaggagaatgtggtgcagcccctgcttgtgagcaccagtgcgatcaccttggcgacagagtgtgtgcggatgattttgaagattgatgatattgtaactgtgaggtagagttgattgaacaatgacgaatttggagagaaactgaatcatccattatcttctttttttttttttgtctttcgtgctttaattttatgttggtagtttatatgttctttctagctactttggttaagttcttttgactttggctactgctgttgtttgcaattttgaatgtcctcatggattgtgatgtttgcaagtcatcagattcaaaagtgttgggagtttatcaatagttgataatttttatgactaatcacggtgttttttgaactgtgaccaaatcggccgctc

SEQ ID NO: 9610 - DNA, 1337 bp, Glycine max
gagagcccagagtgctcaaatttacgcgtgccacataacttggatcactatttcttcttcttagttctcactctcactgtctccgtcgtctttttctccaaagtttcggtgctgacggatagaacactacctattcagccgccatgcacactctcctccgatccactctcaggaccaagactgcttcatctttagcatatgctgtggtttccagaagtgctcacgaaaatctccttcaggctcccttattgtctagatcaaatagcactgaggcttcattggcaaaggataattcctctaatgatgtaaaaaatggtcaagggtacaaaggtcatagtatgcttgctcctttcacggctgggtggcagtcttctgatttgcaccctctgatcatagaaaagtcagagggaagctatgtatatgacattaatgggaagaaatatcttgatgcacttgctggtctatgggccacttctttagggggaagtgagccacgccttgttgatgctgccgttgcacaactaaagaagttgccattttaccattccttttggaatcgaaccacattaccttctttggatctagccaaggaactcctagaaatgttcacagccagaaaaatggggaaagctttttttgttaacagtggatcagaagccaatgacactcaggtgaaacttgtatggtattataacaatgcacttggaagaccagataagaagaaattcatagctcgtgctaaatcgtatcatggttcaacactgatagcagccagtctttctggccttccggctctgcatcaaaaatttgatttgccagctccttttgtattacacactgactgtccacattactggcggtatcatcttccaggtgagacagaggaagaattttcaaccagattagccaataatttggagcagttgattctgaaagagggaccagagactattgctgcatttattgctgaacctgtaatgggggcaggaggtgtaatacctccaccatcaacttattttgagaaggtccaagccgttgtcaagaagtatgacattctttttattgcagatgaggtaatatgtgcctttggaaggcttgggacaatgtttggatgtgacaagtacaacattaagccagaccttgtatccctggctaaggcactatcttctgcatatttgccaattggagctgtccttgtaagcccggaaatatcagaagttatacatgatcaaagcaacaaactaggttcattttctcatggttttacttattctggacaccctgcagcctgtgcagttgcaattgaagcactcaagatctataaggaaagaaatatt

SEQ ID NO: 9611 - DNA, 524 bp, Glycine max
ggtgcatcagtctctttgcaaaaggatatgggttcaatgaggatgagatcagcccctcaaaacattcgtaagaaatggtggcgccaagtacgcattgttctagctattgatgcagctgtgtgtatattactatttatcatctggttagtaatatgtcatggtatatcctgcattcgatagaattcaaacttcttgtgtgactctgaaattgaatcactatcatatttggaacttgagattttccatgcatgatctgatcagcaacagaaattggtttctttgatggggcatgtaaatggaagttacatactggtcatgttgattagatctttagtgctatttgcaggcacgtgcttcttgtcacccatatataggcattttactttataaagtctactgtacagtttcattactcttagacatctgtacttgtatatgaattttgggaagattttaaaggttcttgattcacctgtttctatagttttttttaagtagataattattttctaatatagagatga

SEQ ID NO: 9612 - DNA, 563 bp, Glycine max
gagagcaaagacgaagaagaaacaccctgtacccttcttacatcttctaatttatttttctgaggacttttttatttttatttcttcgtttccaccattttctgttacgccaaactgcgtctgcgacgcgaattgtgattagtgaacggtgaatgttgaggatctgctactttttgaacattgaataaggtctatcagacaaggatttgacagaatttgtcagaatcaaattgttaattctcttctgaagatttcattcgttcgtttgcgatatttgaagatacatttttctctcgaaaaatcgtcgaatttcggaactctggactctctgctagatcgtgcctgagtttgtacttgtagccgtggttgcagatcgaagctctgaaatgtcgttattagttggagtttagaaatagattttcatttttcaaagcttcagaactgaaaccagcgagcttgtgtggcgcgtcttttggctcggaatcggattagtttaggtgagaagttatgaatttacttgcctaaaatcggaactaaggttatgaatttcaccgtaatgttaa

SEQ ID NO: 9613 - DNA, 484 bp, Glycine max
gaacaaagcgaagaagaagaagaagaaacacccagtacccttcttacatcttaatttatttttctgaagactttttttttttttaatttcttcatttccaccattttctgttacgccaagctgcgtcggcgacgcgaattgtgattactgaacggtgaattttgaggatctgctacgtttttcaacattgaataaggtgtatgtatcagacaagtatttgtcagaatcacattgttaattctcttctaaagatttcattcgttcatcttcggtatttaaaggcgctccataatttctagttttgcagatacatttttctctggaaaaatctctgaatttcggaactctggactatctgctagattgtgcctgagtttgtacttgtggccatggttgcagatcgaagctctgaaatgtcgttattagttggattttagaaatagatttgcatttttcgaagcttcagaactgaaacaagcgagct

SEQ ID NO: 9614 - DNA, 568 bp, Glycine max
ggcgtagaagagagtgaaagtaaaaggaaagctaaaaagagcagagtagcctccactgcaccaccatcatattttggctttataaaaaagccatagaactcattagaacttccccctttcccctttcttcttcttcttcttctctctaatttcatttccttgattatagctttcaattaatgggcttctacgctgaagatcctctctcaggcttgacaataggccaggccatatatgaggtagctctcatgattgcagttctgagatgggtcttgtgcttgatcttcagagtgatcaacgacagaagaacaacacaatccgacgagaccccaacaccagaaccatgttctcagatgacaagggacaaggacagcattcttttgctgacgactttcggagagattaaggagaggcttccagagacagaggagacgtgtgcggtgtgcctgagccagctgagcgtggaggacgaggttagggagctcatgaactgctaccacgtgttccacagagagtgcatagacagatggttagaaaacgaacacgagaatcaaggcgccacgtgtcc

SEQ ID NO: 9615 - DNA, 374 bp, Glycine max
ctcgagcgaatcggctcactcgacgctttcttctctagcagttccttgattagcgctttcaatgggattctgcgctgaagacactctctcaggcttgacaataggccaggccatatacgaggtagctctgatgattgcggttctgagatgggtcttgtgcttgatcttcagagtgatgaacgacagaagaagaacagaatccgatgagaccccagccgcagaagcatgttgtcagaaggagtacaacaacactcttgtgctgacgacgttcggagagattaaggagaggctgccgcagacggaggagacatgtgcggtgtgcctgagccagctgagcgtggaggacgaggttagggagctgatgaactgctacc

SEQ ID NO: 9616 - DNA, 544 bp, Glycine max
gcgtgcgtacggtgttctaagactacagaaagggattattggaagtccttatcttatagtatcggttaggtcttgcgtttcgcaatccgttccaaaccacataagcttcaacaaagatggatgtagaaaagttgaagaagatggccagttctgttcgaactggtgggaagggtactatgagaaggaagaagaaagctgtccacaagactactactacagatgacaaaaggcttcaaagcaccctgaagaggataggagtgaatgctatccctgcaattgaagaagtcaacatctttaaggatgaaatagttatccagtttttaaaccccaaagtacaagcatctattgctgccaacacttgggttgttagtggttcaccacaaacaaagaagttgcaggatattctccccaacatcatccaccaattagggccagataacttagaaaacctgaagaagctagctgaacaatttcagaagcaggttcctgaagcaggagatggtgcaaccgcagcacaagaagatgatgatgatgcggtccctga

SEQ ID NO: 9617 - DNA, 701 bp, Glycine max
ggcagatcttacggatgcaaattctgcaacacccctcttgccctcgctgatcacattctctctcggaacttcaactgcagtcaagggagagcataccttttcagcaaagttattttgttatggatgattttcgtggtcctccccaccttcagggtccttcccccaccctcagggtgaacgtaacgcttgggcctcaggtggacagaatgatgatatctggactgcacactgttgaagacatattttgttgcagctgtggaaaccttcttggatggaaatatgttctggcacatgaaaagaatgaaatatacaaagaagggaagtttgtgcttgagaggtggacgatagttgacaatgaagaggaggaattgaattctgatgcacaagctggctctcaaactggctctcaagctggctcaagtgacacagaaaacgcctagcaagtggcttctttttcatgaatttgaagtattgtagctagcaattaatatattatagtattattattatacctttagtattgtaggttgcaaatatattatacctttagtattcctcaagatacaatttcacatagaaacttcttagagcaacttaagcttagctcatttgcagcatatataagtcttaaatattgtcatagcgcaccgaatcttgcaatatatttatggagggcatataattcatcttatttatgagtc

SEQ ID NO: 9618 - DNA, 404 bp, Glycine max
aaaaagaagagggaggagggaggaaggaggaaggagagagactttatatacgaggtaacagggcactgtggaattgcgcgtgtgggtgtgttgtttgaggttgttgtcgttggttgtgttgtgttgtgttgtgtgggttttatgagagtgagtttcacatggggagggtttttgttcttgaattggatggcagatcttacggatgcaaattctgcaacacccctcttgccctcgctgatcacattctctctcggaatttcaactgcagtcaagggagagcctaccttttcagcaaagtggtgaacgtaatacttgggcctcaggtggagagaatgatgatatctggactgcacactgttgaagacatattttgttgcaactgtggaaaccttcttggatggaaa

SEQ ID NO: 9619 - DNA, 462 bp, Glycine max
gaccacaagatggcgaggcaattgaaagagatgggagtagtgaagagtggtgaagaagagcttggaattggaactcttgtttttgtgttatgtgtgaccctctctcttattgcaactatcatcttcttctgtgcagatgaagtgcccaagaactccaagaaagcctcccaagacaacaactacggtggttctgcctgcgccaccgggtgtggggcagcatgtggtggaggctgcggtggttgagggttcaggcacgtacggtacacctctgaattgtgacgtgaaggaactaactaacgagacgagagtatctattaatctatttggcacatgtttctgtttttttcgttctagtcaaaatggtataggatgctaagaaatgaaatgattgattgtacgttgtacgacccaaactaaatgcgtgaaatctaatccaatcaccctgccttttttattccttcc

SEQ ID NO: 9620 - DNA, 699 bp, Glycine max
gattccattacatatcatcctttaaaataatttcattggcttttatgataattttttgaagtctttcacaaatatttttaattacaccgaagaaaatagagaaatctgacatgtatctttaatctctagcattattaaattattacgacgatccaataaggtaaactcaagtggcggtgtgttgtggctgttggttggtttgttgagtatcagaatcggagcgaaaatggggcggggttggtggtggaaagtggcggtgttggcggtggtagtggcggtggtgtggagagggtggcaggtgggtggattggagaaggagtcagcgttcaattttgtcagagaatggtcggagaagttagggatttgggcgatcccgctctacttgtcgctccacaccgtctccatcgctctctgtttgccctctgcgatcttcttcgaaaccaccgcccctctcctcttcggtttcttaccttccgtcttctgtgtcttctccgccaaaatcctcgctgcgtcactctccttctccatcggcaggctggtattcaggagttcaagctcagcaatggagcgggcccaaagaaacagatactttcatttaatctctagaggagttgagcgagatggttggaaatttgttcttcttgcccgcttctcgcctgtgccctcttatgttattaactataccttagcggctactga

SEQ ID NO: 9621 - DNA, 1467 bp, Glycine max
actattattcactgtgcacacttatttccttcaacttcaacttcagcctcaacctcaacccacttaccagtttttccaaattttcattctttttccctttccatgagttgatgcatctttttcaagctaattaagcttgaattagctggtggggctttttaaattcgtcgataaaaaattacagtgttctgctattttttttttcttcttcttgtgtttttggttgcagattcaggaactggtgtgtgagatttcttcaacttggggtgtcattgacataaatgcaaacaatcttgaatttgaaggcagtaagtgattacttaaatccctgaaagacatgcagtcagccttcgtttctgctgaaatgaagaacttgcagacctcggaagaattacagtcatcgactcaagcttctcatgagcccaagagtgaacaaccaaacaatcacacaactgatgctcctgttacagacacaggatcagcatctgctacaagtaatgacagcaaaaaagtttcacggcaggatattgaatttgtccagaatttaatagaaagatgcctacagttatatatgaataaagatgaagtggttaaaacattactgactcgggcaaagatagatcctggattcacaactcttgtatggcagaagttggaagaagagaatgccgattttttcagggcctactatatcagactaaaattgaaaaagcaaatactattattcaatcatttacttgagcatcagtatcatctgatgaagtgtccaatgcctgcaaaggttccattggctccaatacagaatggaatccatccaatgcctgccaacaacctacctatgggatatccagtgctacagcagcctcccatgccagcaacaggtcaacctcgtattgactccatgggttgtggtatatcaagttgtcatgtagttaacggagtccctgcctcaggcaactttcaccccattcggatgaattctggaaatgatatgatgatggaccacagcgctcctgatatggttcctgttataccaccaaatggtacaatgtcatctgtctcagaaatgcctgtgagtccgacatcagtagcatccagtggtcattttcccttcactgcatcagaaataccaggaatgggcgcagatacatcagctcttgatacagcatttacatctgatgtggcaagttcagtaggactacagcttgcagcagatggtggcaatggaatttctagatcgctggatcaaattcaatggaattttagcctatctgatctaacggcagatttgccaaacttgggaggtgatttcttatttgactctctgattcacttttatatatgcagttaaagttagtcagatgtcatcagggagtgaagttgtttgagatgtacaacatatgttgagtttgtgatctgttatgtcattcatgtgcccaaagtaatcttgatatttgagaagaaaaa

SEQ ID NO: 9622 - DNA, 427 bp, Glycine max
tttttttcttttttcctttccatgagttgatgcttctttttcaagctaattaagcttgaattagctggtggggctttttaaattcgtcgataaaaaaacagtgttctgctttttttctcttgtgttttttggttgcagattcaggaactggtgtgtgaggtaatatatttgctagatcttcattccccctttttttggcttcatgggctgtttttttggggcattggggcttccttgtggttttgtggctcaaaaagtttattcctttgaaggagttgtttgcttgatgaatctgtgggccgcttccacttcagttctccatttcttatcggccatccagatctggtttggtttaaatttggtaatttggttaaccaatcccttccatttttgagatttgaaaaaagggttttttttggaccctttg

SEQ ID NO: 9623 - DNA, 263 bp, Glycine max
caacctcaacctcaacccccacttaccagttttcccaaattttcgttcttttttcctttccatgagttgatgcatctttttcaagctaattaagcttgaattagctggtggggctttttaaattcgtcgataaaaaaacagtgttctgctttttttctcttgtgttttttggttgcagattcaggaactggtgtgtgaggagttgtttgcttgatgaatctgtgtgccgcttccacttcagttctcaatttcttatcgacaat

SEQ ID NO: 9624 - DNA, 460 bp, Glycine max
gcagttctctagaggattctattcggtgaaatagaatacgaactacgaagtgcaaacatccgaagacaccgagcgacaaagatcgacgatgacggacgaaaccgaagaattggaaccgttgtttgattacagccgggttcagcctctgaaccccatcgacctcgatgatgattttgatgattacgaggatgtgatttgcgttgatagtaaaaagaggaagaattcccaggctgttgggaatgagaagactaatgggaaaggagtaacagtggtggacattgaggatgatgattggttgcctcctccaccaaagatcgcaagtaatgcacagaagaccactgacgaggattcaactttgaaaaaattgagattaaagaagcaggaacttgcctcgtttgctgaatcagcaaaagaattgttaaaagatgttgaagagtcatcaaaattgggaaataataat

SEQ ID NO: 9625 - DNA, 400 bp, Glycine max
gagtgattttctatttttatatcctctgctatgtgcaactttccctcttattgcaaaaccaattgaacaactgaacataaaatttctcttttcaacctggaatttgctagtcttgttccacttcgattcagttcaccgatcttcattgcttcctcttttggatccgcttcattcgcgttcaaaccaacgactaatcataactcttctaccggatccctcattttttccctttcctttctgcgtttaattcatatcggagaaggagagagagaaactgcgacatgaacaaagcgactcttccgttgacgttaattggcgatggagaccgtgacacgaaagggtgactaaggtggcggagcccgggtaacctcgtcattgcgcttcaggtcctcaacaccat

SEQ ID NO: 9626 - DNA, 579 bp, Glycine max
  unsure (1)..(579): unsure at all n locations
atctcgagccgctcgagcggtcaggcattccttgttgtcgtctggcatgtcttcatccaaacagtgaaactgacttgacgataaagaagcatttccatcaattgaagtgatgattgagagtgggtatggcactcagactcagaggaaaatgggttttgattccattcttttggttttgcctgattccgttttgcttctcacaacagaagctgcgcttgcgctttggaaaaaatggagagttcaagatcttgcaaattgctgacttgcactttgccaatgggaagactacccactgcttggatgtgcttccttctcagtatgcttcttgctctgacctcaacaccaccgccttcatccaaaggatcatcctttctgagaaacctaaccttattgtcttcactggagataatatatttggatatgatgcttcggatccagctaaatcaatggatgcagcatttgcacctgcaattgcttcaaacattccttgggtagctgttttgggcaaccatgatcaggaaggatccctctcaagggaaggagtgataaaatatatcgctgggatgaaaaatactntta

SEQ ID NO: 9627 - DNA, 395 bp, Glycine max
catgtctttgtccaaagagtgcaagtgacttgacgataaacaagcattttcatcaagtgaagtgatgattgggagtggaaaaaatggagagttgaagaagatctttcaaattgctgacttgcactttgcccactgcttggatgtgctgccttctcagtatgcttcttgctctgacctcaacaccaccgccttcatccaaaggatcatcctttctgagaaacctaaccttattgtcttcactgctaaatcaatgggtgcggcatttgcacctgcaattgcatcatacattccttgggtagctgttttgggcaaccatgaccaggaaggatccctctctaaggaaggggtgatgaaatatattgctggaatgaaaaacactttatctgtagtcaatc

SEQ ID NO: 9628 - DNA, 766 bp, Glycine max
gattgtagattggtcttgttatgttatgatatcaatcaagatagataaccaaccattttgtgtccaccaaaacaaaacccctcagaaaacccctcaatagccatgggagagaaagagaagagaaacaagaacaagaagcaaaagcaccaacaccccaatgaccaaaccacaaagcagaactccgatttctccttcaagccaagctcagaggtaaagggtatcaaatttggaggccagttcatagtgaagtccttcacaatcagaagagcaagacccttagagcttctcaaggttctttctttcccaccaaccaacaacaccaacaaaccaaaggacaagctttctttcccttccaccacagcattcttgcccacaaacttcaccatcttggcacaccatgcttggcacaccctcacccttggccttggcaccaagaagtccaaggtgctcctctttgtgtttgaaactgaggccatgaaggcctcagtggacagaatttggccaccagagatagcacttggtgatgtcaacaagaggctcataaggggcctcaatggatgtgagatggcaaggttcaagttcagaaaagggtgcataactttctatgtctatgctgttaggcaagtaggaagctttggcttttcctgtgctgaggatctaagaaccattcttcagtctgttgtggagcttaaggatttcttggatcacactgttatgctttccatgccaaaccaaagaagcatcagttactcacagtcacagtcac

SEQ ID NO: 9629 - DNA, 346 bp, Glycine max
aaacaaacaagagtttgaagaagcagcttgaatttgtctctgtgcagagcagaaccccataacatacagtttgagagagatgggtatgaattgcggtggcgttgtggttcggtttggtttgtgggtggtggcgatgtgcattgcaggctacatagtggccccccctctctactggcacctcattgaactcctcaaccattcctctgtttcttcttcttcttcttcttgcgctccttgcgtctgcgattgctcttcccaacccatcattactattccccaaggacttagcaactcttcatttgaagaatgtgcaaagcacaatccgaaggtggatggagacactgaa

SEQ ID NO: 9630 - DNA, 530 bp, Glycine max
aacagaacaaaagatgaggaagtgaagttgtttgatgtgatgtcatcatgtccaacaacaatagcaagaagcgccgccatgctccgcccgcggcacccgacgccgttttccgcatcgtgtgtccggccgcaaagacggcggacgtagcgactatcggcggcgacggagctaagattctggtggaggacttggtcagcgcggaggagcgcgtggttgttatcgtgggcgacgagtccgctgcgcaggttgcgttggttagggtttttgagagaacgatggatgaagaaactaagaattcgacagtgtcgtgtaaattggtggcccccagctatcaggttggctgtgtgctcggccgaggaggcaaaatcgtcgaaaagatccggcaagacactggggcccacattagggttttgcccaaagaccaacctcctcttcctcctcctcccggtgaagaattcattcacgaataccagaaacctttgggccaactgaagaaaagcggttctatccggtttcagcttgtttttatg

SEQ ID NO: 9631 - DNA, 392 bp, Glycine max
gattgttcccttacttcatgttggttgcttttgaagctggtggggtactacgatctctcatcttgtttctttcataccccttggtgtggttggtgggtgaaaaccaacttggtttgaagatcatggttttcttgagcttcattggcctcagaaaggacacattcagaacaggatcagctgttctggcaaagttcttcttagaagatgttggattggaaggctttgaggccgtaatatgttgtgagagaaaagtggcatctagtaagttgccaagggtcatggttgaaacatttcctcaaggaccatttaggggttgaatccggttatagcctgcagaattgaagtccttcagtggcttccttttgggagtttttgacagtaagaaccaatta

SEQ ID NO: 9632 - DNA, 1181 bp, Glycine max
cccacgcgtccggtgccatcctgcattatctgtttagctcaaataattttgtgaagcatttttattggtagaaatggagagtgagtcggtgaaacgcagaattcacatgattgctgctcactttgcacccaatgatgatatttcaactacccacgttctgcctatgaactgtagtggcagtctgaactctgtgctccggagatgtgataataaggtgtattttgcacgccaagcatctgcttctcttggttattttatgaggcagacttcaattgaagagggtggctcaactggctttattgctcccaaaacccatcctggtgctgctgcatctgaaggtccttctaatgcaagagcaccatgttttgctaaacctgcaagggcagaatcagtcttcacaaattcagtggtccaaccaatggctcaggaacagggctgtgattttagtacacttgatcctcctacatttgctagaccaagcagacagattagaggagataagttacattctgaaaagaaagcgggctattctgaaattggtggaattgagtggtctccaaggatggatgttgcagaatcagaaggcaaatatgttatcacggtggaagttccaggtgtcagtatcggtgacataagagtggaggttgatgatctaaagttgcgtgttaaaggtagacgctctactagctcttggacagttgcaggttgtccaaatgcttctttttcttcatatcatcggagggaaatactatatggaccatatggggtggtctggccactccctgctggtgtgaacaaggacagaatatcagctgaatttttggatggatttctacaaattatagttcctaaagtttgagtatgactgagcaatattgatttgtagcacatatatgtatacgtatacctataccccgtgcatatagatggagaagaaatgggcattgttctgcatgggccatgtcatgccctacatatatttgtaatgtaatgagcagatgatgggttaattttgatttcatatacaacattaattgttgtgcggcccaagaaatgattcacttaattcaatatttccttaaatttagattataactatattacgtttagttatgctttatattatttttatgtgtaccttaaaatttaccttatatatttttttggtggcggcccgtttt

SEQ ID NO: 9633 - DNA, 556 bp, Glycine max
agacgacagaaggggacagacacaaatcacataccccatttccaaccccacattgaacctaaaaaagcaatgtcacctccaccattttccccccctctctctatttcccttctctttgtcttcctgttagcaccattactcttagctcaatctccaccttctccttctccttcttcttcttcttcttcttctgttgcctgcaaaggcacactatatccaaaactctgccgttccattctctcagccattcgttcatccccttcagacccttatggctatggcaagttctccataaaacaaagcctcaaacaggcaagaaaactagccaaagtctttgaggactttctccaacgccaccaaaaatcaccttccctcaaccatgctgagactgcatcacttggtgactgcagagacctaaaccagctcaatgtggactacttggcgtccatatccgaggagctcaaatccgcaagctcctcagactccgaactcatcgagaaaatcgagagctacctcagtgccgtggccaccaaccactacacttgctatgatgggt

SEQ ID NO: 9634 - DNA, 733 bp, Glycine max
tcagtgaaactggagttgctgttatgctaaatctgagggaccttgattgtcatgctctcagttttggaacgcaattcagctcataacaatgcagaatgaagttccacattcaagtttgttttgcgatgtttgttggtggtgctgctattggtgtatcgtggggcataaagccaagaaccgaaaattgaagctgatagtcgaggaaggctacctgtgtttctttagtgtaatatatttttgtagtattgatatatattgacttccatgtttatttttcttattagttttcagtgtaacatagtatttatacattagttaaaaattggtttgcacaaggatggaagtcagtattattggtttggtctcaacctggctggttcaagaggaatcaatcatctgatggtagaatctccctcttttagtcattaagatgataaaggatggctgcttagacacccacttgagtccgcccgactagtcaaatttgttctttcttggaatcacgtattattcagagaggccaaccaagtagttgatgctttatccaaacatggtctttccttggtactactgatagcattgtttttttttttattcagttccgtcttttctttctgttaagatatgtggtgatgtatattgtctacgaccttccctcgtgggttttaataacagttttctttttaaagctccaaaaaaaaaaaaaaaaaaaaaaaaaaaaatcggccgctct

SEQ ID NO: 9635 - DNA, 986 bp, Glycine max
gccggcgtcatccgcaaaacgacgtcgtcactatctctcacaagtcttccttcccacttgcactctctctctctctctctcactccctcactcaccggtcgccgaatctttctccgcatccgcaaccaccaccgccgtatcctcctttgcttcttcaaccgatggatcggccggcgaccggacctggcgtggacatgccgatcatgcacgatagcgaccgctacgatttcgttcgggatattggctccgggaatttcggcgtcgcaaggcttatgagggataaacagacgcaagagcttgttgctgtcaagtatattgaacgcggagataagattgatgaaaatgttaaaagagaaatcattaatcacaggtctctaagacatcctaacattatcaggtttaaggaggttattttaacacctactcatctggccattgtaatggaatatgcatctggtggagaactatttgagaaaatctgcaatgcagggcgttttaatgaggatgaggctcgtttcttctttcaacaactcatatctggggtcagctattgtcatgcaatggaagtgtgtcaccgggacctgaagttggaaaacacgttgttggatggaagcccggcgcttcatttgaagatatgtgattttggatactccaagctcaggctccttcgaaaactagcatatctgcaaattactttctccataaggttactccttcagtttatcgtggattggcaaatcaccaggagaggaggaagcagagctgctgtaccatgttatatctctaggcacatttgaaagagtggcaccggaatggatgaaggaggacatcatgttcagccctagcatgtgccccatcttctttgaaaggatatctcgtgttatcaagttgaaccactagtgttcttctgtagcattgatccgccgaatctgtatttactgtacatattaactgcttaatttttatttggagaacactaagttgac

SEQ ID NO: 9636 - DNA, 537 bp, Glycine max
  unsure (1)..(537): unsure at all n locations
gactaacgcgtacgtccagncgtcagtaaagcagcgagaggagaacagaagggggcttacgagggaaccaccttaaccggcgtcatccacaaaacgacgtcgtcactgtctctcacaagtcacaagtcttccttcccacttgcaccctctctctctcgccggtcgccgaatctttctccgcatccgcaacctccgccgtatccgcctttgattcttcaaccgatggatcggccggcgaccggacctggcgtggacatgccgatcatgcacgatagcgaccgctacgatttcgttcgcgatatcggctcccggaatttcggcgtcgcaaggcttatgagggataagcagacgcaagagcttgttgctgttaagtatattgaacgcggagataagattgatgaacatgttaaaagagaaatcattaatcacacgtctctaagacatcctaacattatcaggtttaaggaggtcattttaacacctactcatctggccattgtaatggaatatgcatctggtggagagctatttgagaaa

SEQ ID NO: 9637 - DNA, 420 bp, Glycine max
gagacaagacaaagaccatgagatgatagtcgtaggaaccacggtgagaagagaagaagaattattattacacacaaaacaaacgcagttgatgttgctgctctagactgttctgcgactctttacgcaactatattttcgtttttgccgagatagggttttcggttttcttcactgctctctcaccaggggcgagttgtgaatggaagcacaaggcataaagtataaagcataaagcatagttagttgagtcaatggaaggtgttgatcaaagaaatagttctgcatttggtgttccagttccaagaccaccaaaccagaaatctcgtatgccaccatctcaccctagtatcaatgtttcaccttcagcaactccttattcccaataccctcaacgattgcgttctccggggttcttcc

SEQ ID NO: 9638 - DNA, 478 bp, Glycine max
cgaaaaactgttttggtttgatttcatttccgaatacttaattcaccactgtgagtctgtgactgttctgttcatccctattggattttcagccacattcttcttattcccgaatatacacccaaattccactttcctatcctagggtcaccatcaccatgagagccaaattgctcgtgttcccattacgtggcaggaactggtgcttctccagaaccatcgatcactctcttctctccgcttcccatgattcctctcaatcatccccctcaaccctcaaaggcttatggaccaacatcaacgtccgtgataaaccccttaacgccaaagccgagctctttgtcgattacatcgccaacaagatgaataatgcttggattggcttggagaaggcgccggaggggtctttcaagaacaagattcatgggttggggttgcggctcttgtcgcgggttaagccctctgagatatttttgaa

SEQ ID NO: 9639 - DNA, 394 bp, Glycine max
gaaaccgcgtcgatttttactttctttcgccatgcgtttttccttctccaacccacattcttcttattccagaatatacacccaaattcctctttcctagggttttagtccaaagggttttggaggcatcaccatcaccatgagagccaaattgtttgtgttcccaatacgatgcaggaactggtgcttctccagaaccatcgatcactctctctccgcttcccatgcttcctctcaatcccccttcaaccctcaaagacttgtggaccaacatcaacgttggtgataagcccctgaacaccaaaactgagctctttgtccattacatcggccacatgaatgaatattgcttggattggcttgcgtaaggcgcccgaagggtctttcaagaaca

SEQ ID NO: 9640 - DNA, 456 bp, Glycine max
gatatgtcaggagttcgacttgtccgtggcattgtgaaagatgttgaagagaagaagattatcctaaatgatggtactgaggttccatatgggttgctggtatggtctactggagttggtccatcagctattattcgctctttggatcttcctaaagctcctggtggaaggattggcattgatgagtggcttcgtgttcctacagtagaggatatattctcaataggtgactgcagtggatttgttgaaagtactggaaaaacaccactaccggctttagcccaagtggcagaaaggcaaggtaaatatttagcattcttactaaacaaaataggtaaagccaatggaggccgtgcaaacagtgcaaaagatgtagactttggggatcagtttgtttacaagcacatgggaagcatggcatctatagggagttacaaagctctagtggacctcaga

SEQ ID NO: 9641 - DNA, 662 bp, Glycine max
ggagaaagaagaggtgatatctattaatgaaggtttgatgtcagaactcgaaggcttgactgaaaaactgaatacatcaacctctgaactatataatttgatggaggaaatttcagctcttaaacaaagattggaagaatctgatatcaaccaagaaaaattgaaaagctctgttgaagtactgatggaagaaaaggaggagttggctatgcaactcactgattcccttttggaaatagaggaggaaagggcaatatggtctgccaaagagaaagatgcacttctagccagagaagaacaagcaaagtcaaacaatgtgcaaattacatcattatcaacaaaattattagaagtgaggaatgaattggaatcttgtagagaagaatgcatgaccctacgtgaaagattgactattacatatgaaaatgcacatatcaaggaaaattccagggaaaaggtttcagaattggaccacctggaaaatcaccctgaaacaaccaatgcttgagagcaaacaatcccaagaaatgtcaaaagccaattctgagatgcaatctttggagcatgagctgcatgacagtcccaaggaggagaaagaaaatgaacttcggaaggaaatacatgttcttgataaaagagattatctatcaagccctaacgtg

SEQ ID NO: 9642 - DNA, 386 bp, Glycine max
ggtttcagtttgttgaggttataccaccttcctccaatcaatatactctacctatctatctcttcttctttgcaaatcaacaatgggtttggatttgttcttttggtttgtgctttgtttgcctctcaactttgcttttttagcctcaacgttctaccaggttttgatgttgtctgacttggaagctgactttatcaacccctatgacgctgcatctcggattaactactttatcgttcctgagtttattgggcacggattgttgtgcgctttctgccttttaactggtcattggatcatgtttttgaataacgttccggtaaaatgctaccatgtgatgctgtacatgaaacggaaacatctcattgatgttactgaggtgttta

SEQ ID NO: 9643 - DNA, 428 bp, Glycine max
gagagctcagtagacggccactttcagtcttctgatatgaaccgtcaagatccaggtaggcatggttaccatgattcaaagcctacttattcctttacaactgatatccatggtgttcagcaccaaaatgatgcctcaagaaacaaaaatgacctctatgcattagttactcatgaacaacctcacaagttcaatggtgtacttgaatcacttaaacaagctaggatatccctacaacaggaactcaagagattgccactagtagagagtgggtacactgctaaaccctctgcttcttttagtaaaagtgaggatagatttgaagttcctgttggatgttctggtctcttcagaatacctacagatttttctgatggagcaactgctagattcaatgttaaagatcctactgctggatttggttcaaa

SEQ ID NO: 9644 - DNA, 509 bp, Glycine max
atttgtaaatagaaatgatcagtcatggatcctgataagtgaatttctatactctgggtttttggtggatgattatgttcatcaaggtttgttttttcccacttgctttccataaatgtgaaattgggaacttgctgatcattttataagctataattcctgtagagtttttttttttcctgtgaaagcattaacgataatgctcggagatcacagttataaccttgattttgtcactgaaaagttttggctttgagtttcaaggaccagcactttgtcagatttaatattgatgttatccttggtatccatgaggaaaattcttccatctttgaaggaaactacataggattgaagaactctagatgtgtgtttagtgctggtttttattatgaattgtaaaccaagtagccagaagtagaagctaaattattcctagatgtacgatttttatgcttttaaggccggacgcgcgcgcatatatatatatatatttcgccaattatcac

SEQ ID NO: 9645 - DNA, 388 bp, Glycine max
attcctgtagagttttttttttcttcctgtgaaagcattaaccataatgcttggagatcacagttataaccttgatttcgtcactgaaaagttttggctgagtttcaaggagcagcatttgtcagatttaatattgatgttatcgttggtatccgtaaggaaaattcttccatctttgaaggaaactatataggattgaagaactctagatgcttttagggctggttttttttattatgaattgtaaaccaagtagccagagtatgtagaagctaaattattcctaggatttttatgcttctcccggacatatatatattgacaattatcccaagcttgtatcaatatttaattgtagttgttagaaaaatgtcaagatttcctataa

SEQ ID NO: 9646 - DNA, 651 bp, Glycine max
aggaagaggacatgggttgctgatgctgaggaatgcaagagaagaggttctattgagactgcccgagctatatatgctcatgccttgactgtcttcttaactaagaagagcatatggatcaaagcagcccagctggaaaagagtcatggtaccagggaatctcttgatgcattacttcgtaaagcagttacctacagaccacaggctgaagttctttggcttatgggtgccaaagagaagtggcttgctggagatgtgcctgcagctcgtgctatcctccaagaagcttatgctgccattcccaattctgaggaaatatggcttgctgctttcaagctagaatttgaaaaccatgaacctgagagagctaggatgctgttggctaaagccagagagagaggaggtacagaaagagtctggatgaaatcagcaattgtggagagagaactggggaacattgaagaggagaggagattgttagatgaaggtctgaagcaattcccttcattctttaaattgtggttgatgcttggccagcttgaggaacagcttgctgagaatgcaaagaggcttgatcagcctgaaaagtggcttgatcacatgaatgcagctaagaaagtctacgaatctggattgagaaactgtcctaat

SEQ ID NO: 9647 - DNA, 365 bp, Glycine max
gtctcacttctcctttcctctttcatgacgcccataacctttcgatatacccttctctctgtctcttgaggtcactagaatttgttaaccttctctctcgaattctcttctctcgaaccctgcggctgcgcctcgaggccttgcgtccgtcgccattgctcgtgatcgcgagtgagctgaattgaagacaacttcagaatcagagatttggtgtagtgtcgtggttgtttctatttagcggtgatggccaaagcatcgatatattcatttacatactcgtcgcagtggcacaacgaggaacttatggatcctttgatttttgcaaagttcaaatcgttcctcacaaaggagtatgatccttcatg

SEQ ID NO: 9648 - DNA, 634 bp, Glycine max
gaagacatatatgatacccaaataggtattcagacaatgcaaaatgagcttggggtattgcaccacaaggtctacgccacgcaagtttgggatctcattcactgtgccacaccgtgtcactgcagagatcaatggctagaagagagtcatagggaagcaccctttgaggatcactagaattccctcaggaggaccaagtcagtttcataggatcatgcaagaggttgacaaagggccatcatccactttgactctgaagaagagaaaaaattatgatgatgatgacacaaaggaggagtatttggttagtcacaaaagggcctaccatagaagccgcttcaatgattggtatgtccgagtgttttattttgagaattgtggtcagaaccaaccctcagaacctaacacatgagggagggctcttttcactcacttggttcaactttgaagttgctcgccttgctttctttcaattctgtaagtaaatgttatgttataggtgctaccggattaattagtattattattatccttgtaaagcttttgcattttagtttttttttatattttttttaatctttacgaatcagaaaccagggacaagggatctataatatttcatgcattctgcgtg

SEQ ID NO: 9649 - DNA, 1672 bp, Glycine max
gaatcttcctaatcctaatcgcttattaacgtcgaggttacttgtccgtctaaccaactcaacagctcgtcatcatcctcatccaccttcgttagatttccccctcaacattttttgtttttctctccatcccaattatcgccacctcctctttcttcaaatttcaatctcagaggatgggtggtgaggaattgtgtttgatggagaactcagggaaagggaagaggctgtggaagaaggtgaagtaccagctggtggagtaccactccttgcccggttatttgagagacaacgagtacattctcggtcactatcgatccgaatggcccatcaggcaggttttgttgagcgcattcaccatccacaacgaaactctcaacgtttggacgcatttgatcgggttcttcatatttctggcattgaccatatacactgccatgaatcttaattcgctacagcagtttcctgacatgctcaagaaggccgacctgcacaaattacaatcagaaatcttgacgtgtctcccttccatgcctgatttgcacatactcagggagggaatctcaagttggcatattaaagaatatctgtacaattgtttgccacatagtgtaaaagatgacttggcgaacataatagcaccactcatgattagaccaattacaaggtggccttttttcgcatttttagggggtgccatgttttgcttgctagctagccgtatttgccatctcctctcttgtcactctgcacgcatggcatacattatgctcaggctcgactatgctggaattgcagccctgatatctacctctttctatcctccagtatattactcttttatgtgttacccatttttctgcaacctttacttgggatttatcactgtattgggcatctccaccatcttgttttctctactcccagtgttccaaaatccagaattccgcaccatccgagcatctctcttctttggaatgggtttatctggtgcagcacctattctgcacaagctttatctattctggggccagccagaagtgtttcacacaactgcttacgagattctgatgggtgttctctatggaattggagcattggtttatgccactaggattccagaacgatggatgcccgggaaatttgacattgccggacacagtcaccaattgtttcatatattggtggtggctggggcatacgctcattatcgggcagggttagtttatctcaggtggcgtgaccttcaaggttgttgatttgatatgcatctatgaacgaacagtggttgaatactctgctgttatgtaactagtaagtatgtgctagtatacactcctccaactgatgtgaatttgtgattccggtaggggatgtttatgcagccatagggattatgtacgcacttagaacccttagcacacaagtcactagtcagcaataaaaattttatttggtctatcgtgacatactagaaacatttttcttctgcctgcatgtatcttgttattcaagttgtattattagccttgtgttttgctctggaagtcgggatactattttggaagccgaagtggcttctcaagattatagtcccaagggttgccctctcattcctgcaacaaaattgtgtattttttatttttaattaaaaatcatgtggatgttatgc

SEQ ID NO: 9650 - DNA, 789 bp, Glycine max
ttccattccaattatcgctacctcctccttcttcttcttcaaatattaaatttcacagaggatgggtggtgaggaattgagtttgatggagaacgaaaggaaagggaggaggctgtggaagaaggtgaagtaccagctggtggagtaccactccttgcccggttatttgagagacaacgagtacattctcgctcactatcgatccgaatggccaatcaagcaggttttgttgagcgctttcaccatccacaacgaaaccctcaacgtttggacgcatttgatcgggttcttcatatttctggcattgaccatatacactgccatgaaaattccgaaggttgtagatcttaattcgctacagcattttcctgacatgctcaagaaggccgacctgcacaaattacaatcagaaatcttgacgtgtctcccttccatgcctgatttgcacagactcagggatgaaatctcaagttggcatattaaagaatatctgtacaattgtttgccagtaagattttccagtagcaatcatactgatgcatgtgttctgcttagtgtaaaagatgacctggcgaacataatagcaccacttatgattagaccaattacgaggtggccttttttcgcatttttagggggtgccatgttttgcttgctagctagcagtatttgccatctcctctcttgtcactctgcacgcatggcatacattatgctcaggctcgactatgctggaattgcagccctgatatctacctctttctatcctccagtatattactcttttat

SEQ ID NO: 9651 - DNA, 644 bp, Glycine max
aggacgccttgcccatttctattactctttctttattcgtcaatagaagaagaagatcgaacgaaggctccttccgttattccattcagcgattccatggtggcgagaggcgtgccggcaatggcggcggtggccgttgccgcccttgacttgacggaatcctccaactggtggcgggacatcaaccgctccccgctctggcaggatcgcattttccacctcctcgccatcctctacggaatcgtcgccgccgtcgctctcgttcaattagtgcgaatacaattgagagtgccggaatatggttggaccacgcagaaggtctttcactttctcaatttcattgtgaatggggttcggtgttttgtttttgtcttccgtcgggatgtgcagaagttgcagccagagattgtccaacatatcttacttgacatgcctagtcttgctttctttacaacttatgcgctgttggtactgttctgggctgagatttattaccaggcacgtgccgtatctactgatggtctcagaccaagtttctatacgattaatgctgtggtttatgttattcagattactttatggttaatattatggtggaaacctatcagcgctctagtctcctgtctaagatgttctttgcaggg

SEQ ID NO: 9652 - DNA, 321 bp, Glycine max
tattctgctcgagtataaaataaataaattgttacagaacaaggcgaaagaaaaacatttgaatatttgtcagaaaacgttaaaaaaagtagtggtagtaataattattagatagattaagttgcatttctgttactcttttttttctttatttcatcaacagaagaagaagaagaagatcgaacgaaggctccttccattattccattcagcgattccatggtggcgagaggcgtgccggcgatggcggtggtggccgttgccgcccttgactttcacggaatcctccaactggtggcgggacatcaaccgctccccgct

SEQ ID NO: 9653 - DNA, 347 bp, Glycine max
  unsure (1)..(347): unsure at all n locations
gattgcatacttgttagctagagtgcctatggggaacatactctatcttggtggtccaaatattgcctcagaaatctacaacaaggagtatgccaatgcaagaatctgtggacctgagaaatggcggaaacctctggcgaagtttttacgacaaccacactttattgtctgggataacagtgacctcgtcacgcatgaggtcatgggtggcttgaaaaatgtctatgcaataggagctggaatggtagctgcccttaccaatgagagtgctacaagcaaatctgtgtactttgcacactgcacgtcngaaatgatatttatcactcatttgttggctgaagaacctg

SEQ ID NO: 9654 - DNA, 1371 bp, Glycine max
cggacgcgtgggcggacgcgtgggcggacgcgtgggagaaagaggagcacataataaccctcaaactccatttcactcacagaaaaatagagatatagagagagaaagtgctgcagaatacacacatacacaccacttcttcaagagagagaggtgtgtgaaggaaaataagaactgaaagaaaaattttgcaaaggaagatatgaaactttgcaaatttaacaactgagaaagaagatctgtgatttctctctctctttttgttgttgttgttgtttgcagagaaaatcacacaaaagcacacacacacacacacacacacacccttcttcgagtctgaatttgtatcattgacaattttttcacaaagggttgttgtctcttcagagagacacagatcttgaggttggaggcaaaatccttcacacactttggtggttatggaaacagaagagaggaaccagaaagattgcaaggcttcggagccagagtttttcttgcagtgggggaacaggaagaggctgagatgtgtgagggtgaaggaccctcggatttcagcgaggctcaacggtggaatcagaaggaaacttggttctgcaatggagcatcatcgctctggcctcactgtgccagaaaaagaacatcatcaccatcatcatcatcaacaacttaatcgccttacaaggaattccgacggggcgattctccggtcatcggccggcgagacaaggaaatcggcgtcgccggagaaggaggaccggtactacacgacgcggggttcggcggaagagaacggcaaggtcaccggcggcgaaggcatcaacggcgaagaacgagccctagtttggcccaagctctacatcactctctcaagcaaggagaaagaggaagattttctggccatgaagggttgcaagcttcctcagcgacccaaaaagagggccaaaatcattcaaagaagcttacttttggtgagtcccggggcgtggttgactgatatgtgccaagagagatatgaagttagggagaagaaaagtaacaagaagagaccaagagggttgaaggctatgggaagcatggaaagtgattctgaatgaatgatatgatggaaagaaagaaaaaaaaatcaattgagcggatccacaagaagggggaagaaggaagcccttttaagaagcatgaagaagaaatgttttggaaatggtgatgatgatgatgttgtttgaattgatgaatggtgaagataatgatgattcaagttttttttatatttgtgtggcatgtatgttgccccctcaatgtttttttgtaaacgagtaagattcgatccgatccaatccatttcaattaattaagcaaaaatattttctc

SEQ ID NO: 9655 - DNA, 668 bp, Glycine max
acgcgtaagtaagagaagaagagaagagaaacaggagcagaataaccctcaaactccgtttcactctgagagaaagtgctgcagaaaacacacccaaacagagagaggaagaggtgtgtgagggatagactaagaattgaaagaaaaaacgtttgcaaaggaagaaaccttgcaaatttaacaccagaaaagaagatctgtgatttctctttcttttttctttttgtttgcataggaaaaaaacacacacccttcatctgagcctgaatttgtatcattgagaattttcaaaaaggattgtctcttcagagacacagatcttgaggttggagtcaaatccttcacactttggtatggagacagaagagaggaaccagaaagggtgcaaggcttcggagccagagtttttcttgcagtgggggaacaggaagaggctgagatgtgtgagggtgaaggaccctcggatttcagcgagactcaacggtggaatcagaaggaaacttggttctgcactggatcatcatcgctctgggttcactgtgcccgagaaagaaatctctcatcaccaccaccaccatcaacaacctaatcgccttacaaggtgctgaaaataaacaacatcaactaaagggttttcttcatgattttctttcccctcttttgttacc

SEQ ID NO: 9656 - DNA, 768 bp, Glycine max
cgtccactttttgagaacaagagggcattggatctggtttttctgccaaattgtctcaaattggcggattgttatttatttgtttgtgattggtgacgttgaatttggttgcaggaattccgacggggcgattctccggtcgtcggccggcgagactaggaaatcggcgtcgccggagaaggaggaccggtactacacgacgcggggttcggcggaggagaacggcaaggtcaccggcgacggcaacaacggcgaggaacgtgccctagtttggcccaagctctacatcactctctcaagcaaggaagaaagaggaagactttctcgccatgaagggttgtaagcttcctcagcgacccaaaaagagagccaaaatcatccaaagaagcttacttttggtgagtcctggggcgtggttgtctgatatgtgccaagaaagatatgaagttagggagaagaaaagtaacaagaagagaccaagagggttgaaggctatgggaagcatggaaagcgattctgaatgatgatgatgatgatgatgatggaaagaaaaaacatttgagcggatccgcaagagggggaagaaaaagcccttttaagaagaagcttggaggaatgttttggagatggtgatgatgaagatgatgattcaagttttttgtttttatatttgtgtggcatgtatgttgccccctcatgtttttttgtaaacaattcgatccgatccgatccgatccatttcaattaattaagaaaaaatattttctt

SEQ ID NO: 9657 - DNA, 315 bp, Glycine max
ggccgtttctagtgcgattccatatttccatccggtttcgtctccgtcttctttcttttcccctgaaactgaaagtgaagacagcaacaacaatgtcttcttcatcttcttcgttcacgagtctccacatcacggcctagacgcgatagtgaacgtcaactccctcttcaccctcgccgtcttcatcggcctaacctggaaccccaacgacccttccaacagcctcaactccgatccggcgtgtgcccccaccggcggcatcggcgaaaaccctatcgccttccacgtctactctttcagcttctttctcttttt

SEQ ID NO: 9658 - DNA, 407 bp, Glycine max
gcgtccgcggtacgcgtggtgcggacccgttggccggcttttaataagacgacagaaggggatctacttcgccagattgacatgcgagacaatcattacactgattggatggaatatcatgaggaatggattaatatctggaaaaacaaacacaacgatattttagatgggcaatgggttgaaggaatagtgacacatacaccaacatacatggaatggtatagaaaaaacactattttgttcttgtctgttgaacaacagctacatgatccatgcacaacaattatacaaaatgatgcagggtcaggtgttgaacaaacacattttgaaattccacatcctcagtcaatgtattctactccttcacctgttcatcaaacttttggccacactggcgagtcagtcac

SEQ ID NO: 9659 - DNA, 921 bp, Glycine max
agctactagaagcccaatccgtcacgaaaagtctagaccctgtcgtgtaacataaaaaccaccgaagaaaacatcactgcgccgcgctgccacaccaaataaacacaaacatggacgcatcaaaactcaatcaattgaagcatttcatcgaacagtgcaagtccaacccttccctcctcgctgatccttcactctccttcttccgcgactatcttcaaagtctcggcgcgaaacttcctgagtctgcttattccgaatcgacgggcgtggagagggatgaggacatagaggatcttacggaggagcacgagaaggtagaagaagaagaagaagaagaggacgatgtaattattgaatccgatgttgagcttgagggtgaaacctgtgagcctgatgatgatcctccacagaagatgggagacccctctgtcgaggttactgaagagaatcgtgatgcatcgcagatggccaaaattaaagccatggatgctatttctgaaggtaagttggaggaggcgattgagaacttaacagaagctatttcactcaatcctacctctgccataatgtatggaactagagccagtgtttacatcaaaatgaagaaacccaatgctgcgatccgtgatgcaaatgctgctttggagattaatcctgattctgctaaaggatacaagtcacgtggcgtagcacgagcaatgcttggtcaatgggaagaagctgcaaaggatcttcatgtggcttcaaagttagactatgatgaggaaataaatgctgtacttaaaaaggtggaaccaaatgctcacaagattgaggaacaccgtcggaagtatgaaaggctgcacaaagaaagagaggataaaaaaaaggagcgtgagaggcagcggcgccgtgctgaagctcaggctgcctatgagaagg

SEQ ID NO: 9660 - DNA, 664 bp, Glycine max
gaagctcaagtcaagaaagaggggaaagatgaaaagcttgatggcgatgctgcattgaacaaatttttccgcgaaatatatcaagatgcagatgaggatacaagaagagcaatgaaaaagtcatttgttgagtctaatgggacagttctgtctacaaactggaaagaagtgggaacaaagaaggtagagggaagtcctcctgatggcatggagttgaagaaatgggaatattaagacattttctggatcagtgttgcacatattttgtgtgtccgtcttcgctaggacctgaattcatggttgttggttgagaggacaaggctgttgtctttggtgaatatattgcaactttctgttttactgtcccttttaagctctgctttctattaatataactgactatataattcatctatcaaatattataattacttaaattgatagatgctaaaattcaaaaacagtgtagttataaactagatgacttttctcctctaaactagaacaattccaaaatcctgatgtcttgaaagataatataattgtacattgtaccaattcaattatttaaatttaatctattattaaatctggaactcaacactacgtgattggtctatggaaattaactgtaatcctgaatgaacttatgatgtttaattct

SEQ ID NO: 9661 - DNA, 508 bp, Glycine max
ctcaagtcaagaaagaggagaaagacgaaaagcttgatggcgatgctgcgttgaacaaatttttccgtgaaatatatcaagatgcagatgaggatacaaggagggcaatgaaaaagtcttttgttgagtctaatgggacagtgctgtctacaaactggaaagaagtgggatcaaagaaggtagagggaagtgctcctgatggcatggagttgaagaaatgggaatattaagacattttctggatcaatgttatacatattttggtgtgagattatactttggtttgtttttgttggttagcttaactgctgaactaaagatacttattttctttaattttttatttattttcatgaggtgtgtccgtcttcgctaggacctgaattcatggttgttggttgagaggacaaggctgttgtctttggtgaatatattgcaactttctgttttactgtcccttttaagctctgctttctattaatataactgactatataattcatctatc

SEQ ID NO: 9662 - DNA, 973 bp, Glycine max
gacacacactgaaacgaggcttttcagtttttactgcgtttccgttggcttcgttatgccactgagagctcagattatgactaaggataattatttattggattagacattcacaatttgtgtcaaactggactgatttcccattatcactactggccaagaatgagcttgctttcaagaataaggcattatttacccaatggtttatgtagacaacctcttcatccaacagtagtgcggcttaacgctagtaacttaaatgtattttcaagacattttggtcaacctgcgaggaaagaggaggaggaggaggatgtagaggaagtggaaattaatcaaagaagtctcccagctgattttgatcctgctacatttgatcccaatgatcatcgaggccctccatcagagagagttttcaggcttgttgatgaggtcgcttctcttacggtagctgaagctgcagaattgggtctcactctgatgaagaaaatgggagtgaaggagatgcctaatgtgggatttatgaaagcaggagctggaaacctggctggaatggcagcgaaagcaccaacagcagcaaaggaggagcaaaagccagaaaaaactgtgtttgaattgaaactcgagtcctacgaagcggcttccaaaattaaaatcatcaaggaggtccggggctttactgatttaggtttgaaggaggcaaaggatttagtggaaaaaacacctgctgttataaagaaaggtgtttcaaaggaagaaggggagcagataatagagaaattgaaagctcttggtgcaaaagttgttatggaatgaagtgatgtatgttgtttcttccagctttcaatattttagttgtctgaaattttgaaaatttcagattgctggccaaggatactgcaaattttgctagtgctgtcactgtgtgttaattttttagcataaactggaatttaattttaaaaaaaaaaaa

SEQ ID NO: 9663 - DNA, 567 bp, Glycine max
cgagtttccagtatagtagagcaggataaaatatcacgggatcgaattgaattaagatatttgaaaagcaaagctaagaagaaatgagaaaataaaaaggatagcatatcatatgatatcagaagtgagtgtctcataatggaagcataacagcgaagtgatccaaagaagaagaaggatgcaggagaactactcataccaatcgtatccagattccggcgagtcctcaccacgatccagagagatagacttcgacaaccctcctccatgggacgaccaaaactacaaagccaagttcatgtgcagctacggcggcaagatcctccctcgctcccacgacaaccagctctcctacgtcgccggcgagaccaaaattctcgccgtcgaccgctccatcaagttctccgccatgctcgccaaactctccgccctctgcgacgccccagacaacaacaacctcacctttaagtaccagcttcccggcgaagacctcgacgccctcatctccgtcaccaacgacgacgacctcgatcacatgatgcacgaatacgatcgcctctatcgcgc

SEQ ID NO: 9664 - DNA, 489 bp, Glycine max
cgggaatttaagatagtatttgaaaagcaaagctaagaactggcgtccggggaaaataaaaaggatagcatagtgccataatggaagcttgagaaggaagtggtccaaagaagaagaaagatgaaggagaactactcataccaatcgtatccagattcaggcgagtcctctccacgctccagagagatcgacttcgagagccctcctccatgggaccaccaaaactacaaagccaagttcatctgcagctatggcggcaagatccacccacgctcccacgacaaccagctctcctacgtcggcggcgacaccaaaatcctcgccgtcgaccgctccatcaagttccccgccatgcttgccaaactctccgccctctgcgacgcccaagacaacaacatcaccttcaagtaccagctccccggcgaagaccttgacgctctcatctccgtcaccaacgacgacgaccttgaccacatgatgcacgagtac

SEQ ID NO: 9665 - DNA, 509 bp, Glycine max
cttgtatatgagcctccaagggatggtcccacattgtgggaaattagtattcctgatagatccgctgcagaattttatgctcctgatcccagtccacaacatattaataagctttttatcaaccatccagacaggttcaggcagtatggattgtgggataggtattcagaattgtatcctgatgcagatttggtttacacaattggtgttagtgactatacgaaggattggttttatgcacaggctccgaggaaaaaagtggataacactcttcaaggaacaacttggcaaatcaagttcgaaatctgtagtgttgttaaaggaagtacatacaaactgagagttgcaattgcatctgcaacattagctgaattgcagattcgagtaaatgatcccaatgcaaggcgacccgtatttaccagtggattaataggaagggacaactcaattgcaagacatggaattcaagggatctaattggctgtaccatgtgaatataccaggttctc

SEQ ID NO: 9666 - DNA, 2210 bp, Glycine max
ctcgagctcgtttttctctagggaattcgcggtaaacaatgatgcggaaggtggctatgctgtttgatttgcttctttttttttttttaatttgcttgttgggtttggggtgtgcttgttgtagatttgtcagtggtacggaccaaggatccggagtggttcttcttctgtccgcaggaccggaagtatccaaatgggcatcgattgaacagagcgacgaataatgggtattggaaggcgacggggaaggatcgtaaaatcaagtctgggacgactttgattggaatgaagaagactttggtgttctacactggtcgtgcacccaaggggaataggaccaattgggttatgcatgagtatcgccccactttgaaggagcttgatggtaccaatcctggacagaatccatatgtcctttgtcgtttgtttaagaaacatgatgagagccttgaagtttcacactgtgatgaagcagagccgactgcttccactcctgtggctgcctattactccacagaggaaatacaatctgatctggctgttgttgcaggatcgccgtcacaagttacagaagatgataagcatcagtcaatgatccctgcacactctgaggaagcaatatccaatgttgtaaccccggttgttcgccgtactgatggatatgatgcttgtgcatgcacaaaatcaaattgagttaccaactgcggaggagtttcaaccattgaactttgatatatattatgacccaagaagcgagctactggatggcaaattattctcccctgtacttgcacatattcaaccagaatttcattatcaagcaaacatcgaatcagatgatcgatatgggcttcaatatggtacaaatgagacaaacatgtcagactttttgaattcagttgttaactgggatcaagtaccctttgaggatcccaattgtcaacagcagagctaccccttgtttaatgttaaggatagcgtattaagcagcgatctagattctgaacttgccattatgacatgtatgcatgctggttatgcggagggggcaattgacggaaggattcctttggtgataacttcagaattttgcagcaccactggcatccccgttgactgtgttggtgacgagcagaaaagcaatgttgggttatttcaaaacaattcccagagagcttttactgatgttaatatgggtcaagtatacaatgtagtcgatgattatgagcaacaaagaatctgtagtgcagttgctagtggcaatactggaatcataaggaggcatcgtgaggtacgaaatgaacagctaagcataaactcaacacaaggtactgcacagaggagaattcgtttgtcaatggctacacatggctcaaataagacggtgaaaagtgaaagttgtgcacaagaagagctttatgcaaaaccagtcattgctatggaggagaaagcttcagaaagccatatttctgatgaaagttctactcttactaatgacgggaatgaactgccgaagacatccaaatcatccggcaaaagaaagatttctcgacaagctacaaaagcaggctcaaccttggggttgaaagactttttattgctcagaagggtgccttacatttcgaaggcttcctcaaatcgtgccaagtgctcttctgtttttgtagtttctgcctttgtaatggtcaccttagtggtctttactgacatctggggatatcttaaattttaaactgctaggagatcattcctttgttgttttttttgcctccatttcctttttgggccatgagtggaggtatgtagggtcttcttagatttgttgatagttcaatttataggtgagtgcacttgtagttggtatatgtatgctcacctggttggcttgtctgtttctgttgctgtacatcatgtatacatttttttttccaactttttatcacctccttttaagtttgtggcttctctatttcaaaaaacaaagggtgatagaaagacaaaaataatggctggaaattttgaattacatgcgagtgttttgaattatgtagccttcaatggtaaatttagcgatgctaatgaaatcacttaaaataatggccggaaatactataccatcttgggaatattaactgctaagtgggcgtgcacatttatcgcagctcgctaaaatcacgagcagcgctgccatttggctaatctgtatgtgt

SEQ ID NO: 9667 - DNA, 438 bp, Glycine max
ggaaaaaaaactgtatatataatgtacaagaacagagtctacagactagccaaccatgtgagcatacatataccaactacgtatgcactcaaatatatattgaactatcaacaaatctaagtagacctacatgcctcccctcaattggcccaaaaaagagatggaggcaaaaaaaaaaaaacaaaggaatgatctcctagcagtttaaaatttaagatttctcaacaagttacaaaagcaggctccaccttggggttgaaagaccttttcttgctcagaagggtgcctcacatttcaaaggcttcctcaaatcgcaccaagtgctcttctgtttttgtactttctgcctttgtaatggtctcattagtggtctttactgacatttggggatatcttaaattttaaactgctaggagatcattcctttgtttaaaactt

SEQ ID NO: 9668 - DNA, 2376 bp, Glycine max
  unsure (1)..(2376): unsure at all n locations
tctcgagccgaatcggctcgagcacgcaccaaccacccaccttcagtttctcagcaacttcgctttaacccgtgacggaaaaactcaaaaagcagcgtaaatcaaaatccttggaatcccttttgattccctcacttcagttttcaccttattcatctcaaagatttctcctttctctcctttcctctctctttcgccttctgggtgttttcaaaacgcgcttaaaaccgtgatgggtgccgtcgtcgagtgttacccacagccgcgcacggcggtgctgtccctcaacaccctgccgttagggttccgtttccgtcccaccgatgaggagcttattgactactacctgcgctcgaagatcaacggaaatagtgacgatgtttgggttattcgtgagattgatgtctgcaaatgggagccttgggacttgcctgatttgtcagtggtacggaacaaggatccagagtggttcttcttctgtccgcaggaccggaagtatccaaacgggcacaggttgaaccgagctacgaatcatggctattggaaggcgacggggaaggatcgaaagattaagtctggctccaccttgattggaatgaagaagactcttgttttctataccggtcgtgctcccaaggggaagaggaccaattgggttatgcatgagtacaggcctaccttgaaggagcttgaaggaaccaatcctggacagaatccatatgtcctttgtcgattatttaagaaacaagatgagagtcttgaagcttcaaacggtgatgatctggagcggactgcttcaactcctacaactgccaattactgtcccgacgaaatacaatctgattcagctctggttccagcatcttcctcacaggttactgaagatgataagcctctaccagttatttccgagaactccgaggaagcaatatccaacattataacccctggtgatattcatagtgacggatgtgatgctcctgatgcacaatatcaaattgttgaaccagttgcagaggaggatcagctgttgaacgtggacatattttatgacccaacaaatctgccattagacgacaaattattctcccctgtccatgcacatttcccaacagatttttattatcaagctaacaatcaatcagaacttcagtatggtacaaatgagaatatttcagaattttttgactcggttgttaattgggatgcgttctctcatgatactagcagtctagatctgagctcatccttccttattaataatacggacaatggatcaggcagtgactcggatgttgaaatgaccaatatgccacatctgcaagcattacataattatcctaaggaggcagttgagcagaagagcaatgtgggattatttcagaacaatttccagatggcgttgtcaaatgatagtactatgggccaagtgcacaatatggtcaactattgcgagcaaccaagaaactttgatgcatttgttagtgctgatactggaatcagaataaggactcgtcctggaagaaatgaacagccaaacatggacacgatggtacaatcacaaggtattgcaccaaggagaatacgattgggagttgttaggcgtccgcttggttcccaggagcagcaagatgggagttgtgcttgtgccccagaagaccataattcaaaaaccatcattagtgcagagaaaaaagcttcagaatcagaaaaccatgctgccgatgggagttccactgtttctgacatgagttccactgttacagatgatgtggatgaaccagaggaggcatctcccgagtcaaccgacctaagaaacattagtgagaaacatgttgcaactgcagaatccgtcgcagggtcgaaagtccttctagtgaacagaagggtccactacacctcaaaggtttcctctaaccgtgccacgtggtctaatgttctcgcagtttctgccgctgtattggtctcagcaatactccttgttaatatatgggcatatgtcagatcttaaactgcttacatgtagtggaagatcatttcttttgtgcgaaatttgcctccattgcttttttgcccggttaaggaggcgtgtaggattgacttgttctgacttgttgataacaatgttgtacaatatatatgtgcatatgtatgtagtagtcattccgcaatatggtagcatagctgtctagtatgatagacacgtctgtgtcgtgttgccgcagttagattcacagtttgaccgtatccatttttgttttgaggttaagtttagttttctctcttggttagtgataataacacgcagttaccctgtgtttttgagtgtcactttaccacttgtgctttgttnngatgtgcttttgttgtatctct

SEQ ID NO: 9669 - DNA, 503 bp, Glycine max
gtgatttgatttttcatacactggaattattgatttagtttctatgattgatgttacctacaggagtttcaaccattgtactatgatgacccaagaggcgagctactggatggcaaattattctcccctgtacttgcacatattcaaccagaatcccattatcaagcaaacatcgaatcagatggtcggtatgggcttcaatatggtacaaatgagacaaacatgtcagactttttgaattcagttgtgaactgggatcaagtaccctttgaggatcccaattgtcaacagcagagctaccccttgtttaatgttaaggataacatattaaacagcgacttagattctgaacttgccaatatgacagtgagtaacagctcttacactattatatcttttaatctttctaggtaggttctgccttgatagtaaaacatagtagtttccaacttcaggtgtcagctctaacaatctaacatggtttacttgagtctcctgtataa

SEQ ID NO: 9670 - DNA, 517 bp, Glycine max
gttattcttgttgtttattcttttgtttcttttgattgaatgattctctttgtgataactttataattttgcagcaccactggaaaccccgttgaccgcgcaggcgacgagcagaaaagcaaggtagggttatctcaaaacaattcccagagagcttttactgaggttaatatgggccaagtatacaatgtagtcgatgattatgagcaacgaggaatctgcagtgcagttgctagcggcaatactggaatcattaggaggcatcgcgaggcacgaaatgaacagctaagctcaaactcaacccatggtactgcacagaggagaattcgttcgtcaatggctacacatggctcaaataagatggtgaaaagtggaagttgtgcacaagaagagcttaatttaaaatccgtcattgctatggtaagaattttgtttttttagcttctgtccaaagagaagagattgtctttgcatgcgaaatgaggtttgtttttttttttgtaggaagagaaaagct

SEQ ID NO: 9671 - DNA, 403 bp, Glycine max
ggttgagtatattttcttttggtcataaccactttgggagagagagagagatggcttacaacaaaggggtgcatagcagcagtggagggagtcacagaggaaggccttatgtgttggtattgcttatcacatttgggattgcactgcttggtgtcatggtgcttcacaagctcagagagaggcgcatctgcacccttcttgtcaaagaggaagaccaacagattcttgctcttcagcttctcttgcagaaggaaagagatcgcagcaaagagttgagaagcaagaatgaagagatgaaggggaagttatacacactgagaagtcagaaaatggagcctggtaaaaacagttggggagatgcaatccaccctggattcgctgaaagatgagcagaagctgatgg

SEQ ID NO: 9672 - DNA, 390 bp, Glycine max
ggtgacagttccattcattttcggagcgcttttgttattgcgcacataaaaaattcgcagcggcaccactttgcttcaacctctaccctttcacgacactcgaagccctcgctggccaggactcgatgggaaaggagagccaaacgtccgctatggaaatcgacgctccaaaatcgatgaattccgatctgatcgttccaaaattctccatcaacgtgctgcagctcttaaaatctgcgcaaatgcagcatggcttgcgtcatggagactacactcgctataggaggtattgcacagctcgtttgaggaggttatataaatcgttgaagtttaccaatggtcttggcaaatatgcaaaaagggccttaactgagtctactgtcaccgaag

SEQ ID NO: 9673 - DNA, 456 bp, Glycine max
ggagaaagaaagactctgcaaaaacctatcctgaaacggttcgcagagaggcagcaaaacgctaaagccctaaacccccatattgagctttctccctctctctccgtcttcgatggcaacatctcttctgaaaactccgctcaatgtgttcaacagacaccacaatcacgtcgcattcttctccaatggcacaagtgcaagaagcagtgctccaatttcgcagaagaggagatcgcgtccattccccgtagtgtcaatggcatccacaccggttcaaacttctctcgaaaaaactgaactttcgtccaaaagcaccggtcttccaataatggttaatgccatgtactggaaaaatgggaaaggctgtgattaatgcggcggaagctgctggactgaatgttgttcctgtgtcgtttggctgtgaagaggagtctggacagacttttcagattggtg

SEQ ID NO: 9674 - DNA, 603 bp, Glycine max
  unsure (1)..(603): unsure at all n locations
cttgttatctcacacgaagtgtttattctcttatcagagncctgcattcccctccaaaacttcagcattgtgtacctttacatagcacgctcaagatatagctttatgggtgcagttgatgaacctggtccttatgggagaggacggtatgatggaaacatggcacctgagatcgacatgagtgactggcgaaaaggctctcagtggtttgaaattaaccgagaactagctcttaggatagttgaagacaatacttactatcctaagctcaaagaattctgcaaaccacacaaatgttatgttgatgagcactattttcagacaatgttaacaattaatactcctcatcttttggcaaatagaagcctcacttatgtggactggtcaaggggtggtgctcacccagctacctttgggaaggatgacatcaaagaggaattcttcaagaaaattttgcaagatcagacatgtctttataataaccagccatcttccctttgcttcttatttgcaagaaaatttgcacctaacgctgttgggccctcttttagacatagcacccaaagctctaggaattggaaaaaggcatagcttctaagctac

SEQ ID NO: 9675 - DNA, 432 bp, Glycine max
gttagcttttgtttaagggctatgggggaatggtgtgataagagtgccttaaatggttcagctctttatagctagccagccacactcattcatttcatcccatttaaaaccaacaaaacgacgttgcgcttgcatctccaatctccgatcagcttctcccgtgtttccatctcaatctgaatccaagccgttgctcgatcatgtgttgttgtgaatttgtttgatcgagtgagaagatgaatcctctgtgctgcattgctccggtttctatcgatcgggaccgggcgaaccctgtggtggccaaatcgccgagtcagtgtcagctatggctcgatgcctccatcatgaacgttaacctagccctccaaatcgagcttctccattcaggattcctccgtcggcgccgattccgtcaaggacaccgccgccgcg

SEQ ID NO: 9676 - DNA, 905 bp, Glycine max
  unsure (1)..(905): unsure at all n locations
ggcgtaactggatgctgaagagtctgatgataatggatatggcaagggaagaactgcaaaagatgttgaagggaagaactttgagttgcaaaaagaagagttccctaaaggcaagcgtaaagctcgaaaacgcaggcgccttgctcttcagggaagagcagtgaaggatgtcagaaggagacagaaagctgactcgctaacggatgaggatctcggtccattctccaattctagtgaagagagcatgttcagtgaagatgaaattcaggctggcagaatacgtccagcaggaagttcatcagatgaggcaggtagtgcctaatatgaatatgagccagctgaataattcaacaggtttgtttttgcaagaataaataattgttggcatgcagtctttgcgagcttgttcagtggaggatggattgcgggtgcttggtgcaatgtcacagcgtatcagtagtgtaaatatttgtagcattagttgtttcttatgcatgaggagaactgaactgagtaggttgtgtagaattttgtaagtgactaaggattcggttgaagagcaagaaagaatgtacaattggatttgactaggaaatagtactaatttagaaactacccttggtcgctgggagcctggtatatgttaatctaatttaacactcccagtggtcttaactcttgagacatgggtgggtatacaaggacaagtagatgtggtagctttgccaaggtcaatgtataggataattactgattggcaactgttattgattgattttgtaaagttcttattagttattgtataacatttaggctctgcatttgtgtctcttgtaaggcgactttatctagtaagaaagtcagagaagtcttttcttgttgttgngaaaaaaaaaaannannnn

SEQ ID NO: 9677 - DNA, 471 bp, Glycine max
  unsure (1)..(471): unsure at all n locations
gcttctattctctgagaaagttcttcctgaatcttgaaggttcttcaacaccctgcttaaggaattgaagagcatggaaagtgaccagaaagtccaaatagcttcttggagtgaggtcatgtcaggtgctggggtggagtttcatcaaggggctcctaatttgggacaaggtggtggtggtggccttcagagacaacctagtatgaccaagaacaattgtctttgttctccaaccacacattctggttcgtttcgttgccggcttcaccgctcccctagcctccagaggaccagaagcatggaatcagagtccctcatggatcacgcatcaaaagtccatgcttcaattgttgatgctgttgctgatgccaacatggatccagtgcattgatcttctgatgaattgaatgttaaaatgtcattaagctgccatatgttttacttgtgtgtangcgtggcatgtttactttc

SEQ ID NO: 9678 - DNA, 532 bp, Glycine max
ggacacactagtttgcgggtagcgaggtgcgttggagagagtcgatgatgagaaggcaaggcacgtgtatatattcgcaggtggtcttctgttttctgattctggtttgaagcccaaaattagtttagtggatatggggactgcatcatctattctaactcaatacgacatcgaggaagttcaggaacactgcaataatttattttcccagcaggaaattgtgtccttatatcaaaggttttgtcaacttgaccgcaacgccaagggatttatttccgcagatgagttcttgtctgttcccgaatttgccatgaatccactttctcagaggctgctcaagatggtcgacggtttgaattttacagactttgtggccttcgtatctgcattcagtgccaacgccagcgcacaacaaaaaattgagctgtttgctcaaggttcctaagttctctctgactttggtctcaactcaagggaagatgccgttttctgttgcttagcccaagactgaaattcacagttatggtcacat

SEQ ID NO: 9679 - DNA, 607 bp, Glycine max
gaattaattaattaattagagataaatgtgaaaggaacgatccatcgacacaacactagtttacgggtagcgagtagcgatgcattggtgcgttcgagagagtcgatgatgacaaggcaaggcacgtgtatatattcgcagtcgcaggtggcctgattacgccaactacagtacaacgaggtaatagtcgatggttcttcagatttgggtttgaagcccaaaattagttttagtgatatggggactgcatcatctatgttaactcaatacgacatcgaggaagttcaggaacactgcaataatttattttcccagcaggaaattgtgtccttgtatcaaaggttttgtcaacttgaccgcaacgccaagggatttatttccgcagatgagttcttgtccgttcccgaatttgccatgaatctactttctcagaggctgctcaagatggtcgacggtttgaattttaaagactttgtggccttcttatctgcattcagtgccaaagcgagcgcacaacagttcatagagcttactttcaaagtacatgatcaagaccgcaatggaaaggtgtctttcaaagatatgctggaagtgctaaaagatttgt

SEQ ID NO: 9680 - DNA, 538 bp, Glycine max
caataaataaaaaaatttgcagcccatcaactgaacaaaaccattgaaaaaaaaataaactaaaattctagggcttgtcaagtgtgaacttggaattccatggacgacatggctgcctactactcacagccccaaccgtcgggccttctcccttaccagtactaccaacagccgcctccgccacctcctccgccgatgatggcggtagtgccaccgccccccggcgcggttgtcccgccggcgcaccacctgcatccgccttacgtggctcagcatcagcagcaagcggtgttcggttcctacggtgctcctcaatcctccacccacgaggttcgcactctcttcgtcgctggcctccccgaagacgtaaaaccccgcgaaatctacaacctcttccgcgaatttcccggttacgagtcctcgcatcttcggagtccctctaattcgtcgcagccttttgctttcgctgtgttcgcgagtcagaagtcagcaatcttggcaatgcatgctctgaatggactggtgtttgatctcgaaa

SEQ ID NO: 9681 - DNA, 458 bp, Glycine max
agggatcctctctctttctcttccctctgcagcaaacaagtgagtgagtgagttgctttgtctcattcactcagctacttctccatccatctccacctaaaaatgcaacccctacactttcattttcttgagcccttttttctcttcaatcctatacacagggtctggtgtaatgcaagcgtagttttttttttttttgcctctgtgactctgtagatctgacccatgcggggataccgaaaaaataaaggattttgatttctgggttttgttttttggcgcattgggtcattggaaaagtggagtgattgttgctggggggtcatgggttccaatggtagcaaagccacttcttcgtctttcgggtagttcttcttcttcatcgtcttcttcggggagtttaaggaaaggtcgatctaagggccttaaagtttttcaatcttgttgtcttggaacaa

SEQ ID NO: 9682 - DNA, 679 bp, Glycine max
gaaggtaaagatcgaagaatggaagggtcttcagcatcatcgcatgaagaagagagaacagccactttctatgtgtaccatccttgctattttcttcaacaagcattcagggctctcttgaggtgtctaggtattgagtctgaagccacaatgtgttcaaaggcagaagaagagaaaagctcactgtcacaaactactgctgcagatgatcttattacaaactctccaagctgcaacatatcccacaaaaactcccaagatgctgcagatccaccatccacaactaatcaaaccattatcattgcaagttcaatggcaaggcgtggaaatcgagggtctagaattagccatgggtcaggccctcagcataattaaatacataccatgcatgggccatggctttggacttggttggaacttataaagtgtggtactcgaaggtcaggacttactctagggcccaggtctttagagaataaatgaaaaatttattactgaatttccttttagtgttaatctagttgtcatagctttgctttctctagctgtttataacctttctttcctattttccttcttctttgccattttcagatacattgtatgggtgtgggaattaaatatttatgcagatatatagaagccatgccctgtaaatgcatatcaatatttaattgcc

SEQ ID NO: 9683 - DNA, 848 bp, Glycine max
gagagatttttagttctgggcatgctgttaatcttctcgaggccccccatagcttccacgtgggactaaactccgtgcagttttccgggcccacagtggagacaccggcaccagcaccagcaccggcaccggcaccagcaccggcaccggtaccggtgattgctccggtgatgaattcaggtagtacggaggggaagaagaagaggggcaggcctaggaagtatggaccggatggcaaggtggcgctgtcaccgatgccgatatcggcgtcgattccgttcaccggagacttctcagcctggaaaaggggcagagggaagccacttgaatcaatcaagaagacttttaagttttatgaagctggaggtgcaggatctggtgatggaattgcatactcggttggtgccaatttcacacctcacatccttacagtaaatgatggcgaggacgttactatgaagattatgtccttctctcaacaaggatatcgagcaatttgcattctgtctgcaaatggcacaatttcaaatgttacactacgccaaccaacttcttctggtggtactttaacatatgaggggcggtttgaaattctctccttgtctggttcatatataacaactgagaatggattaacaaagagcagatctggtgggatgagcatctctttggccgctccagaatggtcgagtaatggggggtggattggctggtttgctggtagctgcaggtcctgtgcaggttgttgtggctagttttgttcctggtcatcagctggagcaacagaaaccaaataagccgagagtggagcatatattaaatgctgctccgacgtatgttaaccctac

SEQ ID NO: 9684 - DNA, 408 bp, Glycine max
ggagaggtgcaggttgaaaatgcttttatccagtaccatgattctctctaattctccaattgcatccccttcactaccaacttcaacgggtgccaagttggaaactttttccctgaaaaatgatggggttatcagaattagaggagctactgcttcttcagtggcacccagaatccgaaaaacagcaacatgttctgtatcgaaagatggtaatgcctctgttgagactgatgtacctttccctgctgattactctgagcttctggaacaagccagagtagctgcagatttggctataaaggataacagacagctaatggagactgagtttcccacagcctggacccgggtcggtgccaggtgatggggaacgtggaattgaaatgactgagagcatgcaattgattc

SEQ ID NO: 9685 - DNA, 778 bp, Glycine max
ggaaattaaggatgactgaaaaacacaatatgaaaggatcagtgatgcagcacatcacagccaaggttttttgtcaagataacactataactttgaagtgttttcttttcttattctcttcacaatatgaattataaagcatgtaatgtacggccaatttggaataacacaccagcagatgccagcacagatctcatctcaagctgtgcaaacccactctgaacatccattctctatatcagccgtatctgctacctcatcatgtgctgcacaacagctgattccaccctcaatgccagattctaaggtgaaagaatcccttgattattctcactctgaacaaaaattgcagtcttctgtgaatgttgataataagcctaataatgatggttacaactggaggaagtatgggcaaaaacatgtgaaaggtagtgacttctcaagaagttattataagtgcacacgtccaaattgtcctgtgaagaaaaaacttgagcgttctcttgagggtcatgtgactgcaattatttataaaggagaacacaatcatcaacgtgctcatcgcagtaagattgtgaaagaaacacaaacttcaaatgaaaattcagtgtctaagatggatctagggtctagtcaggccacaggtgaacatggatcaggaacacgtgatagtgaggaagtacatgaccatgaaactgaagcagatgagaaaaatgatgaacctgatgccaagagaagaaacacaggaaccaggatccatgatccagccactttgcat

SEQ ID NO: 9686 - DNA, 629 bp, Glycine max
gagagaaacaacaagaaagagatgagaacaaacaagaatcaagagagagaggtgttactacgttagtctatgaacagtcaccccgagagactgaaatttccagaccctcaaatcaaactcttctattctctcatcaatcaatcaatccagttccctctcggataggaatgggaatatatctcagcactccaaaaactgaaaagttttctgaagatggtgaaaatgactgtcttagatatggtttatcatccatgcaagggtggcgtgcaacaatggaagatgctcatgctgcatatactgatctggatgagtccacttcattttttggtgtctatgatggccatggaggtaaggtggttgcaaagttttgtgccaagtttcttcatcaacaggtgctcaaaagtgagacatacttaactggagatataggagcctcccttcagaaagcctttttgagaatggatgaaatgatgcgtggtcaaaagggatggagggaattatcaatattgggggataagataaacaagtttactgggatgatagaagggttgatttggtctccacgaagcagtgatggtaattgccaagttgatgattggggtcttgaggaggggcctcattctgatttt

SEQ ID NO: 9687 - DNA, 546 bp, Glycine max
  unsure (1)..(546): unsure at all n locations
ggaaaatggtggtgttagtctatgaagagtcaccctgacctgagtaaaatttccatttccagagcctcaaatcagactcttctattcctttctctcatcaatcaattcagttctctcccactcagctgtcagctcaagtaaccctccctcagaagtcagaaccgggtcttctgtttgtcgtccaagttctctaaagataggaatgggaatatatctcagcagtccacaaactgagaagttttctgaagatggggaaaattgactgtctttagatatgggtttatcgtccatgcaagggtggcgtgcaacactggaagatgctcatgctgcatatactgatctggatgagtccacttcattttttggtgtctatgatggtcatggaggtaaggtggttgcaaagttttgtgccaagtttcttcatcaacaggtgctcaaaagtgagacatacttaactggagatataggaacctcccttcagaaagcctttntaagaatggatgaaatgatgcgtggtcaaaagggatggagggaattatcaatatt

SEQ ID NO: 9688 - DNA, 407 bp, Glycine max
ttaaggtagaaacaagaagaaagggataagaacaaacaaaatccaagagagagagaatgaaaatggtggtgttagtctatgaacagtcaccctgacctgagtaaaatttccatttccagaacctcaaatcaaactcttctattcctttctctcatcaatcaattcagttctctcccactcagataggaatgggaatatatctcagcagtccaaaaactgaaaagttttctgaagatggtgaaaatgactgtcttagatatggtttatcgtccatgcaagggtggcgtgcaacaatggaagatgctcatgctgcatatactgatctggatgagtccacttcaatttttggtgtctattattgtcatgggggtggggtggttgcaaacttttttcccaattttttttaa

SEQ ID NO: 9689 - DNA, 530 bp, Glycine max
gagggtaaataaacaaaagactgatagataaacggtgaattgcgagattaaacgacaccactgaagcgaagaaaggggcgtacggttctgttgtggttggagatccgaattttgattatcgaatcgcaaaattctgaatcaatcaatcaatcaatcagtaatcagagccatcaacgactgcaatggtctgcgagaagtgtgagaagaaattatcgaaggtgatagtaccagacaagtggaaagaaggggccagcaatactaccgagggtggtggccgcaagatcaacgagaacaagcttctctccaagaaaaacagatggaccccttacggaaacactaagtgcaccatttgcaagcagcaagtgcaccagaatgctaagtactgccacacctgtgcttactctaaaggagtttgtgcaatgtgtggcaagcaagttcttgataccaagttttacaagcaaagcaatgtgtagtggatacttgtgttgtattgcgtgctgtatcttcttttagatgcataatagcattac

SEQ ID NO: 9690 - DNA, 453 bp, Glycine max
ggaggcgaaagggtcatagggctctgctgtggttggggatccgaattttgattatcgaatcgcaaaattctgaatcaatcaatcaatcaatcagtaatcagagccatcaacgactgccatggtctgcgagaagcgtgagaagaaattatcgaaggtgatagtaccagacaagtggaaagaaggggccagcaatactaccgagggtggtggccgcaagatcaacgagaacaagcttctctccaagaaaaacaggtccttttaacctaacctctagctttacatactttgataatttctttttttcttaattttaaaattgggtataagaattaagaagcataacttggctctgtcacctgtgtattttataattagctgataacatgttaaagcgatcatttctagttccatagcagagcctttggaatgtaaatgacttgacagttgacactt

SEQ ID NO: 9691 - DNA, 406 bp, Glycine max
gagctcagtgtgtggttgaactattattcagattctgctgttttgagcatgcatgccttgttgcagaataaataaacaaacttgtgaaatccaggaataaaaaagccacctttgaggttcagatttgatatactcttacaaaagagcatagatttgatttttctattggtgtttatcttggttcagtttttatggcattgatggtgtgtggaaagcttagggggtgccttgttcttgtgttctttgctgcactgttggtgggtttagtgaatggaattggtgttaattggggcacacaattaacacaccctttgccagcatccactataatgagaaatgctaaaggacaatggtattcagaaagttaagctttttgatgctgaccctgatattcttaatgctctta

SEQ ID NO: 9692 - DNA, 419 bp, Glycine max
gctctatccatctaagttagtaatttccatatctcattccaatttcgcccctcgccggaaaaagaaaacctcaccgcaacgttcgattcagtttccgatggcgccagcgctgaacctcgccgccggaggaattccgctgagtttctcttcctccgtcgaccgctccgccagctttccacggcggtcctcggtccgcgccgtcgcggctgaggcggtggatacgcagcggccggcggcgagcctttacgaggtgctgcgagtcgagcgagacgcatcgccgacggagatcaagtcggcgtaccggagcctcgcgaagctctaccatcctgatgcggcggtgcagatgtcaccggatactgactgcgacggagacttcattcagctgccgaacgcgtacgagacgctgtcggatcccgtcg

SEQ ID NO: 9693 - DNA, 394 bp, Glycine max
  unsure (1)..(394): unsure at all n locations
ggatcttacatcaataaaagtcttctaactcttggaactgttatttcaaagttgactgaaggcagagctagtcacataccttatagggactccaaattgactagattacttcagtcttcgctcagtggtcatggacgtatatctctcatttgcacagtaacaccttcatctagtaatgctgaagagacacataatacatctgaagtttgcccaccggacaaagcacattgaaatacaagcagcccagaacacaataattgatgaaaagtcacttatcaagaaataccaacatgagatttcagtgcttaaaggaagaattggaacaaatgaagcggggtattgtctcagttcagcaaaaggnactggtgaagttgactttgtgcctctaaaacaa

SEQ ID NO: 9694 - DNA, 436 bp, Glycine max
ggctcgagcgtggacactgcaaattatctgagaattgcttcggaagcagagctgaagtgcaacaagtgagcaacggagaaggccaaagcccgttactcttcttcttcagttgacttaatccgtctctagggcatacgtcagcgcgtgtgcttaatcgagagttgacgaagaagatggagaataacccgaaggagcaagcggagcagcaaagggtcaatttcaacggagaccctcacattcacgacaatggcaacgtattccaccacttccaacccacacccgccgtcgattctggttacgctcttaaccattccatggctcgccctctccgcaaacgcccctggcatcactccaacaacggaaactctccaaatcaattggacgtttcgtgtaaagtttatgttgcacctgttccaagaacggccacggaggatga

SEQ ID NO: 9695 - DNA, 1118 bp, Glycine max
gatacagaatacagattgacagagtccaacgttgcattgcagaggtttggtgtttgtcatgtcataaggcatgggcgatagggtggaaacgcttgccagattagcccagtggaaaatcgacaacttcggactttgttcctacaaaaaatctgaccccttcaaggtcggaatctggaactggtacttttcaatagtgaggaataggtacctctacatacatctttttccagaaccttcgcaggttttgaaggataacccaccctttgctcgattcattcttcgagtctccaatgccggatcatcccgcagctttcatatttcccctgttcaagaaaagctgcttaggacacatgacgactttgtctggcctgtggatacaacttttgttggtcgcttcatcattgatgttgagtttctagacctaaagatatgccctcctaatggtggagaaactagtcctgtatggccatctgatggaaattctcaatccattgcatttcaaagtagcattcttcgttgcctctctcgtatgcttgatgaggctatacatgctgacctaactatcatgacagccgatggaagcacgttgagagctcataaggcagttctctcagcaagttccccagtgttccagagcatgtttcatcacaacctgaaggaaaaagagtcctccacgatccatatagaagacatgccactcgagtcctgcacggctcttctaagttacttgtatggagcaatcaagcaagaagatttctggaaacaccggcttgcattgcttggagctgctaataaatatgacattggaagtctcaaagacatctgtgaggagagcctcctggaagatctcagcgcaggaaatgttcttgagatgctaaatgaggcttggctttatcaattgcacaagttaaagaaaggatgtttggtgttcttatttcaatttggtaagatacatgatattaaagatgaaataaataattttttccagcatgcagatagggagctaatgctggagatgtttcaggaggtgctttcaatttcgaacccgatataggttaactcatggatcctgtatatgatccatcgatgtgtataataaagtttgttgtttctcccgg

SEQ ID NO: 9696 - DNA, 279 bp, Glycine max
attgctcttcttcttatatactatggtatatgacataagtttggaagtcaaaatggtttagacacagtccaacgttgtaggtttggtgtttgtcatgtcataagacgaagaaaggcatgggtgatagggtggagacgcttgccagattagcccagtggaaaatcgacaactttggaccttgttcctacaaaaaatctgaccccttcaagctcggaatctggaactggtgcggactaagtgcctctacattttgtgtttgtgtatttgaaatgaatgatc

SEQ ID NO: 9697 - DNA, 591 bp, Glycine max
ggcgctcatttcagaaacactgagtgtccctactctctaaccttttctctctcactaaccctaatcccaactaattcgaatttcgcttccgtcgtgtctccttccatttcacaaggtcaattcatcttaacccaattcttctctttctttttgttctttttctatgtagtctcttgttatttctgttccttaattccgcgcgtaggtacaacatttcacgccgcttaacgttagggtttcaaatttgacaaatcttgccaattcgtttttttcttttctccctcctttttaaagcaattcgccgattcggttaaagattttcaaaatccaaaatttcatgggaagcaacgataatttcggcgacgggattttcaaaacccgtccccatctggcggacgtcacgaatctcccggccaaaaggtcgttttctttggtttccggcgacggtggggacttgcagttcaccaagaaaattcgcttaggggtggaaaatttagcaaaagggaaaagccaaatgcaattcggagcacatgcctaccttaacaacgaggtcctgttgcaaccaaaagaaaaacacaccattttgttacc

SEQ ID NO: 9698 - DNA, 372 bp, Glycine max
ggagtaagttaaagcaaggagtatattgctctataatcaaattaagatgaaggccatcactcttgtttttattgttctgttggctctttccattggaattgaaaatgaaggaccattgaagttgatagaagcaagacagtgcgaagaaacactgtataagtttagctgtgcaagtaacaaatgtggcactgattgtcgtaataaacatggaaagtttgcaagtggtacatgcaatgccattgaagattgcatatgtcgctatccatgttaataaatgtttgacctttttccaacgttgtccctatagaaaatgttgtttatatatgtaactggcaatgatggaattaaagaaaataaagttactcattttgt

SEQ ID NO: 9699 - DNA, 857 bp, Glycine max
ccctgcttttgctagtggtactgtcttagctttgattctctgttctctgttttgttctgtttcgcgtattgtcttcatacaggaacttgaacaatgaagaatgcaaagggcaagggagcagcaagggcctcaaaagaatcactgaagcccgttgatgaccgaaaggttggaaagcggaaggcttccggtaagcctgggagaagtagtgcaccaaagaaggagaagaaggccaagaaagaccccaacaagcctaaaagaccacccagtgctttctttgtgttccttgaggagttcaggaagacctttaaggctgagaatcctaatgtgaaggctgtatcagttgttgggaaagctggaggagagaaatggaaatccttgtccagtgctgagaaagctccatatgaagccaaggctgcgaaaaggaaagctgagtatgaaaaacttatcaaagcttatgataaaaagcaggcaagctccgcagatgatgaagaatcagacaagtccaaatctgaagtgaatgatgaagatgatgccagtggagaggaggaggaagaggatgatgaggaggaagaggacgatgaagatgatgactgagattgatgtccaaaaccttggttatgatgttttgtttgtgaaggaggctattatatattctgattgtgcatactaggctacttttttatatttgtgctggtagaaaagaatttcttcttttgttggcatgatatactctaccaactacttgagcttccctcacttagctatcgtacctgaatcactctttgtgcattgtagccttacatgggttgctttaagtaatataatttctttctgatcagaaaaaaaaaaaaaaagga

SEQ ID NO: 9700 - DNA, 470 bp, Glycine max
accacgcgtacgagccaacacatcagaagaatcctcaattctcatttctcactgtcctttgttatttttttttttagagaaaaaaagaagttattctttcttctttttgctgaaaccccataaagcgagatcgtaaagggtgtccttggaagaaggagtggttcattaaaaagcagggatctttcgggagaaagataagagaaaggggtaagctttgttttggggcaatgggggatttggagaagcaggagagggtgggagagaatgagaggcttttggagggtatgcctgttttagattttgacatgctttgttcctctgtggcgttgcaaagtgcacatgggagttggggaaagcttgggggtcgggatgagggatgaggaacaacaaggtggggttttgaggatgccggagggtgaactcctcgattgctcttgatgatcgccgcatcgcttttgaatctgcgtttt

SEQ ID NO: 9701 - DNA, 290 bp, Glycine max
agtcggtgaaagccaattatctggttgagtcgtgtggaggcatggtaccaaagtctccaaaagtcaacaggtagatccggttgctttgatccgtttcgctctctattgggtcgtaccctcttctttagtttccaacagcctctctctccgcttttgctagtgattgtcttctgacaggaacttaaacaatgaagactgcaaagggcaacggagcagcgacgccctcaaaagaatcactgaagcctgttgatgaccgaaaggttggaaagcggaaggcttctggtaagcct

SEQ ID NO: 9702 - DNA, 272 bp, Glycine max
tgtcttatctttgattctctgttctctgttttgttctgtttcgcgtgtaagttcccctgttcctcttttcctctttctaagattgtcttcatacaggaacttgaacaatgaagaatgcaaagggcaagggagcagcaagggcctcaaaagaatcactgaagcccgttgatgaccgaaaggttggaaagcggaaggcttccggtaagcctgggagaagtagtgcaccaaagaaggagaagaaggccaagaaagaccccaacaagcctaaaaga

SEQ ID NO: 9703 - DNA, 388 bp, Glycine max
gaaatgagctggattcaatcagtgatgttcatagctggatatgacatagaggaccctctagaactcttgctcaacagaactaccatgtttaaaagatctttcaaggccaagtctgactttgtaaaggagccaataccaaaatctggtctagaaggagcttggaaactgcttctagaagaagaaatagcattcctgatattggaaccttatggtggtagaatgaatgacatttcagaatctgaaatcccttttccccacagaaaggggctacttgtacaacatacaatacctgatcaactgggaagtcaatagtgacgaagcatccaagaggcatctacaatgggctaaaatggtttataaatacatgactccttatgtctcaaaatcc

SEQ ID NO: 9704 - DNA, 430 bp, Glycine max
gaggggacaaggcagggctatagactatagtagtagaccagaaggaaagggaaggtttcctgcgctgcgtgtgttcccttccctaagcacaccacatggaacatttggagcaatggaaacaacaatttctccggtggtggcgcgtcgcagtccacaccgtccccccaattcagctctacgccgtcgccgccgtccttatcctcaccaccgttctccttctctcaattcgcttcttgaagcgcgcaaagtccaacaccattgttctcactggcctctccggcgccggcaaaactgtcctcttctaccaacttagggatggttctatccacgagggtaccgttacgtccatggaacctaacgaggacactttccttcttcattctgaaacagtcccgaagcgcaaggtgaaacctgtttgtgttgttgatgt

SEQ ID NO: 9705 - DNA, 813 bp, Glycine max
gagtcacagaaaagcaaaatcctaacaaaccctacgaaggaaaacgtcgtcccaacaatcttgattgagttcagcgatggcccttgttctccgtctaggaagcagaagcagaagaagaagcgtgttgttcttctccaccaactccaactctcccttatcttcccttttcaatgacaatctcaaacaatcctctccctcaaacaccacgcgttcctcctttcgcactccccctaactcccaaccaggtttcaccgacgacatcaacaaaaacctccacgaattccgcgcccggaccaccgcgcctccaccgcagcaaaaccccgttcccagaagcaaactattcgtgattatctcagacgtaacttcgatcagttggatcagaatcaaactgagaccgctaagaaagcttcacgccagagacttagcgtggaggagaaattggggatgttgaggccggaggaaacgaaaaaggattggttttccgtgagcgagaggcctggcatgatgaggaagatggaggaggaggaggagtgatttaacttgatttcgtctggcttgaagctttgtttggtattaaatgttcagtcataagtaaaagcatatgacttgagatgttgagattagcttgcttccatgtcatttgtattcacatgttaaaaattgtagtttcctatattttctgagtgtttcacttgttttacgtggaggacagtttgatttttagtttcatttgattcctagagcagggcaaatatattgttctgacttctgttaacctcttgaatatggtcatagatagaagtttgaactggt

SEQ ID NO: 9706 - DNA, 890 bp, Glycine max
ctggaggctgctgtcccttttcctttatccacttttttttttccattgcgttatttatttgcccgtgtctctcactcagtcactcactcattctctctgcaaattctaatcttcacaaatcaacaacgtctctctctgttactctgaaaattgacttcaagttagtataactggctgtcaagttgtaatggcattggtctctggaagaagttctgcactgaacccaaatgcacctctattcatacctgctgctcttcggcaggtggaggatttttcacctcaatggtgggatcttgtgaaatcttcaacatggtttcgtgattattggttgagccaacataaggaggaagaatttgaaggttgccaatgactctagtaatgatgatattgagaatatgctctcagaaacttttgatctaggcatggaagaagacttcaatgttctagagaacgagtttgagcagttggtgatgtcctctgaagctctagatcattctggtgatcctaatgctggaaaagtgtctcctcagggtcttaacaaagatgttaaagctattcttattaacttgacaccaaaatcaccaagggaaaggggtcccaagtcccttctgggcttgcaaagcacctcgagaagccagcacagcatgtgaatgcgaagtgtgtctctctccgaattcaccaacctcgttgaggaaaacatttgaagctcatagtgatagcttgctagagctgcaagttgctgactagagcatgagatctctgttgaaagaatttttgtatatagagggtgcaatgttcttgtatttttcttgtttatggtcttgtatattttgatggagccctcggaactgtaggtaggtaagactctaattctgaccagccaaaatttg

SEQ ID NO: 9707 - DNA, 411 bp, Glycine max
agctccttcagatacagaaccagcactagattatgagctccggctcctccgttctcgacctcggttgcgcccccggcggctggcagagcttgggtccattacgtaacggcggctccaaagaaggtcaaggtgcgattctagggttcagaccatctccgccggctaaaaggtctttcccccaaggagaacgggttctgcatgattctctcggatatgtgccttggaagcagaattcgcacgatgcttcttcttcggagtgttgaaagttggagggcaccttgctattaaggttctcgagagtgaggatgcaaagggttcttccttgctagcttacttgtccgcatcatatatgattgatgtgttgttcaattcaattgcttttggttgtgtttctaatgtgttgttgtttgg

SEQ ID NO: 9708 - DNA, 1234 bp, Glycine max
gtttctttggcgctcgttcattcatcaataaataaaacgcacacctctctcctctgttcacaataaatccctattccaattccaaattttcagtttcttcctcgcttttctgcaaaattatctaaatctatttctgatctcagcttttcccttgaaagatgggaggtggtaaggacaaacacaatgaagaagagaaaggagttttctcacatcttgctcatggggtagctcaagctgctcatgggtaccctcctggggcataccctcctcaccaagggtacccacctggtcatggctaccctccacaaggcggctatcctccggctggttatccccctgctggctatcctcctgctgctggtggttaccctcctgctggttaccatccacatggttatcctggatcatctgctccacatggatctcatgcgcctgggcacggcggtatgggggcattgcttgctggtggtgctgctgcggcagcagctgcgtatggggctcaccatgtttcccatggccatcatggatatggtgcatatggaggatatggacacatgccccatgggaaattcaaacatcatggcaagttcaagcatggaaagttcggcaagcatgggaaatttaagcatgggaagtttggcaagggtatgttcaagaagtggaagtgatgatattatattaattttctgtacatacaaaccgcgattctggatgctgctgcacattgcttttataataaactctactttgtttgatgtccatctatattttggtggaactctagtatttttttttatagtcaaagatgtatcatcccgttcatattctattattctagaaagtgcttattctagaaagtgaacgtcaaatagatgatgctctggatattatgtgcgagcttgcagttgctttagaaaagcattgacttgttcatgccttttctgtttttttgctttgtataccatttttagttttaacctttgttggctttcttagacagaacggagtcatcacattcattgtctttatagtctatacaagtctccaaatacacgtaatataatacacgtaatatgttttatagtcgttcatataaagactttacgtgtatttggagacttggatgtatagactatagtgttctggtgaaaatatttttttgttggagacagtacactattggttcatattcaacataaaaaaacttggatgttgggctaagtgacaagtcaaa

SEQ ID NO: 9709 - DNA, 464 bp, Glycine max
gacaataaatccctattccaattccaaattttcagtttcttcctcgcttttctgcaaaatcatctaaatccgtttctgatcctgaatcatcagtttttcccttgaaagatgggaggtggcaaggacaaacacaatgaagaagagaaaggagttttctcacatctggctcatggagtagctcaagctgctcatggttaccctccaggggcataccctccacctcctggggcataccctccttaccaagggtacccacctgctcatggctaccctccacaaggtggctatcctccggctggttatccccctgctggctatcctcctgctgctggtggttacccccctgctggttaccctccacatggttatcctggatcatctgctccacatggatctcatgcgcctgggcacggcggtatgggggcattgcttgctggtggtgctgctgcggcagcagctgcgta

SEQ ID NO: 9710 - DNA, 356 bp, Glycine max
gatgcttggaaagaaagaaaattgagacatcatatttagtaatatagagatagaggctctttaggagtgataaaacatgttggaaggtaaagctgtgatagaggatactgacatgccagataagatgcagatccaagccatggcatccgcttatgaagctctggatctctatgatgtttttgattgcacatccattgctgcccacataaaaaaggagtttgatacaaagtatggttctggatggcagtgtgtggtgggatcaagttttgggtgttttttcacccattccaagggaacattcgtctactttactctggagactctcaatttcctcatcttcaaaggggcttcttatc

SEQ ID NO: 9711 - DNA, 1065 bp, Glycine max
gatcaacaatggcgagaaaaatctgatacccatgtgctacacagcccacccgctatttataccccacaaactctacccaaccctctctgctgttgcgttgcgtctttcattttcacactcaaccctttcttcatccttttatctcgtctctgccaaaacgatgccgtttgctctggagaataacggaggagttacgatcggacggtcctccttcgcttactgcgtcgcgatctgcgatcgtgattttccggaggatgattccgactccagctccgactcctccatcggaaggaacagcatctcgtcggaagattcctccgaccgggaagacgccgtcgaagttgaggttcagagttccttcaaaggccctttggataccatcaatgatctagaggaagatttacccgtcaagaaaggcatatctaagttctatagcggcaaatccaagtccttcacaagcttagcagatgctgcagctgcaagttctatggaagagatagtgaagccagaggatccttatgctaagaaacgcaagaacttaatagctcgtaactcctcaattgagaggagtcgcagttgcgcaaacattggtggaatatcaaagcgacccagtaacataggtggaggagcatcttgtctcactctgaactgtagtgaagagggtagtagctccacttcaatatcgcctccatgccctcttcctcctcttcatccccgtgctattaatcggtcatcgctgcctcaaccttcttcaactggacgaaatcccccttggagatcatattcatggactgatctgcactctgttgctgaggctcatgatatatctggtttggctatttgtagtggaagctaaatgcactgaatttttgaccccaatataagcttttagttgatagccagtgcccatgagtttggttcacattcgagtttgtttgtaatggcacagtactttgtgaacttctcaatgtcctatgtgtacccacctgacttgagtgttgtatattattatatctcagcgttggttattttttacccgtgctgcaaccctacttatctaggtga

SEQ ID NO: 9712 - DNA, 315 bp, Glycine max
tctgaattccgctcgagctcgagcgctcgagccgtgcgtctttcatttcatttcacactgatcccttccctttcttcattcttctatcgtctctgccaaaacgatgccgtttgctatggagaataacggaggaggagttacgatcggacggtcctccttcgcccactgtgtcgcgatctgtgatcgggattttccggcggatgattccgactccagctccgactcctccatcggaaggaacagcacctcgtcggaagattcctccgaccgggaagacgccggcgaagttgaggttcagagctccttcaaaggccc

SEQ ID NO: 9713 - DNA, 364 bp, Glycine max
tgacaagaaaaaaccgacaaagattgcggggtatcctccgccagctagttcttccatataatataaccactttattacagggaaataataacattaattctctttggattagacttagatcaaatcaaagtgttcttcttgcttggtcacagactcatagtcacttccatggagaacactggtttgtgtgtactatgctttatactactcctgttggggtgtgtcatttcctcagaatgtaagtatataagatacaacacaacatcgaccattgttcctgggaaactcaacgttcacttggtccctcacactcacgatgatgttggatggttgaagaccattgaccagtactatgttggttcca

SEQ ID NO: 9714 - DNA, 434 bp, Glycine max
ggagagagttgtatactccagggaaacaacctgagaaagtgtgcacctcggtcaaaaaacctgccggcactcgtatctgtgacaccgtgttcaattcggatccaaaaatctgatttatcgggtctcttcccaactcccccacctccaaccaacttccaccagtagtaaacagaaatacaagcataagcaaaagaagacccgcgacacatcgcaacatcgtatcatgtctgcaacaaacgtccccaaagtgctgttacaactacaaccaccctccaaatcgaacccactctgcgtgccggtgataggactcggcaccgccgcggtccacaacgacggtgacacggtgaaggctgcagtcatagaggctatcaaactcggttacagacacttcgacaccgcggcacagtacggatcggagcaagctcttggagaag

SEQ ID NO: 9715 - DNA, 763 bp, Glycine max
ccttcatatgtttgtctggagttcaagtgcttcaccagtctctgacgtgtttggtgcccatgagtatggaggtcatgatcagaaagaagtcaaattgaatgtatctccagggaaagtggagaataatcatagggacactcaagaagactacctagagaaagatgagttcagctttggtaatagagaaatggacagggagatgaatcagcttgaaggtgagaaggttggagatgggaaaccaaaaaccatgcctccagcaagtgtgatgacaaggcttatattgattatggtgtggagaaaactcatcagaaaccccaacacctactctagcctaattggcctcacttggtctcttgtttcattcaagtggaatgtggagatgcctgccataatagcaaagtctatctccatattgtcagatgcagggcttggcatggccatgttcagtcttggtctcttcatggctttgcaaccgagggtcatagcatgtggaaattccacagcagcttttgccatggctgtgagattccttacaggtccagctgtcatggcagctgcttccgttgctgttggactcaaaggcgttctcttgcacgttgctattgttcaggcagctcttcctcaaggaattgtcccatttgtctttgccaaggaatacaatgtacatcctgatattctcagtacgggtgttatttttgggatgttgattgcattgcccattacgctcgtgtactacatcttgctgggggtatgagtgaatgag

SEQ ID NO: 9716 - DNA, 544 bp, Glycine max
  unsure (1)..(544): unsure at all n locations
caatattttcactcaagagaaacacgataaatcccacgtgtactcagcaagatcatcacttcattttggactaaactagaaactgatcgaacagcatgttcaagcttttggttagtagagcagctagggtttcaactccacacaaccacaatgcctttgcttctttcgctttctctaggtatgctcattcattaccatttgcaactgtagaagcagaagagatatcaggctctagggctgctgaagttttgaacctggtgcaaggtaaatgggtaggatcttcaaattggaatacagttgtagatcctttaaatggagactcatttattaaagttgctgaagttgatgaaacaggcattcagccctttgtagaaagcttgtccagctgtcccaaacatggtgcacacaatccttttaaggcaccagagagatatctcatgtttggagagatatctgctaaggcagctcacatgttatcactttctaaggtttcggatttctttacaaggttaatacanagagtttctccaaagagttaccagca

SEQ ID NO: 9717 - DNA, 448 bp, Glycine max
ggtcctgagttccagccacgcgtccgaccacgcgtccggacgaattggaacccaagaaggttgcgccgtcgtcgttggaagataaagaaaaaggataagcaagaggttgttattgagaaggtcgtacgtaacaagcgaaagtgcatcaccactgtgaagggactggaactttttggtgtcaagctcagtgatgcttccaagaaactcgggaaaaagtttgctactggagcctctgttgtcaagggacctactgagaaagaacaaattgatgttcaaggggatatagcttatgatgttgtggagttcattacagatacatggcctgatgttcctgaaacagcaattttctttatagaagatgggagaaaggtcccagctgcttgattttgatatcctggcattaaaactaaggactgattgcaagactctgctatattactgtaatccc

SEQ ID NO: 9718 - DNA, 799 bp, Glycine max
cacgctcttctctctagagctgctgcgttgctaaaacgcaccggtttgttcctgttctcgttcaaaagaaaactgacacaagtgaggcttggtgcataaacagcaatggcagaaaaaccccaaccggttcgggttctctactgcggcgtgtgcagtttgccccccgaatactgcgaattcggatccgatttcgagaaatgcaaaccctggttgatccaaaacgtccctgacctataccctgatcttctcaaagaggcaaatgagaaggaagctgataaagttgctgacaaactacaaagtaccggtatatcaggagctggcgatggagctgcttcctcagcaccgaagcaagaagaggtgaagcgtcttcctggtgggaagattaagaaaaaggataagcaagaggttgttattgagaaggttgtacgtaacaagcgaaagtgtatcaccactgtgaagggactggaacttttcggtgtcaagctcagtgatgcttccaagaaactcgggaaaaagtttgctacaggagcctccgttgtcaaggtttactgatttttagatggtgttcatagaatgcatgttgtgatcctttttcctgggaaataacttttttttcctttcaaaaacttgttaggaagttactaaagaaaacatttttggaccccaaaataaactaatccaaaccatagttgtcaatagtggcaaatagcagtgttttgggggaattgtgaaatgggggtgcggcttgagcatgttacaaaaattgaacgtcattgcagtttgaagtagcagatgttac

SEQ ID NO: 9719 - DNA, 380 bp, Glycine max
catcattattcctccctccaccgcgcttccgaacgcatcacccttttgcctctagtgctgcgttgcgaaaacgcaccgttttgttcctgttctcgttcctaagaaaactgaacaagtgaagcagggtttgattcaaagctcggtgcataaacagcaatggcagagaaaccccaaccggttcgggttctatactgcggggtgtgcagcttgccccccgaatactgcgaattcggatccgatttcgagaaatgcaaaccctggttgatccaaaacgtccctgacctataccctgatcttctcaaagaggcaaatgagaaggaagctgataaagttgctgacaaactacaaagtaccggtatatcaggagctggcgatggagc

SEQ ID NO: 9720 - DNA, 976 bp, Glycine max
ggttcacaacaacccaatcatatgctgccactcctaggatccaacatggctcaaacactaaactgcagaacactacaaccaatggactcaactatgatcaagtcactgtcccacaatccaaaaaacgccaattccaccgcattcacaaggcactttgccaaaaaatctggtgtttttatcaagatcatggcttctgctacacccacagcagctcctatcacctttggattcaagaatttgttggaaacattcactgttgatgtgcatagagcagagaacaggccactgaatgtgcccttaatagccccttttaccattgctacctctagattggccaaggtggagaacgtggccataagggttgagttgagcaatggttctgtggggtggggcgaggcaccaattttgccttttgttactgcagaggaccagaccactgccatggccaaggcttctgaggcatgtgccttcttgaggagatgtcctgcactcactttgggttccatgttgggggagattgctggtattcttccagggcatcaatttgcttcagttagggctgggatggagatggcaataattgatgctgttgcaaatagtattcgtgtgccattgtggaggctttttggtggggcttcaaataccataaccactgatattacaatcccaattgtttctccagctgaagcagctgaattggcttctaagtactataaagaaggatttaagactttaaagctgaaagtgggcaagaatctgaatgcagatatagaagtgcttcaagctatacgtgttgcacaccctgagtgtcagtttattcttgatgctaatgaggggtataactctgaggaagcagttgaagttcttgagaaactacatgatatgaggttgactcctgttctatttgagcaaccagttcatagagatgattgggatggtcttcggtatgtcggtaatatagcaagagagagatatg

SEQ ID NO: 9721 - DNA, 874 bp, Glycine max
ctttaaataggtaggacggtgcggctgctctgttgagccgcgccatggaatcgagagctccaagtgggccatttttggtaagcagaactggcgatgcgggatgaaccggaagctgggttacggtgcccaactgcgcgctaacctagaccccacaaagggtgttggtcgattaagacagcaggacggtggtcatggaagtcgaaatccgctaaggagtgtgtaacaactcacctgccgaatcaactagccccgaaaatggatggcgctaaagcgcgcgacctatacccggccgtcggggcaaggaccaagccccgatgagtaggagggcgcggcggtcgctgcaaaacccagggcgcgagcccgggcggagcggtcgtcggtgcagatcttggtggtagtagcaaatattcaaatgagaactttgaaggccgaagaggggaaaggttccatgtgaacggcacttgcacatgggttagtcgatcctaagggacgggggaagcccgtctgatagcgctctgtgcgcgtactccgaaagggaatcgggttaaaattcctgaaccgggacgtggcggctgacggcaacgttagggagtccggagacgtcggcgggggccccggaaagagttatcttttctgtttaacagcctgcccaccctggaaacggctcagccggaggtagggtccagcggctggaagagcaccgcacgtcgcgtggtgtccggtgcgcccccggcggcccttgaaaatccggaggaccgagtgcctcccacgcccggtcgtactcataaccgcatcaggtctccaaggtgaacagcctctggtcgatggaacaatgtaggcaagggaagtcggcataatggatccgtaacctcgg

SEQ ID NO: 9722 - DNA, 386 bp, Glycine max
gacggttcatttgaaaattctgctggcgctctcgcgctcacgtttgtttgtttctcgttttcgcaatctcgatcttttcgctcggaaacatgtattcgagtgcaagccagtttgacggcaatgcagccttctccggtggtggattcatgccttctcagaccacccagggccctgactcttcattcgttccctccaagaatcgtgacgctcagtccttgcttcctctgacggtgaagcacatataccatgcgtctcagtcaagtgatgataaaatcaatttgatcattgcctgtgtggcacgttaccaatgtcacttcttgaggaagggggtgtccaacaaagctggacgaatactggatgttactttttgtgcttgatgaatggta

SEQ ID NO: 9723 - DNA, 727 bp, Glycine max
  unsure (1)..(727): unsure at all n locations
gatataaatccaattataaattgactgattttcagaaatattagtatatatttatatgcatacaatgatgcaaacaaacaggaaccgtttggcagcttaatgcttcaagatctattatttgttacttcttccaatttatctgtaacttgtactcccctgccccttttaagaatacttatttacttattattttatttgcagtaatttcagctccttctgatgtcaaaaaacatgagcagaaagatgataaccttccagttgacatcaaattgcctgttaagcatgtattatccagagagcttcagctgtactttgacaaagtggccgagcttactttgagcgagtctgattcagttctctttaaagaagcattagtaagtttggctactgattcaggacttcatccactagttccttatttcacatgctttatagctgatgaggtttctcgtggtttgaataattttcctcttctatttgccttgatgcgagttgttagtagccttttgcaaaaccctcacatccaaattgaaccatatctacaccagttgatgccatctgttgtgacctgccttgttgctaaaaggttgggcactaggttggcagacaaccactgggaacttagagactttacggctcatctggttgcctcaatatgtaaaacgtttggacatgtttatagtaatctccagtctcggttgacaaaacatngctgaatgcattcttg

SEQ ID NO: 9724 - DNA, 2211 bp, Glycine max
gaagtgacagtcagccactgaagaaagacaagagaagaaacattggttttcctaagcgcccgccattgccaaagaggatagtgcgaaacaagaagaacaaaatttcccatttctcgttctgaaaatcggagttaaacactattattatatttgtgatttgtgatatcttctatctgattcagcatcatggttcagctaatgaggtctgatacggataatcactgtttgaaaaaggtgaagttggaggttcaagatgaaatcccccctcttcacactcacaagcgacccaaattggaatctccacccaagtgtggttcaagcgatgaatccctttcaatcccaccagcttcgtataaccccttggatgagccaagccctttgggtttgcgtctcaggaagagtccttcccttttggatttgattcagatgaggctctcgcaacaagaggaatccaaaaagaaagatcaaaaggcttcttcttcttcttcttctgctgctgctgctgctgctgctgctgctgcggattctaaactcaaggcctccaattttcctggaaccattttgaaaattgggacttgggagtataagtctagatatgaaggagacttggtggcaaagtgttactttgcaaagcataagctggtgtgggaagtccttgatggttgtcttaagaataagattgaaatcccatggtctgatatcatggctatcaaggctaactaccctgaggatggaccaggcacgctcgaagtagtgctggccagaagacccttgttttttagggagatcaatccacaaccaaggaaacatactttgtggcaggcaacatcagactttactggtggacaagccagcataaacaggcgacattttctgcagtgtccacaaggattgctaggcaagcattttgagaagctcattcagtgtgatccacgtctcaactatctaagccagcatccggatttggtgttggattctccgtattttgaacctggaacaacttcagttcacgaccacattgaatctagtgacggctttgatagaaaaagcgaagagcgatctggtatttttggattgcaggatgtggagtcaggatctgcagttcaatcatcttcctcaaaaagtgaacataaccttggtaaagctgttgaaaatgttaaccaagaaattacctcacctagctcagtgatgaacatccatgcaatggaagatttcagaagtagaggagctgaaacattgaagtttctcagtaatttggatcagatcaaattgcctggacttcacccatcaatgtccatggacgatttggtaagccacattggacattgcatttcagaacagatgggatccgacaatccgagtttggctggtgacagccagtatagtagatctattctggaagaattttctcagtacttgttcaatgactctcaacatgcaactacctctgatgaacagcgtgtgatgtcaagggtgaactcactttactgccttctgcagaaggatccttcttcagcagaagacataaacacaatgacaaaaaatggcaatagtctgagagatgcaaatgctttgtcaagggtgaactcactatactcccttctgcagcatgcagaagacacaatgaccagaaatggcaatggtctgagagatgcagatgtgatgtcaagggtgaactcgctatactgtcttctgcagaaggatccttctacagcagaagacacagacacaatgaccagaaatggcaatggtcttgatgcagatgagggtggaaaagttggtgtcagtaactctaacaccactgaattgtcagcatgcaaaattaaagtgcctgatttggaagttcaaccggatgatgcttctggctgcaagcagggggttagtggtatgtccaggaaggaatcagctggcgatttgcttcttaatcttccaaggatcgcatctctgcctcagtttttgtttaacatgtccgaggattctgttaataaagttagatagtaaccatctttcaattaaaacttgcaagaaacacaaaagctactatattatatagtcttcaacagtgaatattgtatatctgcagtttcaattgcgtgggattcagaaatttacattgatgatgaatcccgacagacatgacgggacactttatattttcagctgaacaaaaaaataagtgggagtataaataaaatctatgtaacgcgtgac

SEQ ID NO: 9725 - DNA, 1573 bp, Glycine max
  unsure (1)..(1573): unsure at all n locations
gagccgaatcggctcgagccgaaacttgggtgatgttaaacctagaataagtgaagaatctaatgacaagtcaaagatatggaagctcactgaaatcaacgaacaatctcaatgtagatccttgaagctaccggagaatgtaagagtaaccaagatatcaaggttgatatatacaaattcaggtaatgctattctggcattagcatcaaatgccattcacctgctctggaaatggcagcgaaatgagcgtaactcatctggcaaggccactgctaccttgcaacctcagttgtggcaaccatcgagtggcatcctgatgacaaatgacattgctgatagcaatcctgaggatgctgtaccctgctttgcgttgtccaaaaatgactcgtatgtaatgtctgcatcaggagggaagatatctctgtttaatatgatgacttttaagactatgacaactttcatgcctccgccacctgcggcaacctttcttgctttccatcctcaggataacaatattattgctataggcatggatgattcttccattcaaatatataatgtccgtgtagatgaggttaaaagtaaactcaaaggccatactaaaagaataactggtcttgctttttctcatgtgttgaatgtgctagtttcatctggggcagatgctcagatttgtgtgtggaatactgacggatgggaaaagcagaagtctagattcttgcaacttcctgctgggaggactccaccagcacaggcagatacccgtgtacaatttcatcaggaccagatccagttcttggttgtacatgaaacatcagctcgccatttatgaagcaacaaaactagaaggtctaaagcagtggttcccgcgagactcatctgcaccaatatcctatgcaactttctcatgtgatagccagctggtatatgccagctttttagacgcaacaatctgtgtatttagtgcttcaaacctcagattacgttgtcggatcaatccatctgcatatcttcctgcaagtgtcagttccaacatacaaccacttgtaatcgctgcacacccacaagaaccaaatcagtttgctttaggactgtcggacggtggagttcatgtttttgaaccccttgaatctgaaggcaagtggggtgtgcctcctccgattgagaatgggtctgcaagcaatgtggcagctacttcagttggaccttcagatcaagctcaaagatgatccatgtcagccgaaggcaagtttcttttacatacttggcttgctggccattttaagaactaaatttgtacttaagttaatgcagggcactctctccaattcagttgatccagctaagttaaatccatcaatcgtacatgccaaaagtttggagcaacttctttggttgaagaccaaaatcacattgtaatttgccaatagatgtgaaaaattcttttaaagtttaatgctaagatgatgtacaagtccttttgagtactttcaagttgcttttggctatctaattagattggttgatcctaacttgttnnnnnnnnnnnnnnnnnnnnnnnnnnnnnnnnnnn

SEQ ID NO: 9726 - DNA, 881 bp, Glycine max
ctcgcttactgttggatcgttgagtcgctgtctagattcttggcgcttccttctgggagctcaccaccggttccgtcatgtacccgtgtatagtctcatctcgatcacgtacagttcttggttgtacatacctcctcagctcgccatttatgctgcgacgaaactagaaggtctaaagcagtggttcccgcgagactcatctgcaccaatatcctatgcaactttctcatgtgatagccagctcatatatgccagctttttagatgcaacagtctgtgtattgagtgtttcaaaccttagattacgttgtcgaatcaatccttctgcatatctttctgcaagtgtcagttctaacgtacaaccacttgttattgctgcacatcctcaagaaccaaaccagtttgctgtaggactgtcggatggcggagttcatgtctttgagccccatgagtctgaaggaaaatggggtgtgcctccacccattgagaatgggtcaacgagcaatatggcagctacttcagttggagcttcttcagatgaagctcagagatgatccatgtcagccaaagacaagtttcttttacatacttggcttgctggccatttcaagaactaggtatgtatttgagataatgccattgtgttgtctggcctttgtgcagtcacataccagaacaatggaccaaacccgaaaccaaaatctaaaccttgtaattgtcaaaatatgtgaaaatttctttcaagtttaatgctactgaagcagaagtttaagtaaagaggatccctgtgatgagatgacatccatccaagcatcaaccacaattgcagcagcagcaccaccaccaccatatgcatttgcatattctcccaagtaactatcc

SEQ ID NO: 9727 - DNA, 330 bp, Glycine max
ccattgagaatgggtcaacgagcaatatggcagctacttcagttggagcttcttcagatgaagctcagagatgatccatgtcagccaaagacaagtttcttttacatacttggcttgctggccatttcaagaattaggtatgtacttatgataatgcagggcaccctctgaattagttgatccaactattctcttgatccattgtgttgtctggcctttgtgcagtcacataccagaacaatggaccaaaccccaaaccaaaaactaaaccttgtaattgtcaaaatatgtgaaaatttctttcaagtttaatgctactgaagcagaagt

SEQ ID NO: 9728 - DNA, 377 bp, Glycine max
ggaagatggacaaaaatcggcgacgatccaaatccagttctttcatttacggtcctaagtgacacactcgattctggctccgcctcagacgaagaagctcgctctggattctcactcacctgaacggatccttcttcttccttatcgcgaaatccatacttcaaaccctaatcgcgactgcggtttatgatttgtgacacaacacaaagttgacgaaggtggtttttcagcatttgtattctagtattcttctacataagttgaagcgaaaatgaggattatgataaagggcggtgtttggaaaaacaccgaagatgaaatcctaaaagcagctgttatgaaatatggcaagaaccagtgggctcgaatctcttctc

SEQ ID NO: 9729 - DNA, 376 bp, Glycine max
ggataacaaagggtttaagttgggcacgctagacatcgtcttcaatcacggtctaaagtgacactgtagactctggctcacgccttagacgacgaagctcgctctgtactctcactcacctgaacggatccttcttcttccttatcgcgaaatccgttacttcaaaacctaattgcgtgagtgtggtttctgatttgtgttgaagcgaagatgaggattatgattaagggcggtgtttggaaaaacaccgaagatgaaatcctgaaagcggctgttatgaaatatggtaagaaccagtgggctcgaatctcttcgctccttgttcccaaatccgccaggcattgcaaagctcgctggtatgagtggctcgatccct

SEQ ID NO: 9730 - DNA, 686 bp, Glycine max
ggggtgaagcttgtctagcaagtcgcattgaaaattgtaagctgcactgcagagagtgagagcgaatggtaagagtatcagcggttcgattaagcgccaccatgttctcctcaacctctctcagaaaccctaacttcctcctccttccaactcgcttcgacgctacccgttcttcgctcccacacgctttccttctccaatcgcctctcgcttcgatgctacgctgctcgcgccgccttcgacagagttcccgttctcaatcccatcgtcgaaatggacggtgatgaaatgacgaggattatatggaggatgatcaaggataaacttatatttccttacctggatttgaacataaagtactttgatttggggcttcaaaatcgtgatgctactgatgacagagttactgtggaaagtgctgaagccactctcaagtataacgtcgctgtgaaatgtgcaacaataactcctgatgagacccgagtgaaagaatttggactgaagtctatgtggagaagccccaatggcacaattaggaatattttaaatggtactgttttccgtgaacccataatatgctgcaacataccgagaattgtctccggatggaaaaaacccatttgtatcggtaggcatgcttttggtgaccaggatcgggccactgatgcaataattacaggaccagg

SEQ ID NO: 9731 - DNA, 351 bp, Glycine max
actcgttaaattttgattttgatttgaagagagaaaattttgagtttgataatggcaaatggtaacacgcagcagcctggtagctattgaaaagtgtttgtctgctgttcgatttcgaccactcaaaccctaacgtttccaacttgcaagggcttcgctccagaagggttacgatggattttgacgagtatgagtatttagagaaagcagttgaaaaccctgaagttaatcacagggctaatggtggggacaaaaatgtgaaatccgaagagagagggcgtaatgggagttcaaagcataaggatgatgatgatgatgatgttgttgatctccatcccaggcattcaaaat

SEQ ID NO: 9732 - DNA, 554 bp, Glycine max
agttgagctgagtgagtcacagttgttctcattgaagcagaagaagaaatggcggcttctctgcaactgttccaatgcaaactagcgagaccctttcggtccttccctttgcgaaggtcaactccccctctgagtctgaggtgttgcgcttcgcccccttcttcctacagctcactctcatctcaagcctgagactggcttgcttcagatacgtaaagagcttggagtatttgcaaatcttagaccagctaccgtatactctccgttagtggatgcttcaactttgaagagagaggttgctgaaggggtcgatatcatgcttataagggaactcactggaggtatctattttggagaacccaggggctttggcaccaatgaaaatggtgaagagattggctttaatactgagatttatgctacacatgagatagatcgcatagctcattttgcatttaaggttgctcagaagcgtcgtcggaaactttgctctgttgacaaagccaatgtactagaggcatcaatgttatggaggaagagatttttggcaatag

SEQ ID NO: 9733 - DNA, 580 bp, Glycine max
ggccaaacaaaaactcagaaaacacagggaaagaaagagttgagtgatggcggcttgtctgcaactgtggcaatgcaaactagcgagaccctttgactcattaccggtgcgaaggtcaattcctttgagtctgaggtgttcggccgcgccctcttcttccaagccgacgcgctcctacagcatcactctcatccccggcgacggcatcggccccgaaatcatctcggtggccaaagacgttcttgtcctcgccggttatctcgaagggattaaatacgacttccgcgagatgcttatgggtggagctgcattggatgccacgggactccctttaccccatgaaaccctttctgccgctaagcaatctcatgccgttctccttggtgccgtcggaggttataaatgggataggaacgacaaacatctcaagcctgagactggcttgcttcagatacgtaaagagcttggagtatttgcaaatcttagaccggctaccgtgtactctccgttagtggatgcttcaactttgaagagagaggttgctgaaggggtcgatatcatgcttataagggaactcact

SEQ ID NO: 9734 - DNA, 566 bp, Glycine max
gagagttaataatccgaaactaggttaaatataaccttacctaaatactagagggaaagaaagatagaagttgagctgagtgagtcacagttgttctcatcgaagcagaagaagaagaaatggcgacttctctgcaactgttccaatgcaaactagcgagaccctttcggccattccctttgcgaagttcaactccccctctgagtctgaggtgttgcgcttcgcccccttcttcctacagcatcactctcattcccggcgatggaatcggccccgaaatcatctccgtggccaaagacgttcttgtcctcgtgggttctctcgaagggatcaaattcgagttccaagaggttcttatgggtggagctgcattggatgccaccggagtccctttacccgatgataccctttctgccgctaagcactctcatgccgttctgcttggtgctgttggaggttataaatgggataagaacgagaaacatctcaagcctgagactggcttgcttcagatacgtaaagagcttggagtatttgcaaatcttagaccagctaccgtgtactct

SEQ ID NO: 9735 - DNA, 357 bp, Glycine max
gttttacggttggaagtaacagcgagaagggatttttctcgagaaaagaatcttcacgttgagaatcgagttaggatgaaattgtgtggaagtatatggttatggctgatacttctgctggcttcagttcaatcactgggatctgagaggacggatgtggcatacgtgactctattgtacggagatgaattcttgttgggtgttcgagttctcggcaaatcgatacgcgacacgggatccaacaaagacatggtcgttttggtctctgatggtgtctctgattatgccaatacccttctccaggctgatgggtggatagttgagaagattagtttactggcaaatcctaatcaagta

SEQ ID NO: 9736 - DNA, 829 bp, Glycine max
cccacgcgtccgcccacgcgtccggttatgttagtgaagcattaggtatattgctccactatttaatcttgagctgcatcttttttaatttgtatggcttttttcgttttctctatttgatttgtttatatatgttcggcttaatggattgtgtcttggatagaattttatatggttgtggttcatctgtcatactctctgttgttataggcggtctggttgatattttttttatatgttgtttggttgtgggagttgcgatgaatatgatagatttatgagaataggaattaaaattaagtgtcagggaaaacagggttgggtttggctttattaacgtatgttgagtgggggatttttttttgggtatggaaatttgaaaatttgaagggcaatgttgggaagcgggggggtttcggacgggtacgaggttggctcatagagacaaagaatgatggaatccaatccatacttcgcagtgagcagcggaacaggcaacttaccttatgggtatgctggtggcttccagccccctccctttcccgtggttcgtctcagggggcttccattcaactgcactgacattgacatcttgaagttctttgctggactgaccattgtggatgtcttgctggtcaacaagagtggacggttctcgggcgaggccttcgtagtctttgcaggagcaatgcaggttgagtttgcgttacaaagagatcgccagaacatgggtcgccgatatgtggaagtgttcaggtgtaagaagcaggattattataatgctgttgctgctgagatcaagtacgaaggaatatatgataatgactac

SEQ ID NO: 9737 - DNA, 441 bp, Glycine max
aaaaaaacgtgaataaattcgaaatcgagtaaaacaagaaaaaaaaaaagacgaaacgtgaaaaggaaaaaggggtttgcagtgttccacccacacgcacgcagaagcagaagcagaagcgcaagcgcgtgtaaccctaattagggtttgcaagccgatttgggattcgcctttcgcgtgatcgcagcgctggatccgtaccgtgttcctccgtctacggaagcgccttttgctcgatccttcgccgatctcggaagcatgtacggtccccgaggggcaatgttgggaagcgggggggtttcggacggtgagcagcggaacaggcaacttaccttatgggtatgctggtggcttccagccccctccctttcctgtggttcgtctcagggggcttccattcaactgcactgacattgacatcttgaagttctttgctggact

SEQ ID NO: 9738 - DNA, 435 bp, Glycine max
taaaacggaaaaacgggtgcgcagtgttccacacaagcagaagcagaagcgcaagcgcgtgtaaccctaattagggtttgcaagccgatttgggattcgcctttcgcgtgatcgcagcgctggatccgtaccgtgttcctccgtctacggaagcgccttttgctcgatccttcgcctgatctcggaagcatgtacggtccccgaggggcaatgttgggaagcgggggggtttcggacgggtacgaggttggctcaaagagacaaagaatgatggaatccaatccatacttcgcagtgagcagcggaacaggcaacttaccttatgggtatgctggtggcttacagccccctccctttcctgtggttcgtctcaagggggcttccattcaactgcactgacattgacatcttgaagttctttgctggactgaccat

SEQ ID NO: 9739 - DNA, 433 bp, Glycine max
tcgggatatacgggtgcgcagtgttccacacccacccacgcagaagcagaagcgcgaggcgatgtaaccctaattagggtttgcaagccgatttgggattcgcctttcgcgtgatcgcagcgctggatccgtaccgtgttcctccgtctacggaagcccctttcgctcggtccttcgccgatctcggaagcatgtacggtccccgagggtatgtcgacgcaccttcatctctctccttctttattccttttttccctccaattgtttcttttcccttttcgcaattttctggggtttggtttctgtgtggtgatgcttatgattagaaatcgtgtgtccgtctaaattcgtttgagattaacatttaattagggttgcgtgtaacaaatcggggttgattattggatgaatttatgtttatttttttttaagt

SEQ ID NO: 9740 - DNA, 780 bp, Glycine max
agcttgtttctaagaaatttcgtgggtctaagaaaaagaataaacacaatgagggtgagtcaggtagtgaaatttcaagtgctgtgggagaagaaaagttaccaattttagaaattgaagaggaagaggaggaagagaatggggataataagtcaagtaacactaaacctgattgcggaatcacttgttcctatgagaagaaagtgaatagagttgagaattcaggttcttccatggttttagttatgattattgcccttgttgggcttcttttggggcgcttcccagcattggttcttttgatgacatggtgttgcttgatgaagatagttgggattctatggagatcacagaatgtgcctatgaccaagtgttctgtttcaaactcttgatggaacaagtttttgttttgacttcttttttttttcccactttgtttctagatgaagatacacagctggtaaaagattcatgttggtctaaaagactgaggagtgaggagaggattattcccatgataggaactccaaccatttgttgggaatccaacttcatgcgttgtactttgagctgtaaatttatagatagatagatactaatcatagtcaatacattctttctttgtctatgatgttaattagttattcttataatgcgttgttttagattgatggcaaaagattgaaaaggttgaaatgaaatgagatgacaaggaagaaaaaaaaaactaaaaatgaatgaaaactatagaataacaaaaatttaacaagactagtgact

SEQ ID NO: 9741 - DNA, 493 bp, Glycine max
gatgaaggagcgtgttgaaagaattgaatttgaatccgaggaattgagcaacaagggtttgtcaatcgatgaaattgaggatgtggaaacaaccgacgaagtgggtgttagttgcgaaattggtgacgtggcattgaaggttttggagccgtgtttatgtgatgaagatgtttctgaatgcaagattagacctagccgaagtggtaggtttaggtccaagatggtgaagcttgtttctaagaaatttcgtgggtctaagaaagagaaaaagggtgaggtgaataaacacaatgagggtgagtcagggagtgaaatttcaagcgctgtgggggaagaaaagttaccaattttagaaattgaagtagaggaagagaatggggataataagtcaagtaacagtaaacttgattgtggaatcacttgttcctatgataatgagaagagagtggaaagagttgggaattcaggttcttccatggttttagttatgatt

SEQ ID NO: 9742 - DNA, 951 bp, Glycine max
cccacgcgtccgattaccactaaaatatcgcatccgaatgtttcgctcctcgtatcctcctcatccttttatgcgtgtcttcccccaacgaaaccagcgagaccaaacgtggtaacgctttgaatctttgaattcattcaaagatcccccttctgtctccctctctacgcatatcagggcactatggctgccacggtgaaacaaatgtctttgatcgtgtcactgttcggcgtggtgtccttcattttgggtgttgttgctgaaaacaagaagcctgcggcaggaacacccgtgcctggtttggatggtgtctctgtcacctgcaagtacccagctgatccaactgttgcattggggtatctttctacagcatttcttgttgcatccactgtgactggatatctgtctttgttttacccttacaaaggaaagtctattccacaaggggttctgtttaagcacaccactttcacagtgttcttcaacatttctttgttcaccactggattagctgcagctatgctgttatggccaacaatcaccgaacacattcacctgacacgcaatgtgcaccgcaatatcaactatgaatgtcctacagctaaaactggtctacttggaggtggtgcctttctatcacttgattcatctctcctttggttgattgcccttatgctagctgacaatgctcgcgaggacttctttgaagaagaaggagaagatggtgacaagggtgaatttggcacagcctcctctgatgcttattatgatgctgattcaggaccgaaggctagttcctgaagtatgctccaggtagaaattagtgtagacctggtatatctgaagctccctttgaatcacgctgaacaattccgtgcaatagtgaatgtacatatatttaaaacggttgctctcggtgaacatttattgtgcttaagcactactgcagaa

SEQ ID NO: 9743 - DNA, 407 bp, Glycine max
gcgtgtcttcccccaacgaaaccaacgaggaagcaagggggatcttgaattctgcgcttaacgcttcgaatctttgaattcattcaaagatctccctctacgcatatcagggcactatggctgccacggtgaaacaaatgtctttgatcgtgtcactgttgggtgtggtgtccttcattttgggagttgttgctgaaaacaagaagcctgtggctggaacacccgtgcctggttcggatggtatctctgtcacctgcaagtacccagccgatccaactgttgcattggggtatctttctacagcatttcttgttgcatccactgtgattgggtatatgtctttgttttacccttacaaaggaaagtctattccacaagggattctgtttaagcacaccactttcaca

SEQ ID NO: 9744 - DNA, 402 bp, Glycine max
  unsure (1)..(402): unsure at all n locations
ggtccgtgaatnntcccgggtcgactccacgccgtnnccgaaaatttattaaattgtgagggagactttgcgcatgtttatgccttntcatcggtttcagtgaaaaaggggatgcctactgcgcccattgtctccttcaacgacgccaaataaatacctcaaaacgataccttgacagagttgggtattgatatttgcattaaagttcataatctggtgaattactgctaggggcaaggctctgccgtcatttgaggggtgccctgtgaaagttcctgggatgatgcgacgtggttctggtttaggttctgctgcttctcaccgttctcgggagtcccttcctcttcctcagctgttggagaataaaattgctgctcaggaatcagaaatagagcagcttgt

SEQ ID NO: 9745 - DNA, 288 bp, Glycine max
gacatttgtgccatttttgaaatttgattcttagaaaccctaatttcgtcgttgtttcaatactctcttccttggaaaaatcaaaaggtgctcgcaggtgcagcgtttagttcaaagattgtaagcgatcttacatcgtgaatcattgataaagtaacatttatttgtgaaacgtcactggttcgtgtctgaattgaagaagtgtcatcaccatgagattgagaaagggaaataaagtggagatccgtggcaatgctgatgggcttactgtggaatggcgttgtgctc

SEQ ID NO: 9746 - DNA, 1175 bp, Glycine max
gagcaggagttctcctagagcaccatcaggaaaaattatcagcaaaagccctgtaagagtattgagaaagagtataagccgcagtccagttagatcacctgcaagaagtttaagccgaagctctggcagggttccttcaaagaaaagcatcagccgaagcccggtcagagcacctagtagaagcaatcgccgcagtttttctaggagtcctagccctgttcataggacaaggactcctcgtgggaggagtgtgtcaaggagtgtatcacctgatgcttcaccaaagcgtatcagaaggggaagaggtttcagtgaaagatactcttatgcaagaaggtatagaaccccctctcggtctcctgtgaggtcataccgctacaatggaagaaatgaccgggacagatattctacttacagaaggttttcccctaggcgtttcaggagcccaccaccacgtggaagaactcccccaaggtatcgaagcaggaggagcaggacgccatctgtttcacgcagtccacgatatcgagcccgacgatatagccgaagtaggagcccggttcgcagtcgttccctagttgatagatcccgcccctctcgtgtggagaggcatgcatcttcttctcggagcaggagtccatcaaaatcccggtctaggtccaggtcatccgtggagtctccgccaagagcaagtagagacagcaggtccaggtcatcgtccagaagccctgatggaaagcaaggcttggtctcatatggcgatggttctccatactaatgtgaaaggtgaaatatgtggtgctgagggctttgggtcactgtaaccttcaatgagctgcaggcttcaatttttgaacttcaccacctgcattgcttgatggaattcgtgaatgacacttgtttttcccctttagagacagcaatgacatgttgaaatattctagtcctagaataagttagacaataggcggtacttgtgacattaggatgcagccttagctgtgaagttgttgcggtatttgttggaatcgagactcatgttgttgctccagttatgtcttcgttggttaggacatgcgtttgagtttattgagtttaatttataaaatcaggtttagcttcgctagaccatttttataaaaaaaaaaaaaaaaaaaaaaaaaaaaaagggcggc

SEQ ID NO: 9747 - DNA, 779 bp, Glycine max
gaccgggacagatattctagttacagaaggttttcccctaggcgtttcaggagcccaccaccgcgtggaagaactcctccaaggtatcgaagcaggaggagcaggacaccatctgtttcacgcagtccacgatatcgagctcgacgatatagccgaagtaggagcccagttcgtagtaggagtccagttcgcagtcgttccccagttgatcgatcccgccccactcgtgtggagaggcgtgcatcttcttctcggagcaggagtccatccaaatcccggtctacgtctaggtctaggtccaggtcatccgtggaatctctaccaagagcaagtagagacagcaggtccaggtcatcgtccagaagcccagatggaaagaaaggcttggtctcatatggcgatggttctccatactaatgtgaaaggtgaaatatgtggtgctgagggctttgggtcacactgtaacctttaatgagttgcaggcctcaatttttgaacttcaccacttgcattgcttaatggaattcgtgaatgccaatggttttcccccctttatagacagcaatggcatgttgaaaacttgaaatattctagtcctagaataagttaagacaatagacggtacttatgccattaggatgcagccttggttgtgaagttgttgcggtatttgttggaatcggagactcggatgctgttgctctacttatgcttggttggttacgaccagcatttgagtttgaatttataaaatcaggtcgcttcgctagcccattttt

SEQ ID NO: 9748 - DNA, 447 bp, Glycine max
ggctgcataagaggagaggcttaaggcttttctttacactgtccaaattgtgaattatttcaagaattccttccacaccttcaaagttacaagccatggaaacttctcatcctctttctattgaaagcttctcttatagttggttagtgaacctgaagccatcactagaaagcctagatggctccctcagaacttcccttgatgcttctgatgaaacttcttccttcattgaaatggatccaagaatgacaccttctaaaagattcttcagaaactcccaagatttcaaatttgacttcccaatttcacaatcccctctcactcttgttgatgctgatgagctcttctccaatggctacctcatgcacctttttgttgagtcattgaagatggaagcatttgaggcctcagatgccaatccaaccctaccttcctcatcacatgtgc

SEQ ID NO: 9749 - DNA, 702 bp, Glycine max
ctctctctctctctctctctgtttcgttgtaaagaagagtgttcaagccttttcttttcttcttcctctgtcttgtcttcaacctcgttttcttttcttcgtcttctatcaccgattccgattcgctactctttcttcttcttccttttttattgatcctctctgcgatcacgaattttcccattttctccgtttcctcggcgaccaaacggaggagaagaacgcagttctgaaaacgattggaaaatgctgggaactgcactgcaattcagcggcgttcgcggcgaggatcggttttacattccggtgaaggcgaggaagaaccagaatcagcggaaacagagtcacagagccaagaacaacgaacctgaaaacgcggatttagcttcgaagaacaaagtcgatgtctctgaaaatagcaataacaatagcaacatcaaaagcaagagcgatagtaatctcaaccaatctctgaaaccaactctttctccgtccgtagaggctgtcagtaatatcgataggttcttggagtttacaacaccgtcagttcctgctcagtatttctccaagacaacgatgagaggatggaagttttgcgatgtggagtatcagtcttactttacattgagtgatctgtgggagtcttttaaggagtggagtgcgtatggagctggagtgcctttggtgcttgaccaaagtgat

SEQ ID NO: 9750 - DNA, 598 bp, Glycine max
  unsure (1)..(598): unsure at all n locations
taccggtccagaattcccgggccgatacaggcgtnaaaannnnnnagaaggggacagacagagagaaagatgcagaagagagagcagggcaagtccggcggatccgccggaggaggggcgacgccacctgcgaagagaggccgtcccttcggcagcggtaacaacagttcctctgccgctgcttcagccgcggattcggcggctccgtcaaccctccttggtccttcccttcacgttcacaactccttcgccgatcagaacaacaaaagaattgtcttggctcttcaaagtggtctgaagaatgagctaacatgggctttgaatacacttacgctgctctcctttaaagaaaaggatgacatgcgcaaggatgcgactccccttgcgaaaattcccggcttgcttgatgcgctcctacaagttatagatgattggcgtgatatagcactcccgaaggaatttgccaagacaacgaggatcaggactttaggtgcaaattctgttgtaagtggatttgggagtgaatatcaagcgctgggctcaactggtactccccaccgccctggtgtaggatctggctctgctggtatagaatcaa

SEQ ID NO: 9751 - DNA, 870 bp, Glycine max
accaagcgttaataccggtgccaaaaaaacaaaaaaaggaatttaacccacaattttttggaaaaaggaaacctcaaggaaaggattcaattaatcacaagcctatccggacatattttccaatttagccagcataaatttgcatcaaatgttgttgagaaatgtttggagtatggtgatgctactgatcggcagttgttaattgcggagattgttggacatgacaaacaaaatgataatttattgacaatgatgaaagaccaatttgcaaattatgtgatccagaaggtttttgagatctgttctgaaaatcagcgagcaacattactttctcgcataagacttcatgctcatgctttgaaaaaatacacttatggaaaacacattgtggctcggtttgaacagctacttggagaagagaaccaaacaaatggatcatgatgacaataaaggtcttgcgcaatgcttccatgcaagcacaactagtatttctgtgttacaggagacagatgagatattggatctttgggcttttcccattgaaaaaacgaatgctactgtggcttcatatctgatagttccgacattcatggcttcaagaaacatcagtgtatgcatacatgttgtgcacttaatgtaatgtcagttaagtaaattggtttgtatgattgcttgggtataattagttgggaggaaatccttcgtgatgtaaatttactggatattctctgctccactgtggttttagtgtggggccaatcaagggtttgtctccttaatatctgctctctcgtccttgtggtttgtacgttgatttagttaaatggtggctgtttttaatgttccatttgttcggacgaggattccgcc

SEQ ID NO: 9752 - DNA, 294 bp, Glycine max
aaaggagtcaaattattcacaagcatatctggacatattttccaattaagccagcataaatttgcatcaaatgttgttgagaaatgtttggagtatggtgatgctactgatcggcagttgttaattgcggagattgttggacatgacaaacaacatgataatttattgggttcatggagaatcccagacatactgcttcacaggaagaggaaggtagctgggttacaatgcaaataagtgggttactcgtatctgaattacacctgcacatgacaatgaaggcatatttgcttg

SEQ ID NO: 9753 - DNA, 706 bp, Glycine max
cccacgcgtccacaaagcgagagcattccattgttgttattattgtattgtagccggagaagaagagaagagatagcggcgaagaaagaaagatgacggaggcatatataaggaagaagcccgggatggcgagcgtgaaggacatgccggttctccaggacggtccaccaccaggcgggttcgctccggtccggttcgcccggcgcatccccaacaagggccccagcgccgttgccatcttcctcactgctttcggcgctttctcttggggcatgtaccaggtcggccagggcaacaagatccgaagggcactgaaggaagaaaagtatgctgcccgccgatccatactgcctgtgctacaggctgaagaggatgagagatttgttaaagagtggcataaatatctcgagtatgaggcagaagtgatgaaggatgtgcctggttggaaagttggtgaaagtgtgtatcactctgggagatgggtgcccccagcaagtggtgagttgcgtcctgatgtatggtgatgttatttcagccatctctatctgcttctttcattacatgctgctggtacttttgtccagtctctaaattacatgctggtacttttgtccagtctcttaaataaatttgtatctggaacatttgcaactgctttgtgaaattttaaaacaagaatgcattttgaatttgtacttcatgtgac

SEQ ID NO: 9754 - DNA, 1107 bp, Glycine max
gggaggctcataatgtactagtcccagctgtcaacgggggtattattcgcgaagagagagagggcggttgcaattgcatagagaagtgcagagagagcgcagcgtaacgactcagtcaaacactctgtaactctttattttattttctttctttctttctccgatcgcatagctcgctcgcaaccaccatgccttcccgaagaagaactctcttgaaggtcatcattctcggtgacagtggggtggggaagacatctttgatgaaccaatatgtgaataagaagtttagtaatcagtacaaggcaaccattggagcggattttttaaccaaagaagtgcaattcgaagataggcttttcaccttacagatttgggatacagctggccaagaaagattccaaagccttggagttgctttctatcgtggtgctgattgttgtgttcttgtatatgatgttaattcgatgaaatcatttgacaaccttaataactggagggaggaatttctgattcaagcaagtccttccgatccagagaattttccttttgttgtcataggaaacaaaatagatattgatggtggaaacagcagagtggtgtcagaaaagaaggctcgggcttggtgtgcatcaaaaggaaatattccatattttgagacatctgccaaagaaggtattaatgttgaagaagcattccaatgcatagcaaagaatgccctgaaaagtggagaagaagaagaattatacctgccagacacaattgatgttggaaacagcagtcagccacgggcaacaggatgtgagtgctgaatatataggttttcttttcaatacaataaagtacattacttcaaaatgatagtcattgctgtgtgtgaggagacatcattgtacattagtgtttgctcaagaaacaaattggtccaatgctatacgttgggtgcttgtttggttttgtgataattgcccatatcagttgttctacatgtatgctattccgatattgtgaaagaaacagcgttagatttttctgaagttatctgttttgcattgtctatcgttcatactcgacatccccagtattttttgtacgtctattttcgttgcc

SEQ ID NO: 9755 - DNA, 505 bp, Glycine max
ggtaacgactcagtcaaacactctgtaactctttattttattttctttctttctttctccgatcgcatagctcgctcgcaaccaccatgccttcccgaagaagaactctcttgaaggtcatcattctcggtgacagtggggtggggaagacatctttgatgaaccagtatccttcggtttctgtctacaaactccgtgttctttacttttttttttttaatttgcgtttcaatttgttttctattgtttagtactgcatgaaaactatgtattttcccctaacatacgcaatttagatatgtgaataagaagtttagtaatcagtacaaggcaaccattggagcggattttttaaccaaagaagtgcaattcgaagataggcttttcaccttacagatttgggatacagctggccaagaaagattccaaagccttggagttgctttctatcgtggtgctgattggtgtgttcttgtatatgatgttaattcgatgaaatcatttg

SEQ ID NO: 9756 - DNA, 276 bp, Glycine max
tggaatgcttcttcaacattaagaccttctttggcagaggtcttaatgttgaagaagcattccaatgcatagcaaagaatgccctgaaaagtggagaagaagaagaattgtaagttcttaaatctgggcatctctttcatatatgtgaactgaccaactgaactcactaagacataaatacaataagctacatctctcagatttatgagattgcgttcattggttgagggagtgtagtttggttttgtcagagttctaattcataattttcatgtt

SEQ ID NO: 9757 - DNA, 438 bp, Glycine max
cagtcggtaactctttcttttcttttctttctttctccgatcgcatcgcgcaaccacaatcatgccttccggaagaagaactctcttgaaggtcatcattctcggtgacagcggggtggggaagacgtctttgatgaaccagtatgtgaataagaagtttagtaatcagtacaaggcaaccattggagcggattttttaaccaaagaagtgcaatttgaagataggcttttcaccttacagatttgggatacagctggccaagaaagattccaaagccttggagttgctttctatcgtggtgctgattgttgtgttcttggatatggatgttaattcgatgaaatcatttgacaaccttaataactggagggaggaaattctgattcaagaaacaaaatagatattgatggtggggacagcagagtggtgtcagaaaa

SEQ ID NO: 9758 - DNA, 346 bp, Glycine max
tgccaaagaaggtcttaatgttgaagaagcattccaatgcatagcaaagaatgccctgaaaagtggagaagaagaagaattatacctgccagacacaattgatgttggaaacagcagtcagccacgggcaacaggatgtgagtgctgaatgtataggttttcttttcaatacaataaagtacattacttcaaattgatttcactgtgtttagccattgctgtctatgtggaggcatcattgtacattagtatttgctcaagaaacaaattggtccaatgctatacgttgggtgcttgtttggttttgtgataattgacccatatcagttgctctacatgtaggcta

SEQ ID NO: 9759 - DNA, 400 bp, Glycine max
ggttgcatccaaataagaacaagcatgtcaagctttcaaatctgtgctcaaacagtcacatcatggaccacaaccaccacaacaacaacagggtgccaagaatccatgcattcttatcaccaacaccgccttctcctcccatgctttccttcattgctgctctttccatcacaacactaatcttcatgtgcctctacgttttgtcacccattgtttccgtggccattcttctagccctttacatcaccaccctcttcctttgcaggttcatgcaagataggagagaattgagagaaagaacctcttttcatgcacaaacaccacaaaattaccaaagggttagtgagggtttccaatagccttttttgggttgttgaggaaaaaaggggtggcaagaggc

SEQ ID NO: 9760 - DNA, 1098 bp, Glycine max
catctttctccgccaccctagtccaagactcgttaagattagccactgatgttatccccaactactccttcggctgcgtcaacgccatcaccggcgcctctgtcccggcccaagggcttttgggcctgggccgtggcccgctgtccttgctctcccaatccgggtcaaattactcgggcatcttctcttactgtctccccagcttcaagtcctactacttctctgggtcgctcaagctcgggcccgtgggccagcccaagagcattcgcaccaccccgcttcttcgcagccctcaccgtccttctctttactacgtgaacttcaccggaatcagcgtgggacgtgtcctggtaccctttcccagcgagtatcttgggtttaacccgaatacaggatccggaaccataattgattcgggcacggttataacccggttcgtggagcccgtttacaacgcggtgagggaggagttcaggaagcaggtgggaggcactacattcacgagcattggagccttcgatacgtgttttgtgaaaacctacgaaactctggcgccgccaattacgctgcacttcgaggggttggacctgaaactgccgttggaaaacagcttgatccacagcagcgcgggttcgctggcgtgtcttgcaatggcggcggcacccgacaatgtgaactcggtgttgaacgtcatcgccaactttcagcaacagaaccttaggattttgtttgataccgtcaataataaggttggcatagcccgtgaggtttgtaactagctggttggctacatttttatttatttatttattaatatgtaccagtggctttcttgattagctaactaggtttggatctttcgttgggttcaaaaacgtgatggtgtgggtgtgtggccacggtgaataagcttgccttgtgtgcctttggaagatatgcaatgtgaaataggacctagctagtactattttatcttagatcgatcgttgtcgatcattgtaatgatgtttgattaaattaataatgtaagatcaattaagtagcaaggatgtatgttgtttagtttggaataataatatgggatgaattactactgcc

SEQ ID NO: 9761 - DNA, 937 bp, Glycine max
ttgtgacaatgttcgtggtggtggaatatttgccattggggaagtggtggaaccaaaaatcagtgtccaaccccgttggtaccaagaatggcacactacaacgtggttttgaagagtattgaggttgatacagatattctacagcttccctcagatatatttgattctggaaatgggaaggggacagtaatagatagtggaacaaccttggcttatcttcctgccatagtttatgatgaactgattccaaaggttttggcccggcagcctcgactgaaattatatcttgttgagcaacaatttcgttgttttctgtataccggaaatgttgatcgtggatttccagttgtcaagcttcattttgaagattctctatcactgacagtttatcctcatgactacctgttccagtttaaagatggtatctggtgtattggctggcagaaaagtgtggcacaaacaaagaatggaaaggacatgacccttcttggagatttggtgctatcaaacaaactagtgatatatgatcttgaaaatatggccattggatggactgactacaattgctcttccagcattaaagtgaaggatgaagcgactggaatagtacatacagtgggtgcacacaatatttcttcagctactaccttatttatgggaagaatattgactttctttttgttgctaactaccatgctaaacaattaaattaacttggtcttgatataataagtatgtcattcattcaattttgttgtaccataattccttgaatgataaggtgtgcagtgtggttggtatggtatagtcaatcattactcgtgtagatagaattgagtcaattgacaaaggggcaaatatattttttttcagtatttttttgtattatttttcaaattgatttcctaatgaatgtattgccttgacattttatgcc

SEQ ID NO: 9762 - DNA, 372 bp, Glycine max
ggggatcacaggattcagatggtggactaaaatcagcaacatacatattcgagactcctcctcctaagtcctaaccctaatcatcctcttccgcaccttcgccttcttacccctccttcctctctcagcttccttctttctacgagggagagtgtcgctagcattcctccttaagcgtttatgtttaatgtttctttgtgacttggtgtttggtttctgtgatggcagatactcggagagtttgcatgcatttctgtgttttggaggaatgtatcacttcgtgtctggtggaaatgtgcgagttctaatggcgtgctgaatgctggctacttctgttttcagactatggcatcgggcttatcatgctgtgtt

SEQ ID NO: 9763 - DNA, 540 bp, Glycine max
cccacgcgtccgcccacgcgtccgatactaccagaaaaagaagaacccttctaaaaacctgcggcaaaaagaaccaacaatgtcgccgagcttcgtcttcgaccctcctagcgacgaagaaatcgaacactccgaacacgaagaagaagaagaagaagaatcagtaggagaaccagagtcaggatcagaatcagagtcagaaggagaaggaggagaagtagaagaagggcataaagaagcgcgggttccgaagaagaagaagaagaaaacacagtctccatgggacttcgccaaatacacggaatcagtggccgaggaacacgctcgcaggagcacaacctcggtcgacgagaaaatctcaaaagcactcaaacaacgttccacgcctctcgttgctgagctcgaccacagctccgagtccgaacctgatgaacaagaagattatagaccggaggaagaagatgaagaagagggtaatgatggtgacatcaaatccttttttgctccttctggtggaacctctttccatgccgattcctt

SEQ ID NO: 9764 - DNA, 516 bp, Glycine max
ggcggcataaaggaccaaccatgtcgcctagtttcgtcttcgacccgcctagcgacgaagaaatcgaacactctgaacacgaagaagaagaagaatccgaagaagaaccagagtcaggatcaggaacaggatcagaatcagagtcagaaggagaaggagaagaagaagaagggcacgaagaagcgcgggttccgaagaagaagaagaagaaaacgcagtctccatgggactttgctaaatacacggaatcagtggcggaggaacacgctcgcaggagcacaacctcggtcgacgagaaaatctccaaagcactcaaacaacgttccacgccgctcgttgctgagcttgaccacagctccgagtccgaacctgatgaacaaggaagattatagaccagaggaagaagatgaagaagagggtaatgatggtgatagcaaatccttttttgctccttctgatggaacctctttccatgccgattccttcttgcagctcaatctgtctcgccctttgctc

SEQ ID NO: 9765 - DNA, 347 bp, Glycine max
caagccttcgttagggtgccaaaagaccaacgaaaggggaagccttgttcaccaattaagtctttgaaaagaaacagtaattggaaaatggcttcaaagagtgtttcagccgttgccctaattctggtctccctcaacctccttttcttctccatggttagctccaaccccctaatgacccctgcccttgtctcatcaataatatctagcaaaaagtgccccgaattacatgtttgcgccactattttgcctccccatcacaagccagaccagggttgctgccccctcatcgccggtcttattgatcttgaagccgccgtgtgcctctgcgccgtactcaagctcga

SEQ ID NO: 9766 - DNA, 452 bp, Glycine max
agaagggttacgtgtacggtggtgttgcggacatgtgtttcgatgggaatgcgattgagatcggacggctaataggggactatggtgtttgagttcgagaagggggtgcaagtagtggttcccaaggagagggttctggctaccgtggagggtggggtccactgcgtcgggattgcgaactctgataaattgggtgcggccagtaacattactgggaatttccatcagcagaatctgtgggtagagtttgatctggtcaatcgcagagtgggtttcggtacggctgattgtagcagattgtctaactagaatgggggtttaacgattggatatgtgttggtgcatgtaacttgcgtgtgtcagctgtaggtaactagagaatttgtatgtagggaatatcaacgtgtcacgtgtgtgatcaggcacatgatcatgatgatgtggttgaaatc

SEQ ID NO: 9767 - DNA, 581 bp, Glycine max
gggttttacttttcttctcagtaacaatgtccttcattcccgacgagatttgaattttgaagcatatattattgatcccttcctcgtcgaccatccgtctgcactgcacaaatactcggactcggagaccccttcacggagctccgtcgtgggctcgtggccaagcaccacggcaaagatcggtacctgctctcatcgccggtggcctcaaggacttgggcaccaaaaatcccgttctctacctcgatttcgaagttcccgcctaattcacacggcttatgctgaagacactgctgctgctgctgcaagaaaataaaataaaaattgccaaaatagggaaacacaaaattgttggtggtgttgaggtgctaattagaggacaaattgcaaatggctacatctgttaataagattggacactggaagcgaaaagagttgtggtttcttgtaatttatgcaatccttttctatgttatcatcatcaaccgttcacttcaactctctcgtgattattacaaacagcttcacggtttacgcccgggatggctcatagctcattacctcaatgatgtttcagatgc

SEQ ID NO: 9768 - DNA, 483 bp, Glycine max
gaaaaacaatagtcacagcgagtgtggttgcgtttctccgttctcagaaggttttggtcagtgaagtcttctccttcaacaacaacaaggggttgcagttaaaatggatgaagctgaatttcaacgccttctccaactcttccccgttgttcgttctcgcgattacactgcagaagcatcatcatccaaacaaattgcatctgggtcagcacagaatgaggtaaaggaatggcaagatgcatgggatgaaagggataaggattttgagaagcaaggaattaatcaacaagattcattttggagcaagctaaagtcagaggctgctaggaaggtgggtgcagaagaagcggagagattttgcaaggcgttccaacaaatccataagaaactagtatgtgcaaaataattgtgatttaagtcattgttccaacaaatatattatgaaagatatattttatacaacttggtatcttcttggaaagc

SEQ ID NO: 9769 - DNA, 466 bp, Glycine max
aacaacaacaaggggttgcagttaaaatggatgaagctgaatttcaacgccttctccaactcttccccgttgttcgttctcgcgattacactgcagaagcatcatcatccaaacaaattgcatctgggtcagcacagaatgaggtaaaggaatggcaagatgcatgggacgaaagggataaggattttgagaagcaaggaattaatcaacaagattcattttggagcaagctaaagtcagaggctgctaggaaggtgggtgcagaagaagcggagagattttgcaagtcattccaacaaatccataagaaactagtcaatgaagagttgagtttagatgctgctcgaagcttcttaaattcatcctagagttctaaagaatcacgcatgctttcgacatttcttgtgattgaacaatcagccgttgtaacattgtaattcttttgtactgtatcaaagtattttat

SEQ ID NO: 9770 - DNA, 502 bp, Glycine max
ccggctcgacccaagcgtcaggggaggaaaggaaagggttttgtagagggagagaattccaaaccaaaaatccgaaataaataattttttttttttaaaaaaaaagaaccgggtgtgggtgttgttggtgttggcggaggcagatcggagatctgtgatagatatagatggagggagttggggcccggcttgggcggtcctcgacccgctacggaccggccacggtgttcactggaccggtccggaagtggaagaagaaatggatccacgtgtccccttcttctgcttcctctaattccaacgccaataatcatcacaaccacgcttcccatgcctctcatcttctcctctacaagtggacccctctcacccacaggcagaacaccgccactactaacaacgctaacgccaaggactcgcctccggagcctcccgaggaaccgcctcgaaggaaattcaaatatgttccggttgctctactagaggagcagaaaaatgaggg

SEQ ID NO: 9771 - DNA, 476 bp, Glycine max
ggttttgaaaaatgtcatttcaccaccgttcggtaaaaatggttggtatttcaaaatgatttcccgaaaactgtcttaaaacttaaaaggttattctaaatgatggaggttgggattacgagaggttagggcattttgatttttcattgtctactcgtctttgattctatcacaataacccatacatttcaaatttaaaaccctctaaatcaatttagactatccggaaacctccttggcgcactatcgtggcaatttcaggccgccacatacggcggcaccttatagttcctcacccttggccggcctttgcagtttagcgtcctccgacacgatggttgacgtcgatttcagtagagccttcgggaataatgacgaaactagatctgcgagcatagaaccagatctgctaccagacggtggtggtgggagttatcgtgggtgcgggtgaaagaaaatgcgaagagaaacaaaag

SEQ ID NO: 9772 - DNA, 514 bp, Glycine max
gatatttatttctcctgctgcgacgactggtacatgatcagcagttcccccattttaagttagattattatcacacctcgtgaacacagattgcagttggtgcggaggatcgatctcgccatgaatttcaattgcactgctaacaaggagcaaaagaaaaccgtagaccaatctatcttattgtgctgcaagttctttgtctctgaatcacgcaacaatgccactctcaatgcaatagaacgagctgcaaggtcaaacccagaaactgtgattgtgaacatgtttcatgatcgagcttataacagggcaaggtacgaccttgtgtcgtatgttttgcacgactgcacaggaaatcccatatacagccccttgcaccaaactgtcatagccatggctgaggctacattcaatgccatcaacctcgaaattttttcccccaaaatttgggaaaaaaaccggggtttggcccctttcaaaacccccccttttttcggggccctttttttgggggggg

SEQ ID NO: 9773 - DNA, 443 bp, Glycine max
gacgactggtacatcatcagtacttccccaattttcagttagatagattatcacacctcgtgaacacaggttgcatttgctgcggaggatcgatctcgccaatggatttcaacaaggagcaaaagaaaaccatagaccaatccatcttattatgctgcaagttctttgtctccgaatcacgcaacaacgccaccctcaatgcaatagaacgagttgcaaggtcaaacccggaaactgtgattgtgaacatgtttcatgatcgaagttataacagggcaaggtacgaccttgtgtcatatgttttgcacgactgcacaggaaatcccatatacagccccttgcaccaaactgtcatagccatggctgaggctacattcaatgccatcaacctcgaattccatgaaggtgctcaccctcgcttgggcgcactcgacgacattatc

SEQ ID NO: 9774 - DNA, 1075 bp, Glycine max
cggacgcgtgggatttaaaaaaacactgtttctcttctctgtacctccccctatatattcctccccctttattattagagcacagaaagaatttctgtgcctgttttgattagaagggaggagggagaagaagaagaagggagggaatagaaattaacccagtgtttgatcaatttgtatggttcaagattgaacacaaaaaatggcggttactactcgcactctatctgccacagaaaagaaacactggtggcttaccaaccgaaagattgtcgagaaatacattaaggatgcaaggagcttaatagcgacgcaagatcagagcgagatagcttcggctctgaaccttgtagatgcggcactggcgatttctccgaggtttgaccaagcgcttgagctgagagcgagggcgttgctgtatttgcggcggttcaaggaggttgcggatatgcttcaggactacattccgagcctgagaatgggaaacgatgactcatcatcgtcttcttcttcttcttcttcttctgacacctcttctcagcagctttcgagggagggagtgaagcttctctcttcttcctcggagtctccggtgagggatcatagtttcaagtgcttctctgtgtctgacctcaagaagaaggtgatggcagggctgtgtaaaacttgcgacaaggaagggcaatggagatacttggtgttgggtgaagcatgctgccacctaggcctaatggaggatgcaatggttcttcttcaaacagggaaacgcattgcaagcgcggcattccggcgcgagagtgtgtgctggtctgaagacagcttttgtgttaccaatatacccttctccggcgattccacaaacgcgccaccctcaactccgccgcgaacccttctcgcagactccgagagcgtggcccaactcctcggccacataaagttcctcctccgccgccgcgccgctgcactcgccgccctcgacgccgggctctactccgaggccatccgccacttctcgaaaatcgtcgacggccggcgcagcgcgccgcagagcttcctcgccgaatgctacatgcac

SEQ ID NO: 9775 - DNA, 843 bp, Glycine max
ctcgagccgcgcaaccccctcttttagcgttcgaacaaaattagggttttctcaaccctagggtttaccttctcttcccctgttcgaaattaggcaaatcaaaacagaaacacgactacaaaaagaagaaaagaagaaaaagaatcaatcattcattgatcgctgaaacgatacgatgacagggaaggcgaacccgaagaagcacacggcgaaggagatcgcggcgaaggtggacgcggcgaccacgaaccgcggcggcgggaaggcgggtatgaaggaccgaaccgggttggagaagggcgggcacgcgaaatacgagtgccctcactgcaaggtgacggcgccggacgtgaaatcgatgcagatccaccacgacgcgcgtcaccccaagatccccttcgaggaggacaaagttgtcaatcttcacgccaccaccagcgttcccgagtcctccaagcctcgccccggtgttcgcggaagcctcaagaagtgatctcaatcgatcgttggaatcgttatggcccctccttcattcgtagttctcaatctcttttttttctttctttttctttttctttttattttgttgcctaagttgacgttgttgagtattttggaagtgggttttttaagggaaggggttatgaggatgatgccgtgtatgaaggggcagagaaggttttttttttatattctcttattgagaattgagaacgagatttttaactgaacccttctttttaaggatggaatatgtatattgttccatataatggaagttaaagtggtgttgttgaccgcctaaaagtaaaaaaaaaaaactcgagactagttctcctcgtg

SEQ ID NO: 9776 - DNA, 366 bp, Glycine max
ccaaacgcgcaatcacaacacaacccctcttttggtgttcgaacaaattagggttttcccaaccctcttcccttgttcgaaactagcctaatcaaaaccgaaacaaacgattacaaaaacaagaaaagaagaaaaataatcattcattgctcggtgagaagagagagaggaacggcccgatgaccgggaaggcgaagccaagaagcacacggcgaaggaaatcgccgcgaaggtggacgccgccaccactaaccgcggcggcgggaaggccggcctgaaggaccgatccgggttggagaagggcgggcacgcgaaatacgagtgccctcactgcaaagtgacggcgccggacgtgaaatcaatgca

SEQ ID NO: 9777 - DNA, 558 bp, Glycine max
  unsure (1)..(558): unsure at all n locations
actgaaaaagcggtggtagttgatttaacacctaatgcaagttcattgtggactgctgccgtgaagaaaattactttttccaagaagcagctggtgccattttttgtaaatgtccagcgtgagggcctggaatatctacttcaattagtgaaggacgggaaactgaagtctgttattgactccaagtttcctttgagcaaagctgaagatgcttgggctaagagcattgatggccatgctaccggaaaaatcattgtggagccataggtacagtttgcttggaattgttgtatttctagtttctacatatctggacaaggtttgtgtaaagctcatatgaaaatgaataactagggatatcgtatgccgtaaggattttaagttaatgtgttttcatttgatatttcgtactggtttgtatatgacaagatgctttatcaggcaactttttctcgtgtcctactcggttgttgtgctttcaggaaacgggttaagacgacgaatccacatgtgtataaatgagcaatacgcattccacaaaaaaaaaaantaaaanag

SEQ ID NO: 9778 - DNA, 414 bp, Glycine max
ggacatggttgaaggcgaaggcgtttgaaatcgagtaaatggaagcgacattctcttcaacgacggcaagaggatactggaatcagacacgtggttcgacagaacctttgttgctgagagtagatgaggctcgcgatcggaaaccgagttcactgtccattgcgcggcctagcaagttcgtgcagctgtcacttgctcgaaccaggaagagttctttctttaaggtgttatctgctgaaaaggaacaaattcacgttgtagagggaagtcgtgttgatgagttatatgatgcattggttacacgtattctgcctttggtctcagtgtcatcaaatcctaatcacaagcttttagttgggctggctggtcctcctggtgctggacaaagcactccagcacatgaagtagccagac

SEQ ID NO: 9779 - DNA, 327 bp, Glycine max
agagaatgctgatttaagagcattattgagatcaatgcaggtggatatgcgtgatttcttaaatgctcctaatggactaccaaagcaatctttcactggcaatgaaagagttgaaagtgatccttcacaatctccattggttgggaaaatggacgtatttgaccttccttttcacatggccagagatcaaatagaagaaagtcttcgcaacaaaatggcttctataaaggagcgcttggttcagttgcaagatgctcaaaaggaagcagaagttacttctgaggctactgagagggaacattagcattaagcacaacatgacgaagc

SEQ ID NO: 9780 - DNA, 475 bp, Glycine max
tctgtctctcctctgtcttataactttacctttctatcctcatcctcatggagtagtaaagaagtaactaatcaaccacaaacctaaacaaccccttttgcctaaagctccttccttttctccaatggcaacctgggttttatcagaatgtggcttaaggcctcttccaccagtgtttccacggtcaacaagacccatttcgtgccaaaaaccttcaaagtctagatttttaagcacaaacaagggtgtgccagatctgaatctccaagcaagagggttaacatgctgtagttttagggatagaaagtgggaattgggagtgagtgctccactgaaagttgccaccaatgagggagaggaagaagagagaaccaatggggctaataatggggttggtgaggaagtttcagaatttgaccctagtgcaccaccacccttcaaattggcagatattagagctgccattcctaaacac

SEQ ID NO: 9781 - DNA, 406 bp, Glycine max
agtgtgctgtgcgttgcagcgatagaggggggatgttgattcgacgattgccttggacggccatttcttttgccgcaccacttcccttctgtttcggcgctaccaatggacttcccattcgcaagcaacttaactcttctctcttctccttcttctgctccagctccggcgtcaatctccctctacaacctggtcacgaaacggatactcgtcactcgcagtctctgaaacccggtctttacctcgttggaacgccaatcggaaatctcgaagatatcacactgagggctattcgcgtgctgaactcggctgacgtcatactctcagaggacacttggcactctgggaagttgcttcatcactacaacatcaaaacaccccttatgagttatcacaagttcaatga

SEQ ID NO: 9782 - DNA, 1024 bp, Glycine max
cggctcgagacgacagaaggggatagcataacaataacatacataaaccttgttatgttctgccgccaccagcaggatcgcgtattcgtgattgtttccgaaaaccctcgtcttcgaaatcagcaacaaaaacgcgaagtgtactaagcgaagcattgcagcgtgagaatggggaagaaggcaaaagggtcaaggaagggtaagaaggcatggagagctaacatcagcaccgaagagatcgaagatttcttcgagaaatcaacgaaggacgctctttctggtggctctctacaagccgtttcttccgattctctcttctatgaagacaagtccaaagatcttgctgtgaagaagaagatcgagaaacatagggagagggtgctccgatgtgatagcctgctacagaaaaatcagtttgttaagccagtgccatcttctattctgaagaagtgttctaaaaaccgtaatgtggcctctaaatccaatttgaaagtggccaatcaagatggtgataaggatgattctgccatgtttgatctatgggatgataaaggcaaggatgacaagaaggtgaaaaaggtatcaaagcctactcttatcccagcagtagagattgatcccccaggctgctctttcaatccctcatatgacagtcaccaggatacattggcttctgctgttgcggaagaaatgcaaaaaatctacaaaaatgaattgggccctgaaccagtgccattaactgttcctggagaagctattgctgaagaagatatgtattttcttgatgtggacaatgggagtgacaatgatgaaagtactcttgaaaatgagggtgaaaatgaacatggcacattggagaaaaagcccattaaaactaagagagttactagagttgagttgaataagagagctaggcggaaagaacagcagagaaaagaaggagaagctaaaaagatgaaggaattgtcaaaggaaattgatagcataccggaaattattcagggaattgaggaagaagatgagg

SEQ ID NO: 9783 - DNA, 385 bp, Glycine max
gttctttcatgaatcctggttatggaatcccaacttctcatcaaggagttggggctccaccagacactcatcctggcagtcatggttacctccctccatatggcatgccagttatgaattcatcaatgtcagagtcagttgttgaacaggggaaccaattctctgcactaggttctcacgggcataatggtcatttacccggaggagggaaagccaatcataacacagacaacaaaggctcttgtaagttaccagttcagagaaatggagcagtatcgcatgtcctgaaacatcagacatctaaggattttgagttgcaggagacttcagccagtagtcctagtgaaatggcacagggattaagcactgggcaagttgcagaagg

SEQ ID NO: 9784 - DNA, 806 bp, Glycine max
tacggctgcgagaagacgacagaagggggcttcaaggttgtcgttaagacttaataagacaacccgaagaagcaaacgcagccgtagcgtagaggaagagtgcgaaagaaagatcgttctcgatgacagaggggaacggtgacaaaactctgcgaaagatcgcagacgcattcaatgaccttgcaaacgttttcaccgattctcagagcgcagaagcagaggtcaaggttgctcccttctctcatgcctgctctctcgtctcccctctcttcggttgcttgggcgtcgccttcaagttcgccgaaatggattacgtcgccaaggttcatgatctggcagaggcgtccaagtctattcagaatctgcagtctctgattgagctggatgtgcaagctaacactgttaggaaaggaggtagccatacgcggaatctgctcagagtgaagcgcggacttgacatggtcagagtgctctttgagcagattctagttacagagggtaattcccttagggatccagcttccaaagcttacgaacaggtgtttgcacctcaccatggctgggcgatcaggaaggctgtttctgcgggaatgtatgcccttcctacaaaggaacagcttctgaagaaactcaatgaggatgaggcatcggcaaaagaccacatgcaaagttatgtcactgcttccgcacctctaatccaatacattgacaaactctttgtttctagagacttgggaatagattggtgaaaccttgggttgtatttcagattgtacaatgtaatttgctattattaaatttatatg

SEQ ID NO: 9785 - DNA, 592 bp, Glycine max
ggaaatcaaaccaacacaacaaagaggagttaataattgaagaaaatgtccaagtatggaacatctctattggtgccttctgttcatgaacttgtgaagcaacctatcaccaaagttccagatcaatatcttcatccaaatcaagatcctcctgatatatctaacacaaccttaccacaagttccagtcatcgaccttagtaaattgttatctgaagatgtcactgagctagagaagctagacgatgcatgcaaggaatgggggttcttccagctgattaatcatggagtcaacccttcaatggtggaaaacgtgaagagagatgttcaagagtttttaaatcttccaatggaaaagaagaagcaattttggcaaatcccagatgaattggagggttttggccagttgtttgttgtatctgaggatcaaaagctagaatgggcagatatgttcttcattcacactcttccaataaacgcaaggaatcttcgcttatttcccaactttcctcaaccattgagggataatatagagaactattcttcgcaattgaaaaactttgcctcacaatcattgagcgtatggcgatggc

SEQ ID NO: 9786 - DNA, 454 bp, Glycine max
attatggtaactgaaatctcgcaacgttatcactaatgttattgttgctgcgctacgtaagacacgagagaagggaagacaaaagctattgtgatttgtgagtgatatgagtatgtctattatgcatgcaatgtcgatcagaagcagcgctttcttttgctttcaaataaattgctccgattcaaagcaaggccgtggttttggagaaaacactaacagtaacagtaacaggaccagattaagaccaacaaatctgacaagggatcaacaactaaacagtctcgccctctatcttctcaggcaccccgtttaagttcacaacttgacggcaaatctaggaacgactttttggatgttgactttgaggaacggctaaaagcagttagaaggtcagcacttgagcagaagaaggcagaggaggaaaaagaatttggagcaattgactatgatgcac

SEQ ID NO: 9787 - DNA, 478 bp, Glycine max
gaaaggtacaaaacaagaacccctcgtccgctccaaaaccctaaaacctgaaagcatacgctacttctgcttcgttgcgatgttggaaatcaaaaccgccaagacccgcaagggcaagcgggagctcgagaagcgcgcccccaagctcgtggaatcggggaagaagacgctgatcctgcacggaacgaagaccagcggcgtgctgaacgccgtgctcgcgcagatttatcatttgaagaaggacagcgccgtcaagtacagccgcaagaacgagaacgtcaagcctttcgaggccggcggcgagacttcgctcgagtttttctctctcaaaaccgattgcagcgtatttgtgtatggatctcactcgaagaagcggcctgataaccttgttatagggagaacttatgatcatcatatctttgatttagtggaggttggagttgaaaattttaaacccatggagtcttttagttataat

SEQ ID NO: 9788 - DNA, 469 bp, Glycine max
ctttctttgggcggacgcgtgggtgtgaattaagtttgaaaatgcacggtcggcctcgcaaagcgttgaagcaagaagatgaagccgcttcagcagccaaagctgaaaagcttcgttcactccaagctcagttcctcgccaatcaccacaatcacatttatagcaaggaagcgttagatgtgagcgcgaagcttctagaagtgaatccagagtgctacacagcttggaattacagaaagctcgccgttcaacatcttctctctaactccgattccgatcctcactctatcttcgatgacgagctcaaactcgtggagattgcgctgaggaagaatttcaagtcttacggcgcgtggcatcatagaaaatgggtactcagcaaggggcattcgtccatagacaacgaaatgcgccttctgaatggttttcagaagatggatcctcggaattttcacgcctggaattaccg

SEQ ID NO: 9789 - DNA, 1612 bp, Glycine max
  unsure (1)..(1612): unsure at all n locations
ctcatccaacaataacaatancaacttctccaccacctccaacaagcatacatatcatatctttgattcagcttccaaacgcgccattcccatttctctctctcttgcttcttcttcagatacctaacctaatctcccaaacaaacaaaccaactcaaccttatcaatatcgtttaaataaattttgatcgcgcacgcgctttgagatagatcatgctgcgtttgtgctacggccctctggattgctgcttcggacgccgtggtggccgcgccgccgacggacttctctggcacaccgacttgaagccccacgcctccggcgacttctccatcgccgtcgcccaggcgaattacagtcttgaggatcagagccaagtcttcacctccccctccgccacctacgtcggcgtctacgacggccacggcggccccgaagcttccagattcgtcaacaagcgtctcttcccttatttgcacaaattcgccactgagcaagggggtttgtcagtggatgtgattaaaaaggcgttcagtgccacagaggaggaattcttgcatttggtgaagctatccttgcccattagtccccagattgcttccgtcggatcctgttgcctttttggtgcaatttctaataatgtgttgtatgttgccaacctcggcgactcgagagctgttcttggcaggagggatacggtgagaaagaacagtccagtggtggcacagcgtttgtcaacagatcataatgtagctgatgaagaggtgagaaaagaagttgaagctctccatcctgatgactcgcacattgtggtttataaccgtggagtttggaggattaagggcattatacaggtgtcaagatctatcggtgacgtgtatttgaagaaaccagatttctaccgtgacctgggttttcagcagtttggaaatcctattcctttgaagcgttctgtaatgacagctgaaccatcaatcattattagggagcttgagtcagaggatttattcttgatatttgcatcagatggcctctgggaacaattaagtgatgaggctgcggttcagatcgttttcaaacatccaagagctggaattgccaagagactggtgagagctgctcttcatgaagctgcaaagaagagagagatgagatacgatgacataaagaaaattgacaaaggaataagacgacacttccatgatgatatcactgtggttgtaatctatcttgatcaccatgcaggctcctctaagcaaactgctgttggctatacaactgccccagttgatattttttccctaaatgcggatgggatgcttggtacagttgcctaagagtgaaattgcttcaaaggatcatacactgacattatttggggcaaaaattatttataggtgaagattaatattgttggtaaatgaagggaattcttgagaaaaatatacaaaaaattactgcatagatatagtagctgggagttgctgacagattctttctggtgcagatatgcatttgtatagttgtgaagtctattttttgggtttgatggtatcagttttgtttttctttggaaagaaagaaaataaaattatattgattgggttagtcatg

SEQ ID NO: 9790 - DNA, 533 bp, Glycine max
ggcctattgtatcgtgatatacgcgtcaactcaagcaacaaaacaagcattacatatcatatctttgattcagccttcaaacgcgccactcccatttctctctctcattcttcttcagatgccaaacctaacctaacctcccaaacaaactcaaccttatcatcatcatcgtcgtcgtttaaataaattctgatctccacgcacacgctctgagtcagatcatgctgcgtttgtgctacggccctctggattgctgcttccgacgccgccgtgccgacggactcctctggcacaccgacttgaagccccacgcctccggcgacttctccatcgccgtcgcccaggccaattactgtctcgaggatcagagccaagtcttcaccttcccctacgccacctacgtcggcgtctacgacggccacggcggccccgaagcttctcgattcgtcaacaagcgcctcttcccttatttgcacaaattcgccactgagcaaggagggttgtctgtggatgtgataaaaaaggcattcagt

SEQ ID NO: 9791 - DNA, 558 bp, Glycine max
atttttggtaatcattcaagagctggaattgccaagagactggtgagagctgctcttcatgaagctgcacagaaaagagagatgagatacgatgacatatagaaaattgacaaaggaataagacgacacttccatgatgatatcactgtagatgaaatctatcttgatcaccatgcaggctcctataatggtagatttaagcaaactggtgttgactatacacctgcccctgttgatatttttccccttaatgcggatcaaccagaaaagcgcatgcttggtacagttgcctaaagagtgaagttgcctcaaaggttcatgcactgacattatttgagccgataattatttatagttgaagattaatattgttggtaaatgaagagaattctcgagaaaatatataaatttctgcatagatatagtagctgggagttactgacacattctttctggtgatatgtatatgtatagttgtgaagtctattttttgggtttgatggtatcagttttgtttttctttggaaagaaagaaaataaaattatattgattgggtt

SEQ ID NO: 9792 - DNA, 408 bp, Glycine max
cctcgagccgattcggctcgagaagggatcttgtctttcttactgcaagtgaagaagtgaaaaagtgctgaagtgaacacaatggagagaagggttggctatgaggtgctggtggctttggtgacccttttggttttctcatttgcttgtgccactgcttcatcatcaggaccaacaaaactccaccaccgtgtggagcaattcaggaggaatctgcttgctaatggccttggtagaactcctccaatggggtggaacagttggaatcatttcagctgtcaaattaacgaaaaaatgatcagagaaactgctgatgcccttgtttctactggtctgtccaagcttggatacacttatgtcaatatagatgattgttgggctgaattaaatcgggatgctaagggtaat

SEQ ID NO: 9793 - DNA, 471 bp, Glycine max
gggaactgccctaccctctttactttatattcactcacaacaagggcacaaaaaaaaaaatgaacaagtcttctggtgctgtttttctcgcacgctctcggcatacgatgttttcgtttcctaattagtagcagcgagattctgaggttgtcgtgaccaaggccatggaactgaaatttgttctctttctgctccttctgcttgctgttgctggttatggactcgcttccaatgcgacactgaacgagacttgtggatacttcgatggttctctcaatagggaccctaaagtgccttgtccaattggttggattatggaccctaacaagaccaagtgctttctccatgttgggaggcctcaatcttggaatgactcagagacctgttgtagtaagtatggtggacatttagtgtcattgacatcgcttccggagctacaatttgcccagggcctatgcggtgaatctataa

SEQ ID NO: 9794 - DNA, 473 bp, Glycine max
gataaatttgagtataatggagcaacagagcttgtatttgatgtgcagttcatgttgaagagtgcaatgcatttttatggtttttcacatgaggtaagaactgaagcaaggaaggttcatgatctcttttttgatatcttgaaaattgcatttcctgatacggacttccgagatgcaagaagtgcactttctttctccagtcaagctactgccagtacagtaacatccccaaggcaagtggctgtcggccaaagcaagaggcacaggctgataaacgagatggaaactgagtcatacgctttgcagaggtcactgcaacgtggatcagcttctagcggtgaaaacaacagaattaaagtccatttgccgcagagggaatcaagaactggaagcggtgggggcagcagcaccagggagcaacagcaggatgattcttccctgctcgcgcatcctggtgaacttgttgtatgcaa

SEQ ID NO: 9795 - DNA, 1459 bp, Glycine max
gctttacagagtggaatggtcggttttatggtcaaaccaaccctgacttgaatcaacggctggcgttgttcatgtctctgtggcaaatgtctgacccttgatgtaatccaagactttcatgatattgtttcttagaattttgtatttttttttataatttatttaattattttctccctacaaaatcttgatctctctgctgttgtggagtggtgttgtgttaatctcattcacacattcacagttatactctctctctctttgtcgcttggatcactgatctcatctcaattttcagatatgtcgacatctgataagccagaagtggtggaaaggggtagcaaggatgaaaaacacaaggaagatgatcaagaggaggggaagggtggattcattgagaaggtgaaggatttcattcatgacattggtgagaagattgaggaagctattgggtttgggaagccaactgctgacgttactgcgattcacattccatcgattaatcttcacaaggcagatcttgttgttgatgtgctcatcaagaacccgaatccggtgccaatccctctgattgacatagattacttggttgacagtgatgaaaggaagctagtttctggattgataccagatgcgggtaccatcggtgcacatggagagcagactgtcaaaattcctgtcactttgatttatgatgacatcaagcaaacatatgctgatattaaacctggaagcatcattccttatagggtgaaggttagtctcatttttgatgttcccatcttgggaaggctaactctacctttggagaaaactggagaaatccccataccatacaagcctgatattgatcttgagaagattcattttgaaaggttctcttttgaagagacaattgcaactcttcacttgaagttggaaaacaagaatgattttgacctcggcctcaacgcgctcgattatgaggtctggcttggtgatgttagcattggtggtgcagaactcaccaagtctgctaaaattgaaaaaagtggaattagttatattgatattccaattaccttcaggcctaaggattttggctctgcactatgggacatgattagaggaagaggaactgcttacaccataaaaggacatattgatgttgacactccctttggagcaatgaagttgcccatcagcaaagaaggtggtactacccgtcttaagaaaaagaaggaagatcgtgattatgatgatgatgacgatgatgatgaggaatgaagaaatgtagcaggttattactagctataaataaagcgggcattactttctgagttctgatggccaatttttatgtatcttgagagttcaagttgacattcaaattatgtgctaggataagaatcttgaaaatttctagttgtactttattgatgatcatgacaatctagtgctgttttaatgtgagataaaa

SEQ ID NO: 9796 - DNA, 516 bp, Glycine max
cctaagttttcattcaatcatcactgatctaagatatgtctacatctgataagtcagaagtggtggaaaggggtgctaaggatgatgaaaagccaaaggaagaacatgagaagggtggatttcttgatacagtgaaggatttcattcaagacattggtgagaagattgagggagcagttgggtttgggaagccaactgcagatgtcactgggatacacattccatcaattaatcttgagaaggcagagctagttgttgatgttcttataaagaacccgaatccggtgccaattcccctaattgacataaactacttggtcgagagtgatgggaggaaactagtttcgggattgataccagattcgggcacaatccatgcacatggagaggagacagtcaagattcctcttactttgatttttgatgacataaggaatacctatgatgatattaaaccaggaagcatcattccttataaggtgaaggttgatctcattgtggatgttcctgtctttg

SEQ ID NO: 9797 - DNA, 605 bp, Glycine max
ttgccctttcgtccgcccacgcgtccgctctgggacatgattagaggaaggggaacaggttacaccatgaaaggacatattgatgttgacactccctttggagcaatgaagttgcccatcagcaaagaaggtggtactacccgtcttaagaaaaagaaggaagatcgtgattatgatgacgatgacgatgatgaggattgaagaattgtagcaggttattactagctattaataaaagcaggcattactttctgagttctgatgggcaatttttatggatcttgagagttcaagtggccattcaaattatgtgctagtatcagtattttagtgaatatatgctgctgcagtccggcttgtgttttctcttgaaactttcttgttgtacttaattgatgatcatgacaatctagtgctgttttaatgcgagataaaagatcatttgccttggaactttgtgtgtggccggttttatttattttatctaaaaggtggggttttgctttgtcattccggaattgagaattgactatggcttcttttgagggttgtgtcatgtgtgtggtttctattagcctgctggtataaatcaaacagttctattg

SEQ ID NO: 9798 - DNA, 368 bp, Glycine max
ggactatgcttgtggagaggcatcgcgctgatggcatggagatctcaccgcagggaaactgttataacccagacacctcggttgctcatgcctcctatgctttcatcagttactggcagaagcacaagagaagtggtggaacatgcagctttggaggaactgccatgttgataaattctgacccaagtttccttcactgtcggtttattcttagctaagtgaatagaagtggcgtggcgactttctgtttttgttgcagatagtgtggaggattttatgttaaggtgacttttcttttgattaactagcaatcggtttatgtataatgtatggaccaacttaaaacttctatattgggatcttgttgg

SEQ ID NO: 9799 - DNA, 481 bp, Glycine max
ggctccacagcggagtacaccaccactgtccactggtacactcttggcattttccctttcttttttcatttttatttttaaatcccactctcattttcccttccacttttccaattccttcacttcacactctcacactcacagacacagtctctctaatctaatggatgcaaagtctgctgaagctgttgttcccttagaaccattgaagtatcagacatggttcttgaaagtttcgatccactgtgaaggttgcaggaggaaagttaagaaggttctacagagcattgatggtgtttttaccacaacggttgacccgcaacagcaaaaagtaaccgtcactggaagcgttggagttgagacgctcataaggaaactggtcaaagccggaaaacacgccgagatttggccggagaatctcgccgccgggaagggaaagaactccggcaaagacaagaagcagcagcagcagcagaagaag

SEQ ID NO: 9800 - DNA, 388 bp, Glycine max
gaccattcgccattccaatgtcaccttctttttgcacatccctcttcctcttcacactctcccttctcttcttcctattcttctccctctccgtctccgtccacagccgccaccacgacgacggtgacgccgactccgacgccacccccgacctccgtgctcggcccttgattctcgcgaaggtgtggtgcctgatcgtcatcttcatcgccaccttcgtctcgggcgtttccccctacattctgaaatggaacgaggggttcttggttctggggacccagtttgctgggggagtgtttctgggaactgccatgatgcattttctcagcgacgcctatgagaccttcggggacttgactcaaaaggagtaccctttcgccttcatgcg

SEQ ID NO: 9801 - DNA, 419 bp, Glycine max
ggaagaaagtgtgaggtcaggtcgaacagcaagacgaggaaaacgcacgtagcgtcaccgccatcttccatctaaaaccccaaaacttaacatgcccaatctgtgtcgaaaaatgtttcaataatggttctgttccgcaagttcctaaaacaaatactcgtcgacaacacccaaaccaaaacaaaagcccgaacctttttcacctcaacctcaaccgcaaccgcattcccatggtgcgcgcctcaccataacaaccgcctcttccggtccccaggcccaggcccaggcccaggccctctcttcctcgctcggcctccatggaaactctctcagtccgccacccctctctattcgcacggaaacgccttcaatttgcttcgctccacagcccctctccagttccctgatccggttccctc

SEQ ID NO: 9802 - DNA, 875 bp, Glycine max
  unsure (1)..(875): unsure at all n locations
gagagacagagtgtatctgtaactgaaacgcgctggaatcaaatcttagcaaatcctaaatcaaactcaaacgagcgaactttggtttgagatttcaccactgattattctcttctcctgcaaaacttggcccccgatctctctctataatcaaatatcattcaacaataatcctcatttcgttattccttattccttattttctagtgagaagagaagttgatgagagatgttgagcatttgcatctggtgaaatctattcaagattctggcgtaattttttaaggtaccttccaaaatcgctcttttaattgaattgaaggatttaaaagctgtgttttttctttttttgtttgcttgcttttattttcttcctgttgttgttgtttgtttgttgtcaaaacaacacacgagaaagttgttgatagatatagcgttgtgaggggtttgcaagttggaaattgcagcataatggaccagcttcctgttgaagtgattgggaacattctgtcacacttgagggctgcaagagatgtggtgatagcttctgcaacatgcanganatggcgaacagcgtgctgcaagcaccttcatacactctacttcagctccaaagatttggccatttacccgggattgacgactacccgcctcgagatttgacacacanaccatttccagagcctctggttgcagccctatccatttggatggagatgtgatgatctcgcttncaccgtactgctttgccttgtcaccaaggaactctcangcaattgaattatatgtcagatacgcctatggtacatncttggaatagtgcagcacagctgganntaactgactgctatatttcctntnnnngggggtgctaa

SEQ ID NO: 9803 - DNA, 427 bp, Glycine max
gcggaggatcataaacatagagatttgggtctccgttctcggcgaaatccctagcggattgagatgacgatggcgctgtcactgggtcagaactccatttcctcgcttccctttgttagacaacacaggcacaccccaagtccttcttccacttgcttgagcttcaaacctcaagccctcccttcttcacccagcccaagtcttacttgtactacgaaatgcactcgcacgctgtccacgctgatgggactcgccctgttgctgatgaagaaggcggccactccagtgttgagcatcaacagcgacagcgtgtccacgatgggcactttgttcttcgcttcccttcgtgaccgtccgagtgctagtggagccctgaacacgccgctgacggttgtggcggcggggcttggggagtggcttgacatat

SEQ ID NO: 9804 - DNA, 495 bp, Glycine max
gacgtgccgtttcatttgatcatcacatgaaaatggtgtccgaaagcattctcctgggcattggtaaccctctcctcgacatctccgccgtcgtcgaccaagacttctttaaaaagtaccatctgactcactcactctcttttccatgccgttttgctccactctcctcgtcgtttcgtttaaccttgcacaccgttccataggtttactggatggatcaacgacgtcgtaaatcgctttgttcgcttctgaatgatttttttacttgtttttgtgtttgatagatatgatatcacctcaaacaatgcgattcttgcggaggacaagcacacgcctatgtttgaagaattggttgagaaatataatgtggagtacattgctggaggtgccactcagaattcaatcaaggttgctcaatggatgctccaagttcctggtgcaacaagttacatgggtggcataggaaaggataagtttggggaagagatgaagaag

SEQ ID NO: 9805 - DNA, 319 bp, Glycine max
catgcagaagagatcggcgcgtttcatttgatcagatcataacaatggtgtccgaaggcactctcctgggcatgggtaaccctctcctcgacatctccgccgtcgtcgatgaagacttcttaaaaaaatatgatatcacctcgaacaatgcgattcttgcggaggacaagcacaagcctatgtatcaagaattggctgagaaatataatgtggagtacattgctggaggtgccactcagaattcaatcaaggttgctcaatggatgctccaagttcctggtgcaacaagttacatgggtggcataggaaaggataagtt

SEQ ID NO: 9806 - DNA, 428 bp, Glycine max
ggttataacccgcactgagtagtgatccgttagggttttagtttgttaaaaaagaactgcaattcccaaagcggttgggacggtggtggtgaaggcatcagtaacagttagggtttcccaatggaggagcaggcgtcccagatcggccgctccctggtgaagcagctggcatgctgcaagaaaaccactcgagacaaatccctccgcctcctcctgaaatcatggctcccgtcgcagtcccagcccctctccgacgacgacgccaagaagctctggaagggcctcttctactgcatgtggcactccgacaagcccctcgtccaatccgatctcgtcgatcgcctctcctctctccttctgtccctccacctctccgtctccctacagtacttctccaccttcctcctcaccatgcgccgcgagtggtc

SEQ ID NO: 9807 - DNA, 695 bp, Glycine max
ttcagggatactcatctcatgattttatataggactgggaggaggaaatctgagttatacaaccatacattgatggttaagattaaatgttatgtaatttatagaagtcatttaatttttttaagttggaagtcaacctaattttgaacatggcgaattaattacaagttacaacaaatagtggaaggtcacctgagttaaattcttatatgatctgttatatactcattgtaatatgcagttctttgtgcttgtatgttaaaatttgcttgtggttgaatgttaaaactacatgcatactggctccaaattttatgaattactaatattctatttgtaaggcagcattgttggctagcacttaacactttccaaccaatcagtaccagcaacttcttgctggtactcaagttgtcctgcatcttctgtgggggatgacatgactcacaacagcatactgaatcacagtagcagctcttgagggtgtccatcgggtccaagtggcccctaactcgccatttgatttgacagaaactaatcaaagtggggactttcgtacttcaactggtggagcatcaactacagaagcaaatcagctgctgttgatcaaagactatggcaacagagaccagcatgcttgagacccatccattgtggtattagttgtcacggtgatcagactcttgctgaaacag

SEQ ID NO: 9808 - DNA, 394 bp, Glycine max
agcgaatatgcgtggagcgaaataggaagattcttgcgtaagcagcatcttcctctctcttattctattcccttattttccctttttgtttcttatttctcaaaattcaaagaacctgaaatcaaccacaaccttctcctatatataatacacacttctgcattgctattccttctcagcattctccttagcctcaggcagcattgttggctagcacttaacactttccaaccaatcagtaccagcaacttcttgctggcactcaagttgtcctgcatcttctgtgggggatgacatgactcaaaacagcatactgaatcacagtagagctcttgagggtgtccatggggcccaagtggaccctaactcgccatttgatttgacagaaactaat

SEQ ID NO: 9809 - DNA, 1405 bp, Glycine max
gaacaccaaaacagaaccaaagttatggataccctctctcagcttagccttctttgcctttgcctttccttctttccccttttcgcttcccctgctttgctgtttcaggggttcaactgggaatcaagtaagaaaggtggttggtacaactcgctgaagaacactattcctgaccttgcaaatgctggaattacacatgtttggctccctcctccctctcaatctgtttcacctgaaggttatcttccaggaaggctatatgatcttgatgcatcaaagtatggaacaaaggatcaattgaagtccttaattgctgctttccatgacaagggaataaaatgcctagctgacatagtgatcaaccacagaactgcagaaagaaaggatggaagaggcatatattgcatctttgaaggtggtactccagatgcacgtcttgattggggtccatctttcatttgcaaagatgacaatacttattctgatggcaccggaaaccttcacagtggtgagccctatgatcctgctcctgatattgaccacctcaatccacaagtgcaaagagagttatctgaatggatgaattggctcaaaactgaaattggttttgatggatggaggtttgattatgtgaagggctatgcccctagcattaccaaaatttacatggaacaaactaggccagattttgcagtaggagagaaatgggattctctttctattgataactatgacggtcatcgtggggcactggtgaattgggttgaatctgctggtggggctatcactgcctttgatttcacaacaaaaggaattcttcaagctgctgtgcaaggccaactttggaggttgaaggattcaaatggcaagccttctggaatgattggtgtgaaaccagaaaatgcagtaacctttattgacaaccatgatactggttccactcagagaatttggccattcccatctgataaagtcatgcaaggatatgcttacattctaacacatcctggcaccccatcaatattctacgatcatttctttgattggggcttgaaggagcagatagccaaattgagtagcataagggtgaagcatgggatcaatgagaaaagcagtgtgaatattctggcagctgaagctgacctttatgttgcaaagatagacaacaagatctttttgaagatagggccaaagatggaccttggaaaccttattcccccaaatttccacgttgctacctctggccaagactatgccgtgtgggagtgactcaatttattacattacaataagttaccattggaataagatcatcttgtaaaaaataatttcaaagcttgtaatccattatcggtttaaatatgtttttaatctctataaaacgagtggattttgattttagttg

SEQ ID NO: 9810 - DNA, 667 bp, Glycine max
tgggacagcacagatattttctcaaagggaaatagcaccatttggcattttacaatttccaagctatggccaaatcaactgggtcacttgtctttctctctattttcactttgctcctttcttgcaacttaggagggcacttaaagtttgctaatggaatgctagaccaggaaagttggtgcgtagcaaaaccttcaacaagtgatgttgcactgaatgataacattcaatatggttgcattgccttgggtgattgcaaaatgatccaaccaggtggatcctgcttctacccaaacactctgttaaaccatgcctctgttgtcatgaatcagtactatgcagctaatggtagaaacacttggaactgtttcttctctggctctggtctctttgttgtcagtgacccaagttacgctaactgcacctatgcttagcgggaataaaccggaaaaaagatgtcttgtttagagatatttttactattttactctataggctacgtttgatttccaaagcttattactacattctactaggtgctgtaaggaataggaagtttattattcactggtgtggtctttgtatttcatgaagattagtactttgttatttcattacctaatgaacccatactaggtttcaattataagattacttttatggccgg

SEQ ID NO: 9811 - DNA, 560 bp, Glycine max
ggagactgcttctgttttatatcacccaatgcaacactctcttctaattcccatctacagttagccccaaatctggggttagggtttcctctgcgtcgatggcttcgaattcgatcgacggcgacgcgttacggggtcgggactgtgcataaacgacgtgttaagggacgacgagctgcgttccattctggggcgagtggagagcgagaaggacaaggaaacgttcgggttggtctgcaagcgatggcttcggttgcagagcacggaaaggaagaaactcgccgcacgtgcgggtccccacatgctccgaaaaatggccgataggttcacacgcttagtcgaactggacctcgctcagtccgtctctcgttccttctatcccggcgtcaccgattccgatctcgccgtcatcgccactgccttcacttgcttgaagatcctcaatttgcataattgtaaaggaattacagatgctggaatgaaggctattggtgaacatctttccttattacagtcgttggatgtgtcttactgtagaaagctgactgacaagggattat

SEQ ID NO: 9812 - DNA, 528 bp, Glycine max
ttaaatatccgtacctaatccaagttgaattgtgatccatgggcatatactatggttgtccttcttctcctccacacaccgtgagggctggctggtcagaaatgagaatggcttcagcattgtccctgcatctctcaacccctttctcccaactccaccctagtctcaaacctaaaaaactccatgatttccccactctctccctctccaaacctcgaaaactcagcgtgaactccgtggacatctccaaagaagacacgcccgtgaaacccgaatcggagctggagaacttggggccgcggcggctggaggagaagttcgcggttctgaacactggaatctacgagtgccgctcctgcggctataaatacgacgaggcagtgggcgacccttcctatcccttaccgcccggctatcagttcgagaagcttccggatgattggcgctgccccacttgtggggccgcccagacccccttccagagcaagagcgttcagatcgctgggtttgctcaaaaccaacaatatg

SEQ ID NO: 9813 - DNA, 940 bp, Glycine max
gggtctcctttgaggcatgcaattgagtcttcgtgcgccaagactctggcaccggcaccgtttgtgtcttctcctgggtcggtgtcgccgcctctggagtctccgccgatgtcgccgatgactgtgagtgttaatgagatggtggcgtctttaaggaacttgcaactggggaaggtgaagtctttgccttcttcttggaatgtcatggggccttccgggttcggatctccgagaggacccatgatccgacccggattcttcagccttccgacaaccccgacccaggcaccgactcgcggtggggtcaactactttgaccagtgggatcagagttgttgcgaggaggagcctgttatggagagggtggaatctggacgaagcataagggcgaggatgtttgaaaaactgagcaaagagaatcatctggacgggtcgggttccgaatcgggtcaaatcggggttcccgatgttgggtgggtttcggagcttgtcagtcgctgatttcattttgttgcacttccctcggtgtgtatagaatgcgggggagaagaaaagtaagatttattttggaagaaggagcatcaactcaacttgtggtttctgtaaatagcttattctcaaggtaaggtatggtatgggtgaagaagttaattaagagaaagagtagaatctttttttggggttattttcttggtcgatcaagaagtgatttgcaagaatcaggatcgtaagcttttgtataggtagctgcggatgatgaaattatattattcccacgtgttaattactgtgtttattatcactaatctcatctcattcatgtataaatttgaaatatttctcccatatgttatgaagaaattcaaacttgtctcccctcaaaaaaccaaaaaaagaaaacaaaaaaaagcgcccgctctagaggatccgagcttacgta

SEQ ID NO: 9814 - DNA, 411 bp, Glycine max
ccaccccgcgcgctaccgcactcagccttgcaaggatggcaccagttgtcgccgccgcgtgtgtttcttcgcgcacacgccggatcaacttagggttttgccacagcagagtccgcgcagtgctgattcctacgacgggtctcctttgaggcacgcgattgagtcgtcgtgtgcaaagtcgcatccgtttgtggcttctcccggttcggcctcgtcgccggtggagtctccgccgatgtcgccgatgactgtgagtgttaatgagatggtggcttcgctaaggaacttgcaactggggaaggtgaagtccttgccttcttcgtggaatgttatggggtcttccgggttcgggtctcctagaggacccatgatccgacccggatttttcagccttccgacaacgccgaccca

SEQ ID NO: 9815 - DNA, 372 bp, Glycine max
ggctgctattgcgttgtatgtcacacccttccagctgcctattcttctgactggattctacttgatgaggcaccccatgcttcggagcaaggtgccgcctgctccggtgaatttcttccgtaggttgccttctctcacagacagcatgctgtaaatggatactcttgtgtgttctagaatcttgaaaacttatctgctgctgccagtgtttgaattaatttttggtagtggttgtagaatcattggcgctatctcactttgtgttgtttattaagtgttgaccgttggtgcaactgtatacttagtttggtaaactccaatgtagttttcatgttaattaatcagcgtttgtgagcttgtgttctatacttg

SEQ ID NO: 9816 - DNA, 507 bp, Glycine max
cggctcgagatctctaagaaacaaatagtttctcacgctccccagacccagttgcgtgaaattcacgatgatcaccgtcatgatggtcgccgacaccgtcgccgtaaccgccgccaaaggcctcggcgtccttcgcgcctgccaatccacctgtaacttttccctcgccgatcagatctccgccatgattcagacttacgacgccgtcgcgccgccgccggtcaagcctactacctacaggctaagacgccggacgctcctccggagatcacaacgtaccatacccagattatcaggtgacgactccggggacgccggggacgagggattcctcttcggtgacggcggagacggtccttttggcggcggtggtgggttcggtggtagcggtggtggttggaattttaatagatttgggagtgggcacaattgggatgaaccttcgtcttcggtgccggaccctgcgttcgatttcgtgtatcaggtgctgtcgtggattatgctctc

SEQ ID NO: 9817 - DNA, 432 bp, Glycine max
  unsure (1)..(432): unsure at all n locations
gagacccaattgcgtcaaattcacgatgatcaccatcatgatggtcgccgacaccgtcgccgtaaccgccgccaaaggcctcggcgtccttcgggcctatcaatccacctgtaacttttccgtcgccgatcagatctccgccatgattcagacttacgacgccgtcgcgccgccgccggtcaagcctactacctacaggctaagacgccgaacgctcctccggagaaaacaacttaccaaacgcagattatcaggtgacgactccggggacgccgggaacgaggggttcctcttcggtgacggcggagacggtccttttggaggtggaggtgacttcggtggcggcggcgtccgtggtggtggttgggatttcaatagattgngggtggaaacaattgggatgaaccgtcatcttcggttcccgaccctgcg

SEQ ID NO: 9818 - DNA, 848 bp, Glycine max
agaaaagccaactggacgggaagaagggaagcaaaggaaaaaagagagaggaatggaaagggcagaataaggtgtctctctctctctctctctcttggactgattcgcttcaaacgcatctatctcttcctcacctctttctatattcactactcttaaggcaaagttggtgtaaagaaaggatgatgatcgtggtgctggtggcttctttctcaacggacacgatttcttccatttccattttcttctgattccttctctttctgcccatctcatctcatctcattttgttttggtccaccctcatcatattgaagactccgccatatagggggcatctttgtttctctttcattcttcttgtgtgtttgtgattattgccctgtcctctgcattcctttaattcccccattcatttcccacctttctctcacaaaccaaactcatcatggccgttcaagctcaatacccttccaatgtactactcttcctaaacagcaaaaccgggcaagaagcacatgattattcattgcaatctccgccaggacaacaactccttgatcaatcccatatgctattcaacaacggaggtacttaattctcgaaagagagggaagagaaacaactgcagctaccggcgattgccccaacacgttatcaattcattctctttgcaatcccaatctccacaggcacagctcatagaactcactcaacttcataatcaaaatgtagtctccaccgggttacgcttatcctttggtgaccaacaacaaagacaacaattacaacatcaacatcaacatcagggggtgtcactcctctcttttcgtatctctactatccga

SEQ ID NO: 9819 - DNA, 1811 bp, Glycine max
cggacgcgtgggcggacgcgtgggcggacgcgtgggcggacgcgtgcgcaaaaacaaaaacaaagtaagagttcactcaatctcactgtgttgtgagttgtgtgtgagcaccaaccaacaatggtgtctctgactccgttatgtttctttattaccttgttgatcgctggtgcagacgcagcggcggagccccaaacggtgcgttttgacaccggggggttgagcagagacacctttcccaaaggattcttattcggaacggccacgtctgcgtaccaagtggagggtatggcccacaaagacggtcgcggcccaagcatttgggacgtcttcatcaaaaaacccgggattgtcgcaaataatggcacgggagaagtttctgttgatcagtaccatcgctacaaagaagatatagatctcatggccagcctgaattttgatgcctaccggttctcaatctcgtggtccagaatttttccaaatggaactggccaagtaaattggaaaggtgtagcatactacaataggttgatcaattacttgctagagaaaggtattactccatatgcaaatctctaccattatgatcttcctttagcacttgaggagaggtacaacggattattgagtcgccaagttgtgaaagattttgcagattatgcagaattttgtttcaagacttttggagatagagttaagaattggatgacgtttaacgaacctcgtgtggtggctgctcttggctatgataatggtttctttgcccctggaagatgctcaaaagaatatgggaattgtactgctggcaactcaggcactgagccttacattgttgcccacaatttgatattgtcgcatgcagcagctgttcaaagataccgagcgaagtaccaagaaaagcaaaagggaaggattgggatcctcttggattttgtttggtatgagcctcttacaagatcaaaggctgacaattttgcagctcaaagagccagagactttcatattggatggttcattcatccccttgtttatggagagtatccaaaaaccattcaaaatattgttgggaatagactccccaaattcactagtgaagaagttaaaatcgtgaagggttcgattgattttgttggaatcaaccaatatactacgtactacatgtatgatcctcatcaagcaaaacctaaagtcccaggctatcaaatggactggaatgcaggatttgcttatgcaaagaatggagtgcctattggtcctagagctaattcttattggctttacaatgtaccatggggcatgtacaaatcattgatgtacataaaggaacgttatggaaacccaactgttatcttatctgaaaatggcatggatgatccgggtaatgtgactcttcccaagggtttgcatgacaccacaaggataaactattacaaaggctatttgactcaactaaagaaagcagttgatgatggagcaaatgtggttgggtactttgcatggtcattgctggataactttgaatggaggttgggttacacatcaaggtttggcattgtctatgttgatttcaaaaccctcaagagataccctaagatgtcagcatactggttcaagcaactcattgccaaaaagaagtactaatagctgggctgaacatctactttctaagcttctagttgcttcagataatcatgttttagtggttttggttgagttaaaagtagttctgtaactgtaatcatgtgacttgattaatgcaagtctttgaataaaatgatcttttatggccaaaaaacaaaaaaagggcggct

SEQ ID NO: 9820 - DNA, 393 bp, Glycine max
cccacgcgtccgcgctttctttaaccattatggtttaaaatattttctatacatttcgataactggtctcttttggtttggcttatctgaacattgaacatgcaaagaacggagtgcctattgctccaagggcttattcttattggctttacaacgtaccatggggcatgtacaaatcattgatgtacataaaggaacgttatggaaacccaactgtgttcttatccgaaaatggcatggatgatccgggtaacgtgactcttcccaagggtttgcatgacaccacaaggataaactattacaaaggctatttgactcaactaaactaggcagttgatgatggagctaatgtggttggatactttgcatggtcattgctggataactttgaat

SEQ ID NO: 9821 - DNA, 618 bp, Glycine max
aaggcttcgagggaggagaggagagaggaagtgagagaggcaaaagctgcggaggatggtagaggagaggttgttgagaatgagaacattgagaaggagggtggaagagaggagaggagggcaagggcaaggggagagaggcggcgatcttcgaagccgaatccgaggttgagcaatcctcctaaccatgttcatggtgagcaggttgcagcagggtggccctcttggctctctaaggttgctggtgaggctatcaatggattgacccctcggagggccgacacttttgagaagattgataagattgggcaaggtacatacagcaatgtttacaaagctagggatactttaacggggaaaattgttgctctaaagaaggtccgttttgacaatttagagcctgagagtgtcaagttcatggccagagagattttgattctccggcgtctggatcatcccaatgtcatcaaactggaaggcttagtgacttctagaatgtcatgcagtttatatcttgtgtttgaatacatggtgcatgatttggctggacttgccacaaacccagcaatcaagttcacagagtctcaggtaaaatgttacatgcatcagttattttct

SEQ ID NO: 9822 - DNA, 436 bp, Glycine max
cttctctttatatggagggaggtaatcgcacattgcggattccatctagcgagttattcagattctctcacagggttccatcttttaaaatgactggtcaggaaagagttggtgttcctgtaggatcttatgaacttgatccggtatctttgccaatgaatcttgaagagattgctgttgctgaacatttggaagtaaaggagggtcattgtccatctagtggggtgggcacaaggtattcagatatgtcgaaattcacaatgaactcagagggagaagcttctactgaaaaggttaagtgggaaagaagcaattcagcagaggagaacaaggatcctgttgatcatattggtattggtagtgacccttcagcttcagccgcacatgccttttgtaattcctgattctgagttctgcaattttgatgctgagaggt

SEQ ID NO: 9823 - DNA, 398 bp, Glycine max
aggggggaaatttgtccggtataatgtcagcagcagtggaaaatccgtccgttgaaatgccgggaaatttgtccggtgtaatgccgacaacagtgggaaatccatccgttgaaatgttgggaaatcagtccggtgtaatgatgacagcagcgggaaatccattcaccgttgaaatgcctgattctgctgcaattccttgaccaaccaaattttgagacttgataaaggcttatgttatatttagtataaatagctgatagcatatgttttatgttatattgaactcagtcattatagtactcttgaacaatgtctgcacttgatcctggaatattatttataattgcagatggttatgtttcacccataggagggcataaaatccctgttcgtttcgg

SEQ ID NO: 9824 - DNA, 472 bp, Glycine max
ggttggattacaaaagcaagagagatttactccccatcaatgcagctatgtggagttagaagtgatatcgctaatgcagcgaaggcgttgttttggcaagcaagaaagggcctctcatttgtattaacctttgaatcagagagagacagaaatgcagccattatggttgccaggaaatatgctcttgattgcaatgtcgtgctcgctgggccagatgatctagtgtaggagcaaaatttaactgactgagtttttccatcaaacgtgagatttatcagattcttggtgtgagtatacatgtgtgcttgttttgttaaagatatgatttcatctttgtgattgggtttcactaattgagttgcattgttttaggcatgttttttatttgcctaatcatgttgtaccaaactcaactttttataattattagttcatttggtcattggggctaatttgcatgtgctagttggtt

SEQ ID NO: 9825 - DNA, 676 bp, Glycine max
gacggattcaaagtgaagttagtgcaacttcacttttagttctctctctccctggtcctttgagcttcaagaagttgttcctgtttgttgtagcagttcctgtccttaatttcttcaaccttctcaacacataaccaccttggtctgtgtttgtttgtgtgtgcttattacttggtctcttcatattgtacatataaaaattatggatgatgaatatgccaagcttattagaaggatgaacccaccaagggttgtgattgacaacaatgcctgtgaaaacgccactgttattcaggttgacagtgtcaacaaacatgggattctcctcgatgttgtccaagttatatcagatatgaaccttgtgataacaaaggcctacatctcctctgatgcggtgtggttcatggatgtgtttaatgtgattgatcataatggaaacaagatcagagataaggaagtcattgattatattcagaggagacttgaaaacaatcccagctttgcaccctcattgagagagtctgtaggggttgtaccaactgaagagcacaccgtaattgaactcactggcacagaccggccaggtttactatctgaaatctgtgcagttctcacagaccttcactgtaatgggtgactgctgagatatggacacacaatactagagctgcagccg

SEQ ID NO: 9826 - DNA, 400 bp, Glycine max
gaaggattcaaagtgaagtgaagtgccccctgtcctacttcacttttagttttctctctcctctctctccttctctctccttggtccttggagttacaagaagttgtttgttcctggccttaatttcttcaaccttctcaacacgtttaatatcactaaccacttcctcgttgaatcataacataaccacttggtctgtgtttgtttttgcaacttcatattgtacataaaaacatggatgatgaatatgctaagcttattagaaggatgaacccaccaagggttgtgattgacaacaatgcctgtgaaaacgcaactgttattcaggttgacagtgtcaacaaacatgggattctccttgatgttgtccaagttatatcagatatgaaccttgtgataa

SEQ ID NO: 9827 - DNA, 523 bp, Glycine max
  unsure (1)..(523): unsure at all n locations
ggaattctcagaacaaaaaacaatattgaaaactccaaagtcttgtccttctcaagcacttgctctaactccaattcaaccatggttgcgagactcgcggtaacagcgctggtgctgatagctttggcaacaatttctctccaatcttcagcttcagcttcatcagtgggtaaattcgtcgacgaaaccatcacttcccacaagatcgtcattttttccaagacctattgcccgtactgtagaagagcaaaagctgttttcaaagagttgaaccaagttccacatgttgttgagctcgacgagagagaggatggttcaaagattcaggatatcatgattaatattgttgggaggcgtactgtgccacaagttttcatcaatggaaaacaccttggaggctcagatgacaccgttgaagcttacgagagcgggcacctgcataaacttctaggaatcgagaaaaaggatcatgatgatcatgatgatctctgaataaggttgtaattanggtaaactatgtcgc

SEQ ID NO: 9828 - DNA, 609 bp, Glycine max
agtttgtagaatttaaaaccatgtcacttgaagtgaaaatgccaacagtaaataaccatttgccatctttattggagcttaatgagaatgaggaagaaaaagttcctgagacacccacttctttggagagtctacatcagctacacaagaaactacttctccttgagaggaaagaatcaggaacagaagagtcattggatggaagtgtgataagtgatatagaaggtggtgaggtaaccattgaaaagttaaaatctgcattgaaatctgaaaggaaagccttaagtactctatatgcagaactagaagaagagagaagtgcatctgctatagcagccaatcaaacaatggcaatgataaataggcttcaagaagagaaagcagcaatgcagatggaagccttgcagtatcaaagaatgatggaagaacaatctgagtatgatcaggaggctttgcaactcttgaatgagctcatgatgaagagggagaaagagaagctagagctagaaaaggagcttgaagtatatagaaagaaggttcatgaatatgaggcaagagcaaagatgatgatgtcaagaagagatggtagcatgagaagcagaacttcat

SEQ ID NO: 9829 - DNA, 337 bp, Glycine max
cgggaaataaatggacaaacttcaagaagttgtgacaaatcaaaactggggaattcactctgagggcatgtcatcaaccactcccatctatggcttggcacaatgcttccaagacctttccagcattgattgccttcagtgctttgcatccagccgcaccaagctccctcgctgcctcccttcggtttcggctcgaatttaccttgatggctgcttccttcgctatgacaactacagtttctacactgaggacactgaccctttgagggacacagtgaactgcacctcacagtatggtgctgtggttggtgatggtgagaagttggtgtttgctgag

SEQ ID NO: 9830 - DNA, 366 bp, Glycine max
gactcactactattcccacaacacaacattagcgtactctgttttactctctatctctctctctctctgtctcagccaacaacacaacaatcaatgtacgctgcatcaaccatgaaatccatgtacaagcctccattgcccagatctccaattcgccttcgaccctctcatgctgttcattcatcaaactctatcgctcttcaaaccccaccaggttccttgaccaaatctcagaaacctgttatctctccaaacatgcgacccgaataccgcaccatttcgtgcgaattacgggctctgaccaagatggttcgtgatgaattcagcaaagccaattcagagaaagcggcgagcgcaaattcgagt

SEQ ID NO: 9831 - DNA, 289 bp, Glycine max
tgtgctaccccgcggattcctcgtcatgtcacttgaagattcctttttgtccttgctcgtcaattccacacaagcctctcgaaagaaaatgaaaggtcagattagggtttttgttctctaccgaaaccgcaagccaagttggaaattctgcttcggttgaagggttcctctcggtgtgggttttcaatggagaaaaatgatggtttgtggtggctaatggtggatgtgggtgatggagaaagtacttggaactttagaaatggctttggaagaaagaaagaagaagaaa

SEQ ID NO: 9832 - DNA, 638 bp, Glycine max
tccgaaacttggatatcgtatcgaggagctatgcctatggtctcccaggaagaaaccttagtggaagcggcgctccgagttctgaacaccgccgacccgttcgagaaggcgcgactcggcgactcggtggcttcgcggtggctcaatggcgacatagcagaaccctacgacccttccggctccgatctcacgctccctgatcgccccgcaagactatcctctgtgaagttggtggcgccgagcttgatgccgaagctgggtagagcgggcagcttgcagagcaggatagccattgctcatagcctcactcacactgaaagctgggccattgacttgtcttgggatataatagcacgttttggcaagcaagagtcaatgcctagagagttctttacagattttgtgaaggcggcacaggatgaagggcgacacttcagtcttcttgctgcacggcttgaggagcttggttcttattatggagcattaccagctcatgatggcctttgggattctgccactgctacttccaaggatttactagcacgattagctgttgaacactgtgtccacgaggccagaggacttgatgtggtgcctacaacaatcttacgattccgcaacaacggtgataacactac

SEQ ID NO: 9833 - DNA, 400 bp, Glycine max
ggggagggagcccttcattgagtctccgaggaaccctagactccaaattggtaaatctctctttgcaaaatctccgaggaacccaacggcattgctaaatttctttgctggaatttaagggcagggttgctggtgatgcatttcttagtggggttatctttagcttagcttctgaccaaagtcttttccagggctagcatcactgacaacaacaatcatgggttacttcgacctcaacatcccctaccctgatccttcccctgccaacaagcccactgagcatggtaaccgtacgaggctggcagtgaaggccatggagtttggctacaccggaatcgcttacaaccgcacgatcaagggcgtcatgtccgatcaccaccgttgctccatcttttccctt

SEQ ID NO: 9834 - DNA, 420 bp, Glycine max
ggttagctttttatgttatgtgaggcccttcctctcattctcttttgactttctcaaatggcctttgcaagtgtcgtagccattgtcgcatttcttcttctacaacctctttcagctacttctgacctcctttctcctctgctttctcccatctttgatgatgtatgcaaagaagtggaatgtggaaaaggaacatgtaaaccttccaagaacagcactttcttctttgaatgcgagtgccacccgggttggaagagagctccttcaaatgataagatgggtttgaagtttcttccttgcatagttcccaattgtacattggactactcttgctccaaagcccctgcccctgttcaagaaaaggcaacaaagtccaatgagtcaattttttatgcttgccactgggttgattgtggaggt

SEQ ID NO: 9835 - DNA, 390 bp, Glycine max
gatgacaaatttgcaatgcaacttcacatgtaacaagctaaccctctcaccatgcaaagagtatgacttagaaatgtccatataatgtcacattctcaaccccattatagtgaagtacatacaacattctcagttgcttatccacacacactcaaacatgggaacctatgtggaaaatttcgcaagtgaggaggaacatgtctttcgtagccaatactcatctgtccctgtccctgacaatgtgacattgccggaattcgtgctccaaaatgctgaattgtatgcagacaaggttgcatttgtggatgctgtgactggaaaaggggttacttttagtgaggtggtgaggggtgtacacaggttttcaaaagccttaagatctcttggtct

SEQ ID NO: 9836 - DNA, 423 bp, Glycine max
cccacgcgtccgcccacgcgtccgattgcctttccatctccccttccgttcgcggcgccggaggtgtcaccgaccccaacaccgcccgctccaagggttacggcttcgttaagttttctgatgaaaatgaacggaaccgcgccatgactgaaatgaacggcgtttattgctccaccaggcccatgcgtattagtgctgctacgcccaagaaaaccaccggtgcttatggtgcacccgccgcgcctgtgcccaaacctgtgtatccggttccggcctatacttcgcctgttgttcaagttcaaccaccggactatgatgtcaataatactaccatttttgttggtaatttggatcttaatgtgtcagaggaggagctgaagcaaaactctctgcaatttggggaaattgtttctgtcaaaattc

SEQ ID NO: 9837 - DNA, 465 bp, Glycine max
ggtccggaattcccgggtcgaccgacgcgtccgcccacgcgtccgaaaaaaagaaaaaaggagaagcatactcagcgcggcggtggaagatggtggcgacggcgatcgaggaagtgcgaaccctctggattggcgatttacagtactgggtggacgagtcctatctctctcagtgcttcgcccacaacggcgaagtggtttccattaaaatcatccgcaacaagctaacgggccagcccgagggctacggcttcgtcgagttcgtctcgcacgcctcggccgaagcctttctccgaacctacaatggagcccaaatgcccggcacggagcagaccttcaggctcaattgggcctcgttcggggactccgggcccgaccactccatcttcgtcggcgatctcgcccccgacgtcaccgattttctccttcaggagacttttcgggcccattattcctcccgttaaa

SEQ ID NO: 9838 - DNA, 517 bp, Glycine max
gtgcgagtgatgaaattgaatccaaatacctaagcggtggacgaggcctacctgagccactgcttcgcccccgccggcgaggtggtctccatcaaaatcatccgcaacgagctcacgggccagcccgagggctacggcttcgtcgagttcgtctcccacgccacagcggaaagggttctccagacctacaacgccatccgaccagaccttcaggctcaattgggcctccttcggcatcggcgagcgcaggcccgatgccgccctggaacactccatcttcgtcggcgatctcgcccccgacataaccgattatcttctccaggaaatgtttcgcgcccattacccttccgttcgcggcgccaaagtcgtcagcgaccccaacaccggccgctccaagggttacggtttcgttaagttttctgatgagaatgaacggaaccgggccatgactgaaatgaaccgcgtttattgctccaccaggcccttgcgtatagtgctgctacgcccaagaaaaccc

SEQ ID NO: 9839 - DNA, 515 bp, Glycine max
gaaaagagtgcgagtgatgaaattgaatccaaatacctaagcggtggacgaggcctacctgagccactgcttcgcccccgccggcgaggtggtctccatcaaaatcatccgcaacgagctcacgggccagcccgagggctacggcttcgtcgagttcgtctcccacgccgcagccgagagggttctccagacctacaacgccacccacctgcccgccacgctccagaccttcaggctcaactgggcctccttcggcattggtgagcgcaggcccgatgccgcccctgaacactccatcttcgtcggcgatctcgcccccgacgtaaccgattaccttctccaggaaacttttcgcgctcactacccttccgttcgcggcgccaaagttgtcaccgaccccaacaccgcccgctccaagggttacggcttcgttaagttttctgatgagaatgaacggaaccgcgccatgactgaaatgaaacgcgtttattgctccaccaggcccatgcgtatag

SEQ ID NO: 9840 - DNA, 437 bp, Glycine max
tcgcaattggcttcttccttggctttgggatcccctaatgaatatcaccaatgcctattgtcatacgtacgctttcttgcaagagaagcagatgaatctcgtttacgtgaagtgtgtgagagtttccttggacctccaactgggatggttgaggaaacatcttcagattcaaagaacttagcatgggatcctatggtgcttggaatgaggaagcacaagcttcttagggaagacattcttccatccatggcatcaaacagaaaagtccagagattacttaatgaattcatggatcttttatccgaatatgagatcattgatgctaatcaagagcaatcaaaccccacagtaccaaaatcatccttgccagaaaccaatccaattgagagcagttcactagcaacagatcaggagcacactgctccaccaaaattgga

SEQ ID NO: 9841 - DNA, 494 bp, Glycine max
ctcgagcgttttttcaaagcaacgcatagtcacatagtacactctggtctgaactctgaatctttctggtgtcgtgtcccatttgaattgaattgcatcttgaaagatggcggaggaggagaagccaaatggagaagaacaagtgaaggacaacaacaacaacaacttatacgacgccgttcagcgtctgatcttggaaccttccaagatcaaggcctccctcatccctctcttccccgaagcttctagaacctactctcgccaactcctccactggtcccgtcaaggttctcccctccgacgcatcctcttcatctccattgggatagttgcacttgttgctctctcaggacttgttgcttttacgctcttttttctggctgctactgtaaatgccattttcgtctcccttctcatttctttggctgtggctggaggcttcttggttctggtctttgcttttgtgacagctatatatattggagcactatcac

SEQ ID NO: 9842 - DNA, 377 bp, Glycine max
ccaggtgaaaggcagggacgagtcgaaatggctgaagcagagagtgtgcagattcctcaagtcaaacttggaactcaaggccttgtggtttcaaagttagggttggggtgtatgacccttagtggacgctataatgatccacttcctgaagaggaaggcatatctgttattaagcatgctttcagccaaggaatcactttttttgacacatctgatgtctatgggctcgaccatgctaacgaatttttgctcggaaaagctttgaagcagttacctagagaaaagatccaggtagccacgaaatttggcgttgcagtagcaaaatttcctaattttcaaatcaaagggacaccggagtatgtgccgtcgtgttgtga

SEQ ID NO: 9843 - DNA, 465 bp, Glycine max
gttagcgttaccctcggaactgaactgaactgaactgaaccggatccagagagtgctcctaaacgacgccgtttcgcaagcatcagtagtgtagtcgcagagaatcaaatcaatggagaagggaaagggagtgatgggatcgggaggacgaagatggggcgttgacttctccgacaattccacttctcgcgatattcccgatcctcccggtttctgtcgcacttctctcgatcaggacgattcaacgctcagtcgccagaagaaggacgctgaatccaactggaaagcccagaaagcttgggaggtagcacaagcccctatgaagaatttgctaatgatggggttcatgatgtggatggctggtagcacagtccacttgttcagcattgggatcactttctcagccctttggcaacccatcagtgccctacagagtgtcggaaagatgtttgagccctacaaaga

SEQ ID NO: 9844 - DNA, 380 bp, Glycine max
accaatttccctctttcttttgtgtgtaatgtgtaaaaccacgtcgttttgcaaaaacaaattttgaaacctcatatatgcgttagcgttaccctctgaagtctgaactgaacacgatccagagagaacccctgctccttaacgacgccgtttcgcaagcatcaatggagaagggaaagggagtgatgggatcgggaggaagaagatggggcgttgacttctccgacaattccacttctcgcgacattcccgatcctcccggtttctctcgcgcttctctcgatcaggacgattcaacgctaagtcgccagaagaaggacgctgaatccaactggaaagcccagaaagcttgggaggtagcacaagcacctatgaagaat

SEQ ID NO: 9845 - DNA, 779 bp, Glycine max
  unsure (1)..(779): unsure at all n locations
cccacgcgtccgcggacgcaaatacagaaatatcattttccgagacaatcccatcttccatttccatcttcaatatttcttctcatcgagaagcttcgcgaacgaaaacaaagaaccctagacagaaccattccatagccatgtcaggtgttggccctctttctcaggattgggaacccgtcgtcctccgcaagaaggctcccaccgccgccgccaagaaggacgagaaagccgtcaacgccgcccgccgctccggcgccgaaatcgaaaccctaaaaaagtataatgctgggacaaataaagcagcatctagcagcacttcattgaacactaagaggctggatgatgatactgagagtctagctcatgagaaggtgccaactgaacttaagaaggctataatgcaagctaggatggacaaaaagcttactcagtctcagcttgctcaactgatcaatgagaagcctcaagtgatccaggagtatgagtcagggaaggccattccaaaccagcagataattagcaagttggaaagagctcttggagctaaactgcgtggcaagaaataagttgtaactaatgtcatggttgtgcatgtagcttggtttgcatgtcactaactcactatggaactgttatgtttgctagccaattgtgtaatatgtaagacagataaatggttgtgaggacctgtggctttcacctgttcgagtaaataaagttgcactttcagtacaaaaaaaaaaaaaaaaaggggggggccccnnnnnnnnnnnnnn

SEQ ID NO: 9846 - DNA, 617 bp, Glycine max
  unsure (1)..(617): unsure at all n locations
gagggaacttcctcgaatcgcatctcgaatctcaatcacaatttcgctccctttgctcacatgcgacaaatggtcagggctagaacgctaatcaagatgtcaaagccacttgccgacgccggaggcgaaatcgacaccctaaaaaggatataacgctgggacaaataaagcagcatctagcagcacttcattgaacactaagacgctggatgatgatactgagagtctagctcatgagaaggtaccgactgaacttaagaaggccataatgcaagctaggatggacaagaaacttactcagtctcagcttgctcaactgatcaatgagaagcctcaagtgatccaggagtacgagtcaggaaaggccattccaaaccagcagataattggcaagttggaaagagcccttggagctaaattgcgtggcaagaattaagtgaacttaatgtcatgttgcgcgtttattttgctatgcatgtcactatgggagtgttttgtgtttgttagctaattgtgtatatttaagacagttaaaatggttgtgttgacatgtgcctttctcctgttcggataaataaagttgcattttcagtacaaaaaaaaannnnnnnnnnnnn

SEQ ID NO: 9847 - DNA, 453 bp, Glycine max
gagatataaagaacgaaaaatccactaacagcagcaagcttatctctgcagcattgaacaccaattgaacaccaatctgcagcattgaacaccaattcaacgccaatgggtcaggaagaggaaaaatcccaagaaaacaaagtggaggagaaaaaagtagaagaagaagaaaagaaagaagaagagaaaaaatcagatgagaagaaattcaaggagaaatctgcgccgccagaaatcgtgcttaaagtgttcatgcattgtgaaggttgtgctcgcaaggttcgtcgctccctcaaaggattcccaggggtcgaagatatactcacagattgtaagtctcacaaggtggtcgtgaaaggagaaaaagcggatccgctgaaggttctagagagagttcagatgaataaccatataaaggttgaacttctcttctccgattccaaatccaccctc

SEQ ID NO: 9848 - DNA, 493 bp, Glycine max
gacgctagcacaaataaaaagaaccaaatttcagaagaaaaaagagtcacttgaaggttcaatgggcgaggaagagaaaaaattagaagaaagcaaagaggagaacaaaaaagcagaggaaccaaagaaggaagaagagaagaaagaggagagaaaaactgaggaatcaaaagatgacaaagaatctaaggagaaagttgcgccgtcagaaatcgtgcttaaagtgttcatgcattgtgaagggtgtgctcgcaaggttcgtcgctccctcaaaggattcccaggggtcgaagatatactcacagattgcaagtctcacaaggtggttgtgaaaggagaaaaagcggatccgctgaaggttctagagagactacagaagaaaagccatagaaaggttgaacttctctctccgatcccaaaaccacccacggaagaggagaaaaaaccccaagaggaacatgagaagcccaaaccagaggagaagaaagaagag

SEQ ID NO: 9849 - DNA, 521 bp, Glycine max
gggtgaataactaaagcgtgatcctaaagcagaagagcagcgaaatcagtgaaccacgaagatgaagatgaagacgaagacgccattgaagcagctgaagctcgcggttcctgctcaggaaacccccatcacgtctttcctgactgcaagtggaacattccatgatggagatctactcttgaatcagaaagggttgcgtcttatctctgaagaaaaagaatcacggccttcagatggtaaggaactggaatttgacttcttgctggacgatcttgagaccatcaaagcaattggaaaaggcagtcgtggtgtggtacaacttgttcgccataagtcggttggaagattgtttgctttaaaggttattcagatgaatatacaagacgatattcgaaaacagattctccaggaactgaaaataaatcaagcgtcacactgtccacatgttgtagtttgctatcactcattctatcataatccagtaatatctcttgtcttagaatacatcgatcgtggttctc

SEQ ID NO: 9850 - DNA, 701 bp, Glycine max
agaagttgttgcacatcacataattacacttatctataatcatcattcatcaatactggtaatgagtcatcacgaacttccagtatatctggatcaattagacgtcaggcaagttttgacagaattagttcttgttggcaattagatcatttagttaacgcttgcatgctaagttttttctgtcttgagaagccacataatgaacaatgcaccttcattgaacattgaattaattacatggctcttgtttgataaagtccatatatctatatgctttttagcttgaggcaactttttttttagttatttcttaatccaaaattagtttttccttatattttagatgagtatgaagctatcagttgctgatggtcatctctgtaacatgggaaggatgattgaagaaatggagagtaagctgaggaactcactagatcaggtatactttggcaaaacaagagaaatggtttgcacactgagaccaccatctgaagtggcacagatgagaatgcctgatagcgcctgagagctgacgtgtcgttacttggcgtataagagagaaatttactttgttttcttcatatgtgtttgcgtgttggctggtaacttgtgtcacagtatttgaaggtaggtagtttcacaatggttggtggttcgggtgaccattgttttacagaggtagttgtgtttgttgtttgagt

SEQ ID NO: 9851 - DNA, 634 bp, Glycine max
  unsure (1)..(634): unsure at all n locations
gggaccagaggaagaagaaaacaccaattatcgtttaaccagtacagttatgctgactctgactacaaataatgagtcatccggaactttcagtttatctggttcaattaggcgtcagatgagtatgaagctatcagttgctgatgggcatctttgtaacatgggaaggatgattgaagaaatggagagtaagctgaggaactcactagatcaggtatactttgggaaaacaagagaaatggtttgcacactgagaccaccatctgaagtggcacagttgagaatgcctgatagcgcctgagagctgatgtgccgttacttggtgtagcagagagaaatttactttgttttagcgtattggctggtaacttgtgtcacagtatttgaaggtaggtagtttcacaacggttggtgtttctggtgggtggccatgggtctacagaggtagttcgtttatgttatttgagtgtcaattgttgttttctgtagtggataagcatcatgtttgttgttgatacttgactgatgattcaacacaacagtgaaattctaaaactggtgcctatgagaatgcttgacatgatacccttgtgtggaaatgaatcaaatgatatctcgtgccattacaacttan

SEQ ID NO: 9852 - DNA, 2670 bp, Glycine max
aatttttcttttcatcttaatctgctatctatcattcactttccactttccccatccatccatccaccgaaccctaaccctaatcctccatcatcgatttgactcgattctctcgctgtctgttatttccttcaaagcaaaacaattccatcgatgaatcgggcgtcgcagctttcgtgataatgatcttggcgctgcgaatcgattgcatgggtttggagaatgccggagcttcgtagtggaccgcgacgacgtcgtgctccggttgctcgtaaaagctccgaaccaccgtctccggccgggagatacgtcaagactcgcgctgcagtcgccagagaggcagcggcggtggagaggccaagaactcgtttggcggccaaaaaagaggagaatccccttataataatatccgatcacactaagaaagacgacgctgccgccatggccgacgagagtggtggcttgagtgcaaacaagggcgttgctcaagaagatgacaccaacgcagctccttttccggagagggttcaagtaggaggatcacctgtctacaaagtagagaggaaactgggcaaaggtggctttggacaggtttttgttggccgtcgagtcactggtggtaacgatcggaccactggtgctggtgccactgaggtggcattgaaatttgagcataggaacagcaaaggctgtaactatggccctccttacgagtggcaagtgtacaacacccttggtggcagtcatggaatacctaaagtacactacaaagggagacaaggggaatattatgtgatggtgatggacatgcttggtccaagcttgtgggatgtttggaattcctcaagccaggctatgactgcggaaatggttgcatgtattgcagtcgagtccctgtcgatcctggagaagatgcatgcaagaggctatgtgcatggagatgtaaaaccagaaaactttttacttggtcaaccttctacaccacaagaaaagaaattgtttcttgtagaccttggattagcaacaaagtggagagacacctccagtgggcagcatgttgactatgatcaacgccctgatatgtttagaggaactgttcgatatgccagtgttcatgctcatttgggaagaactgctagtagaagggatgatcttgaatctcttgcatatacactcatcttccttcataaaggcagattaccctggcaaggttatcagggtgataacaaatccttccttgtttgcaaaaagaagatgggaacatctcctgagatgctatgctgtttttgccctgctccttttaggcagttccttgagattgtagtgaacatgaagtttgatgaagaacctaactattccaggctaatatctttgtttgatggtatgcttggaccgaatcctgcattgaggccaattaacactgaaggtgctcaaaaggttgggcagaagaggggtagattgaatattgaggaagaggatgattcacagcccaaaaagaaggttcgtttgggggttcctgctacacaatggatttcagtttacaatgcaagactgccaatgaagcaaaggtaccattacaatgtagcggatgcaagattagcacaacatgtggagagagggattgcagatggccttcttattagttgtgtggcttcttgttccaatctctgggcccttattatggatgctggaactggcttttcaagtcaagtttataagttgtcaccatttttcttgcacaaggaatggatcatggagcagtgggataaaaacttttacattacttctattgcaggggctaataatgggagctctcttgtggtgatgtcaaaaggtacgcagtatactcaacaatcttacaaagtgagtgaatctttccccttcaaatggataaacaagaagtggagagaaggttttcatgtcacttcaatggctactgctggaagtcgttggggtgttgttatgtctcgaaatgctggattcagtgatcaggtggttgaacttgattttctctatccaagtgagggcatccataaacgttgggataaaggttataggattacagcaaccgcagctacattggatcaatctgctcttatattaagtattccgaggcgcaaactcagtgatgaaactcaggaaactctacgtacatcgcaatttcccggcacacatgttaaggaaaaatggtcaaaaaacctttaccttgcctgtttgtgctacggacgcacagtatgctgatttccatgacattttaaagcattttattgacaagcggattatgagttgtcatcctgccccaccacaaaagatctttttgtagaaaggaactaattgttgtgccagcagagaaccttattttgttatgttataagaatattgttctgttccctgtccctccccttctattatatgctttactgggatggggaatgttgcagagtaatgaatgctgtttagctttatatcttcctccattatgtttattcaaggttttctattttgtctctgcatgctgcgtgcttaattcaactaatattcaatcaggtatgttgctgaggtttttcagatttattatctccatgacattcttgtaataagaagcaattaagctgtatgacatcttctctttaatataatattaaaggtagtacagctgagattcctatt

SEQ ID NO: 9853 - DNA, 544 bp, Glycine max
gcaccaggtctaaccaattccatatactggaatgctcatacctttgccctcactgaatcagggaagctgtatgcatttggtgccggagacaaaggacagctaggaattgaacttgttgctaaccagactgaaaggggaaatccagaaagggttgaaattgatcttggttaactgtctgtgtccttacaccccccagtcctccacaattctttacaccatgctgtcctctaatttatggtcatcatgcatagcatttaatatttaaattccttgtctattctgtaaatataatcaaaagaatgcatcttgaaggtccaaggtaaggtaacagctaacaagggccttagtagcttctgtcttatggttgttgatatctcatcatcactcttaggctttcatctggttgttgatagttgatacattggtgaaggttcatttatagcctagttgtcttgaattgttttcatagatcatttgcttagatacagattgttaaatttggcattcattcatcatcctaagtcaaaacctcatggtgttgatc

SEQ ID NO: 9854 - DNA, 735 bp, Glycine max
tgttcgccctcgtgtcctgctagctatcattcactttcctcatccatccatccatccaccgaaccctaaccctaatcctccatcatcgattcgattctcttgctctttgttatttccttctttggtgaacaaagcaaaacaattgcatcgatgaatcgggcgtcacagctttcgtgataatgatcttggcgctgcgaatcgattgcatgggtttggagaatgtcggagcttcgtagtggaccgcgacgacgtcgtgctccgattgctcgtaaaagctctgaaccaccgtctcccgcggggagatacgtcaagactcgcgctgcagtcgccagggaggcagcggcggcggcggagaggccaagaactcgtttggcggccaaaaaagaggagaagccccttacagtaatatccgatcacgctaagaaagacgccgcacgccatggctgacgagagcggtggcttgagtgcaaacaagggcgttgcacaagaagatgacaccaacgcagctccttttccggagagggtttttgttggccgacgagtcattggtggtaacgaccggagcactggtgctggtgccactaaggctcgtgaggctgctatgacagttcaaagaaagatggtagattctcagtgtaagaagagcaaaggttggtagactcctcggcttgtttatgggcagtgctctttttcaataaaactcggaacatttcgacagattctgtgtatgcactt

SEQ ID NO: 9855 - DNA, 298 bp, Glycine max
actggctggtgtacgtctactcaaaatcatagtttagcaagttgggcaaaagcggggtaggttgaatgttgaagatgatgattcacagccaagaaagaaggtccgtttagggattcctgctacacaatggatttcaatttacaatgcaagacttccaatgaaacaaaggtaccattacaatgtgtctgatgcaagattagaacagcatgtcgtgagaggggttgcagatggccttcttattagttgtgtgtcttcttgttgcaatctttgggcccttattatggatgctggaactggt

SEQ ID NO: 9856 - DNA, 364 bp, Glycine max
gtacaagtaggtgctttgtttatgttgcaagagatatgtgtcgacgattgctttcggttatgcacaagatttgtgtttaagtgaaattgcctgagtttttttatttatttaatgttttgtttgtgtacagcacccttggtggcagtcatggaatacctggagtacactacaaagggagacaaggggaatattatgtgatggtatgacctacacaacaaccattttatgttctcgtcaccagctttactatagaacatttttatgtaggtacgtatgcaggtgatggacatgcgtggtccaagcttgtgggatgtttggaatgcctcaagtcagacgatggctgcggaaatggttgcatgtattg

SEQ ID NO: 9857 - DNA, 914 bp, Glycine max
cccacgcgtccgcccacgcgtccgcccacgcgtccgggaagatgagtttgagggcatcagagatagcgaagaagttgaatctgcaacctcacccagaaggtgggttttacgtggagacattccgagaccattccgtccagctttcgacctctcagctcccccccgaatacaaagtggatcgccctgtatcgacctccatctattttctcgttccttctgggagtgtgtctcgcctccatcgcataccctgcgccgaaacctggcatcattacatcggcgaccctctcaccgtatgtatatcttcatctctctctttcttttttaacctaatctgatatgaattgtattgcaggtagtggaattgaatgagaaagatgggagcgtaaaattcacttgccttggatcagatctgactcagaatcaggtgccgcagtacacggtgcctcccaacgtctggtttggctcttttcctaccaaggactttacctactctgcggacggggtattcggaagtgctgaagctgaagctgaagctgaagctagagatagtgagaggaactacactcttgtaggatgcacttgtgcccctgcgtttcagtaccaggacttcgagctcgctaagccttcttatctcctcgctcgttttccccaattccaccctctcgtcactgctctcacattccccgagtgactcacactatctatctgttctgcttttcggctttctaataatcatatagacgccttccttctatttctaattaatgcctctttcaacgcgagaaataaccattcctacgttgttgttgttgttgttgttgttgttcttttcgccggaaaacttatcttatccctagttttgattttaggtattggtccctgcctctttagagcgttgaaatgttttacttgtc

SEQ ID NO: 9858 - DNA, 713 bp, Glycine max
gttgggtttggaatttgattcttcacctaccgctgttgtagtttgaaaattatataatgaaatgaagagtttgaaaataaaaatctagagtttgtgaggaaggaagatgagtttgagggcatcagagatagcgaagaagttgaatctgcaacctcacccagaaggtgggttttacgtggagacattccgagaccattccgtccagctttcgacctctcagctcccccccgaatacaaagtggatcgccctgtatcgacctccatctattttctcgttccttctgggagtgtgtctcgcctccatcgcataccctgcgccgaaacctggcatcattacatcggcgaccctctcaccgtagtggaattgaatgagaaagatgggagcgtaaaattcacttgccttggatcagatctgactcagaatcaggtgccgcagtacacggtgcctcccaacgtctggtttggctcttttcctaccaaggactttacctactctgcggacggggtattcggaagtgctgaagctgaagctgaagctgaagctagagatagtgagaggaactacactcttgtaggatgcacttgtgcccctgcgcttcagtaccaggacttcgagctcgctaagccttcttatctcctcgctcggtttccccaattccaccctctcgtcactgttctcacattccccgagtgactcacactatctatctgtt

SEQ ID NO: 9859 - DNA, 1471 bp, Glycine max
gtcaacgtctgcgacgtcgtatttaaccgtctccgggagccataagcgaagaacgtttcttcctcttcccagttccctgcaacattaacaagagcacaacagaacagagggagcacacaatctttcttcattcttttcgtgaaacaaaagaaaacaaaagattaggttttgtgatgtcgggcatggagaggcttcagaggatgttcgcgggtgcaggtggagcgctgggccatcccccaccggattcccccaccctcgattcctccgagcaggtctacatctcctccctcgcccttctcaaaatgctcaaacacggaagagctggggtacccatggaagtgatgggtctgatgttgggggagttcgtggatgagtacaccgttcgcgttgtggatgtgtttgcgatgcctcagagtgggaccggtgttagcgttgaagctgttgatcatgtttttcagactaatatgcttgatatgttgaagcaaactggaaggccggagatggttgtggggtggtatcactcgcatcctggatttgggtgttggctttctggagtggacattaatacgcaacagagttttgaggctttaaatcaacgggcagtggctgtggtggtggaccccattcagagtgtgaaaggcaaagtggtaattgatgctttccggctgattaatccacaaactatgatgctaggtcaggaaccacgacagacaacttccaacctgggccatctaaacaagccatctatccaagctctgatccatggcttgaatagacattattactccatagcaattaattacagaaagaatgaacttgaagagaagatgttgcttaaccttcacaaaaagaagtggactgatggtttgacactcaggcattttgattcacattctaaaactaatgaacagactgttcaggagatgctaagtttagcagccaagtacaacaaggcagtgcaggaggaagatgaactgccaccagaaaaacttgcaattgcaaatgtggggaggcaagatgctaagaagcaccttgaagagcatgtttccaatttgatgtcatcaaacattgttcagactttgggaatgatgcttgacacggttgttttctagagttagctagcatcgtccattgtattgttccttactatagttagcaacatttcattaatactcttgacatgtttgttaacagaaattgttttattgtaagtttttgcattttgtgttttctttaaaatgcaggagcaaagctacattacatgttagaggatgaaaatcatattttaatctctctaaatgtaatggaggtcttcgtgatcgtgcgccagttttatttgtttatttggcagccgtaggattttacatataaactaagtgttgattcagttgtaattggaatcgcggagcaactaaacctgcgtgtgaactttagtcccataattcccaatattgggtgaattgttattcct

SEQ ID NO: 9860 - DNA, 423 bp, Glycine max
atattatatagcttgtcttttatttcttagactccatccattcttctccccaattgaatcttctttattttgtttcttcactgtctcgttatggctatagttttgcatagtaaataaactgaactgaagctatctatatagcagcaagtgttgatttaattacttactttagacaataattatattaattacaccaatttataagctctttatctatctatctagctagggaaaattaacatgtctagcagaaggtccaggcagcaatctgcatccacaaggatctccgatgaccaaatcatcgaccttgtttccaagttgcgtcaacttgttcctgagattcgcgataggcgttctgataaggtatcagcatctaacgtcctacaagagacctgtaactacatcagaagcttacacagagaa

SEQ ID NO: 9861 - DNA, 866 bp, Glycine max
ccggtcatttggtttggactgagaccaagagaagagggtatagcatagtttaatcgcagccccgaggggaataaaaccgacaaatcgttgaacatcggagccagagattcagagcgggtaccaccgacgatggatactggcggaggcggagcatcacctacagccgccatgtcgcggtggaagttcgcggcgtggcggcagtaccagcacctgctggacaaatcgacgccgcacgtcggacgccggtggctggggttcgcggcggtggcgcttttgtacttgctgcgcgtgtactttgtggaaggcttctacgtcgtttcgtacggcttaggcatatacatcctcaaccttctgatagggttcctctcccctcaggtggaccccgagaccgcgattctcaacgccgacgaccctatactccccatcgccgcctccgacgagtttcgccccttcgttcgccgcctccccgagttcaagttctgcgctatgatgtaaagagagcaccaccagaaaccacaagcctttcagtttcagaggactgaaattttcagctggagcaatctgaggatttgatggaagctgaagaaagttgcttttgaggtcttgtgtggacaccaacgggatgtcttggatgtttttaggccctagtaaaagattcagtttagggagatataattggagtttctgagggttttcttttactcctttattttctatttctttctatataagtgggctaatggctctcgttcttgaattagtactagtaatcaaataacgagaattttagatagatagcttgtgtagaatgaaatctttttcatttcttgcagtgaagttatactgatctatctttttgttttgct

SEQ ID NO: 9862 - DNA, 404 bp, Glycine max
gaaattttcagatggagcaatctgaggatttgatggaagttgaagaaagttgcttttgaggtcttgtatggacaacgggatgtctgatttccatttgagaaattgtttagactttgggcgtcttggatgttcttacgccctagtaaaagattcagtttagggagatataattggagtttctaagggctctttcttttactcctttactttctatttctttctatataggtgggctaatggctcttgttcttgaattagtactagtagtcaaataacgagaattttagatagctagcttgtgtagaatgaaatcgttttcatttcttacaatgaagttataccgatctattttttttattgtatatataaacattttaatttttaatcaatgattttttggaact

SEQ ID NO: 9863 - DNA, 417 bp, Glycine max
ggaccagcgtccaagcagaaatgatgcatggagcacacggatgagggagaagtatgggcttgatacttcggaatttacttacaacccatctgagtcgaacaggttccagcaagtaaactcgcagccaactgaagaaaagagccgctgcactataatgtgatatattttgcagagtttgtgtacacaattcttgctgtactgcatcactccatggcatggcaacatcttcatgatagtgtgtaatattgtgctgagacgtcaaaaatttactctggtgttgcttatgttcatagttaggggaagtgagtagtgaagtcgttagatgccccattttatcgctttgaagccaatgtcttctttctcccatgtttttaagtgaccatcactcggtagttgggaaaactatgatttagtccc

SEQ ID NO: 9864 - DNA, 589 bp, Glycine max
ggtgtgtgtggcggttagaagtgggggaatggaagagaaatactcaagcctggaaattgtggaggagagcccaaactcgggtgtgttctttcttatcttaaatcgtccgtcacgacggaacgctctctcgcgcgaattcttcagcgagttcccgaaagctctgcacgcactggatcacaacccggaggtgaaggtgatcgtgttgtccggcgccggggaccacttctgctccggcatcgacctctccctcctgggatcaaccgccgcgagttcgggttcctccggctccggcgaaaccctccggcgagagataatggcgatgcaagacgcggtcacggccctggaacggtgccggaagccggtgatcgcaagcgtacatggggcgtgcatcggcggcggaattgatatagtgacggcgtgcgacataaggatgtgcagcgaggaggcgtttttctcggtgaaggaagtggatttggcccttgccgctgaccttggcactcttcagaggttgccgcttattgtagggttcggcaacgccatggaattggctttgaccggtcgcactttttccggtaaggaggctaaggag

SEQ ID NO: 9865 - DNA, 627 bp, Glycine max
cgcttgtgagaggactgtgtagcgatacgaacaaggcttccttctcagaacctccgccaaacttagcggcgatttttccagcttccatttcccccctcaccttcttcttatacccctcacactctcttcttcctcgtccaccccatttctctctctttctaacaatggctcaggtcgtggcttcacgatccattcaaagcaccccattgtgccccacttctggatctgcacgtgacagaacccaaaacctgttaaagcctccatcttttgcttccaaggtgttccctttgggagagaacaataacaaacgctccaaactcaggctcagaagccttcagatcagtgcaaggaaatctgccccttctgaagtcatccccgtgtcacccgaagatgatccaaagattgaggagcatttgcaacatttacgtggggtgcagccatttggtgagaactctgttggtatgtggtctaagcccacgtttaggcgcaaaacgaagatagtgtgtactattggaccttctaccaatacgagggaaatgatttggaagctggctgaggctggcatgaatgttgctcggttgaatatgtctcatggagaccatgcttctcatcagaaagttattgact

SEQ ID NO: 9866 - DNA, 566 bp, Glycine max
ggagagagaaaggaagacaagagagaatggcagagaaaacgtttaaaatgaaaacccaatgacccaacacagattcacaagtcagtttcagagagagagagagagagagagatccactcttacaagtcaaactatgtctcactctccacattcacatttcacacacacatacccttccccatgaaatgacccttttgcccttccctctcggcctccatcttcttcttctcctttgactcaacaaccccccctctctctctttcacacagagagacactttctctctctacaccgcaatggacgccggcgaagccctctccgacgatccgaatcggcccaattccgccgccgacgcagcttcggcccccgcgggagcaaggtacaagctcctgtcgccggctaagctcccgatctcccgctccccgtgcgtcacgatttcgccggggctcagtccgacgtcgtttctcgagtcgccggtgctgctctccaacatgaaggtggaaccttcaccgactacagggtcgctttctttgcttcatcaaacagcatatggttccatgacttct

SEQ ID NO: 9867 - DNA, 392 bp, Glycine max
ctggagagacatacaatggtgaagatctagtgtgctactcttggggttataacagccgtggccaattaggcttgggggatcgagagagcagactgcatccggaagttgttagaacatttgacgaggagtccccttatgaggtagcatgtggtgcctttcacactgctttgctcactcgtaaaaagaaacctactgacacagtagaaagcacatgctggacctttggccttgggggtaatggccagcttgggcatggaactacacatagcacattatttcctacacctgttaaagaattgccacaaaatgtatcacttatctgtgttgactgtcggtttgtttcatactagttgttgtttcctcagatggggatgtgtggtcatggggaatgg

SEQ ID NO: 9868 - DNA, 664 bp, Glycine max
ccggtgctggttatggaggagcaggaggtggaatgtatcccagtaggggaagctatggtggcagtagtcgttaccatccttatgcaagatagttttattactaagctttgcagtagaatttgtatgcaggtttaagcattttctagacacaaggcacttactgcaggtggccactttctagaagtcagaagaaccactagcatgtctgttttatctattgcttagacaaccgaaggtagaaacatcatcagtctagagctttctgagcatcatcaatctagagcttcccatcagttatcagcctatatggattttagataggcacattctgctttaatgtgatattcagatgtttgcattagactgtcgctattctggattcgatatttagttagaaacatggtggagttgtgttaatgtgtattattgtaggtcatacttgctagaaatttgcttgaaatagtacttgttctccatctttcctttagttatgtttggttagcctatgttgaagatgttgacataaccttttcaggttaaactagttactacagttctgtgatttagttacatgcctagttagatcatatccatgcgagcgatctgaattagtctcaacaggtttctgaagtcacttttcttcctaaagggctgttttgacggc

SEQ ID NO: 9869 - DNA, 586 bp, Glycine max
atcgagcgaattcggctcgagcggctcgagaaggaaagcaattcgcttgcgcttcacatattgtgcggcaactgtctcatcacatctcgcgaatccaagccgaaggggaagggggtttgataaaggttgacattgaaatttgaagccatggttcttgactccattctgacatctcctcgtctcaagtctccatctttcaggagacagtttaaaaaggatgaactgggtagttggtccacacttttccagaggcatcgcttcctcttatctgctcttgttctgctaactctcctctgcactgtttatctttactttgctgtcactttaggggctagtggcacctgttctggtttgactggagcgcagaaagcttcatgccatatggagcttgttaaggattctgtggccaagggtaaactgaaaattctttgatatttcaaaatataattacagggaatattctttctttatttttgcctgagtataggtgacgtaatgaaatccaaatatagtctccggctactgtatcaatcagtgtgtctgtgatatgtatccatactattatttatcttggtatttttgagcc

SEQ ID NO: 9870 - DNA, 244 bp, Glycine max
gtctcatcacgtctcgcgatctcttcaaaggcgaaggggaacgcttcaggggcttgaataaggttgatattgtagccatggttcttgactccattctgccttctcctcgtctcaagtctccattctttcaggaggcagtttacaaacgatgaactgggtagttggtccacactttttcagaggcatcgcttcctcttatctgctcttgttcttctaactctcctctgcacttattatctttact

SEQ ID NO: 9871 - DNA, 624 bp, Glycine max
aacccccaagcgctgcattggtcatccattgttggaacattctctgattaccaaacaatgagacccccgagaggcggtggacgcggcggcggattcagaggtggccgcgacggtggtggtcgcggcagaggtggttttggtcgcggcggaggtggttttggtcgcggcggcggcggcggatatcgtgacgaaggaccaccctccgaagtcgtagaggtgtcatcttttatgcatgcatgcgagggagatgcagtgacaaagcttacaaatgagaaagttccctttttcaatgctcctatttatctgaaaaacatgactcagattgggaaagttgatgaaatatttggccccatcaatgaagcttacttctcaattaagatgatggaagggattgttgctacttcttattcatccggcgacaagttttatattgatccaaggaaactgttgcctcttgcaagatttcttccacaacccaagggacaatcagctggtagaggtggtggtggaggtggtcgtggtggaggtagaggtggccgtggaggcggtggttttcgtggaaggggcggtccaaggggtgggagaggtggtcctcctaagggtggtggtttcaagggaaagggg

SEQ ID NO: 9872 - DNA, 386 bp, Glycine max
ccccccccccctccaatcgctgcatcggccatccattgtaggagcattctctgattaccaaacaatgagacccccgagaggcggtggacgcggcggtggattcagaggtggccgcgacggtggattcagaggtggccgcgacggtggcggtcgcggcagaggtggttttggtcgcggcggaggtggttttggtcgcggaggaggtggttttggtcccggcggcggatttcccgacgaaggaccaccctccgaagtcgtagaggtgtcatcatttatgcatgcatgcgagggagacgcagtgacaaagcttacaaatgagaaagttccctttttcaatgctcctatatatctgaaaaacatgactcagattggaaaagttgatgaaa

SEQ ID NO: 9873 - DNA, 629 bp, Glycine max
gaagaaaatcgtcatcgactaagaaaggcattggaggagctagtgtggcttagtcgctaaatttgttacgataaagaaattaattcagcaacaaatacaatgggttctcttatggcaggatgggactctctgatcttggatcctgaatcagctacaatagagaggaatcgatcactcaccaaagaagaaattaatgcttactggagagtaaagaaggagacagagttagaacacctcagagctatgtccaaactatctgagactattcaggcccgaaaatttgaggattcagagaattctcataagtcaagtaccgtgaccttggccagcataaaggagtccttaggcatggacgttgaccagaaaagtttagagcaacttatcaagaaaaatggctggtggaccaaaagcagctgggcatttctgaatgaaccgccagtgatagaagctgcttccaataagtatgcgtcacagtttcacgtggccaacttggggtcaacgaaatttaacccccggagatggaattagtgcttgatatatgactttttctatcccacgtcgccctgtatctatatatatctccacgagtattcagtatagttgctatctatatgtgtaatggcttctat

SEQ ID NO: 9874 - DNA, 397 bp, Glycine max
gtgaatagtttattacgatataagaaatttagcaacgcaatgggttctcttatggcaggatgggactctctgaccttggatcctgaatcagctacaattgagaggaatcgatctctcaccaaagaggaaattaatgctttctggaaaacaaagaaggaggccgagttagaacacctcaaagctctttccaaattatctgagactattcgggcccgcaaatgcgagtattcagaaaattctcacaggtcaagtaccgcgaccgtggcttaggcatggatggtgacaacaaaacgtttggagaatcttatcaagacaaattgctgcagatgctcggcgtgactgcaggtggaccaagagcagctgggcatgtctgaatgaaccgccagttatagaagct

SEQ ID NO: 9875 - DNA, 649 bp, Glycine max
gtgaatagtttattacgatataaagaaagaaatttagcaacgtaatgggttctcttatggcaggatgggactctctgaccttggatcctgaatcagctacaattgagaggaatcgatctctcaccaaagaggaaattaatgctttctggaaaacaaagaaggaggccgagttagaacacctcaaagctctttccaaattatctgagactattcgggcccgcaaatgcgagtattcagaaaattctcacaggtcaagtaccgcgaccgtggccttaggcatggatggtgacaaaaaaagtttggagaatcttatcaagaaaaattgctggtggaccaagagcagctgggcatttctgaatgaaccgccagttatagaagctgcttccaacaagtatgcttcacagtttcaagtggccaacttgggatcaacgaaatttaaccccggagatggaattagtgcttgataattgatattagtctttctcacgtcaccctgcatagttcatagaatcgtagattcatagttggtgtctatatgtataaattaaggcttctattttgtcgcacacaattctgcataagaactgtatttctggtttctttgaaaagggttcaaattttctgaacagatttgtatgagaaaatgttc

SEQ ID NO: 9876 - DNA, 264 bp, Glycine max
agtttattacgatataaagaacgacatttagcaacgtaatgggttctcttatggcaggatcggactctctgaccttggatcctgaatcagctacaattgagaggaatcgatctctcaccaaagaggaaattaatgctttctggaaaacaaagaaggaggccgacttagaacacctcaaagctctttccaaattatctgagactattcgggtttgactttggaattaacatctctacagatttcacctactgcatttatcaagaa

SEQ ID NO: 9877 - DNA, 869 bp, Glycine max
ctgcttccattgaggcttcgttgagttactcgtcttctttgatcactgactccccaggtagcattgctgctgtgaggagggagcagatggcactgcaacaagcacaaaggaaaatgaagattgcccattatggaagatcaaagtctgcaaagtttgaaagagttgttcctcttgatccttcaaacactagtcttgcatcaaagccaactgaggaggagaagagatgcagctttatcacacccaattcagatcccatctatattgcttatcatgatgaggaatggggagttccagttcatgatgacaagatgctgtttgaacttttagttttgagcggtgctcaagttggatctgattggacctcaaccttgaagaaacgcctagatttcagggctgcattttcagaatttgatgcagaaaccgtggctaacttgactgataagcaaatgatgtctattagttctgaatatggcattgacataagcagagtccgaggagttgttgataatgctaaccaaattttagagattaagaaagactttggttcatttgacaagtacatttgggggtttgtgaatcataaaccaatctccactcaatacaagttcggccacaagattccagtgaagacatcaaagtcagagagcataagcaaagacatgatcagaaggggctttaggtgtgtaggtccaacggtgcttcattcatttatgcaagcagctggactcaccaatgaccacttaatcacttgccatagacacttgcagtgcaccttattggcatcaaccccccattgtaccacagagcactttctatagttccaatttcaattgagaaaaatgagattgatccagatgagatcaagacca

SEQ ID NO: 9878 - DNA, 539 bp, Glycine max
ccatcgttccgtcttcacaaaccctcggatcacagtgttagggttcttcaattttctccgattgccatcaaacatcacacaccacccaccaactatacgtcagcattgaaccctaaaatacatgactcagaagcagagaaccagaatcccagattccatggaaacccagtacgaggagagtgagaaagacgagtcttcctctgcttatagttcctcagaagacgaggaggaagagatagagaaggagctggctgatgtaacatttgaggagttgcagaaagctcgctcgaatgggacacatgcatttttccagaaacccaaagaagacaaaaaattaaaaagggccaacaagaataggccaatggaggctagtagcaagaagccagtttctgggtttagagaggtcatccaagctccaaagaaggttgtacgtgatccacgatttgaatctctttgcggtaaacttgaccctgaagggtttaggaagagatataatttcttgtatgaaaatgatcttcctgctgaaagacaggctctta

SEQ ID NO: 9879 - DNA, 409 bp, Glycine max
aggatctttcaatattctctgattgtagtcaaatcacaaacaacccaccaattataagttgccgtttcccttctcacttgctcgcggaattggaggaacccttcgttcgtgtcttgcggcattgaaccctgaacacatgactcagaagcaaagagacagagtcccagattccatggaaacccagtacgaggagagtgagaaagacgagtcttcttctgtttatagttcctcagaagatgaagaggaggaagagatagagaaggagctggctgatgtaacatttgaggagttgcagaaagctcgctcgaatgggacacatgcatttttccagaaacccaaagaagacaaaaaattaaaaagggccaacaagaataggccaatggaggctagtagcaagaagccagtttct

SEQ ID NO: 9880 - DNA, 1218 bp, Glycine max
cgacccacgcgtccgcccacacatcttaccaaatacttctcttggcattttgtgtcccttctctctttctcttgctcgatattttccaaccaaaataattattaaaaccaaacgtagctaggcaccactgctaggaatggcaagtgagatatttcttgcccttctgatcacaacctttgtggttgcagcctctgctggtaacttcaaccaagactttgagataacatggggtgatggtcgtgccaaaatcctcaatagtggggaacttctcaccttgtccctagacaagacctctggctctggatttcgttctaggaatgagtacttgtttggaaaaattgacatgcaactaaaactcgtgcctggtaactctgcaggcacagtcacagcttattatctatcttctcttggggatactcatgatgaaattgattttgaatttctgggtaacttgagtggtgatccttatattcttcatacaaacgtattcacacaagggaaaggtaacagggaacagcagttctatctgtggttcgaccccacccaggcacttccccacatattccattctttggaatcctcagagcatcatattctctgtggatgggacacccataagggagttcaagaatcttgaatcaaaaggggtttcttttcccaaaacccaacccatgaggatatattcaagcctttggaacgctgatgattgggccacaaggggaggccctagtgaagactgattggagccaagccccattcacagcctcttacagaaagttcaatgcccaagcatgtgtttggacttcttcttcaggctcatcttgctcctccaacaatccatcatcaaaccaagcatggttgaaacaatcactggattcaacagggcaagctaggattcagtgggtccaaaagaactacatgatttacaactactgcactgacactaagcgtttcccacagggccttcctcctgagtgcacaatcgcatgaaaacaaaactatttcatattataaacctctcatacctcatgaattcattttttttttcttgtcttgtgtaaattaataaaaacactatagggctcctcggtttatactttatatgcatctattgtctgtgaaatagtgtgcaaatgagattcgttgtaattttggtttttaataaatttgttggagagttataaattacaaaataaaaagaattatgcgcttaaaaaa

SEQ ID NO: 9881 - DNA, 389 bp, Glycine max
ggcaccaactcaaaatattcacgactctctcgaagttagtttaggtttagggttaagttttcttttccttcaatcttgcaagaaattcttctccgcacgatgcctcccgggcctctctgaaatccccatgacgtgaacgccccgatgcacgtgccaaatcgccgccgttcgtgttgcagtttagccccaattttcccacggttgatctgtgtcaaagtaacggcgaaattcctctttttcaatttctctctcttagtttcgatttggtgttgaatggatgcttgctgaattcgccttgctataccttcagcttcttttcgaacaccacacgtgttctctgaaaacggagctagtcctaaaggcgtaaatcgaaacgcggtcgtttttca

SEQ ID NO: 9882 - DNA, 382 bp, Glycine max
ggtacctgtgacaagaacttcgtccgagaaatattcagaattttgcatgccaacctcagatttgtctaaggagcaatgtaaatcatgtgatatttgcagacgatcagagtttatgttaaaccctatcccagtgtgctctggttgcaaggtttcggtgcacttggattgttatcgtagtgtgaaagaaacaacaggtccgtggtactgtgagttatgtgaagatttgtcctctagaagctctggggcagctgctatcaatttctgggagaagtctgttgtagaatgtgctctctgtggtggtactactggtgcttttagaaagtcttctgatggtcaatgggttcatgccttctgtgctgagtgggtttttgagtctacattc

SEQ ID NO: 9883 - DNA, 658 bp, Glycine max
gacatgacaatgtccaaaacagtaccttgccgtttattatcacacaagacagcattacccttctattgttatcatcgacattcttaactcttaagaactgattcaccaacgacccctctgaatttcagaaactatcaatgaagggggaagtgcagcttcagcctccagcggttatgcaaaaccctagtgattcggaccctttgctccataaccaggaggaggaggaggaggatgagtcaccgggaagctctggtgagatcaagaatgaggaagaagacgttgaggctggattactcccctgttgtcgaatttgcctcgaaagcgattccgacccagaggatgaattgatatctccgtgcatgtgcaaagggacccaacagtttgtccatcgttcatgtcttgatcattggcgctcagtaaaggaaggatttgccttctcacactgcacaacctgcaaagcccaatttcatcttagagttgaatcgattgaggacaacacttggcgtaaaataaagttcagactttttgtggcaagggatgttttccttgtttttcttgcagtacaaactgtgattgcagctattggtggctttgcatacatcatggacaaagatggttccttcaggaactcgtttgatgatggttgggataggatact

SEQ ID NO: 9884 - DNA, 286 bp, Glycine max
gaccagaattttatgatccccgtgttaggttccgcgatattgtgttgttaggggggtcttctcttttctaaacctgcttgatcgaacagtaaccatcaatgaagggggaagtgcagcttcagcctccagcggttatgcaaaaccctagtgattcggaccctttgctccataaccaggaggaggaggaggaggatgggtctccgggaagctctggtgagatcaagaatgaggaagaagacgttgaggctggattactcccctgttgtcgaatttgcctcgaaagcga

SEQ ID NO: 9885 - DNA, 611 bp, Glycine max
gcgattttctgggtcagttgaaatcttacgtgagggaggaggatggtgctgtgattctcaaattggctggtggactcaccattttgatctttggcttggagtgggtggttttgacacttgcatttttcttgaagtattatgcttgtgttgaggggaatagtggggctgttgtgcctgtgaggagtgggaaggtgcagcaggatgaggacttgaaggattggccttggccttttcaagtttgattcttgtgatgacaagaagaaacacaagaataacaatgacatgttccttttgaagttgttgcagctgttttgatgataatctttcaaatatgttgattcgttggagaattggatgcttttttctcctgatagagatatatgtgtgtgtgtttgtgttggctatcatcattatgtaattagttgtgtgtgtgtagttattctttagattcatcttatttgttgttggattattattacttcacatatcatctccttcttgttaagcaagaagttcagttactatataatggtatcagttttgagtaactttatatctggcttgattgagaacgagagttcggttactatataatggtatcagttttgagc

SEQ ID NO: 9886 - DNA, 2654 bp, Glycine max
ctcaccctgtgaaacatgcataccccctgtggttgacaccagttatttgtcagatctggttcgccttataccggcctcttgatcagtttccaaaatgctctcccattaatcgtgagacttatcttgaacgccttgctttaaggtatgatcgtgaaggagaaccatcacagttagatcctgttgatgtgtttgttagtacagtggatcccctcaaagagccgcctcttgtaactgcaaacactgttttgtctatactttctgttgattaccctgtcgacaaagtttcctgctatgtatcagatgatggttcagctatgttgacctttgaagcactatctgaaacagctgagtttgcgaagaagtgggtgcccttttgcaaaaagcacaatattgaaccaagagccccagagttttattttgcccagaagattgattacttaaaggacaagattcagccctcgtttgtaaaagagcgacgggcaatgaagagagaatatgaagaattcaaagtacggatcaatgcccttgtagccaaagctcagaagatgccagaggaaggttggacaatgcaggatggaactccttggcctggaaataatcctagggatcatccgggaatgattcaggtgtttttaggtcatagtggggggctggatacagatggaaatgagctgcctagacttgtttatgtttctcgtgagaagcgaccaggcttccaacatcacaagaaggctggagctatgaatgctttgattcgagtttctgctgtcttgaccaatggtgcatatcttctgaatgtggattgtgatcactatttcaataatagcaaagccctcaaagaagccatgtgtttcatgatggatcctgttcttggaaagaagacatgctatgtgcaatttcctcagaggtttgatggcattgacttgcacgatcgatatgccaatcgcaatattgtgttctttgatatcaacatgaaaggtcaggatggtgttcagggcccagtctatgtgggaactggttgttgtttcaataggcaggctttgtatggttatgatcctgttttgactgaggaagatttggaacctaacattattgtaaagagttgttggggttctagaaagaagggaaagggtggcaataagaagtacagtgacaagaagaaagcgatgggcagaactgaatccactgtacccatatttaatatggaagacatagaggagggtgttgaaggttatgatgatgaaaggacactacttatgtctcaaaagagcttggagaagcgttttggtcagtctccagtttttattgctgccactttcatggagcagggtggcattccaccttcaacgaaccctgcaactcttcttaaggaagcaatccatgttatcagctgtggttacgaagacaagacagaatggggcaaagagattggatggatctatggctctgtgacagaagatatcttgactgggttcaagatgcatgctcgtggttggatttccatctattgcatgccacctcgcccagcatttaagggttctgctcctatcaatctttctgatcgtctcaatcaggtgcttcggtgggccttgggttcaattgagatctttctaagcaggcattgtcccttgtggtatggctacaatgggaagttgaagcctctgatgaggcttgcttatattaacaccattgtctacccatttacctcaatcccattgattgcttactgtacgcttcctgcattttgtcttctcacaaataaatttattattcctgagataagcaactttgccagtatgtggttcattcttctctttgtctccatttttaccacttcaattcttgagcttaggtggagtggggtcagtatagaagactggtggagaaatgaacagttctgggttatcggtgggacatctgcgcatctctttgctgtgttccaggggcttctaaaagtgcttgctgggatcgatacaaattttactgttacatcgaaggcatcggacgaggatggggactttgccgagctttatgtgtttaaatggacatcacttctcatccctcctacaacagtgcttattgtgaatttggttgggattgtggctggtgtatcctatgccataaacagtggttaccagtcttggggtccactatttggcaagctgttcttcgctatctgggtcattgcccatctatacccattcttgaagggtctcttgggcaggcaaaatcgtaccccaaccattgttattgtttggtccgttcttcttgcttcaatattctccttgctgtgggtgaggattgatcccttcacctctgactccaacaaattaaccaatggtcaatgtggcatcaactgttagttctcttgtatgattcattttgtgttgttattcccttttgcttggagatacacaaggttgctgtcgtgtatatagcaagaattttcagcctatcaaagttgtctggaggattgaacccctgaaatagatgggaatgtaccctctctgtttctattatttatctacatgttccttacaagaatagtcagtagtaatgttgaggtgtatgttatattttttccccacagaatataaatttgttcatgccgaatatttaatgaaagccaacaagggccttgtgttgtttggtcc

SEQ ID NO: 9887 - DNA, 395 bp, Glycine max
aaagaacaaaacacaggaccttgttggctttcattaaatattcgcataaacaaatttatattcagtgggaaaaaaatataacatacacctcaacatgactgattattcttgtaaggaacatgtagataaataaatataaataatagaaacagagagggtaacattcccatctatttcaggggttcaatcctccagacaaccttgataggctgaaaattcttgctatatacacgacagcaaccttgtcatgaatcttacaagagaactaacagttgataccacattgaccattggttaatttgttggagtcagaggtgaagggatcaatcctcacccacagcaaggagaatattgcagcaagaagaacggaccaaacaataacaatggttggggta

SEQ ID NO: 9888 - DNA, 317 bp, Glycine max
gcacgaccggttcttcggcttaccactgtgtggcacacctcccaaataataagactatgtttatgctctctacgccgccaacaaccacattcttcgctacgcctagggttcttccgtttctctcttcaaaactttcttcttcttcttcttcttctactgcgtcgtcctcgccttgttgctcctccatcactcccaaggttaaatccaaagataacaacaattgctacctcgtctccgctaaacattctcccgctaacatgtccgcttcggtttcgtcacgcaccttcctcaacgctcggaacgcacaagagcttcta

SEQ ID NO: 9889 - DNA, 573 bp, Glycine max
cccacgcgtccgctgaggttcgcttacatcttcttactgcagttatgaagtgtttctttaagcgaccacctgaaactcaaaaagcattaggagctgcattggctgctgggattgctactgattttcaccaggatgttcatgatagggccttattttattacaggcttctgcaatataatgtatcagaggcagagagtgtggttaaccctccaaagcaagcagtttcagtatttgctgatactcagagcagtgaaatcaaagatcgcatatttgatgaatttaacagtttgtctgttgtataccaaaagccttcttatatgttcactgataaggaacaccgagggacatttgagtttgcagatgaacttggaaatctatctattagtgcagaatcttcagattctgttgttccagctgagagagtggaagcatatgacaaggatctgcttctaagtacttcagaaaaggatgacggaagagatcctggtagcaatggttctgtctataatgctccttcctataatggttcttctgccccttctacaacttcacaaccacttgcagatttgtcat

SEQ ID NO: 9890 - DNA, 586 bp, Glycine max
tacgggagagcgggataaagaaaaagaagaataaaaattagggcgaacgggtcataggtgtgaagtgaaagagagattctgcgtgcaggaagagcgaacctagtgagtgtggcaatggcggaggagcaaggtgaattcaggatttacaattccatgactcagcagaaagagatcttcaaaaccaaagtccccggcaaggtttccatgtacgtttgcggagtcactgcctacgacttcagccatctcggtcacgctcgcgctgcggtttctttcgatatcctcttcaggtaccttaagcacttgggctatgagattacatatgtgcggaatttcactgatgttgatgacaagataattaagcgagcaaatgagaccggggaggatccattgatgttgagcaaccgtttttgtgatgaatataatgctgatatggctgatctccagtgcgagacaccatctagggaacctcgtgtttctgaacaccttaacgagataaaggacatgataacccagattatcagcaatggctatgcgtacgaagttgatggcgatgttttttatgctgttgataaatgcccaaattatg

SEQ ID NO: 9891 - DNA, 712 bp, Glycine max
  unsure (1)..(712): unsure at all n locations
ggcgtgaaggaagtgcgaacgnagtgagcttggaaatggcggaggagcaagctgaattcaggatttacaattcgatgagtcagcagaaaagagctcagttgcaattgattcaatccttattggaagtggagaaagaagttggaaaagttttggacgtcctaggattattgtcctctaaatcttatgccgaggttctgcatcagttaaaagataaggcattgaacagagcaggtctgacagaagatgaagtgctacatctgatagaagaacgaactcaagctaggattaataaggatttcgccaaaagtgataagatgagggctgatttggctaccaagggcattgcccttatggatgtgggcaacgaaataatttggagaccatgcatcccgagtgaaccacttgttgcagaagttgttcatagagaccagagggcacctacagttgaagaaaagcagtcctcatcttcagtgaatcaaaaagtggatgagatacctggtggtcgagaagggaatgacctacatacaacaacatgaaggtagagtcaatgtccctccttagctatgattaatacagaaaatgttataataatttatcaaaatactgcacaaggcttgttgaagattgtatatcacttgaaggctatgtatgaccatacctagctggctaggacgtgaatcgtgttacacatttcttatgttgggtcttttac

SEQ ID NO: 9892 - DNA, 397 bp, Glycine max
gactcatatgattcttctttaaaattacactacaacaatgtgcaaaagacaaggcgatttgcgtaattgtcaaccaccacaccaaccaagccgcgtcgttctttttagtcactgataagaacaaacttccaccgtccgcggccatggcaacgctgtcttccgccgtcactctcgccgctaaacccctctcactacccctaaaccaccgcgccagagcggcggcggcgttccactctcccaaacctcatctcaagagagcggaattcaaattcttttcgaatggctcagctgcctctgtccactcccttacccgccgcctccgcgtttcctccaacgacgctcacttcaattcgggtcccgaggagagccagcaacaacagtcgtcgagttttgcaga

SEQ ID NO: 9893 - DNA, 767 bp, Glycine max
gtgggaacaatggaagacataaaatctctgaatggggaagttgatgcactaaaattatccggtggaaccggcagagccagcggcagaaaagacaataacggtgataaaggcaatgccgacaatgttgctgccagtaaaatgaaaggcttcatatcaaagaagatactctctaaaatttggtctagcaaagaaaaaagtggtgatctaagtagctctgatacttcagagagccctgcttctactgttgtagaggaaacaaaatctaccccatctagaagtaggaggcattcagtatcttagaccatgttatgcagactttagagctccattcagttactgtataatcatctcactaaagtagcatcaggagtcagaggacactgacatcatattccagctgatacttcaatgagttctatgtaactgagcaaatgttggcacgtgggctaaaaatgaagcaccaaaagtaatattttaactgtggctatatcatactcctagggttgcaatcagccattactgatctttaggttagatggctcttgtgagacccagttttgattattggaaactggcttatgaatgccagcatttgtaaccttaagttttaaagggaaaaaggacttagaggatatctagaaccaattgcttaaggagtaaggagggtgcagagtttgaaaggcttgtgttgggaatattacttagcattttgatccgtcattaatgttaatttgacccgtggtatgggctgcaaaacctattggact

SEQ ID NO: 9894 - DNA, 940 bp, Glycine max
cagtagctgttaacgggttgggtcgggtcgcgaaccggggatgttggttagatagaaagggttgacccgacagaagtggcgttgtgaagtgcactgcgtttgcctttgcgtttaattgaagatcagaaatgcaaatgtcaagattcacccaattccgagctctactccgcggcaccaccagccaccagcgctcccctctccgccaccccgccgtcgccgattcttcatttgcatcaaaaccctcattctctaatgccgccgcgttccgcgcctcttcgcctgtgttccacccgcaacaacgcctcggcaatagcaccttccgattcttctcatccaatttcgacaaaggctttgcgcagaaggtatttgataaaccggccgccgcggtgacctcggccttctcgcgttaccgcgaggcaattgggctgcaaatcgaggcgttcttcaagaggaatactctctttctgtggggcgccggtggcgttgtcctctgcgcttttctgtggaggatccttttcgggatcgctaacctcttcgttggactctccgaaggcatggccaagtatggcttccttgccctttcatctgctatcgctgcttttactggcttgcatatccgtgcgaggctcacgatcaacccggataaagcctatagaatggccatgacgaaacttaacacgtcggctgggattcttgatgctatgggtgcccctctctctgcaactgatctgagagcctatgtcatgtcagggagtgggctcactgtcaagaagtcacgccagtgtacgcgtcgaccgtgcttctcatttcccatacgagtctggacaacgcctagcagtgtgagcacgagaagaggccagacatcgagctgtgctgtgagtccatgctctgtccaacacgatgatcactggatgaaatacacggcatcgtggctacactc

SEQ ID NO: 9895 - DNA, 590 bp, Glycine max
gtccggggttggaaaagaccaccagaaggggaacccaccatcgaaattgggcaaaacatttaatttctatctaaaatggtgacttatatctcaaactattctcttctctttgtaatgctggctctgactataacaggcctaatagaagtaaaaggaaacacatgttcacaaccattgggtggatgtggtcctatgggacaatgtgaccagagatgtaaagctctacacattgatggacagggatcttgtgacttaggcttgtgcacttgctactacggttgtgcaaggcctccaccaagtccaaccccacctaaaatatgcaataatggttttggggtttgcactcttcagtgtggtgatgcatgctgtaatgcaaattgtgcaagaaaaaataatcagggaccaggaatgtgaagccccattggtaacaacaacttatgtacttgccaatatagatgtggctgaagtttatgcctgatcatatatctagctaatttatccctccctatacgttgggatgtgtgtgggataagtatgtcatgaatcaattacaataaatcatatacatggatgcctctttcaatttcaag

SEQ ID NO: 9896 - DNA, 377 bp, Glycine max
caacgaggaacggatgacatcagtaagtaacacctgagaataccaacgagttccttcaccttttcggcgatttagcttcagcactggctttacaggtaaaggttctggctgtaaagaggttgcacatgtgccacatcagagctccatagcagcacttaaatctagttcagaaaatgtgagaggttatgctagctcaaaaatttcacgcaatgataaacctggtaatgctgtcaaaagcaggtctagtagccctttaaggagactactggatcccctgctgaaaccgaagacatcagaccatcgctcggtggagtcatctcaaaacgattcagtggtaatacagaagaattgtaggtcagctaatgggggatttgcta

SEQ ID NO: 9897 - DNA, 548 bp, Glycine max
aagacttcgagatccctacaatttctaaagatgttgacatgaaggagatatttagcatactaaagcaagcattaatctccaaatctcctctaagtgaagtattcttcaaaaaagaaggatctaagtcatgctcttgcccatactcttgcccttgctcacgaaataccaacccaattcattggaaagattctataaaaatcaaggtaatggtgaacaaatcaaataataagattgtgttggccgaagcagatggagattttgttgattttcttttcagcttcctcacaacaccccttggatctattctgaaccttactaacggcaaatttcccttgggaagcattggtaacttgtacagaagtgtgaagcgtctcgatccatcatggttcaaagggtcatctaaggaatccttactgaatctgagggtggctcctcattttggttgcaagagcagcccatttcaagaagaccacactcctaattattggtatggcactgtagcagggaaagataataatgaggggcgtacaatgattttaaagaaaaag

SEQ ID NO: 9898 - DNA, 2420 bp, Glycine max
gttggatcagctcagaggtttggggtgccaatggggtatggagggcctcatgcagctttcttggccacttcacaagagtacaagaggatgatgcctgggagaatcattggggtcagtgtcgattcttccggaaagactgctttgaggatggcgatgcaaactagggagcagcatatcaggagggacaaggccaccagcaacatttgcactgctcaggcactgcttgcaaacatggctgccatgtatgctgtgtatcatggacctgaaggcctcaagaacattgcacaccgtgttcatggtcttgctggggcatttgctcttggaataaagaaacttggaactgtggaaattcaggaccttcccttctttgacactgtgaaggttaagacttccaatgcacacgcaattgctgatgctgctctcaaaagtggaataaatttgcgagttgttgatggaaacactatcactgttgcttttgatgaaacaaccacattagaggatgttgataatcttttcaaagtttttgctggtggaaagcccgtctccttcacagctgcatctcttgcaccagaagttcagagtgcgattccttctggattagttaggaagagcccttatctgacacactctatctttaacatgtaccaaactgagcatgagttgcttaggtacttgtataggctacaatcaaaagatctctcactatgccacagtatgattccacttggatcttgtacaatgaagctgaatgcaacaactgaaatgatgcctgtgacatggcccagctttactgatattcacccttttgcaccagttgaccaggctcaaggttatcaggaaatgttcaataatttgggtgaactgttgtgcaccatcactgggtttgactccttctccttgcaaccaaatgctggtgctgctggagaatatgctggacttatggttattcgtgcatatcatttggcaaggggagaccaccaccgcaatgtttgcattatacctgtctcagcacatggaacaaatcctgctagtgctgctatgtgtggaatgaaaattgtctctgttggaactgatgccaagggaaacattaatatagaagagctgaggaaggctgctgaaacacacaaggataacttatctgcacttatggtaacatatccttcaacccacggtgtttatgaggaaggtattgacgaaatttgcaatattattcatgataatggaggccaagtatatatggatggtgccaacatgaatgctcaggtgggactcacaagcccgggttggataggagcagatgtttgccatctcaatctccacaagacattttgcatccctcatggaggaggtggccctggcatgggacctattggtgtaaagaaacacttggcaccatttttaccttcacaccctgtgatagaaactggtggaattcctgcccctgacaaacctcaaccacttggtaccatcgctgctgcaccatggggctcagcactcatattgccaatctcttacacttacatagccatgatgggttctaaaggactcaccgatgcatcaaagatagccattttgaatgcaaactacatggcaaaacgattggagaattattacccggttcttttccgtggagtcaatggaacagttgctcatgaattcatcattgacttgagaggctttaagaatactgctggaattgagcctgaagatgttgcaaagcgcctcatggactacggttttcatgcaccaacaatgtcatggcctgtgcctggcacactcatgattgagcctactgagagtgaaagcaaggccgagttagacaggttctgtgatgctcttatttccattagacaagaaattgctgagattgagaaaggaaaggctgacattaacaacaatgtacttaagggcgcccctcatccaccatcactgctcatggctgatgcatggacaaaaccatactccagggaatatgcagccttcccagctccttggctccgtactgcaaagttctggcctaccacaggacgtgttgataatgtgtacggtgaccgcaacctcatttgcacccttctcccagcatcacaggctgttgaagaacaagcagctgccacagcataatgtgttcaaatgacaactattttcatttcccgttgtacataaactcttattcctattcatacagttcttgcacttgttgaatattgcttcatcatatgtgacaatgatgataatccactgctcttaagtttcatccaatcacaggaaaaaaaaaaaaagtaattcgtataattgctgctgctattggattttaggaatgtattttaggcctatctgttacagtaatgtgaaaaaatgaatttgattcatgtaaaaaaaactcagcattagtttcttttagtaaagaatgcatttgccat

SEQ ID NO: 9899 - DNA, 644 bp, Glycine max
attggtttaaaatcatgcgtcccactaatttgggaatagaacttaccaaatgaggaaggagactcagatttaatgggacctatataaatttcacccaaatagtgtgtgtggtactaacatttattatagtctattgaaggtgtgctatgttgtatgtagtgactgcatagtttagtttgagaaataaatgcatagactaattaatgaatgaaacatgtgtatcaggacgtgttgataatgtgtacggtgaccgcaacctcatttgcacccttctcccagcatcacaggctgttgaagaacaagcagctgccacagcatagtgtgttcaaatgacaactattttcatttcccgttgtacataaactcttattcctattcagacagttcttgcacctcttgaatattgcttcatcatatgtgacaatgatgataatccactgctcgtaagtttcatccaaccacagggaaaacaaaaaaaagtaattcgtataattgctgctgctattttattttaggaatgtatttgaggcctatctgtcacaataatgtgaaaaaatgaatttgattcatgtaaacgaattgtataaaaagaaaaaaagaaaaacattcagcattagtttcttttaataaagaatgcatttgcc

SEQ ID NO: 9900 - DNA, 733 bp, Glycine max
tagccattttgaatgcaaactacatggcaatctttgatgcatcggtgagtcctttagaacccatcatggctatgtaagtgtaagagattggttctaaaggactcaccgatgcatcaaagatagccattttgaatgcaaactacatggcaaaacgattggagaattattacccggttcttttccgtggagtcaatggaacagttgctcatgaattcatcattgacttgagaggctttaagaatactgctggaattgagcctgaagatgttgcaaagcaaggccgagttagacaggttctgtgatgctcttatttccattcgacaagaaattgctgagattgagaaaggaaaggctgacattaacatcaatgttcttaagggcgcccctcatccaccaccactgctcatggctgatgcatggacaaaaccatactcccgggaatatgcagccttcccagctccctggctccgtgctgctaagttctggccttccacaggacgtgttgataatgtgtacggtgatcgcaacctcgtttgcacccttctcccaacatcacaggctgttgaagaacaagctgctgcaacggcctaatgttttcttccattgacaagtattttcattttttaaattgtacataaactcttcctatcattcaggcgttgctgctcgacctttgcttcatcatatcataatgatgatgatgtaagtttcattcaaccatagagccataccc

SEQ ID NO: 9901 - DNA, 963 bp, Glycine max
  unsure (1)..(963): unsure at all n locations
ggatctggaccaatgagcctgaatgcaccactgaattgattgcttgtgacatgccccagctttactgatattcacccttttgcaccagttgaccaggctcaaggttatcagnaaatgtccaataatttgggtgaactgtgttgcaccatcactgggtttgactccttctccttgcaaccaaatgctggtgctgctggagaatatgccggacttatggttattcgtgcatatcatttggtatggatcatacttggatctttatgataaattgataatttattaggaaatttatggttcttctgatttactcttaggatataaaagtttttgtgtgattattgaatgtgactttgtattttcatttcagcctattgtacaatagccttagttgtgccattttctattgctacatatctaaaagagatgcgatgattttcctacattactatctctgattaaattcctgtgatgcttcttacttcttttggccattggaaactgtaggcaaggggagaccaccaccgcaatgtttgcattatacctgtctcagcacatggtacaaatcctgctagtgctgctatgtgtggaatgaaaattgtctctgttggaactgacgccaagggtaacattaatatagaagaattgagaaaggctgccgaaacacataaagacaacttatctgcacttatggtaacatatccttcaactcacggtgtttatgaggaaggtatactgacgagatttgcaagattatccatgataatggaggccaagtatatatgggtggtgccaacttgaatgctctcagaattattaccccgttcttttccgtggagtcaatggaacagttgctcatgaattcatcattgacctgagaggctttaagaatactgctggaattgagcctgaagatgttgcaaagcgcctcatggactacggttttcatgcaccaacaatgtcatg

SEQ ID NO: 9902 - DNA, 1191 bp, Glycine max
cgttttcttcttcgtattttcactttttggtcgcatattaataatcggagacgagaagtgtagttttagtgggagaaggaagaagattgacagagagagagaggaaggagcgcgaaaagactaaattgaccttggatcttcgtctttcctctctctccgattcgtttttcgttggtcttctaaaagcttcttccaccatgaacagcaaggccaacgtttccaaagagctcaacgccaagcacaagaagatactggaaggacttcttaaattaccagagaatagggaatgtgctgactgcaaagctaaaggtccaagatgggctagtgtaaatcttggcatctttatatgcatgcagtgttcaggaatacatcgaagtttgggggtacatatatcaaaggttcgttctgcaaccctggacacttggcttccagagcaagttgcattcattcaatcaatgggaaacgagaaagcaaatagtttctgggaagcagaattacctccaaattatgatagagttggaattgagaatttcattcgtgcaaagtatgaagagaagagatgggttgcaaggaatgagaaaccaaaatcaccttctagtttccgagaagagaaaagtccttcacattggcaaaagcctgaggaaacgaagaaaatccaaccatcaaatgcaattcctgctacaagaattagtgttcctgctcctcccaaagggcctgagctggtaactcctatggcaaaacctcaacatgttgagaaagtggaacctgttgcaccatcaccacaagctgaaacttcaaaacagactactgacacaacacaaaattccccttcaaaagttgactatgctacggacctttttgacatgttgtctatggatgatccaaatgaaaagggctcaggggcagctatgctactgctgatgataataactgggcaggttttcagtctgctgcagaggcatcgacagctgagaagactgatgctacaaaagcagttgagagtacaccccagtccacttctggaattgaggatttatttaaagactcaccttcagttcaccaagtttaactacagaaaaccacaaaaagatgtaaaaaatgatatcatgagcctctttgagaagtccaatgtggtgtctccatttgcaatgcatcaacagcaactggccatgctggcacagcaacagtctc

SEQ ID NO: 9903 - DNA, 746 bp, Glycine max
  unsure (1)..(746): unsure at all n locations
tccaccatgaactgcaaggccaacaaganccaatttataatcaactccaggcggcattaaaatactgtgaaggcgcttcttaaattaccagagaataggggatgtgctgactgcaaagctaaaggtccaagatgggctagtgtaaatcttggcatctttatatgcatgcagtggtcaggaatacatcgaagtttgggggtacatatatcaaaggttcgttctgcaaccctggacacttggcttccagatcaagttgcattcatccaatcaatgggaaacgagaaagcaaattgtttctgggaagcagaattacctccaaattatgatagagttggaattgagaatttcattcgtgcaaagtatgacgagaagagatgggttccaagagatgggaattcaaaaacaccttctggatttcgggaagagaaaagtccttcacattggcagaggcctgtggagagaagtggttatgccgctgtttctgaaaataaatttgaggaaaggaagaaaatccaaccatcaaatgcaatttctaccacaagaattaatgttcctgctcctcccacagcatctgagcaggtaactcctattaccaaacctcagcatgtggagaaagtggaaccagtagcaccacaaccaccagcttcccaaccacaagctgaaacatcaaagcaagctacagacacagttcaaaatatccctccaaaagttgactatgctacagaccttttcaacatgttgtctat

SEQ ID NO: 9904 - DNA, 397 bp, Glycine max
gttttggtgacattcttcttcttcttcatatcatcacaaccaagagagagagagagaggagagagaaagcgcattaaaagaccaatttgcccttcgatcttcttcttcttcgtcttcctctctctcgcaccatgaacgagaaggccaacgtctccaaagagctcaacgctaaacacaaaaagatactggagggacttcttaaactaccagagaacaaggagtgcgctgactgcaaagctaaaggtccaagatgggctagtgtcaatcttggcatctttatatgcatgcagtgttctggaatacatagaagtcttggggtacacatatcgaaggttcgctctgcaactttggacacctggctcccagagcaggttgcattcattcaatcgatgggaaa

SEQ ID NO: 9905 - DNA, 349 bp, Glycine max
ggggagaaggaagaagattgacagagagagagaggaaggagcgcgatcagactaaattgaccttggctcttcgtctttcctctctctccgattcgtttttcgttggtcttctaagagcttcttccaccatgaacagcaaggccaacgtgtccaaagagctcaacgccaagcacaagaaggtttctctcttcgtgcttgttcgttttattagtatttcaatttcgatttgtgaagcctgcattcgctgattatataattgcctcggatcattaatcggaacttgttcttggatttgaatccgtcgctgtccgatatgcatatcgcgaaattttgaaagtgagaaagtttc

SEQ ID NO: 9906 - DNA, 383 bp, Glycine max
tttcttttcgcattttcactttttggtcgcatattaataatcggatacggggagtgtagttttagagagagaaagattgagtgagaggtaggagcgtgaaaagaccaaattgaccttggacttcgtctttcctctctctccctgtgaactctcgttccgattcgttttcgttggtcttctagaagcttcttccaccatgaactgaaaataaaaagtttccaaagagctcaacgcctcgcacaagaagatactggaagggcttcttaaattaccagagaataggggatgtgctgactgccaagctaaaggtccaagatgggctagtgtaaatcttggcatctttatatgcatgcagtgttcaggaatacatcgaagtttggggg

SEQ ID NO: 9907 - DNA, 589 bp, Glycine max
aagaaattattcggatgaggaaagttggtggccacaataaaatcctcacaagtggcaaataattaactttgtccattccacgttatcgtctcttcctcaaactctgaaccttccgtgcagcgcagagctttgctggcatacccaccgtgacgaaattaacctctctacgtaacagcacacagcgatttccccaaatcatcgaaaccctaactcgcgattcccaatcgaaaccctaactcgggatggcgattttgctgggcgaaattcttcaatcgctggagctgtggctgaagctgatcaagaacccgcagccgcagccctacgtaaaccctaatctggaccccgttttgctggtgcccggtgtcggaggctccatgctgcacgccgttgacgaatccgaaggaagccgagaacgcgtctgggttcgcttcctcaacgccgagtacacgctcaagaccaagctttggtcgcgttacgatccttccaccggaaaaaccgagtccatggatccaaattcaagaattatggttcctgaagataggcatggactccatgcaattgatattttggaccctgacttgatgttggg

SEQ ID NO: 9908 - DNA, 549 bp, Glycine max
accacacagcactttccccaaatcagatcatcggaaccctaagtcgcgtattccgatcttgacccaagttcggtatggcgatcttgctgggcgaaattcttcaatcgctgtatgtgtggctgaagctgatcaagaacccgcagcctcatccctacgtgaaccctaatctggaccccgtgttgcgggtggccggtgtcggatgctccatgctgtacgccgttgacgaatccgaaggaagccgagaacgcgtctgggttcgcttcctcaacgccgagtacacgctcaagaccaagctttggtcgcgttacgatccttccaccgtatttgatgcacgtggagcaacagctacaaatagtagtttctgagttttagttttacgctgttgacatgaaactgccacttgactcaaggatttgatatgcaaacaaacaccagctaagtaaaagagcttataggagtcactttctaaagcttaactaaataccttcaatttttaacttatgtgcttatatgataagtccaaaccagttctgaagaagctattctaaa

SEQ ID NO: 9909 - DNA, 1677 bp, Glycine max
cccattcgttcgcttttcgctaaccctttcctctcaaccatggagcacttcaacaacgacgatctcgagtacgttgtcgacgagtactacgacgttcccgattttgcagtcgaagacacctcctccgacattgttcctgaactaacctccgatgttgactccgacttcgaagacgagtttccaacgagtaatgcgaagactgataccactgcttccgaagccagaaacgggaaagatatacaaggaatcccgtgggagaggcttaattatagcagagacaaataccgcgagaccagactcaagcagtacaaaaactaccagaacttctctcgctctcgtcacgacctccgcaaggagtgtttggaagtgcagaagggggagactttctatgacttcttcttcaataccaggcttgtcaaatccactattgtgcactttcagctgaggaatttgttgtgggcaacttcgaagcatgatgtatactttatgcaaaactattcagtgatgcactggtccgcattactacgaaggggtaaagaagtgcttaacgtagccaaaccaattattccaacccttaagcgtcctggatttttagctcaacctgtctccagagtgcaaataagcaccatgactgttaaggaaaatctgatggtggcaggtggtttccagggtgagcttatatgtaagaatttgaaacatcctggagttctattctgtggtaaaataactacagatgataatgccataaccaatgctgtggatgtttacagcaatccagctgggtcattgagggtcatcacagcaaataatgatttccaagttcgggtttttgatgcagagaattttgcttctcttggttggttcaagtatgattggtctgttaataacacttatgttagtccggatggaaggctgttagctgttcttggggacagtactgagtgcttgatggctgatgctaacaccggaaagattactgggagcctaaaagggcacttggactactctttttcatcagcttggcacccagatggacaaatattggccactgggaatcaggacaaaacatgcagattgtgggacataagaaatctttcacagtctatggctgtgttaaagggaagaatgggtgcaataagagccctaagattcacatctgatggacgatttttggccatggctgagcctgcagactttgtccatatttttgactcacattctggttatgaacaaggtcaagagatagatctatttggcgagattgctggcatatcctttagcccggacacagaggctctatttgtgggtattgctgaccgaacctatggtagcttgttagagttcaacagaaaacgtcactataattacctagactcgttttgatggagtggagtgcctcaagatgtacagcaactactccatgtgcatatccaccagaggattcctcaaataggtttgaaatatatatggtgaagtgtttttctagggttatttttctgttgaatttagtggagaagcaagttgtaaattttggctctaggaagctatttttgtttctttaatttcaattttattagcgatagaatagctgattagtcttgcctttgtaagaatttccttgcatgctattgtgtattaaaaacaatagcaatatattgctttaaacttatttttccc

SEQ ID NO: 9910 - DNA, 448 bp, Glycine max
atccactcgattccgctcccatgtccctgcttcccataacagagcaaaacgacgtccccggcgtcgacattgacagcgacgaaaacggcgtcgccgccgtagctcctgcaagaaacgacgcgtcgtcgcacaagactccgtcgccacaagttgagcttgtgcagcaagaaacccctgcgtcgggttccgctctgtctgcctccgacggcctgtctcgaagcttctggaaagccggggactacgttgttggtccctcctcaaagcccactcccttccaaggtcacttggaacatgctcgggtgcaccccaagtttttgcagtctaatgcaccgtcccatagatgggcttttggagcaattgctgagcttgtggataatgctgttgacgagattcataatggtgcaacattcgtgaagattgagcagtttgatgtccagaaggataattc

SEQ ID NO: 9911 - DNA, 418 bp, Glycine max
  unsure (1)..(418): unsure at all n locations
cccacgcgtnagtacttctgagagtttatgactgagcgtgtgaccttgggggaagatacaccaaacgagagctgaaaaagaaataagaaatacacaaatggcagagcttctgttattcttgaagccgctctgagtcctcaagtgcctaaactttgggttttttttaatcctgggactaacatgtaatggctcccagatcaattcaaccaagcatgggtaaatgtaaaagtccacaatcaacaatcaaagtcaattatggtgatgtggcaagtgatgttcgggtagttgatgcggccagatgctgacatggtactaatgtggtaggtgacgtggcaaagctgccgtagatgattggatgtgactcaagttttgacttgcatgtgtaagcatgtacgcaaaaagaaaagagaagataaaa

SEQ ID NO: 9912 - DNA, 606 bp, Glycine max
gatgtcattggcgagtgatcaataaaatactaagttatttagtattatgttctgtcgtaatcctttcaagtcacaagctttaaaagagggtgtaagtgtaacttttcaattcctcaacctcaagataataataaagctaaatcatagtagtgaggagtgactagtacaaacagaatccaaagctttttttttcttcttcttcttcttctttctaacgccatgtctgggagccaccaagagcagccactgttagagaactcgttcatagaagaagacgagccgcaagaaacagcttatgattcgtcggagaagatagtggtggtcggagtcgacgagtccgatgacgaggagaattgggggagagtgccccgattctcgtggaagaagctatggctgttcaccgggccgggctttctgatgagcatagcgtttctggaccctggaaacttagagggggaccttcaggcgggtgccattgcagggtactcgctgctgtggcttctgatgtgggccacggccatgggcctcctgatccagctcctctcggcgcggctcggcgtggccactgggaagcacctcgccgagctctgccgagaggaataccct

SEQ ID NO: 9913 - DNA, 394 bp, Glycine max
ttgtttagaatgaagcgagtgtgtagattctcttctgacgcaacaacgcgagcagctctgttgttgctcatgcaatcccatcataatttccatggattctcaaaccccaaaaccactttctctccctccttcgccaccgccctatctcatcattcgcaatgttcataccgtcccaaacatatactctgacatcactcccttgttcaccgccaagtcttgctcttcgccgaaacaggatctcatcaacaaggtcacgattctcaaaaacgagctcattagagattcctgcgactctgctagggttcagaccattttggacgatagtttcgacactttgtttcggcgtcaccccaatggatctgcgtttctcaagcttatgaatcaattgaattca

SEQ ID NO: 9914 - DNA, 697 bp, Glycine max
ttcgagccgcacgaagagaaaataactgatttgccacttgacaatggggtgagggctctattgaggggctgtaactagctgaggagatttgctctatatctcaggcgtggcgggttgaccgatgtaggtcttggttacattggacagtacagtccaaatgtgagatggatgctgcttggttatgtgggggagtctgatgcagggcttttggagttcgctaaggggtgtcctagtcttcagaaacttgaaatgagagggtgtttatttttcagtgaacgtgcacttgctgtggctgcaacacaattgacttctcttaggtacttgtgggtgcaaggttatggtgtatctccatctggacgtgatcttttggtaatggctcgacccttttggaacattgagttgattccttctagaaaggtggctacgaataccaatccagatgagactgtagttgttgagcatcctgctcatattcttgcatattattctcttgcagggcagggatcagattttccagatactgttgtgcctttggacactgccacatgcgttgatacctagaggccagagctgtgtatatataccagttttcttttgtttttcttctcccctttcatatgctgtttctatgttcctgctctatttgtagttcattttagacaattagtcttgtaataagcctgtgttttcatttgaa

SEQ ID NO: 9915 - DNA, 512 bp, Glycine max
cctcgagccgaaaccaaccatcaatggcagatgtaaccacctacctccgccaccaccgcgaccccgaccccgaccccgacgacgacgaccaaaccctaattccattcccttattgggatttggactttgatttcgaccccgaattccccacaaacactttctccttcaccgaccgcgaaaaccagatcaatttcgtcatggatctcttccaccagcgcgtggagcagtctcaactcaccgatcccctctccaacgacgccgttttcggcgtcatcgacggaatcgacttaggtttccccgccgccgacgacttcttcatcggacggagattctccgtcggatccgacgaatccgacggaggacactctcactcgcacgcggggattgacgacggtgtcctggggttctgcgcgcattccgacgaagactacaacgaaaacgacgacgttgcgagcatccctctctgctgggacgcgcttcaattgggaagacaacaacaacaactacgatga

SEQ ID NO: 9916 - DNA, 399 bp, Glycine max
gggcatatatagcagtactatacaacggacagagcgagcgagctagataaggtcacatatatgaacaacatgttcggtcaatatcctttgttttcactggcttctctagccacattccttgtcttaacccacgccgccaccgcgccggagaatcctcctcctccgctcacagccgcggcgagggagttcttggaggcgcacaaccaggcaagagccgaagtgggcgtggaagcactcagctggagcgagaagctggggaacgtgtcgagtctgatggtccgttaccagcggaacaagaaggggtgcgagttcgcgaacttaacggcgagcaggtacggcgggaaccagctgtgggcaagggttaacggagttgcccccccccttgttgttggaggattg

SEQ ID NO: 9917 - DNA, 470 bp, Glycine max
gagtatttgatggcgtggaactaccattatggtatcgtataatttaagatattcccttgtatatgttattagtgttgtctaccattcatttcacatttttcactttgcactccgaagagaggatgagagttcccaattgttcatcattcttcactctacccctacgtcatttcattaccttagcaaacacattgggtttcattctcttgatcttgttcatatctgggatcattgagttcccctctttttctttattatcacaattctcaacccaaccaatcaaagaccaatcaaaggctttcaccgacgtggttggtgcattcaaaaagtgggactccgaagtggggtgtgcccgattcaagaaagagataaaccaacaaagaaatggttcaaattatggtttttctacttctttgcaagatcaatttggtggccaattggaatgtggggtgctgacaatgaaacatgtg

SEQ ID NO: 9918 - DNA, 369 bp, Glycine max
gggcgataaccccttcacatcatacatcacgcttcttcagtactataattttagccttattagttaatttttttaaagaaattttttactttcctataaatatcactggatactcccttttcactcacaaacaactttctttctttttttataactctccagcagttacttgcctataaatatcactgtatcctcccttttcactcacaaacaactttcttcctcttttataactccagcaatagttcttctttgagaagttattcgctggtaggaacagtatagaaggagcttttgtcaaagagaagaaagaagcattttgaggaattaatgaagcattgagcttaaaccggattttggtcgtggact

SEQ ID NO: 9919 - DNA, 563 bp, Glycine max
cggctcgaggtcgaataattagtagcactaacgtgagcgcttttgtcgaagagtgaaagaagaagcgcagttaatgaaggtataagactgcagaaactgagagagaaagagatctggaagagatgagtgaagcgcagaagcacgtttgggaaggggccattcctctccagattcacctccacgaatccgaagtcaccactctccctcctcctccacccgctctcgtgttggcacctcggctagggtacttgcctttgctgatttcgctcttgaagcctcagttcagcaccacgcttccccctggagtcgacaccatttggtttgagtacaaaggcctccctctcaagtggtatatacctactggagttctttttgatcttttgtgcgtggagccagagaggccgtggaatttaactgtacactttagaggatatcctagtattgtattgcttccctgtgaaggtgaagacagtgtaaagtggagctttattaactcactgaaagaggctgcatatgtaataaatgggaatagcaaaaatgtgatgaacatgtctcaaactgat

SEQ ID NO: 9920 - DNA, 1027 bp, Glycine max
cggacgcgaaattgaagtatagattgaacacacacatagaaacccaacaacaagaatgaagaagatgattctaaccctcttcttcaatatcattttatctctcctctccctctcccacgcctccgtggtggatttctgcgtagcagactacacaggccccaatggccccgcagggtactcatgcaagagcccagcaaaggtcacggtggacgacttcgtctactccggccttggcaccgccggcaacacctcaaacatcatcaaagccgcggtgacgccggcgttcgacgcgcaattccccggcgtcaacgggcttggaatctccattgcacgcctagacctagcagccggtggagtcatccctcttcacacgcaccctggtgcctcagagctgctggtggttgtgcagggaacaatctgcaccggcttcgttgcttcggacaacactgtgtacctcaaaaccctaaaaaagggtgatgtcatggtgtaccctcagggcttgttgcacttccagatcaacgatggagagtctcaggctttggcttttgtgagcttcagcagtgctaaccctggcctccagattctggacttttctttgttcaagagtgatttccccactgagcttatcacgcaaaccactttcattgatgctgcagttgtcaagaagctcaagggtgttcttggagggtcaggttaattaaatataattaacgcgtgttgatgtgtttttaattaaacggagttgttcattcaaaacacaagagtctagagtgtgttgtgttgtgtcatttttgttaaatttgtttgttttggttttgtactgttttggatttagcagcatgcatgtaatttgtaaaagtatgaaggtatgggtttcttcttcgatctttagcagattgtctttgttaaacgaaccagtgatctggttttggttatattgtttctagttgttaagtaattaagttgcttttacaggctgataactacttacttcagaaatttatgctacaagatgaataaatgtgtg

SEQ ID NO: 9921 - DNA, 520 bp, Glycine max
ccttcttccttcaaattctagaaaaatgccccttcaacctccgtaacttaccgatccatccataaatacacacacataaccattttcattcaacatttttattttttatttttttgtatccgtgtaatatccacacattttcatttttcacattaaattaggtgaatacacgcattattattttttatgtacccattcgcgtgcgatagaattttctagagcaagagatttcggcgtaatgggtccaaacgctgcggcggcgaaacaagcggagaagctccgaattgacggcaacacttacttcaaaaaagaccgtttcggtgccgccatcgacgcttacaccgaggcgattacgctgtgccctaatgttccggtttattggacgaatcgcgcgctgtgccatctcaagcgcaatgattgggagagagtagaggaagattctcggaaggcaattcagttggacagcaattcagttaaggcccactatatgttggggcttgcattgctacagagacaagaa

SEQ ID NO: 9922 - DNA, 474 bp, Glycine max
gaacgacaacttccccaacacgttgtgttactctcttcgtcttcgtcgttttcataccccttctcccttcaaaccctgggaaaattctcgaacaatgccccttctccctccgtaactcaccaatccatccataaatacacacacaaacattttcattcaacatttttttattacttctttgtatcggtctaatatccacacatttccacatcccataaatacccacacattttagttttttcatgtacccattcgcgtgcgatagaatcttctagagcgagagatttcggcgtaatgggtccaaacgcggcggcggcgaaacaagcggagaaactccgaaattgacggcaacacttacttcaaaaaagaccgtttcggtgccgccatcgacgcttacaccgaggcgattacgctgtgccctaatgttaccggttattggacgaatcgcgcgctgtgccatctcaagcgcaatga

SEQ ID NO: 9923 - DNA, 1071 bp, Glycine max
  unsure (1)..(1071): unsure at all n locations
taccggtctacgaattcncgggtccgaccacgcgtcaagtacggcggcaaaaaaacaacaaaaggggcagatttgaaaaaaaggaatggggcaaaggtaattggttcagaaatagacaaggaaagaattcctggcattgatatccacttgagtgatggtgataactggatgttcgcaggccatgaagtgcatatattggccacacctggtcacaccgaaggtcatgtaagcttctactttccgggttctggggcaatttttaccggagacactttgttcagcttatcatgtggcaagctcttagaaggaaccccccaacagatgctatcttctcttaaaaggatcatgtctttgccagatgatacaagtatttactgtggacacgagtatacattgaataattcaaagtttgccttgtctatcgaacctgaaaacgaggaacttcaatcctatgctgcccatgtagcttaccttcgaagtaagggcctgcccacgattcccaccacactgaagatggaaaaggcttgtaatccattccttcgtacatccagtgctgcaatccggcaatcactaaacattgcagccacagcaaatgatgcagaagcccttggtgtcatccggcaagcaaaggataatttttagattatttacttataatattttgaaagtctgaagaaacttgttctatgtagggtagggtatgaatccatccgtggcataaaatgtgcttgatgctatgttctcaatatgatttcagaaattttgtttccatttgggagggtctgtatgtacttggtgccttagaaagttgtggtgcgatttagaggtgtacaatacatacatgacactcactcagttgaggatatgtggcgggaagaaggctagctagcagtttaaagtaaactccttggccaatggcgacccacccccacttccctcaaaggaacaagagccatatatgggtctggactctggactgagttttgctaccaagagcgcgtataagtggcttcttgaggatctatctgcaagtctcaacatacaaaaaaattagtaatataaattattatt

SEQ ID NO: 9924 - DNA, 651 bp, Glycine max
tcattatagggaatttggccctcgaggccaagaattcaagcagatcatgtctttgccagatgatacaagtatttactgtggtcatgaatataccttgaacaattcaaagtttgccttgtctatagaacctgaaaacaaggaacttcaatcctatgctacccatgtatctaaccttagaaataaaggcttgcccacgattccaactacgctgaaagtggaaaaggcttgcaatccattccttcgcacatggagcatagaaatccggcaaaaactaaatattgcagccacggcagatgatgcagaagccctgggtgttatccggcaagcaaaggataatttttagaattttttaattaaaatttaaaattctaaagatacttattctgtatagattaggttaatgaatccatcaaatggaataatatttacttggtgatatcgtaatataatttttcaattttctttgggttcatttgagatgtaaattagatttcagttttgttggcctgatgggagtcaaaatcatgatggtgcgtggaagaagctcatcactcagacactcccttcgtgtttagcatatatatgcatatgttgagaattatttagaaagttgtattttgaccccccgcacttttgtgacatgaagatttt

SEQ ID NO: 9925 - DNA, 727 bp, Glycine max
ccattaatagcttaaatgctggatatggtctctaaaggttgttcctgctatggccacttttccttgttccagggtgaaaagtgggttgtgcgtgtggccagatgtgagacaactttgctttagaaaaggcatgctatatggatttatgcggttgttttctacaccgttgaaaacgctccgtggagctagccgctcgctgagagtgactcaattttgcagtgttgccaatatgtcttcctcattgcagattgaattggtaccttgcctgaaggacaattatgcttatctgttacatgatgtggacacgggtacagttggtgttgttgatccttctgaagctgtgcctatcatagatgccttgagcaggaaaaatcgaaatttgacatacatactcaacactcaccatcatcatgatcacacgggtggaaatgtagaattgaaagcaagatatggggcaaaggtgattggttcaggaactgacaaggaaaggattcctggcattgatatccacttgaatgatggagataagtggatgtttgctggccatgaggtgcgtgcaatggacacgcctggtcatacccgaggccatattagcttctattttcctggatctggggcaatttttactggagacactttgtttagcttatcatgtggcaagctctttgaaggaaccccacagcagatgctatcttctcttaaaaagatcatgtctttgtcagatgat

SEQ ID NO: 9926 - DNA, 579 bp, Glycine max
tgtttttcatattttaacttttgttgtttatatatattttgtcatataatgcttgccgatatgttgaatattggattttgatttctagatgttattgcagatgtacaagtggctacgaatgcaatccatttcttttatgtggtcaagtctgttacttgataagttagtaatgtgttttatctttaattattgagaatttcttccatgttacagatgctatcttctcttaaaaggatcatgtctttgccagatgatacaagtatttactgtggtcatgaatataccttgaacaattcaaagtttgccttgcctatagaacctgaaaacaaggaacttcaatcctatgctacccatgtatctaaccttagaaataaaggcttgcccacggtaattttcagaactgggcttcgttaatggatggtttcaagtgccctctgtaggggttcttcttcactagaaacacctgtctgtcataactcattgctactaaagcttgcatagtcttattagttgctgttgtggtggaattttgcgtttttgcttttaccatattactactgttctcttagattccaacta

SEQ ID NO: 9927 - DNA, 314 bp, Glycine max
ggcccacttttccttcttccatggtttgcctctctctctctctctctctctactctcctttcatttcagaaatcatggggaaataaacataattaatctccgaaataaacaaaacatttttcgtgacattcgatgaatgatatgaaggtgagaagtgggttgtgcgtgtggccaaatgtgagacaactttgctttagaaaaggcattctatatgggtttatgcgattgttttctactccgttgaaaacgctgcgtggagctagccgctcgctgagagtggctcaattttgcagtgttgccaatatgtcttcctc

SEQ ID NO: 9928 - DNA, 725 bp, Glycine max
ctttgttttgttaaatattattcttaaaatcattctaacctgcaaccacgcccacacaatccattgattcattcagtgagcgagaaagtgagaagatgtggccaccaattttcattttcatataaaagaagaatcatcatctgtatacattactagttatttactaaacagacaaatgggtttcagagtattaggagtttctcttcttatcttcatctatctcattaatcttgctcctgcatatcctcttcaaaacaaattgttttcagaatttgtgcagaatagcaagtacgaagataagggaatactatatggaagtaagataggaggtgctggtcatggaggcagttcacacggaaatggaaatggaaattcaggatcacctgaaacacgaggaggaggagctgcacttatacctgtttatgcagcaggtgctgcaaacaaaaatcaccaacatcagacccgtcatggtgctgcaaactgcaaccttaacaaaatcagattttccaacttgcttatgatcatcctggtctatcctctcatactgtcatttttgttgtaatagaaagcgcaaaaaatagttcattgtatattatgtaacaactgttacaggtctttcgagaaatagtgctgtcatggtctactgatgtattttgtttaggttaaatttgtgacactttgcagaatgtatcaaatgctgatgaataaaacttgtttcgaatggc

SEQ ID NO: 9929 - DNA, 415 bp, Glycine max
ttagaaacctcgtaggaggtgcgaaacgcagctgcgcaatccaaagcacgaggaccactctctactcaaactccaccatctgtcatctacgccttcgcccctctcgtgtttcccacaacggttactccttctccctctcctatttcaacccatgccatggcttgtctgagccgctaccaccaccaccaccacccccgcggcgccacctggctctcttcccctgacgaaatgctccaacactgccccctctccgcccaccaccgccgtctccgcgatgacgacgccgaacctatctaccttccctctctctcctccgcctaccgcatcttccccgtctacgccatgggcgcccccgacccgacaccagaacccgaattagacggacccgacccgatttggaacgctgtcagggacg

SEQ ID NO: 9930 - DNA, 403 bp, Glycine max
aacccagatgtgtgttcgcatcaatactatgcagcgcattcgcatggaattaggggttttggaaaagaggatagttgccaatctcagcagttctagatccactaatgcggatatagcaaatggggtgagcttgaagttcaagctttccgcatctgctgctgtggaaggcatccatcaactctgcgagtgcatagcatacaaaatcgttttccatgaactctggcatgttatttgggatggcctttatgttggagaagttgcatctgctaggattgagccttttcttcaggagcttgagcaatacttggagattgtatcatctacagtgcatgataaaggtagaacacgtgtaattgttaaagtaatgcaggcttcttttgatgggtttctgttgggtttgtta

SEQ ID NO: 9931 - DNA, 562 bp, Glycine max
cccacgcgtccggttcaagctaaaagaagataaagaaaaggaaaaagctgcggcaatagagagtagagagtaaacagaaaatctgaggcgcgagtggctggtgaaggcagcgactgcgagggaagggaagcatctttagctccaaatccaatggcggatacctcaagccgatcaagagacctcgacaagctccttctccgccctggcaatctcgtcggtcctaggttcgaacctggccctgagttgcgagatgaccttcaggccttcgccaaagtgttggtggttggggccggtggcttaggttgcgagttgttgaaggatttagccctctctggtttccgaaaccttgaggtcattgatatggatcgcatagaggttactaatctcaaccgccaattcttgttcagacttgaagatgttggcaaacccaaagccgaggtagctgccaagcgtgtcatggagagaattactggtgtcgaaattgtgccccacttttgcaggattgaggacaaggaaatagaattttacaatgattttagcattattgcccttgggcttgatt

SEQ ID NO: 9932 - DNA, 425 bp, Glycine max
tttgggggcgtcaatagagagtagagagtaaacagaaaatgtgaggcgcgagtggctggtgaaggcagcgactgcgagggaagggaagcatctttagctccaaatccaatggcggatacctcaagccgatcaagagacctcgacaagctccttctccgccctggcaatctcgtcggtcctaggttcgaacctggccctgagttgcgagatgaccttcaggccttcgccaattcttgttcagacttgaagatgttggcaaacccaaagccgaggtagctgccaagcgtgtcatggagagaattagtggtgtggaaatcgtgccgcacttttgcaggatcgaggacaaggaaattgaattttacaacaattttaacattattgcccttggtcttgattccattgaggcccccagttatatcaatact

SEQ ID NO: 9933 - DNA, 402 bp, Glycine max
aacaacaacagcaacaacaacaacaacaacaacaacaaagtggagtttctcctcttcctaggaggtcacctcgtacctccaaaacattaaggatggggttcagatagaaattttcagtttttgcatttctttttgtttccttgcacagtttgtttcaatagaggaaaggcacaaatacattggtcattctgacatctgtgctacttttgtttcattgctgttgctgctccgatttcaatctgcaattttcttctctcattcaccatgacttgcagagtattgtattcatcagctttgttgataactaatttctgtcggagaacttagttcgttggttttagtgaagtctcctctttcaatcacactttcttttgaacccgagaccttattagtttcgctcgg

SEQ ID NO: 9934 - DNA, 719 bp, Glycine max
actcgagccgaatcggctcgagatttttatgcaaaagatttgtgaaattctccacacacatgtactttcttctaaaccgatactatgtgatggccacgattcacatataagaaaccaaatatgtgggcttgcaatgtacacacatttattcatgaactgcctttgcagaaaacttttgtaaagacaaccattttagcaaagaaaattggtgtaattaaattctcaatcttctttacattttcactgtcagaactgtagcacgtgactctttagtgaaaccttcactccatggtttcctcattgccctttgaagcttgaactcggataaagatcgtgactttggctgattctggaaatgggttctcggattcagcttctgcctatttgcttttggctgcacttgacatgcttcagcttcttttttggtagcatagtgagtgtgagaggagatgcaactgtgcaagggagtgttgccattgatggcaaggctgtgattggaaccattgatgaggattttgtgtgtgcaactttggattggtggcctcctgagaaatgtgactatgggagatgcagttggggccttgcttctcttctcaatctggacctcaacaacaagatttttttaaatgctgtgaaagcattttcaccgttgaaacttagattaggtggaagtttgcaagacaagctaatatatgggcctgaagttaatccccaacctt

SEQ ID NO: 9935 - DNA, 949 bp, Glycine max
caatttatttcgaacattgaaatgaaactaaagttgatgtggttatgaaatatgagtgtgatggcgaagacacatgagttgttgtgagttaatttaaagtgaggttttgcgcactttccttgttcccgggacaggacgagagtgttacataaagcgttagcctcactcatcactgcgactccaatggagcctcccacatcctacatttccaccgatgaacttcgcaagcataacacgcgccacgacgcctggatctccatccacggcaaggtctacgacgtctcctcctggctccaccgccaccccggcggccccctcccactcctcaccctcgccggcaccgacgccactgacgccttcctcgccttccaccctcccaacaccgcctccctcctcctccccgccttctccacctcccaccgtctttccgaccactccgtctcccccgcctcctccgactaccgcaagctcttctccgacctctcctctctcaacctcttcaaccgcaagggccacaccacttccatcctcctctcccttatactcgtccttttccctctctccctctgtggagtcctgctctctgacagcacgtgcgtgcacgtgctgtccggagcattagtaggcttcctctggattcagagcggctggataggccacgactccggccattacaatgtcatgctcaacccccgcctcaacagagcaatccagattctctccggcaatgtcctctccggaatcagcatcggctggtggaagtggaaccacaacgcccaccacattgcatgcaacagcctcgacttcgaccccgatctccagcatttgcccttcttcgtcgtctcctctagctttttcaactccctcacttccagattctatgaaagaaagatgaatttcgattccttctctaggtttttggttagttatcagcactggactttttacc

SEQ ID NO: 9936 - DNA, 489 bp, Glycine max
gggtgattgccatcaggcagggagagatccgaggcactcgcttcgtgacaccatttcttgaagggcttgttaagattgttgcaagggttacatatgtcttggcagaagagcctgatgccattgcactctgccgtgatcacaatcttgccgctctctttattgatctgcttcagtccaatggacttgataatgtacagatggtttctgctacagctctggagaatttatcccaagaatcgaaaaacttgaccagattacctgagatgccattgccgggtttttgtgcttctgtgttttcatgcttcagcaaaaagccagtcataactggatcgtgtaggctccaccgagggatatgttctttaaaagaaacattttgtctctacgaagggcaggcagtgcttaagttagtaggtctgctggaccacacaaatgtgaatgtggttgacgcagcacttgctgctttatctactttaatagaagatggggtag

SEQ ID NO: 9937 - DNA, 388 bp, Glycine max
gtagactctatagtagaagctgatgatgcccgatttgattattttgttaaaaaggttttacccagaataaatgatttagatcagggagggaccatgttgtttaccaattcttattttgaatttattcgaatccgaaattttttgaagtcacaaaatgcctccttttgtctgcttggggagtaacaatccatgtccattattatgtcattagttgaatgtgattatttgatactagtgattttttctaaattcatattaggtagttcttatgttgcattttgatttatgagtggtcttttttggtaatttaggtatacaacccaaagtgatatttctcgtgcgcgtgtttggttctatgaaggaaaaataaaaattttggtttacactg

SEQ ID NO: 9938 - DNA, 392 bp, Glycine max
gagagatagaagcagtgacacagctttgtgcctaactagcatcgcagtggcagagacgcacgcagttgccgcatcagtccgcatcaactgcacgtttgtttgatctctcttcacccttcaaattgcaagtgtgaccgtcgaagaagaggaatctttcttgcaattccaatcatgactttgctagaagtaattaaggatgcttcagtcaattcaaaaccacttgattcacctttggactacccaattgttctgaacccaggtggtatcttacctaatttaaagcctgaagttgaagatgaatcttcttcatccctcataaaaccccttattgtgtggcaaatttcacaaactgatgctgagattattgacgttagcaaaaagttctttacaca

SEQ ID NO: 9939 - DNA, 388 bp, Glycine max
gaacccagagaaaaaaaaacatcatttgaaccaagtgaagttgagttacaagcttataaaatgggtttttcttggataagagggaagtgcattggtaagggcgcgtttggcaccgtcagcgtcgcgcttcgcaaacgcgacgatcaaactcaaaatttcgcggtgaagtccgtggatttaaaaacgggtctcccgggtcagctcgaagcgttggagaatgagattcggattctccggcgcatgtcctctccgcacgtggtaacttttctcggcgacgacgccacgtgcgagcagcggaaccttcacatggagtacatgccacgtggtacgctcgctgacctggacgctgacgtggacgaagttttagtgagacgctacacgttgtgcc

SEQ ID NO: 9940 - DNA, 763 bp, Glycine max
gtttctagcaatcctctttttgtcaatagtgttgctaaaggtgtttagtttctgtaaatgcttttatgaccataattttttcattaaggttatcgaacttcatgcttgatagtatatgatctaaacaactttctcagtgacgattgtttcttgactcatgtcatgagttatgctggttccaagtttatgtgtaatcaatacttgggaatgcatttaacttatagtagttgagaatatttaaactgtgttaatgtggcatgaccatatcagaatatattgattttcatatttttcatactactgtctattctatgtgatccatcaaatacgttgattatacattctaacagcatatcctaaaacgaatttagtgattgatatgcctttttatgaaaactgacaaaggcatagatgatggcacttaagttttctttatccttgggtttaagtatgtaatacatttccatcggatacaatttttgtagtatggggacaattatcttgatcattaattatttttaaccagcatatgatcagctatcattgctccaatgttttaacaggtaaagtcatacccgcgtcgtgcctacagtattaacgattgctcatcaaccttcaatgaagtaggccttagcaaaaacaatgaagctttgtttctggagttgatttagtttcatctattttccttgaagtatcttgatcttttttatttttctgactttgtagtatcttgatatgtacaatatatagatttggccccccc

SEQ ID NO: 9941 - DNA, 359 bp, Glycine max
gatgggagtggttatggatatggtggaggcaggtatggatcaggcggcaattatggggacagtggctctggcaataactattcaggaggctatgctggtaatgccggtggtgtaggcaatcatgaaagctctactggttttgccagtaatggatatgatggaagtgttgtggatggtggtgttggtgcaggtagtggcactagctttgctgatggctatgatggaagtgcggggtctgaatttggcagcagtggccaattagatagcaaagcaagcagcaaaggagatgaggattttggtgattacagggatgacaacgatgcagatgattttgccaagaaggcttgatggaatttaat

SEQ ID NO: 9942 - DNA, 379 bp, Glycine max
gaagaatcactggtgtagcattatgagcatgcaaagagagaagatggcgaagaaatccattggaagcttaatgcgaaagaagctttctgatatcaccaacaacaccaatcctcctctctctcaacaacaacttgacactactcttccctccgataacaatttcattcaacaactcctcaaggaaagaacagcgttgattcaactccttgcggaaagaaataaaataattgaagcgagtggggtggagctgcggaggctgagagcagatgtgacgaagctgcaaatccaaaactggaaccttgctcagtccaatagccacatgttagcggagcttaacatggggagggaaaggattaaaacgctgcaacatgaaattttg

SEQ ID NO: 9943 - DNA, 730 bp, Glycine max
gatacacaggatagacatgaaaagtaaactccataccatatatgcttaatttaatgtatgccgtactgtaatagttgtaatttggtacttattttagagcacttgcctacggcctgcttggtgcttgcctactatctacattaataatctaaagattagattacattatattaaagagagaatcaatataattcagagacatgcactttacctgaccaggctcttctataaagggctccatcaggttggtttagtttgcaagattttggcagtaaagaagggaatgcaggaagtgctgaaaatggtgaaaagcaatgaacaagttgttcctggagccaaatattgtgtcacaggttccacagggtatatcggttcatggctagtggaggctcttcttgaaaggggatgcacggttcatgccactgttagagatcctgcaaagtcattgcaccttctgtctctgtggaagggtggtgaccaattgagatttttccaagcggatttgcatgaagaaggaagcttcgatgaggctgtaaaaggatgcattggtgtgttccatgttgctgcttcaatggaattcaatgttagggacaaagaaaacaatgaggcttttgttcaagcaaatataactgaccctgcaatcaaaggaaccataaaccttctaaagtcttgcttgaaatccaattctgtgaaaagggttgtcttcacatcttccattagtaccattact

SEQ ID NO: 9944 - DNA, 365 bp, Glycine max
  unsure (1)..(365): unsure at all n locations
gactcactcaaactcaacacagagagagatatggcagattacgacgagagatacgaagggaacggagaagaagaggaacttcacaattctcttcctcatcctcatccccagcctgattcctctcctcaccccacccacgacgatctcaccgattccaaatctcaccatgggtctcgcgattatgacagagactcttccagaagcagagataaggaacgggagaaagggagagacagggaaaaaaaaagagagaagggaagggacagggaaagggatagaagtacggatagggattcagagagaagtanggacaaggacagagatagggagaagagcaaggacagggaganggaccgggaacggga

SEQ ID NO: 9945 - DNA, 1086 bp, Glycine max
gtggggggtgtgagcttaggacaagtgattgtgcctgaactcagccaaagggagaaagtgtgcccttttatcttctttctctctctctttacactttaacacaccaaataaatgaaaggcgtaccttgcctagcccaaccccataagcctctttctttttctctctctcacttgcatacgttcctttcactgtactttttgacacacacgtaacacattcatcagaggaagagagaatgagttcatcctcaggtcagagcagtggctatgatctctctttcaagatcttgttgatcggagattccggtgtgggaaaaagtagcctactagtcagctttatttcaagttctgttgaagatctttcccccaccattggtgttgattttaagatcaaaacgctcacagtgggtggcaagagattgaaattgacgatttgggatactgctgggcaggaaaggttcaggactctaaacagttcttactatagaaaagcacaaggaatcattctcgtttatgatgtcacaaggagagaaacctttacaaacttatcagaagtgtggtctaaggaagtggaactctactcaactaatcaggattgtgtgaagatactagttggaaataaagttgatagagatactgaaagggctgtgagcagggaaagagggtttagcacttgctaaagatttggggtgtttgcttcttgaatgtagtgccaaaacaagggaaaatgtggagcagtgctttcaggaccttgctctaaagataatgcaagctcctagtcttttggaagaaggctcaacagcagttaaaaggagtgttttacaaccaaaacaagaatcccaagcatcccaaaatggtggttgttgctcttaaattgatactacatcctggcgtggacattgagtcttcttaactagcaatcttggacaagtcttgtatatgtaagcttcttccttagtttcttctgccactgtcttttgattgcgtaattacttgtattaccggaagggggaaattggcaacaatggcgtctattagcctgtgtaaatttgtttgcctacgaatgactatatcatttatgtgttg

SEQ ID NO: 9946 - DNA, 563 bp, Glycine max
actaaatcagaatttttgttgttttagaaactagattgtgactggattacacaaggaccaaaattagttttacaaatatttatccaaacacgataaataaattgagaaggagttaggaagtgtttggttacttctgagattctgctgttccttagagagcgagcgatgacggtagcagcaggaatgggttacgctctggtctagcgctaggaccctctctctccatcttcgtttctgtcatttccaaaaaacccttcctcattctcaccgttctctccagcacactgctgtggcttataagtttgattgtgctgtctggaatatggaggggggttttgcctctcaacacaacagcttggtggccttttggaatactcattttctcatctgttgcttttcaagaagccctcaggcttttctcctggaaaatatataagaggttacaagatatgttagatgcctttgctgatagaatatcaaaaccacatcttcacctgacagataagatgctgattgctctggctggtgggttgggtcatggtgttgcccatgctgtgttcttc

SEQ ID NO: 9947 - DNA, 437 bp, Glycine max
ggatctcgtttttgttggtttccacctttttccagtgggaggagctgagcagagaaggagtttaggaagtgtttggttacttctgagattctgctgttccttagagagcgagagagcgatgacggtagcaccaggaatcggttacgctctggtctaccgctaggaccctctctctccctcttcgttcccgtcatttccaaaaaacccttcctcattctcaccggtctctccagcacgctgttgtggcttattagtttgattgtgctgtctggaatatggaggggggttttggaatactcattttctcatctgttgcttttcaagaagccctcagacttttcttctggaaaatatataagaggttagaagacatgttagatgcctttgctgacagagtatcaaaaccacatcttcacctgacagataagatgctgatt

SEQ ID NO: 9948 - DNA, 778 bp, Glycine max
gaacccaattaatctttctttacaattccttctctcaataattctcctctgtttttcacaaagcaacatggctgcatacagagaacccatgaacatgaacatgagcgacagagccccggtttctccgcagcaaccacactctccgtggcattccccggttccgtacttgttcggagggttagcggcgatgttgggtctcatagccttcgctctattgatccttgcatgttcctactggaagctctcagggtacctcgaagggaacggggaaacagaacgggacctagaagctggcgaaacggagcaggaccagaaacctgcgaaaccatacgaggagaagatcttggtgatcatggccgggcaagagaagccaacattcttagcaactccgagtgtttcgagttgcagcactagcaggtcctcttccttcggcgacaacaccagcacgtgcacctgcgaggagaaccgaaaatcgcttgaaatggcacaggctgggactgggaccaccgaaaccgcacactcctcgtcggattagaacccttgatcgggccaaacatggccacctgttggggggttttgttttgtagccaggttgctttcgtgaaaaagcaaagctcgtgacacccgggtgtctctctaggttgcatgttcaacaattggtggtgatatgggaattctcttttcttttttcttttcttcttcttctctttcagttctcgtctgtacattattccgggaatgtaaattctttgaggtggaattgagcccttgctgtttc

SEQ ID NO: 9949 - DNA, 410 bp, Glycine max
aggcgtcagaacacgagtcagtggggctgctaaaagactacagaatgggaacccaattaatctttgttttcaattccttatctcaataattctctttctccttcttctataactctcctctgtttactctgtttttttcacaaaacaacatggctgcatacagagaacccatgaacatgaacatgagcgacagagccccggtttctccgcagcaaccacactcgccgtggcattctccggttccgtaccttttcggtggtttagcagcgatgttgggtctcatagccttcgctctgttgatccttgcatgttcctattggaagctctccgggtacctcgaagggaacggggaaacagaacgggacctggaagctggcgaaacggaacaagaccagaaacctgcgaaaccg

SEQ ID NO: 9950 - DNA, 408 bp, Glycine max
gaataataataatacttcagaaaactcaactagtcctcattgtcactgcgtcacgaaccctaattccttttcttcttcttctgcttccgcccttactctcatcctcgattcagtggcagaggtgacggaattcacgtgatttccatgagtggctccgttttccttgaatcgaacaccacgtctgttcacggttcgcggtttccgaaattgagctcgattcctcgtcagtggtgatcgtcagtgcatgcatcctcggattggtaatgtgcgagcttgatccatctatttgcggcgttttgagttaattttgcctgactgggaaatcatggcgcagagtaattgggaagcagataagatgcttgatgtttatatttatgattatttggtgaagaaaaagttgcataacac

SEQ ID NO: 9951 - DNA, 410 bp, Glycine max
atgcaagggctggaaatgagaaaaaagcccttcaaagtctaggcgttctggaagctaggaaggatgaattaggtcaagctgagtttgagagaattataagtggccttattgatggtgggtttcagaaggatgcacaaagaatatgtcagatcatggaggcacagggttttgatgcatcaagggttaagtttaaactttcgaaacctgtctccagagcaccgagtttgagatagtttagtggtcatgagtagggccattttagtctttctctgccaagtgaccaacaaatacgctgccttattaaggaagcatggtctgctggatttatcataccatgtaacaaataaggatgagtttatgcttgtcagtttttcagttgtactgtgtttatgaatttttcctttgtcccc

SEQ ID NO: 9952 - DNA, 508 bp, Glycine max
ctaaaatgctataaatagctttgtctagtacatgtttcgatcttctcactataatgctaatgtgttcttcacctctccaaaacttgtagctgaggatattattactcagcaaaaattcatggaagttccaatcaagtatccggcaaaactcacccttagggtggttcttacttgtatcatggcggccaccggtgggttgatttttggctatgaccatggtgtttcaggtggagtgacctccatggattccttcctgaagaagttcttcccatctgtatatgaaaaggagtctaacgtgaagccttcttcaaaccagtactgcaaattcaacagtcagatactgacactgtttacatcttccctttatctaagtgctcttgctgcgggtcttggggcatccagcataacccgaatgttgggaagacgtgcaactatgattatgggtggaatattctttgtggcaggtgcattactcaatggattagctgtaagcatctggatgcttatt

SEQ ID NO: 9953 - DNA, 460 bp, Glycine max
ggattctttagattccaacgccttctctctcagttacacacacattgcagcaacaatcacatccattttttctctatcactctgattccatgagtcgctacgatcccaatcccttcgacgaagaaccattcgaggttaatccattcgcggatggaacagctaaaggaaaagggtcagggcaatcaagttatagtggaggtgcattttatactactaacactggaagtgttccctctgcaaactcaaggctctcgccccttcctccagagccttacgatcgtggggcaactattgacatcccccttgataatgcaaaggacataaaagcaaaggagaaggaacttcaagctaaagaggctgaattgaaaagaagggaacaggaactatgacgaagggaagatgctatagcacgagctggaatagttatagaggagaaaaattggccaactttttttcccat

SEQ ID NO: 9954 - DNA, 438 bp, Glycine max
ggtgtgaagtttttgtcagaaacaaacagaataagaaagagaggaagccgtagattccaacgctttctctctgagtcacacacacacacacattgcagcaacaacaacaaccacacccgattccatgagtcgctacgatcccaatcccttcgacgaagaaccggtcgaggttaatcccttcgcggatggagcagctaaaggaaaaggctcagggcaatcaagttatagtggaggtgcattttatactactaacactggaagtgttccctcctcaaactcaaggctctcaccccttccaccagagccttatgatcgtggggcaactattgacatccccctaaataatgcaaaggacgcaaaagcaaaggagaaggaacttcaagctaaagaggctgaattgaaaagaaaggaacaggaactaaaacgaacggaagatgc

SEQ ID NO: 9955 - DNA, 757 bp, Glycine max
ctcggagaagacaacacaaggggacaacctaccgtgtcaactctccttcaaacaccagcgattaaacttgtctctctttaatctcttaataccaaaacgctaccgttttgctcttttatttctctctctctctatggattgcaagaagcgagttcgggatgactcggacgaatcaattctggaatcgcccgaggcgaaacgactcagggacgatttactcgagttcttcgacgacgccgatgatgcagcttccactcaggaccttgactccgtcatgaagagcttgcaggaggagatttccggcgtgacgtcagattacggcgagtctcaggcgcagatcggatacctcctggaggcctccgacgacgatcttgggcttcctcccgccggaaactcgtcggcgccacaggagaagaacgtggaggccgagttggtccgagtcgcgtctgactcgtccggaatcggcgagttgtgggagtttgaggaccagattccgagatacgactcgttcgatttgggaatgggatttggctatgagtgtgatacgaccgaatacgctgcgtttggtggacttttcgatcattcggatttgtattatgactcgtggcggcacgagaccttgccaacacaatagaagatttaatgaaaacaaaaggaaaaaaagggttttagagatgtaaatattttcttctctctcagctttttcttttttcttttttgttcccttctcttgatgaagggaattacagaagaaaga

SEQ ID NO: 9956 - DNA, 666 bp, Glycine max
caattttggttcatggtttttccagagttgtctttgaagtcctaaaacttgctgcacaaaataacaaactatttcgggtcttctgcacagagggaagaccagaccgaacaggtttgcggttgtcgaatgagctggccaaacttgatgtttcagtgaaacttctaatagattctgctgttgcatatactatggatgaggtggacatggtttttgtgggtgcggatggagttgtcgaaagtgggggcataatcaacatgatggggacctatcaaatagcattggttgctcacagtatgaataaaccagtttatgtcgctgctgagagctacaagtttgctcgcctttaccctcttgaccaaaaggatttagcccctgcattacgccctattgattttggcgtacctattccatcgaaggttgaggttgaaaggtccgcgcgggactacacccctcctcaatacctgactctgcttttcacagatttaggtgttcttactccatctgtcgttagtgatgagctcatccagctatacttatagtaatccatccatgtatatttttccccctattttccctatcaagatcatgtatttcacatgaaacaattttgtgacaagcacgtgtattgtttccattaattagggataggttttagtatctgtgtgt

SEQ ID NO: 9957 - DNA, 2008 bp, Glycine max
tcgaaatctttaatccacagcatgtgctttacgctacctgtatatatgtaagatggtcaaaattcttcaaatactttttttattgtataggagcagaaccagaagagaaggctcaaccacaaagggatccaatttcatttttcatcttcctcttcttcactctcttttatggctccaagcaagctcaattcctcgggaaatactagtatgccatgttcacaggctgagaatggttttgtcaattccttttctctcttccccgagaaagtggtgcaagagcttcttcaatctccagtccaggggtcggatgaccatcttattgagttctctgaagctttaagaactgttgcgaaggctctcaggctagttgctgaagggaaagcttctgctcaagctgaggctactgaatggaaacgtaaatatgagttggagagggatcggaatctgaagtttgaacatgcagagaaatcatgtatagagcatcaggctgatcttgatgatgtgaggacaaataaccctgctaaacaacctactttatgtaatgaagctaatggacagtctgagaaatgttgttcaaggaatggtatttgctcccatgaagttcttagggatggaacacgtggttctgattccaagatggtcaaaaaggcttcatttaaactctcatggttcagcaaaggtgatcaaagtgatcagtacaaacacgacattgtctcttttgaaaggggaaatataaccactgcagagcgcagtagtaagcagatctctttgaagtgggagtcatgcccacagacagtgcttatattgaccaaaccaaattcagtttcagttcaaattctgtgtgctgaaatgattacatggttaaggcagcaaaagaatctacacatctatgtggaaccacatgtcagggttgagcttttgacagaatcatcatactttaactttgtagaaacttggaatgatgataaggaacttttgagactacacactaaagttgacctcgtggtaactcttggtggagatggcactgtcctatgggcagcttcaatgttcaaagggccagtgcctcctattgtccccttttctttagggtctcttggctttatgacccctttctatagcgaacaatacaaagaatgcctagaatcaatcttaaagggccccattagcatcacattacggcatcgtttgcaatgtcatgttatacgagatgcagctaaaaatgaatatgaaactgaagaacctatccttgttctaaatgaggttacaattgaccgtggaatatcttctttcctcacaaatttagaatgttactgtgacaactcctttgtcacgtgtgtgcaaggggatggattaatcttatctactacatctggcagtacagcatattctttagcagctggaggatcaatggtccatccgcaggttccaggtattttattcactccaatttgcccacattcgctatcttttaggccattgatatttccagagcatgtgactttgagggtgcaagtgccattcaacagcagaagccctgcatgggcatcatttgatggcaaggacaggaagcagttagcacctggagatgcacttgtgtgcagcatggctccatggcctgttcctacggcttgtttggatgattctactaatgacttcttgcgcagtattcatgagggcctccattggaatttgagaaagacacaatcatttgatggcccccgggaaacatgacttctttcttagtaaactttagttgcaaactggttagtcatttatcaagataatagcgacttgttacagaaaaaatctagtgtaattttattcctttatcaatagtcacatgtagttataattattagagtaaattatactcctctacaccctattcctctctcttattttagaatgtatactctcctcttgagaaagagatgaatatggatcatactttagatcatttcaatataaatgtaccttttaatagtaatgaataattatgaatgat

SEQ ID NO: 9958 - DNA, 624 bp, Glycine max
tttcagttttgatgatgctgaatttggagaagcagatcatgatgagcaaaaatatgtagatccattggataaatttctccctcccccaccaaaaactaaatgctcagaggagctacaaagaaaaataaataaattcctggagtataagaaggctggaaaaagctttaatgcagaagttcgcaacaggaaggactatcgtaaccctgacttcttactgcatgcagtgaggtaccaggatattgatcaaatagggtcttgcttcagtaaagatgtatttgaccctcatggatatgatcaaagtgacttctatgatgaactagaagctgatatgaggcgcgaaagtgagaggaaagagcaagagaagaagaaagcacagaaggttgaatttatttcggggggtgcacaaccgggaattgtagctagcgctcctaggattagcatgcccgttgcaggtgcttctgctgtgactgcaggtggtttgcctttggtgcctcctacttctgattctattaatcgggatggtagacagaataaaaaatcaaaatgggatagggtggatggtgatagaaaaaatcctctgccctctgcagggcaggattctgtatctactattggggctcatgc

SEQ ID NO: 9959 - DNA, 442 bp, Glycine max
gtggagtaccctcatagaatccttgtttgcattgttttgtcacacgcgacagagcatgtcccgtttcctaggaaaatcccttaggactaaggggcccttgtttctgcacaaaattttgggaatctcgtccgagtcgcataacatcctggttttatcaaggtatcgccgccacttttcacattcccttccccacaatacttcaaatttggttccaagtaccgggtctctccaaattcggttctttgcctctgaggccgctgctgccaccactgaaccctcaacctccgatgggctcacggtccaaggaattctggccaataattggaacattctcgacgaaaacgacggcgattggaagagtcatgccaccgccatagctcaatctattcacttgatcaaacgccgtttacattgggaaaaattgaaggtgaggttggatatg

SEQ ID NO: 9960 - DNA, 485 bp, Glycine max
gggaagagagtggagtatggacgtgtgttagttggctaatgaggagtcctcatttttcttcatctgtatctgaaccctaatcccttcggaattggaaagaataagaatcatcaatggagggagtgctgtccgcgaatgagcaacagagcatggtctcttctttcctggaggtcgctcagggccagaccgccgagactgcgcgccagttcctccaggccacaagttggaagcttgaggaggctcttcagctgtttctgatagggagtgaaggtggggccgtgccgttgccggtgccgccgcctccgttgttgcacactccgcctttggaaaatgtcgattcctggaccgatcaacagcctttgagtgaaccgaggaaggacgctgcggctgcaagtgaaagtattggcctcaatgatgcggaagaggtgcgccctcccttgtctgttattagggaaactctctacgacgacgcgttgcttgtttgg

SEQ ID NO: 9961 - DNA, 389 bp, Glycine max
ggattacaattcttcaaatgaaaagccataactgtcccgaatgatagcttccggttaactttaatctttggttgcatgtacaagatacgccattatctgttttgcatattcatcatactacatggcctgaccatggagttcccaattatacatatgctgttcgtgaaatttttaaaagattatatcatttagaaccaaaccttggccccatagtggtgcactgcagtgccgatattggtagaactggaacatattgcacaaattcacaacacaattcagagaatacttgctggtgatatctctgctgtaaatattgctgacacagtcactacgttcaggacccagcgtcttagaatggctcagtacaatttctgctatatagctatcat

SEQ ID NO: 9962 - DNA, 548 bp, Glycine max
ggccacgtcatgacgagagtagcgatgatctagtgaggagattttggtgggaagatattttcgacgattttcgcggttgtgggcgaaagctggctgccagcgatagtgaatcagaatcgtaagctcgacaaagaagcaagcaaggttattattctttgtggttgcggaacgaagcatgctgttgctgttcgagaatggatgagttgaacggcgccatgacgacggagaatagcaatgcggaggtggttcgatgggagaggtttctgccgcggatggtgctcagagtgctgcttgtagaagctgatcattccacgcgccaaatcatcgccgcgcttcttcgcaaatgcagttacacagttattgcggttccggatggattaaaggcatgggaaacgttgaagaagaaggcacctgagctagatctcatattaacagaagtggagctaccagcaatatctggatttgcacttctttctttgatcatggagcatgacatttgtaaaaacattccagtcataatgatgtcttctcatgattcggttagcatg

SEQ ID NO: 9963 - DNA, 1077 bp, Glycine max
gacgacaccaaaaacaaataaaacgaacgcttttggacgcagacggtagcaaggaaacccaccgtaagcgataagcaatagaattcagagagagagagaaagagagtctcttgctctgtatctttgatttgatcattccaatcttcaatttttctatatatccatcaatccgctgagtgcaaagttctaatctttcgcctattgggttctactcctttctctcttcgtttccgatcgatccaattttcttcccatggctacgatcggacacaacaatctcaatgccaaattggttcttctcggggacatgggtgctgggaaatccagcctcgttttgcgctttgtcaagggtcaatttctcgaatttcaggaatcaacaataggggcagcgttcttttcacagacgctggcagtaaatgacgcgacggtaaagtttgagatatgggacacagcaggacaagagaggtaccatagcttggctcccatgtattacagaggtgctgctgctgctatcattgtctatgacatcactagctcggactcctttacccgagctaagaagtgggtccaagagcttcaaaagcaagggaatcctaatatggtcatggctcttgctgctaacaaagctgatttggaagataagaggaaagtgacagctgaagaagcacgtgtatatgctgaagaaaatggtttgtttttcatggagacctctgccaaaactgcatccaacgttaatgatatattctatgaaatagccaagaggttaccaagggctcagccagctcagaacccagctgggatggtacttgttgatagacccgccgaaggaactagggctgcatcatgttgttcataagtatttgaactgtatttgcaccccccaatcctttttaattaatcatgttttctttgggttgtatgtactacacactttgatgtcactgttatgtggagctccaacaagtggtatgggctgcaatttacaaaacacaacaacttgatggtgcaaaatatatcctttggatgtgtaatttgtcccgtgatttgtttcattgtttgggtatatgaggtgaaaag

SEQ ID NO: 9964 - DNA, 380 bp, Glycine max
ggaagaaaaaaattgattctaaaaatcagtctcaacagagataaacaaatggcaaaagcttcattgttgtttccttacttgatagttataattctcatagcatttggaacaggttttgcaaatgcatgtaacttcccgtgtcattctcggaacggttgtggtaatctacactgccctggttgcttaaagcaatgcgtcaacttttgttgcctttgtgattgtagtccaccacccaatggaaatgtttcataaacaaagaatcataataattaaataaacttgagattccattgctcaaattatgatgtatgaactccctgcctttgcatttgtaattagagaagatggtattatcaacaacattggcatctctctaaaaa

SEQ ID NO: 9965 - DNA, 341 bp, Glycine max
gctcacttaaatagtttatctctcatttgacatgatatctagaaccaggttgaggaaataatgaaaaccgtccctcaccggggacctactgtcctcggggggcctttctagtcattgcacttatctcagtgacctgcttccgcttttcgacgaacctttctcctttttcagccattgctgaccaccatcacttttttggcgacactgtccctgggtgagcctttctgattgtctcacttattcttacgacctattttcgcttttcaatggctctttctctttctcaagcgacttttcgagccactatcgaccatcgtcactttttcgaccaacgccacaac

SEQ ID NO: 9966 - DNA, 632 bp, Glycine max
gcgggggaaagttaacgaagaaccattcggtggaaatcggcgacgaacgaagatcatcatcaacaacctcacaccctcatcaattcaattcaattcttcgccctataaaatcaaaatccgttacatcacttttcacatccattcctaacctccccaacctgacaattacacgtttctttcagagaagctgacatgccttcagtttacatgggagataggatggataattctaactcgagcttgagttctaattctaaagaaagcagcgttgttgttaatgggaaagaaacgtacaaaaaacttctggttgcatcacggcctaaaggctttgcacagagaaattatgaacaccttgtgtcattaacccatggtgactttggaagcagtgctgtgggacgtgtcacgttttttctactaaaacttgctgcattagaaaccgtgaggagattctccaggagtatatgtccgtgtgtatggcgaggcctacagggtctccaaatccttgtctatccaccattcaaatggattcagaggtgggcacccttcaggggtttggtgaaaagcatgcaggtactatcaagacctctattagtcctttctattgcaaccgtctttactgatcaaccacaatg

SEQ ID NO: 9967 - DNA, 387 bp, Glycine max
catgttgtcatgtttgacttccccttgaattccattgactaccttcatcgcactggtagaactgctcgtatgggtgcaaaagggaaggtaacaagtttagttgctaaaaaggacttggacttggccagcaaaatagaggacgcattaaggaagaatgagagtttggaggctatcacaaaagaaagtgtccgaagggacattgcaaggacccaaaatcaaagcactgagaagggaaagagcaaaagattggttaaagtttcaaaagttatgggcaaatctggtagtcgttttggttctgggaataatggatcaggtatgaaatctggtaaagggtcaccagtcaaatctatgaagaaagggattcaagtttcaaaatctggaaaatct

SEQ ID NO: 9968 - DNA, 1452 bp, Glycine max
acaccacataactaaaacacccatactctctctttctctttcattctttgatgcctttctacaaaaacacaaccttttaactgttatttttttttttttcgtttgctccttattttcttcgccgaatcctagaatgtcatcgccggggttccctggcggcggtagtgcgtctgagtttttcgctggagcgggtgttttcggcggcagatccattccgggggccaccatgaacaaccccaacgccgccgcttccgccaccatcaacaacctccaccctctctaccgaacccaacaacaacagaaccttcccgcaatgtttctagatccttcctcgcagatcgcccaacgccaaacaccaaccttcatcggtaagcgcaccctaaccgaattccaagcctacaaccaaaccaacaacaaccccaaccacgtcctctcgaacctcctgcttcgttccgttaagccccggaccactttctcccataaccatatggactttcccgttcctgaattgcaaagccaaaacctttatgccaaccaaacgcagcgttttggtgttccgttacttcaccagctccgccctcagcccattaatctccccaacaacgggcccgtgcccatgacaggcccaaatttcggttaccggaactcgaatttgggttttccaccaaaccagaaccgggttcgtgtttctcctcctgtttctgttccggttcaggttcagtcatctgaaccggaaaagaagatcatggaccacaggcttcttgaattggagaagcagcttctggaagataacgacgaagaaggagaagcagatgctgcgtctgtgataaccacgagcgagtggtccgagacttatcagaatttaatcagtcccggtccggttcagaaaccggttttgacgaccacgtcgccgacttcgtcgacgacgtcatccacgtcatcttcttcctccgtggcttcgcctgcttccggatgctccaagcaaactctcatggaagccgcatctgcaattgttgaaggtaaacacgatgttgcggcggagatcctgaaccggttgaacggtgtgaaccggagtgataggttgacggattgcatggtttcggcgttgaaatcgaggatgaatccggtggagtatcctccgccggtggcggagcttgttcaggaaggagcacgccgagtcgtctcagctgcttttggataactcagtgtgcttcaaggtagggttcatggcggcgaattacgcgattctggaagccgcatttgaggagaaaacggagaataacaggttctgcgtggtggattttgagattggaaagggaaagtcagtatttgcacctcctcaacgcgctctcggcgcgtgaccagaacgcggtggtgaagatcgcggctgtggcggagaacggcggcgaggagagagtgcgcgccgtgggagacatgctgagtctactcgca

SEQ ID NO: 9969 - DNA, 400 bp, Glycine max
ggaagttgagaggcttaagattgctaccggagaggcattgaaccaatccgagtcttttaatctgggaatgcaccagatgccatatgcagggccaaatttcttttcaattccaccacattcaggtccttctgggcaccagaacatgcaattgccaccatttggtcactcccaatccaccgtgccgactcatcagctgcaacaaacaaattctcaccaaatgtcagatatattgcaaaacgaccagcttggtcgtttgcagggactcgatattagtagcaaaggaacacccatggtgaagtctgaaggcccctcaatatctgcaaatgagagttgcaccacattttgaattttttgaccaaaatttgcttgacctgctgacttctccgtggcattattccct

SEQ ID NO: 9970 - DNA, 760 bp, Glycine max
  unsure (1)..(760): unsure at all n locations
gaaaaaaaatttagagcaaaattctaaggatcaggacagattttttcagcaggtgaagagctctaaagatgggttttctgtcattgctgaatattttggaaaagggatcatcagcaaaataagtaatggatccacttctggtcccgtatccggaactgcatcatccagtagtggtttctaaggcttgagatttctggcacttgctttctgcacttattctccatttaacattaaacaagttgggctttggatattggatgaaatttagttattttttcgggttttgattttctttaatattgcttgttgactggggtccaggcttcatattttccataatgtgctgactgttataaagaaaccaggagtggttcgttcattaaggaaagtccttgaatggtcttcctctattgccagagtactgaactttctgggaggatttaaagtttgtctttttatggatcagaacagaacattttcatgacagcctctccttaagggaaataccggacaaatattcaaggcaatgtgagattggttaggtatgaattcaagtgatacttttctttttcttgtttttcattgtgtaaaattatgatggattacaatcatggaaatgagatttttactttgattgttttaatttttgtgaaggccttgaccaatactaccaatatgaatacttgaatagtctgttttagctaaaaaaaaaaaaaaaaaaaaaaaaaaacaacgcggccgctctagaggatccnagctt

SEQ ID NO: 9971 - DNA, 1110 bp, Glycine max
gtattatattgtggtagctgttacgagtcagcaagagagaaatatcttgttgagttgatttctgatcccaaattgagtttgagtttcagccatggtatctgtttctctgctcttattcctatctttctttgccttctttgcaccctctgaatctcacgacaaagtctcgttggaattgtactacgaaagcttatgcccctacagcgccaacttcatcgtgaatcacctcccaaaaatcttcaccccagatcttgccccaatcgttcacctcaaactcgttccttggggcaatgccaaactccgtgccaacgccacctttgactgccagcatgggccatatgagtgcttgctgaacacagttgaagcctgtgcaattcacatctggcctcaactcagcaaacattttcctttcatctactgtgttgaggatctggtgtttcagagtaagcgtgaggaatgggaatcttgttttgagaaactggatcttgattcggaacctattaatcagtgttataatagtgaacatggaaaacagttggagctacaatatgcagctgaaacaagtgctctggagcctcctcacaagtatgttccttgggtagttgtggatggagaaccactctatgaggattatgagaacttcttaagctatctttgtaaggcttataaaggcactgttacaccccaaagttgcacccaagcatcatacctaagagaagtgaatgcaaagcctaagcattcggtttgctacaaggacagtgggattatgctaacatgggaaaaagtgaggtcaaccattgcatcatggatgcactagatgaatcttggcagtgcattttagatgtgccaatgctgcatttagtagcagtttgttcgtgttatcttgtgtgtagttgtgttgatccctccaaaagtgcaaatagaacttgtgatgcacataaaaccatatcgtactctcataaaaaaaataaaaccatgatgtgtatgtgtatgaggtacttaagtacaatatatatagagagagaaaaaaaaaagtaagtgcaattctatattttcgttattctcgtcaaaaaaaaaaaaaaagggcgccgctcgcgatctagaactaaa

SEQ ID NO: 9972 - DNA, 693 bp, Glycine max
ggtacgaaggaggtgcattggtccattatctatcgttaatggaagtggaagtagcacttccattttccattttgcatttcccagtagagtaggcaaagccaaatccaaagggaacacgttcattcaattgcaattatttatattaattaataataattcacaaattgtgtgtggccagcactccaatcccctccctcaactacccgacaaattttccattcccggcatctcctcccagcctcgtaccccagataccttaaattcgcttcataacacaatttcgtttctttctttgccgaccaactcggttctttttttttctttctttcaccttcacctatggccatggcttctttgattcagtgttctgcaacttccctctccgctgtccccatcactacccgtttcaccaggacccacaagtctcgccttcgctgctccttagatgctaatgtttccgacatgagcgttaacgcgccaaaagggttgtttcctccggaacctgaacattatcgaggaccaaaactgaaagtggcaattattggagctggacttgcaggcatgtcaactgcagtggaactcttggatcaaggccatgaggtggatatctatgagtcaagaccttttattggtggcaaagttggctcttttgttgaccaaggtgggaatcacattgaaatgggattgcatgtt

SEQ ID NO: 9973 - DNA, 542 bp, Glycine max
gtaggaatgaggtgcattggtccattatccgttgttaatggaaatggaagtggaagtagcacttccattttccaatttccaatttccagtggagtagaacacattcattcaattgcaattttttataatttcatatatcctccaatattgctggtggttagcactcacaagagacaggctcaactaccagacaaattttccattcccggcatctcctccaaacctacgtaccccagataccctaaattcgattcatacacataacacaacacaacctcgttcctttgctgaccaactcggttgttgtttttttctttcactttcacctatggttatggcttccttgattcagttttccccaactcccctctcctctgttcccatcactacccgtttcacccggacccacaagtctcgccttcgttgctccttagatgctaatgtttccgacatgagcgttaacgcgccacaagggttgtttcctcccgagccacaacattatcgaggaccgaagctgaaagtggcaattattggagctggac

SEQ ID NO: 9974 - DNA, 376 bp, Glycine max
gatgtgggtcaagttgcacaaataaaatgtggtaacataaaggtatattatatgcttcaaattaagtgaccccaagtttttaatgttattccttcttttttgaatatgttgttctagcggacgtttcttccttcgaccacgtttcctcgtgatttttagtttgtgggtttcagttgtccttttattaaaaaaataaataaataaattcaagtgaccccattatgttgattcaggagtattgtgtttttggggaattgtagggggcctaagattcgatgttggggttgtttgtgcaggtgatggagggtgtgaaggagataacaagaaatggtgccaaatttatggatggaaaagaaaaggaattcgatgctataat

SEQ ID NO: 9975 - DNA, 711 bp, Glycine max
  unsure (1)..(711): unsure at all n locations
gcaacaacttgagcagacaccaagttccctataaccgacaccaggctagtagggtttgccacaactgacaganacctctttttagttgtgaaccattgtccatatagttttatgtcaagcagcaatattacaaacgaaaaggccaagcaaagaactccgtagcaagaagttgaatgaacgatgatgggtgctgattgaagcatgagaagccaagaaatccaaggagcatacatgcagttcactccaacatgatgtgagaactcctccttcaccatgtccaagtgaaagatgcacttgagcacgtaaagtaaagacaaagtagtggcagtgagcagtgccacacaccaaagtagtagaaacgcaatggaaggcatcaaattgaatccatgccagagagtttgtgagtccttgttgtgtttactcaaactcttccagagcaaagcttgtgcaccaaaggaaaggcatatgaaaaagtaaccagcatggagcttggtcaagattggtaagtgtgattgtgatgacttggtgatgtcggttgggagggtgtggttgtttgcgctattgttattgttcatggaagcacatatgactacttcaactgatggtttgatctcagtgtcacccatcatattgctatagcaataggagtgattttggaattatattatgtgtgatattgtctcactcccccgctgtgtcttcgacgcgtgg

SEQ ID NO: 9976 - DNA, 387 bp, Glycine max
gagcacgtaaagtaaagacaatctagtggcagtcagcagtgacacacaccaaagaagtagaaatgcaatggaaggcatcaagttgaatccatgccagagactttgtgagtccttgttgtgtttactcaaactcttccagagcaaagcttgtgctccaaaggaaaggcatatgaaaaagtaaccagcatggagcctggtcaagattggtaattgtgatggcttggtgatgtcggttgggagggtgtggttgtttgcgctattattattgttcatggaagcacatacgactacttcaactgatggcttgatctcagtgtcacccatcatatatattgctataggaagatatataggagtgtgattttggaattagtgatgtctcactcc

SEQ ID NO: 9977 - DNA, 373 bp, Glycine max
gacagcttcaaactcaaactcacctcaacttccacttgctgttttccacgttatcctttccaaaaacctgttcttttctcaaatgggtggttcaggaagatggctcatgtccctcatttctctcagaaagccctccactattgatcaagagaagggtggtgacaagagtaagagaaagtggaagttatggaagagcacttcagaagggtttgggattggatcatcaatgcagaaggggcatggcggtggtggatcctttgtggtggacgatggagcatttgctgctgccttggctgctggggtcagaactccactcaaagactttatggtcattaagcaggaatgggctgccattcgaatccaagcagtgttt

SEQ ID NO: 9978 - DNA, 612 bp, Glycine max
ggggtttggtgaatgagaatcggattgaagaagaagaagacgaccagcggtgcagcttcgaaattgctggccatggcgaagaagctaagctcgaagcccaccattttgttcatcttcgtctctttcatgcttttttgcgcctttcttcctgttttcgctcctcttccttctttctcctctcaccattctcatcgcaatacagtttacagaaagttcgagatcgccaacgataggttctggaaagatggtgaaccatttcagatcatcggtggtgacgtgcattattttcgagtgcatccagagtactgggaagatagactgctaaaagccaaggcattgggcttgaacacaattcagacatatgttccttggaatctgcatgagcccgcaccgggaaagcttgtttttgagggttttgcaaacattgaagcattcctcaacctttgtcacaaacatggtctccttgtgatgattcgacccggaccatacatatgcggagagtgggattggggcggtttcccaggttggttctattccatgaacccaacccccaaaccaagatcatctgatcctacttatcttcaactggttgaaagatggtggggtaacctg

SEQ ID NO: 9979 - DNA, 411 bp, Glycine max
cggaatcccggtcgaccacgcgatcgtagaagtgaagattcagttcgggatttttgcgcttcgctctcaatttgcagtgcgtgagtgaagcacatggatacttccgaattgcccaacctaaagaaatggattgtgatgtatcccgtttacataaactccaagaaaacgatggccgaaggaaggcgcattggcctcgccaaagcctgcgaaaaccctacttgcgccgaaatcggtgattgctgcagctatctgaagcttccttttgcaattgagatagacaaggcgtaccctcgtgatttcatgcagagagggcgcgtgagggtgttgctgaagaaggaggatggaactctctttaattccaacctcctctccaagaaagcaactaatggtaaaggtgcagagatggtacct

SEQ ID NO: 9980 - DNA, 378 bp, Glycine max
atcactctcatcatagtcactgacacagttacgctctaaccggttattcaactccgcatccaattcaatgcaatgttgagaaataaaactcaccactagcttcttcaaccaccatcaacaatgaggtattattcccaattcaaacacttatcccatttcctcaaaaccctaacccgacgaccccaaaaccctaccttcgcttctgcacggatctcacagaaccttccaccgcgtccctcccacgcgcgtgactactgcagcagcggcggcgcgtcgctgtcgcagggttcggagaaggtggcggcgatcgtggacgaaggtgatggggctgacgctgctggaagtgatggacctggtggaggtcatgcgcgagaagcg

SEQ ID NO: 9981 - DNA, 622 bp, Glycine max
acgtaacatacgcaaatcatcacaaaaggcattctgtactctatttgtaaatgggatacctcagaaatataacaagagagaggctcttcttgctcattttaagaagtttggggaagttattgacatctatattccattaaacagtgaacgcgcttttgtgcaattctccaagagagaagaggctgaagctgctttgaaggcaccggatgcggtaatgggtaatcgttttatcaagctatggtgggctaatcgggatagcattcgcaaagatagtactactagtgggaatggtgtgattgtaactccccgtgggcaagcacctgcttttgttccatctcatcctgttgtcactgataggggtaaagacatccatcaagctgatgcttcaaagactatgtatgaagtatcatcgcctactgatcaatctaagcctgtcatcacagatggacccaaggttccccctccgttgcagaagaagctggtacacttagagcgtctaaaggcagaactgcgcaagaagcaggaaatgctagatcaaaaacgcaatgagttcaagcgccaagtgaacaaatttgagaaacaagcttctggactcaagggtgaagtatctactgagccagct

SEQ ID NO: 9982 - DNA, 963 bp, Glycine max
cttaaaaatgctcctattttgttgttggatgaagctagttcatcacttgaatctgagtcaagccgagtggtgcaagaggctctagacaccctaataatgggaaacaaaaccacgattttaatagcacacagggctgcgatgatgaggcatgtggacaacatagtagttctaaacggaggaaggatagtggaggaggggacccaggattcattggtggcaaaaaatggtctgtatgtccgattgatgcaacctcattttggtaaggctttgcgccagcatcggcttgtttagattgggagtatataatgtgagtagttgcaactaatgttgcttcatgagaattgtttcatatattacttgagttgaatgactggtgattgctgcacctggtggaattttccaatgtcaggtggaggcttgcatgtagcaagaatgggagtattggatcagcactcgacattggtaggcataagaagagggtactctggcaggggtagtgtaggaattaaagataggaatttggaatttggaatttggttggtttgagactcgagtattgaagctgtggatgcatattcttttggaggcaagcagtttagactgacggtgttgtttccacggtatattttgatagaggaaggcggcggaatcaacactatttcagctgagttactcttctataagactttcttttcactcttcctgtctctcaagcgtggatgacgacttgttcactactgtatttattttctcttcatttgtgaaaattgtagaaaagacagtctcaagtgttataaaatctctgtatatacacagcgatagtctagaagcaattcctttagtttttgaattacccgaattcacgagttttttgtccttggataatagatgcaaatttccacgtgtattttgccaagtagtttgagatattcttatagttttttaaataaaaaactagtttgc

SEQ ID NO: 9983 - DNA, 388 bp, Glycine max
tgcatctgggagtgggagagaaagatgccgaagaggacaacgcacacatactcaagcgaggatgcagctccggagggtcctcactccgatctctttgtatattactgcaaacattgcggatcccatgtcctcataacagatacccaattgcagaaaatgcctaaaaggaaaaccgacaaagcttatgtactggacaagagcaaacatctggccagattgaacatgaaggaaggcgggaaagtagtgttaaaacgaggggaggggaaaatggagaaacaattccgcatgaactgtatggggtgtggactgttcgtatgctaccgggcggaacaagagttggagttatcgtctttgatatatgttcttgatggtgccctcagtactgttg

SEQ ID NO: 9984 - DNA, 445 bp, Glycine max
gaacctcatgcattctattcttctctttctctctctctctctctcactttctctacctttctgtgaatttctgttgcattaattttctctgcagaaagagaaaaaaaaagagcttccacaatggtgagcgctgcaattgctcgtaacgtcgtcggcgtaataggcaatatcatctcctttggcttgttcttttcacctgctccaactttctatggaatcgtaaagaagaagacggtggaggagttcaagccagatccttatatagcaacggtgttgaattgtgcgttttgggtgttctatggaatgccttttgtgcacccaaacagcattttagttgtcactatcaacagcgttgggcttgcgttcgagtttgtctatcttaccatatattatgtctatgctaccaacaaaggacggaaaaagctactgatttttcttctcatcg

SEQ ID NO: 9985 - DNA, 724 bp, Glycine max
cccacgcgtccgcgttctttctgccctacgccaattttgtttttcgccttgtatctctcccaattcctcagtttccttcttccttcatctttgcgtcatggccagaggttcctctcagtctcagtcctccacttcaacagccacgcgaccaggaccagcaggcatggctccccgcggttccgccgccgccaccgctggcatgcgccgccgccgtctcggcggaggaaacagctccgccagcaccggcgtcggaggcggcagcagcaacatgctgaggttctacacggacgatgctccggggctgaagatttcgccgacggtggtgctggtgatgagcctctgcttcatcggcttcgtcaccgcgctccacgtgttcggcaaactctaccgctccaaatctggcggcaccgtttgatcttacgatcctcttttggatttgtagttctgatccgcatccgatcgctttggtttcggtttttaattccgtaattttgttaacacttgctattttgttgtagctgtggaatcaaatcgttgactgtctacttaccgtggttaattttggctttggccataaacatcgatctgtgtcgtttatttaatcgtgtatgtatattaatgagctaggtttgctattgttcctttttctcaaaggaatttgatggtttcttttgcacaagttattaatttgatcaaaaaatcctcgcggccgctctagaggatc

SEQ ID NO: 9986 - DNA, 1263 bp, Glycine max
taagagatggtgtgccttacggctcctcgtggtaggtgagttgggacttgtggcggcgagattgctgctgctccaaacgttacaggagagaaagccttctttgccgtgaattcggatcgagatcaatgggttcagcggagaaagagccactgttaacagcggagggaactcgatcaaactcaaagcacgagtcctcctcccatgggcaacttgagagaattctctccgacgacaccctacccttcctcaaccgtgtgggacccgccacctggatcgagttgaagctcctcttcttcctcgccgcccctgccgtcatcgtctacctcatcaactacctcatgtccatgtccacccaaatcttctccggccacctcggcaacctcgaactcgccgccgcctccctcggcaacaccggcatccaaatgttcgcctacggcctcatgttgggtatggggagtgccgtggagacgctatgcggacaagcattcggagctcaaaagtacgggatgttaggagtctacatgcagcggtcaacgattcttctctcactagccggcgtagtgttgaccgtgatatacgtattcagcgaaccgatgctaatattcctcggggaatcaccgagaatcgcgtcggcggcagcactctttgtgtacgggttgatcccacagatattcgcatacgcggcgaacttcccgatccagaagtttctccaagcgcagagcatagtggcaccgagcgcgtacatatcagcggcgacgctggtggtccacctggggatgagttgggtggcggtgtacgagattgggttggggctgttgggggcgtcgctggtgctgagcctgtcgtggtggataatggtgattggacagtacgtgtacatagtgaagagcgagaggtgcaggcgcacgtggcaggggttcacgtgggaggcgtttagcggtttgtatgggttcttcaagctctccgctgcgtccgcggtcatgctgtgcctggagacatggtactttcagattctggttttgctcgcggggcttctccctaatcctgagttggctcttgattccctttctatctgcaccacaatttctggatgggtgttcatgatctctgttggattcaatgcagctgcaagcgtgagggtgagcaacgaactaggagcaagaagtccaaaatcagcatcgttttcggtggttgtggtgacagtgatttctttcataatatcagtaattgcagcactggtggttcttgcattaagagatgtca

SEQ ID NO: 9987 - DNA, 733 bp, Glycine max
tagtgacactataaaagcttacgtccatgcaactaagcaagatatcatcacattgcaaagaaaatacacattacattactaagtctttgttcatttgagtagtagtgatggctagcctcaaggttgcatgtgtggttgctgtgatgtgcatggttgtggtggccatgagtgctgcacccatggcacaggccgcaatcacgtgcgggcaggtcgccggcgacatgtctccgtgcttcagttatcttcgaagcggcggaaaaccgtcgcaggcctgctgcaacggagtgaagtccctcagcagcgcggcgaagaccaccgcggaccgccagggggcgtgcagttgcctgaaaaaccttgccaataatatgggacagagtttgaatgccggcaacgcagcctctctccctggcaaatgtggcgtcaacatcccttacaagatcagcaccttcaccaactgcgccaccatcaagttctgaagggcaatttttcagtcgcagaattctatatatgatatagtagtgctgtagaatttaactattgtgtaaaataaagggagggcaatgagggatccaccagtgcgagtctcttcttggtattgccgtgtcccttagttgtttcagactttgatccagttattatgttatttttacgtgttcgctgaaatttgtctcagttggttgtttgcatatgtaataatgacataaatagtactttttgcagttaaaaaaaaaaa

SEQ ID NO: 9988 - DNA, 760 bp, Glycine max
gaccaaacaataagcaagaatttccattgcatgcaaagcaaatacgcattatattactagttttaatttgttttgtcgtttgcttctttctttgattaatgatgactagctttaaggttgcatgtgtggttgcgatgatgtgcatggttgtggccatgagtgttacacccatggcacaggccgcaatcacgtgcgggcaggtcgccggcgacgtgtctccgtgcctcagttatcttcgaagcggcggaaaaccgtcggacgcctgctgcaacggagtgaagtcgctcagcggcgcggcgaagaccaccgccgaccgccaggcagcctgcaattgcctgaaaaaccttgccaataatatgggacagagtttgaatgccggcaacgcagcctctctccctggcaaatgtggcgtcaacatcccttacaagatcagcacctccaccaactgcgccaccatcaagttctgaagggtggatctagtataaggaagaaactgcagggcagtttttcagtcgcaggatactatatatcataatgttgtaaaatttatattaatgaaaataaagagaggacgatgagggctctagtacttaagcgagtcccttagttgtctccacttgttgttgcatgtaatactatatgtagttctctgctactttacttttttgacaattaataatatttacacgtcccttaattaaaaaaaaaaaaaaaaaaaaaaaaaagcgtgccgctctagaggatccaggcttgcgtacga

SEQ ID NO: 9989 - DNA, 337 bp, Glycine max
ccgcttcgaagtcactgagccgcggagacacgtcgccggcgacgtgcccgcacgtgagtgcgatgatgtgcatggttgtcgccatgagtgttacacccatggcacaggccgcaatcacgtgcgggcaggtcgccggcgacgtgtctccgtgcctcagttatcttcgaagcggcagaaaaccgtccgagtgcagctagcacggggcgaaaaacacacagggacgggccaagaccaccgccgaccgccaggcagcctgcaattgcctgaaaaaccttgccaataatatgggacagagtttgaatgccggcaacgcagcctctctccctggcaaatgtgg

SEQ ID NO: 9990 - DNA, 429 bp, Glycine max
gaaatgactgccacatactccactttcatattccctttagtcacaccaagatcaacttttcagttgagaggtttatccttgattactaagagcaccaagccaacccatatgagcaaaaacaccaagtagtgttttcactcacactgtttaacaaattcttgctccaatggagagcatattttttcagtctctctcccttgcaaagattccaaagtctcaaacttcacctctgctgaattcaccactcttgtttcactccaatgcaacctcagttgctttcagttcggtaccctatcatcaccaccatttgctcaagtgctttctgtttagatccaaagcaaacgaaaagcagaacctggtgggagttttacgtgcctctgaggctgcaacaaccccaacaaccaatgatgcagaaagatggcttcttga

SEQ ID NO: 9991 - DNA, 665 bp, Glycine max
gccaaatgcaccatcttaaaaaaaaacaaatatatatttgaaaaaaaagaaaaaaatgcatgccatcatcagaccaggaatgaatcattcctcctggtcctgatcctaaatagggttagggttagggtttatgcaatcgaactcctgcgacggtgcatttgtgcgtaatcgatggcgaatcgcacggatccagcagcgaagagcataagggggacgaaccctcagaacctggtggagaagattctccgatcgaagatctaccagaacacgtactggaaggagcaatgtttcgggttaacggcggagacgttggtggacaaggccatggagctcgaccacctcggcggcacctacggcggcaaccgcaaacccacgccgttcatgtgcctcgtcatgaagatgctccagattcagcccgagaaagaaatcgtcatcgagttcatcaagaacgaggattacaagtacgttaggattctcggtgctttttacttgcgtatcactggttctgacattgacgtctaccgctacctcgaacctttatacaatgactatcgcaaacttagacgaaagctcgctgatggacagtttacattgacgcacgtggatgaggttatagatgaacttctcacaaaggatcatgcttgtgatatagcgctgccacgcgt

SEQ ID NO: 9992 - DNA, 641 bp, Glycine max
gacaataatctttggcacaaacacacacacacccatctcctccatccttgttctccacaattctagctacctagcacaaaaattgtagtcatgttggggaagaggccccagccactgatcggaaaaatctccgaattattggtctccggcggtcgtgccgccgtgcttttcgatgccctcggaagccctagaagcccgtttgacatgatgaacttaaagatgcaatcaccaaagggcctaaaaagctatgaccttggtggtgttggtctaggaattgtggtggcccttgataaatcatcatccgaggaacaaggccatgtttgcacatcaaattcaaaccgatccgtaccaatcccagttactaaccaacgtgggtttcaaaagggtgtgaatgaaattcccgctggaagctccgaggattacacgtttgtgacataccatgtacctaacaacaagaccatcactaaggtttattatgatggcggtgaaggtggaattctaacacatggctactataatattaataataataacaacaacaacgttggtgttggtggtgttagaagaatcccaccaacgcaaactttaattgaagaagatgaacagtcatatcccacctcggatttctcagctcgtgtcac

SEQ ID NO: 9993 - DNA, 476 bp, Glycine max
cattgtactgatttgaaagtgcggtttggaataaactcaaagttttttgatagtgctggccggccacgattgagttttgtggttgatccatcaccaagtctatgtaatgttcttgatgcatgtgaccgtgtagcacagaagttaaccgtggattctggtagcagctctgattggaggcctgttgttattaggaaagaaggcttcttcaactatcctactgtcagattacacatacctactgcaggtagtggcagacattgctatttatgccacggaaatttatcaaagagaatcatctggaacagtgcaaagacttctcttagtaagtttgatgctgcagaacttggttccttgttcatgcctgggacatttgttgatggccgtcttctcttagaatccgtatgaatatcagcagaatgcagggattaaattggttgccaaaaaattgatcattcataggcaatagagggaaattg

SEQ ID NO: 9994 - DNA, 364 bp, Glycine max
gggaaaagaaaagaaaaagaaaaaagttgctagggttttcactgcacttgaggttcgtagaggagagaaattcaaattcaatgcaaagaaattagatttttgaacgaaagctacgaactttaagttcatggaccgcttgcgtcctaggaatcgagcggtcttttctggatttacaaatgccgagattgagaaaatggagaaattgttaagggaacctacagggggatcattgggcagggaattttaccaaaaactggctcgaagtttcaactattcctctggccgtgctggcaagcctatcataaaatggacagagattgagagttggtttcagactaggctccaagactcaccacaagtccct

SEQ ID NO: 9995 - DNA, 357 bp, Glycine max
gataagggctgaatttgacacacccttcctctcatctaatatctccacttttccattccttatcgcccatgttcttccaatatatttcttttacacctgtttttatggtgaaaatatcctgttcatctcattagtgaatcaatataaccagagtctgttatgcagttcttcacatttcaatgatgtctaatgtcttcaagatgaaatagttttgtagcatgttaatcaagggaaagtacgaacctggagatttgcgtcctgtacaacttagtctcgaaacattaaaaaggtgtattttgacccttaagttttttcaatgggtttaaaacaacctctatgataatttttccattaaaa

SEQ ID NO: 9996 - DNA, 303 bp, Glycine max
ggggcgaggaactgtggcgacgttcttgtcgggacaaggacaagggaagaggttagcttccatccatggcagagtacgaaaggagcatccagcaccagtcgaaagaaacagccttccaggccctgaacaccataatccagctccacttcgagaaaaccctggagaacaagcgtgccatcgacctccagaagaaggagctctacaagctcttccagatattcttcatcttcctgggcctcgtcttcctggtcctggcccactccccccgcctccaatgccgccactgctggatccccatcaccc

SEQ ID NO: 9997 - DNA, 630 bp, Glycine max
gcacgcgtacgtaagctcggatttcgccccgcggaaaagtgtttcatttgtttctcccaagtcagaacacaacacaacacaactaaacaacaatgtcgatcgctttttccttcttcactccactctcttccaaatccgttccatccttttccctctctaccccttctctctgttttcgcctcactcccctccgccgccccaccgatcgcttttaccctctctgctcctccgccggaggacctggcggcggatccttcggaggccacggcggtcccggacacggaggacatggtggcggcggcggcggcggcggtcacgacaacgacgacaatgagagaaagaacgaggctttattggtggtggcggaagcggggaggtcgttggagagcgtgccggcggacctggcggcggcgataaaggacggcaagattccggcgtcggtggtgagtcgctttctcgaattggagaagtctccgttcttccggtggctgcttcagttcactgggttcagggagcgtcttctcgctgatgatctcttcctcgcaaaggttgctatggaatgcggcgttggcgtcttcaccaagactgctgctgagtacgaaaaaagaagagaaaactttttcaatgagc

SEQ ID NO: 9998 - DNA, 401 bp, Glycine max
ggattttatgtagtcatcatctagcagatccaaatctcgaaatcccctcaatttctggagaagattctccttcattaagtgaagcttcagcttcaagtccttttccattctcatcaaacctgcctggaaaagagataataaatatacgatacttctttctccgaagctactgttcctactcttctcttccactctcatcatcctcatcttcttcttcgcattcctcacctcacacccctcaaacccttcaaaccctaccttcaccgccttcaacacccgcctctccttcaatgccaggactgagggtaaggatgggttttttgtcgacgttggtgccaacgtaggtatggcgtccttcgccgcctccgctatggggtttcgggttctggctttcgagctgt

SEQ ID NO: 9999 - DNA, 439 bp, Glycine max
gctcccgtggcattgtagggactagggattgtttcacagaacacctctgaaattcaaatcccttttttttgtttgatattaatctatggtaggatatagaatctgaagctgaaaaaaggggttaattgttttgcagaatcagtataattgtagagagcgagatggatcactatggttcttctggaggaagctggacaatgatcccaacccacaattcccaatcccaatcgaaccaggaccctaacctctttctgcaacaacaacaacagtttctccagtcacaaccttttcagcaagcactagcgcctcaatctccatttcaacagcagcagcagcagcgtcttctacagcaacagcaacaacaacaacagccgcagaaccttcaccagtcactggcctctcactaccatctcttacacttggtggagaatttggctga

SEQ ID NO: 10000 - DNA, 372 bp, Glycine max
ggcataattcatgcgtaaatagaaaacctggtaaacaaatttgaaatggctttcttgcatcaccactttggcaggtattcaaccatcgcatcacatcacatttacaaataaaactcaaaatccacacaccaccttgtctatatattatcatatttattgtaagcatcaccactaactctactgctactttcacctttcatcatcattcaattttagtccaatggagtggtctttctccatatccgtggtgctgtttcttacccttctcattcaaatacatggaagtggttatcttgatcacaagcaagcaagaggctttgcagagaattatggttgtaatttgttccaaggaagctgggtttatgatgattc

SEQ ID NO: 10001 - DNA, 466 bp, Glycine max
gcttgttcatgtgtgttgcattggtttcatggctcttttgacagatatcttaccatatatctatgactttattttttttggtagacttgttgtttagagggcctttttgcatcccaaaaggtggacgcttgtgttatatgaggttgtgaattgctgttgatttgttttatgcagcttcgatagatgccaatttgatccagtacatggaggggagatgactcagctggaatatcagaactttttaaagccagaaccagaaacagccttgtgagacgcgatgtgaacaaatcctgagcgcgtgacatttcagcttaggtaggttatgcagatatgtatactgaagtaacactgacctcattttattattattactaactcagggtcgacctcgttgcttcttccattgtaatatttgtaattatatagttttctaatttttttaataataaatattgagagctttgct

SEQ ID NO: 10002 - DNA, 559 bp, Glycine max
ggattcaagggtactgtccatgtattcagcctcaaggttaattctagcatccccgagcaggaaaagtcacaaagttcatccaattcagatgctgccattaccccatctagctcttctcgctccttcattgtcaccgaaaggggtgttgcccaagtacttcaattctgagtggtcagttgctcagtttcacttacaagagggctctcattacacagttgcatttggtctccaaaagaatacagtcattattcttggtatggatggaagcttctatagatgccaatttgatccagtacatggaggggagatgactcagctggaatatcataactttttaaagccagaaccagaaacagccttgtgagacgcgatgtgaagaaatcctgagcgcttgacatttcagcttagttaggttatgcagatatgtatactgaagtaacactgacctcattttattattattactaactcagggtcgacctcgttgcttcttccattgtaatatttgtaattatatagttttctaatttttttaataataaatattgagagctttgct

SEQ ID NO: 10003 - DNA, 1073 bp, Glycine max
ctttcattgtcagctgttaatttatcatcgctctctgtcaacagggaaactctccaaattcattgaaacactatgcggttgacatcaaggaacctttatctccagagtccctgccggtacagaaacagcgcaaatatatgccaggcatcactaatggcccagtgagggaatcagcagcatttatagatcagagtagaaggatgatacccattgggcaactgtcaatgaaaaaacttgcagttgtaggacaagcttctggcaagctatggaggtggaaaagaagccaccatcagtggctagtacaatttaaatggaagtggcagaagccatggagactttctgaacggattcggcacagtgatgagacaatcatgagagcaaggccacgttcgcaggcttggccgcgtataatgtgaatctgaatgttattgtgatcatcgatttgctttgactctgttcattttttaacctacaagaatgatcctagaaataaggcaataaagaaccaaaaactaggtgcagttgcagggtgttaaattaatggtttctgacaaataacattatatatactgcccgaatgttgaaaatgtttccattgtttgctgcatatggagcatcttgcgaggtgtgcaaaaatgttgccgagggctacccaaataatcaagagaataggagatagttgtttgcttggaggcattggtgaagatatcgctagacaaattatcttggaatgttttctgtttatactttataccaacactagaaggaggaaaaaggaaatattcttttgtcaagtcttggaaatgtgtattgagggcttctttttcttacttgtaagttgtaaaattctatggtcttgctatgtttgtcaatcattgatttttgttgatagaaatactgcagcgttcctctgccacaaagcaacagaaggaaagtaggaaactcttctgttttacctctaggtcttgtgtgtaaagaacattaactatattgaaagagattgtaatttaccataccagagtttgtagcaaaaaagaaaaattaatgaaatataacaaataacattatatata

SEQ ID NO: 10004 - DNA, 435 bp, Glycine max
agacaagatgaaccaaaatgaaagcaaagtagccttggctaaacctacactatcaaacggagaaaaaggaaatattcttcaagtcttggaaatgtgtattgagggttttctcatttcttgtaagttgtaagtttctatgctcttgctatgtttgtcaatcattgatttttgttgatagaaatactgcagcgttcctctgccacaaagcaacagaaggaaagtaggaaactcttctgttttacctctaggtcttgtgtgtaaagaacattaactatattgaaggagattgtaatttaccataccagagtttggggcaagagaaggatgataaccgatacgctatatacacttgttaatcaatcccccacccccttgggttacgtaacccattttgaacccttccatttatccctggcaatggatttattttggact

SEQ ID NO: 10005 - DNA, 800 bp, Glycine max
ggaggtttggttgttgaaatcggcaggggacggaaatatcgaaagagacagacagagcgacgtcggagaaagaaagaaaggaatgaatgaaagagggatggtaggagaaaaatgagaatggcgtgaatgtgaggagagaagagcctgaatattagaatcggatacccttaaagaagcggagataggagtgtgcgcctccaaacccaaggggcttcggaggggctcttcatcggaggcggtgctatattcccctccggattcccccaccatgaagagcctcttcaagcccaagccccgcactccttccgatatcgtcaaacaaacgcgagatcttcttctccgtctcacctcccgagatgacgataacatgcccgacttgaccaaaaacctcagggacttaaagtcaatcctctatggtaacagtgaatccgaacccgtccccgaagcttgtgcacagctcactcaggaattcttcgccgacaacaccttacgcctccttatccaatatcttcccaaactcaacttggaggctagaaaagatgccactcagattgttgcaaatttacagaggcagcaggttcagtccaagctcatcgcctctgattacttggatactaatttggatcttatggatgtcttggtatctggatatgaacacacagacatggctttacactacggtgcaatgttgagggagtgcataagacaccagattgttgcaaaatatgttctggactcacctcatatgaagaagttttttgactacattcagcttccaaattttgacatagctgcagatg

SEQ ID NO: 10006 - DNA, 529 bp, Glycine max
  unsure (1)..(529): unsure at all n locations
gtcacaatggcccctatgacaacgaatgagagacttttcatttcattccaatgatttattaatcttgcaaggaaacaacagagagaggtggaagatggattatcatcaggacaaccctgcagttttcttcactaccatcaagaacaccaagcaactgaaagtcccagaggagtttctgaagcatttgaataaagacttgtggagtaattcagttcttataggcccttctggtgataagtggcaagtaactattttgaagaaaggaaataacgtgtatatggacaatggttggtcacaatttctgaaagacaattcagtggtgcttgatgagttcttgctttttacatatcatggaggaaactgcttctatgttcaaatttttggtgggaatggattggagaggctatgccgcgaagaagcaagacaagaacaagctgccatccctcaattttttgatctgcctttcagcaacatgcctcactcttgatgggtatgagataagaacacccgacanagacaagcttccatc

SEQ ID NO: 10007 - DNA, 815 bp, Glycine max
ggcacttttccaaaccacttttaactgctgcagatgatggcgaagaggtatcagccagaagggaagagagggaaaaatttgcattggagcacatagcaaaatgccagcactctgctgttagcaggctagcaaatccaattgctaaatgggacataaagggtacacaaacagcattgctgcaacctttctctcctatagtgatagctgctgatgagaatgaacgtatcaggatatggaaccatgaggaggcaacactactgaacagttttgataatcatgattttcctgacaaaggaatttctaagctctgccttgtaaatgagcttgatgagagcttgcttcttgctgcttcatctgatggaaacattcggatttggaaggactatactctgaggggtaaacaaaaacttgtcactgcattctcttcaattcatggtcataaacctggtgtgaggaatctgaatgcagttgttgattggcaacaacaatgtggttatctgtatgcatcgggtgagatatcatctattatgctatgggatgttgataaagagcagcttgtcaattctaaatcttcatcatcagattgcagtgtctcagcattggctgcatctcaagttcatgggggacaatttacagctggtttcatagatggttctgtccgactttatgatgtcagaacacctgatatgctcgtttgtggattaaggcctcatacacaaagagtagaaaaggttgtggggattggctttcagcctggattagaccaaggaaagattgttagcgcttctcaggctggggatatccaatttcttgat

SEQ ID NO: 10008 - DNA, 607 bp, Glycine max
aaaaaaataaaataaaaattggaaaaattccaattccgctctcgattttcgatttcggagtttgatagcaacgttggaaggaaaggtgagagcagaatcgttggaagaatctggtttttgtgtcgtggttgttgttttcgcgatcaaaacgatgtcttcgccggacattgtctcgatattggagaactcgaaggagttcgatcgggtgaggaaagaacaagaggatattctgtcggagatcaacaaacttcacaagaagcttcaagcaactcctgaagtagttgagaagcctggggataactcattggctaggctgaaatttttgtacactcaagcaaaagatctttcagaaagtgaagcaagtatttccaacttactgataaaccaaattgatgccctactgcctacgggtccacaagggcaaacacgaagaagaataggaaaagaaggtaatgagcagaaaaggaaacgagtgaagactgagtcagacatttcaaggctaactcctagtatgcgaggtcaacttgaggcttgtgccagtcttaaaggcgaacaggtagcggctagggtcacaccacgaaatgccgataaggatgaatggtttgtc

SEQ ID NO: 10009 - DNA, 628 bp, Glycine max
aatgttaatgaggagtactttgatcactgtgattacactgtggatacctttaattccattgatgtggcttctgtatcgccaactttcggctgctaatagtcccgcaaggaagcagagaccaaatggtcagacagttggatttgatgatgtggaaggtgttgattctgcaaaagtagagctcgtggagatagtttcatgtctgcaaggggatataaattaccgaaagctaggggcaaagttacctagaggtgtgttgctggtgggtcctcctggaactgggaagacactacttgcgcgtgcagtggcaggggaagcaggtgtaccctttttcactgtatctgccagtgagtttgtggagttgtttgttggaagaggggcagctagaatcagagaccttttcaatgcagcaaggaaatttgcaccatcaatcatattcattgacgaacttgatgcagttggaggcaagcgtggaagaagtttcaatgatgaacgtgaccagacgttaaatcagttgctgacagaaatggatggatttgaatccgagatgagagtggttgtcattgcagcaactaaccggcccgaagccttggatccagctctatgtcgccctggtcgtttctcaagaaaa

SEQ ID NO: 10010 - DNA, 381 bp, Glycine max
gggcacagaatgaaaatagtttcgtcgaattctagcttgaatatacacaagtgcgttaggtaatcagaagtgtgaattggagtgtatggattcagaagaatcaatctggagaggtcgataaacataaactccaattggttttgttttgtcggcaatgagggttctgcaacttggattgtttcttgctctggcatctggattcgcagccatttccatttacatcaccggcctctcagatccttttgtatatcccagttatcacctcacagatgaagacacccaagcattgctttcgctgcacgacactttccagaagtgtgtgactgcaaatggacttggcctaaaagcaaccaggggcacagattattgccaaaccacaat

SEQ ID NO: 10011 - DNA, 572 bp, Glycine max
gtcaacctgcattcctctcatacactgcctcaacaattgccgtgacattgttcttggttttgtattgtgctccccgttatggccagactaatattttggtttatactggaatatgctcgatagttgggtccttgacagtatgtggtcccagtggtcgctggtatctggcagacagtgggtctgtgcctggagatcttttacttataataggaaaggcacttacccatgctactgttggcctatgtcctgctgcatcatatagagcttctcctgattattttttgagtcctaatggtggaggaaggacttctcttgcatatagactcatgccacagggcaatgctatattagattgttccctaattgcagcagctggccatgttattccccaaagttatgttcgaatatctgtaagccaatttatggatgaccttgttgtcgaagaactgataggcaatagatgggtttataaaaacaatggataccttatggtctcgtgcaatggaggactcaaccaaatgagagttgcgatatgtgacatggtggctattgccagatatttcaatgtcaca

SEQ ID NO: 10012 - DNA, 948 bp, Glycine max
  unsure (1)..(948): unsure at all n locations
tcttctatggccttgtcctttttagcttcagttgcccttaaggccttgatttcactctggcaagttgccagttccttgaccttttctgtgagttggttgtgcaaacgatcaatctgcaaccccacagggtctggttggacaagagaaacttcctccccaccatatatctcttcactagccaccattttcctctttctggtgctgccaaatgctcacacaaagagcctttgttcaacaacagatgaggcttggtcactggaaataggctttgttcaacaacaaatattgggacttagtcatttctctaacacttcacaatctctgtttcagctttctctcttttctacaatggcttgcaccaccgtcgtgttgacgctagtcgccgcattgttggtaacctccgtcgtggctcagtctccggcgtcctcaccagctctgtctccaaagcgcacccccgtcgccacacctcagaagtctccctcgccggcgatttctccctccgccgtgtcgccgtcgtcctctcctcccgctccggtggtgaacactccgtctccgtcaccaaactcagtcgactctccgccatctcctccgcagtctccgtccgtgtcaccagccggtgttccctccgtcactccttcagcaatctccgctcctcccactggagcaccggctccctctcaaaacggtgccgctttgaacagattcactgttgctggatctgctgctgttgtggttntcgctgcggctttgctcatgtagagagactagagagggtttcgcggaggtttatttttaattttttattatcatcgtttgcgaacgaacgtgaattctagtacttcattnttggttgcttttttcatgcagtgtgaggattcattctttccattnatttgtctattggtattatgatgatgatgaatgatactacatttttatganaaaaaa

SEQ ID NO: 10013 - DNA, 373 bp, Glycine max
gaaacacaaacacaaacatagggtaactcgaatgcgatgcaaaactttgatccaaatcaaatgctgataaaattgaagggtcccttagatcttctttgaggtcactgttgcatctctcacctttgctccaacgccacgttgctttggttggagggagatgattgatggagtccagtgaggatgggagcatgtcatatagagagttccatgcgaatggaagccgcatggttacatcagaagttgaggccaagcttgatgaaggaaatattcaagaggcagaagatgcattgcgagaagggttgtcgctcaattttgaggaagcaagagctcttcttggaaagttggagtatcacagaggtaatgtacaaggtgc

SEQ ID NO: 10014 - DNA, 705 bp, Glycine max
ggtgtgcaaaacagagatgagtgcaaatcagaggagtactgctccaccctttaaggaggaatttgcaactgtactaaggatgactcattccttaaatgatgctcaacctgtacctgcaacaccagcatcattttgcaatcctactaattgcaatattggttgtgacgatgttgttcagaaccaaaaaaatgagaatgaaaccccacctgcgacacaaaattcaaagccaaaacgaggaagacccttcaaaacgccacctgaatcgattaaaaattggtatgttatacgcaaagaacgaaagatcgccaacaggttcgatacgagttattttcataaggagacaggctttcggtgtcggtctttgaaggagattaagaattacgagaaatatggaagtcctcctcgacgtcacaaagtgaaaacacaagccaaagaagaaagcaatgacaaaaccaaaaatgaaacagaagaaatggttgttgctcaaagaaaagcaaaagcagaagttatgagaacttttgttgaaaagtttctttcgaaagcttattacaatcagcttcacatgttcgacccataatcaataaaaatcaactattatataatgttcaaatcgactgaaaaacattgtcatcagtttatttaatacctatgttgacaacttccatgtgacccaggattttcatatgattttattttgactttccc

SEQ ID NO: 10015 - DNA, 521 bp, Glycine max
  unsure (1)..(521): unsure at all n locations
gcgtccgcnnccacgcccgtccgtaccggtcttgtcgagaagacttatcagaagnngggccctccctcaatcctgtcagattcatagtattcaaagcacccttctactccctccttctcttttcaatggatgcccaaaaccccctcctcaacttccgcttcacaacccctttgaaccctatcagacccatggttcccttgaaagtttccaattccactgtgaaggggttgcaggaggaccaagtaaagaccaagttctgaggagcattgaccggtgttttcacctgcaaccaatagactcaacagcagcagcaaagtaaccagtcaccggaaagtgtgttggtgtagaagatccccttctcaggaaaactgacctcagagccggaaaacaaacgccgagatatggcccggagaaatctcaactctcgacgacgaaagaaatcgccggcaaagggaagaaaaagaagaagaagaagaagaatgaagcacgagaaccacagagcttgggaaacaagggagctg

SEQ ID NO: 10016 - DNA, 349 bp, Glycine max
gaaaaaatattgatggcaagtttcgtacagaggaggaaaacaaaaattaatttgaaaagcaagttgaaaaagaaagtagaagagtctccaccatgggtgaagaacttgctaagctttgttgaacttccaccaactgaagttatcctcagaagattgtttctctttggcttcatgggtggctggagtattatgaattctgctgaaactggacctgcttttcaggtggcaatctctttggctgcttgcatatattttctcaacgaaaagacaaagagcttggctagagcattcattattgggtttggagctctagtggctggatgggtctctggttcattgctggtaccta

SEQ ID NO: 10017 - DNA, 653 bp, Glycine max
ttcccaagagaggtttggctttataacatcggagtaggtagtcttgtgtacaacgttgagaagatttgtgatgaatctggtgaggatccggattgcagcaggtcggtgactgggaatagcattgctgatcacttagtctattatggcgtagacatgggatcagatgagcctagttcatgcagaattgttatggattctcatgttcagaatactagcatcagagattcaagaggaaacttaatcttgtccagagatcctgcaacccccctcatcaaattgggtggagagggtgacaatcaggaaaatcccattaatgttgattgaattggcattagatatctgttgcatgatatgttccagaggtttgccgtggggcattattcttcagatttcttctttcttcatggtccatacagctgaacaattttattgaacaggctagggctggaaggagtttgtatagtcttggactcgtgtacatatgctcatccttgtatatataactaataattctatattttttactgcataagtaataattcttgatactttgtcaattgtataatttcactttcaaattctactgaattccactcctcatttgggtgataattctttttacccattgtcgtatccaaagtttaattttacgc

SEQ ID NO: 10018 - DNA, 435 bp, Glycine max
ggtacctaaaaaacctcggtttcactctcttctctctccctttcctctactattcgctgatctcaattgcgtctcacccatccatcaaccttccaatacttctcggcaaaaccaccgacggtagcttccccttgttctcactcataatcttcagcccttacatctatttcgtcagaatcttctctctgctccgaagacttcgaagcggggaacctacttacacccaagtccacgagggtctctatgtcggtggctggccaccgtcgcctcagaagctgccacctggctgacccgccatcgttgattgcgcgtgcgagttcccgcgtgtgaaggatttcactacggggttgccttaccggtgctttccgacgtgggacacgaggtcgcctcaacccgctgatatcgaatccgctgttaagtgggcatctcgacaga

SEQ ID NO: 10019 - DNA, 520 bp, Glycine max
ccctctctctctctctctctctatacaatccctgcttcgttagagaatctagggtttccaactcccaaactcattcttcaccttctaaacaaacgcaggaggcaacatggcatttcttgtttccattacaaaagacggggctaactaatcttccaatatatggcaactgagagtccaattagaatctctgaagctgggagtaaatggccgtctcttaaggaagctgcaacttttggctcgccatcccgtcacatggcaacagaggatctgggtatatttttaaatggccataggtttcatggcagtggaaaggatgcagtacccaaccgcagtggcagtgcacctccgagcatggaaggctcatttctggccatagaaaacttgttatcccagaacaccaccaggaatgcgagcttgggatctcggaacagagctatgcaaaaatatgatagtggtaaagggtcttttcatttgtcacaaggaactcttgcaacacacaaggaggagtctgaggatgatt

SEQ ID NO: 10020 - DNA, 749 bp, Glycine max
agccaacggacctgctatgttggttgatgttccaagagatagtaatattaccgctcaagttatgaagtcgttgaatattccaaggggtgtaatacgtgttctcttccgaactttaaataccgaccggcggctgatgtttcagaaggaatgggactcaagctatgtgggattcacagccgatggagccaaatggctagtggagaacacagatatcaaacttgtaggaattgattacctatctgttgcttcttatgattacttgattccatctcaccttgtttttctaaaagacagggagatcattctcgtggaaggcttgaagcttgatgatgttccagcagggttatattcagtccattgcttacctcttaggttggctggtgctgagggatcaccaatacggtgcattctgattaaaaattagggtgtccacatgtctgtgttcggtgtccgcgtcggtgtcggtgcttcataggctggaactgataaattggcatgggggtgtggtgtccttatggagcaagatagtttcaatgttgtgcaacaacttttgtagcttatgtttacacttactaaaaacatgcataagcacttcaagaaatcattttgaaatggaaaataatgtatatatagataatttgcacgtagcattagcacttcgagaaagatgcaatggaataagttggcacaatggtgtgtctttgtggagcaagattagtaatgtttgttaactttagtggctcatgtgt

SEQ ID NO: 10021 - DNA, 456 bp, Glycine max
gagtaaaagacagaaacaagaagaaagagattcgagagaggagaggagagaaatttgaagaaacagcaaaggaaaatttccaattttgacgccttctcttttactgtatgtaatgtgagtcttgtcacttcccaacacctaccactgataattccatgccttcttcttattaaccccaccactttgcctctcctcagaatttcatgtgcctcatcttgtgttctccaattccctccaactacaccacagggcctggttagtgcctttactgtgacctcctctttcaagtgatgagagggggtctcagaattttccatttcaggttgggatcagacacccttttgagcaattaagaaaacccagagagcaaaatctcaccttggtaaggttttgtaagtggggttgaagttctggtgctacaatggcttcacacccatgggggtttttggagcataa

SEQ ID NO: 10022 - DNA, 493 bp, Glycine max
cttcccagctgtactttgcttcttctttctttatccgttccttcttcatcatcatcgtcgtcattctttaatcctggcaaaaaaaaattacgctactttcgttgcgatcgtttccaatttcatgcgctttcttgtgtggggtggattggtggtgggttggttgattttaggtttgggaaagaacgcgtgactttgatgattacgaggattaaattgcatcaacaagtctctatgatatggatcaaatgagtcaacaaaggcatggctattttcattccgaaagtatccatttcagaggcagcaacatctctccgcctaatgtatgcacactcgtgacagcctcagggcacggaactaatctagattcccattatttactagatgcttatgacaatggtatgatgtatggaatgacacaatacaatggagttcaacatcaacataatcttgatatgggtgttccagctgcggccaacttatattattctagcat

SEQ ID NO: 10023 - DNA, 363 bp, Glycine max
gctgtactttgcttctttctttctttatccgctccttcatcttcatcatcatcatcatcatcaccatcatcattatcattcttcaattctcgcaaaaaaattcgctactttcgttgcgatcgtttccaatttcatgcgctttcttgtgtggggtggattggtggtgggttgggttgattttaggtttgggaaaaaacgcgtgactttgatgattacgagattttctttacatggtgttaagcttttaatgactttcctagtgactattttattcactctggttggtacattaggattaaagtgcatcaacaagtctctatgatatggatcaaatgagtcagcaaaggcatggctattttcatt

SEQ ID NO: 10024 - DNA, 438 bp, Glycine max
ctcaattcttcgcgtaatttgatttcccgctctgaaaaccctaactaccactgagactaagttgagctgagaagagaagctgggagcgaatggggcagaagcagcgttcgagttccgatgccgacaacgaagtcaagaaacgacgccgtgttggtttctcaggcgttgattctggagttgaggccaaagactgcatcacaatctatctagtttcaagcaaggaggaattcgatgctccagagagttttgtcattcatcctgtggatctgaatagcttttttgatgatgatgggaaaatttatggttatgagggtttgaagattaccatctgggttagcagcatatcattttatgcgtatgctgatattacattccagagttcatctgatcgaggcaaaggggtcacagatttgaaatctgctcttcagacaatttttg

SEQ ID NO: 10025 - DNA, 388 bp, Glycine max
ctcgagccgattcggctcgagcgtgctcgagcggcgtttgtaaaatatctctttctctctctatctctggcctcataccaccgctaccggagccgctatatcatgttggagccaattgtcgctgtcacgtttaattttcatcattactaagttagtttaatagactctgtgctccattcattcaaatttcatatttatataggaacaaaacacactcctctccgctcttcccaattcctcaccccattgtcgattcccaaaccctacattttcgcccaacggcggattagtttccctattcctcactcaccaattaagtgtaagatggaggatgatgagaaacccacgggtaactcccatggcattgctgatatggatgttgctgatg

SEQ ID NO: 10026 - DNA, 360 bp, Glycine max
ggtgacgagaaagagtgatttctctctctcacacacacacactctcagaagtgagaacacacttgggctccattgcctctgaatgaaaaatcttacacaccccacaacgacaccgttttgacaaggttaaacaatgggatctaacattttctgagaaaattgttggttttttttccttgacgttggagccatcgaacagtttgtgaaatctgagatctaggctcctgggaacggttgttgaaggctttggattataattttgaattttggtttctcggttctctgaagtgagggaaaaatgcagaggcctccacctgaagattttctgttgaaggagaccaagccccaccttggaggcgg

SEQ ID NO: 10027 - DNA, 388 bp, Glycine max
gcatgcataagcgagctaaaagccacacttaagcgtggtttgtagatcttagtcatatttcaggaaataaggtagttaagcgtaagctccatcacgcttaagcgagagcaaagttgagctttagctgtttcttggatttgaagcttaagcgtaaaagaagctatgcctaagcgtggctgaagttggtttccaaggattgtagcttcagcgtaaaaggatgacacttaagccaggaccactttccaaaactggggcatactggtgttggcgcttaagcatgtctgcacctacgcttaagcgcccttacttcatcaaatcttttcttttctttcagcactacaagcccatatctttgcaaatattctttttaaatccaaatggagcgagc

SEQ ID NO: 10028 - DNA, 407 bp, Glycine max
gataggaagtttatagcaaacatttcagtctcaaacggagtgttaagggaagaactcctcaaatggagacacctttagtgatccagaagttcacttcagaatctgactacttgccggtgaaaagcttgaaggatttgaagtttgttttgtggacagagacagtgaagatatggagaatagcattccctatggcactgtctgcactgcttcagtttctcacaatctcctcaacttccatctatgctggccatcttggagacattgaactttcttctatctctgtttaccaaggtgtcatcagtgccatctattttgacttgttgtttggtatgtcatctgcattggttacactatgtggccaagcttatggagcatggcagattcaatcagcatgtatttatgttcaa

SEQ ID NO: 10029 - DNA, 426 bp, Glycine max
cagagatataaggctagggtttgagcagaaaagagattgtgttggattggtttccattcccaattcccaatcgtgttgggtggccatggattctctactggcgaactatgcctcttcagatgaagaagaagatcaacagccatccccaccaaaaacgacgacgttttcctcccttcctcaacccaaactttctctgtttcaatcccttcctcaacccaaatcttctctgtttcaatcccttcctccacccaaacaaccttccaccgaaagctcttccctccctaaccctaaccctaaccctgaccctaaaccccaaatcgaaaagacacaacccaaacgcgtcgtgcaaatcaggcccccaatcatcccttttccacaacctttaacacacgacgatgacgacgatgacgacgacgacgacgaaga

SEQ ID NO: 10030 - DNA, 1128 bp, Glycine max
tgtgaggacctttttggtagaattatacatataagtcctgttatgggtagattcattggcaagagttacagtcctagacagttgatgcgagcatctacggggactccaatttttgaaatttatgtggtaaaaaatgctgatgacacgtatcatatgcaggtagtgtatttgcgacaagccaaaggaaagtcaaggagaaaccctcaatctatacctgctaaaggcccatccaaacctgaggtggagaatgcatcttcagttgaggtgcaagaacctgaagagaagattgagagaaatgatgagaaaaacactaatatcgagggagtaactgaggaaggcattaaaagtgtcataaattttcttaaagaaaaaattccaggattgaaaatcaaagtcatgaatgttagcgttgaagaggaagcagcagaaaacaatgattctattaagcaattgatggaggaagatagcaataaaactggctccagtgagaatcatgaagaggaagttaataatcttgatgaacctgatgcggtcactctagaaagagatggagatgccacagaagaagaaaaggatttggaaatgaagcttttaattggtggggttgtacacaacaatgaagatactcctgtcaaggatgaatttatacgtcttccagctgaaataaaaaatatggaaaaggattcttttgtctttcattttgctagtggaaatgtagattatggtatcaaagaagataaaattcccaacatcaaagtagcagccctagcagcacaaggaatctccgagcttatgcctcctgatgttgctaatgcattttggagttctgacaaagtctcttctaaggtctccaaaagcatgcgtgatattgtcagagttgctatgagtcaagcacagaaaagaacaagattatctggggatacaaattttagccggattatctgttcaagaggggattctgatccttttgatggactctatgttggtgcatttggtccttatggcatggaaatagtgcatttgaggcgaaaatttggacattggaatgaagtgaacaatgaaaacaacacttcagatgttggattctttgaatatgtagaggctgtgaagttaactggggatcttaat

SEQ ID NO: 10031 - DNA, 529 bp, Glycine max
ctcgagccgctttcaaattctcattttcaagctgtttggtgtaaagatgggacaagtgcttggttgtgttcaagtgaagcagtcaactgtagccgtcaaggaatgtttcgggaagtacgatgatgttcttcaacctggttgccattttgtgccatggtgtcttggctgcggtgtggctggtgtcctttctacgcgtgtcatgcagctaagtcttcgttgtgaaactaagacaaaggacaatgtgtttgttaatgtggttgcctcaatccaatatcgagcattggcagaaaaggcatcagatgcttactacaaactcaccaataccaaagcacagatacaatcctatgtctttgatgttatcagagctactgttccaaagatggaacttgatgctgtttttgagcagaagaacacaattgcaaaagcagtggacgaagaacttgggaaggctatgtcagcatatgggtacgagatagttcagactcttattgtggatattgtgccggatgagcatgtgaagaaagccatg

SEQ ID NO: 10032 - DNA, 1189 bp, Glycine max
tcgcccacgcgtccgcttatgactggacttcataagagcttactttctcaatatggaaaattccttggactaaattccaatagggttccagccaataatgccgttgatcagtctgcagaggccttggctaaagcttggagtgagtataacaatcccagggctgcaattctggtcgtggttcaggttgaagaaagaaacatgtacgagcagcattatatttctgcacttctaagagaaaagcatcatattagaagcatacgcaaaacgttgaccgaaattgatcaggaaggaaaaattctgccagatggaacactttctgtggatggacaagcaatttcagttgtttacttccgggctggctacacgccaaaggactatccttcagaatcagaatggagagctaggctactgatggaacaatcttctgctatcaaatgccctaccatatcttatcatttggttggcaccaaaaagattcaacaggaacttgcaaagcctggtgttcttgagaggtttgtagaaaacaaagaccacattgccaaattgcgtgcatgctttgcaggattgtggagtttggaagactcggatattgctaaaaaagcaattgaaaatccagagctatttgtgatgaagcctcaaagagaaggaggaggaaacaatatttatggtgatgagttgagggaaaccctccttaaattacaggaagcaggttctgaagaagatgcagcatacatccttatgcagaggatatttccagccacttctccagcaattttggtgcgtgatggtaattgggataagggtcatgtcatttcagaagctggagtatttggtacttatttaaggaataaggataaggttatcattaataacgaaagtggctatatggtgcgtacaaaaatatcatcatcttatgaaggtggagttttgcctggttttggagtggtagatactgtatacctaacttgatggagccaacccccaagttatcaaagcaattcaaaacattatgtatggtttatatattaccactcaagtctcctgactcctgattttgtttgtatatctccgaaaacagtgaaagaagaaaagaggcattgttgtttcttttaattgctcctatgggatggtgtctgtactcaacgacctgtttgattctaaccaataaaaattgatgaactgttcttct

SEQ ID NO: 10033 - DNA, 351 bp, Glycine max
ctcagatattgttaaaaaagcaattgaaaatccagagctatttgtgatgaagcctcaaagagaaggaggaggtcttgtaccacttaaactttgactcaacactgttggaaaaaaatgtccgggagagaaacttacacaatgagctgtaattacttttcaggaaacaatatttatggtgatgagttgagggaaaccctccttaaattacaggaagcacgttctcaagaagatgcagcatacattcttatgcagaggatatttcccgccacttctccagcaattttggtgcgtgatggtaattgggatacgggtcatgtcatttcagaagctggaatatttggtacttattta

SEQ ID NO: 10034 - DNA, 484 bp, Glycine max
ggagcctttttttttcagtctaatttgttgtgttgtgtccacccagattcaaaattcaacttggaatctcttatatttgtcttcattttccagtcttatcttcctgtttgcttgtgacttctggtgtgtatcatgtgggtgtgaagtggatgttaaaacttaaaagtctcacctttttggctcattggtgatttgttttgttacattggtctggaatctgaagatggttgttcattgttaggcattgaggtttctgagcattgattttgatttggtggagaaagatgaaggatttctgtgggacacctggcactgttcttgggcttgttcttaagatttcacagttcatttttgctgctgggtctattgcttccatggctaccacaaccagtttctttaatttgactgccttttgttacttgatagcttcaatgggtttacaaatcatttgggagtttgtgcttgctttaatggatttgtatgc

SEQ ID NO: 10035 - DNA, 475 bp, Glycine max
gccactcactctgtttactctatcacaatcttattatactactatcttcttctttctctctttttttcttctaatatttaattatcaaaatttgtttttatagatgatataaaaattcgttttttgtgttgacgacttgcattattgcatatacataggcagcacaaaatccttttgttgagtcagtgagagaaagagagagagagggtgtcagtgatgcccttttgcttgatccgtcatttgtcaagataagattaagagggtacatatcttggtggtgatttgatacacaagaagaatgttgggtcgggctgcattttcccgaactgggagtttcaggcctgagaatttaggtcagaatgccatggccatgattgggaacgtttgcttctcattttttgttattggggttttggttttcaccattatggctgccacttatgaacctgaggatcccttatttcacccttcaacc

SEQ ID NO: 10036 - DNA, 488 bp, Glycine max
gaaagttagtagtagtaattgtgtagttgggatttggcgaagtcggtttagggtggaaaaggataagaatgacggtgtgcgcagtgcgcctttccctcacacacactccctcctaattgcaatttaataaatccacctcactccttcatccattgaatgattctatcttccaatggatcctcctctcatcactgactccacattctcccccgcttactctctcgccgagatttggcccggaatgccccatttcccccctcccttcccccacccctcctccgccgatcactccaccctcaccgacctcaccgccaccccccgcaagagaaaggactgctcctcctcctcctcctccgcctccgccgccgccgaggacgactgctccaaggtcctctcctccaccaccaccgccactgccaacctctccaataatgattctggtagcaataaacagatgaagttaggagggtccagtgttgaaaacgatg

SEQ ID NO: 10037 - DNA, 411 bp, Glycine max
ggagtcgaatatccatcactcactcacacattggttttctctctctgactgtcaccctcatccattaacagtctccatcactctcctctccctcctaattacaatttaataaatccacctcactcattcatcccttcttcactcttccaaaaccattgaatcactccaatggatcctcctctcatcagcgactccacattctcccccgcttactccctcgccgagatttggcctggaatgccccattttcccgatcactctcacctcaccgccaccgctcgcaccaagggaaaggactccaccgccgccgacgaggtcctctcctccaccaccactgccaacctatccaataatgattctggtagcaacaaacggatgaaggtaggagggtccagttttgaaaacgatggt

SEQ ID NO: 10038 - DNA, 595 bp, Glycine max
aaatttgaaaagagcgatagacaaagagagaaatggcatcggtgtccggaaacataaagggtttttacagacagaagaaaaccaccgccaccaaaaaatcttccaaaaaatctccgattcccgccgcggcccaatcaccggccctcatatcccacggcggaaaacccgacctagaagatgagtacaaggagagcgaggtggcactgcggcaattcgacctgaacatggcgtacggaccttgcctcgggatgacgcggctcgcgcggtgggagcgcgctcagaggctcggcttgaaccctccgcaggaaatcgataggctcttgaagagtggcaaggttccgcccgagtccttgtgggatggtcgcatttaggatcccttttgttttgtatgaaaaagaaaaaaagaaatttaaatccttatcgcttattgtgtagtttttgggttttgcttaggaaaatcatcttctggctgagttccttgttattatgtgactctaaaccaagcattatggatgctggttttagaaagaaaaaaaaatgttgttttcttgcttccggttcccagctgttgttatagatcgtgatttgctctgcc

SEQ ID NO: 10039 - DNA, 362 bp, Glycine max
gaagttcagaccatttcaaaattcaaatttgaaaagagcgatagagaaatagagaaatggcattagtgtccggaaacatgaagggtttttactcgacagaaaaaaaccatcgccaccaaaaaatctccgattctctccccggccatcatctccctcggcggaaaacccgacctagaagatgagcacaaggagagcgaggtggtgctgcggcaattcgacctgaacatggcgtacgggccttgcctcgggatgacgaggctcgcacggtgggagcgcgcacagaggctcgacttgaaccctccgcaggaaatcgagaggcttttgaagagtgggaaggttccgaccgagtccttgtgggatgg

SEQ ID NO: 10040 - DNA, 664 bp, Glycine max
ccatcgagccgaatcggctcgagcggctcgaaatcatcatcccctctccccaacggataaagagagagaagggtcccttcattctctcacacagaaaaatggcagcgtcagtttcgtgctcatggctaacccttccctcccaaatgaggagactttccctcacatcctcttcttcttctctttccatctccaattctgcttctctcagtttctccagaaacctctcacaccctctcttctcacaaggtaactgcttgtcgctgagcacagtgcagaggcgcgcgtctgtggtctgcgaggctgcgccgaaaaaggtggattcggctgtgaagagagcgcgccaagccgagaagcgccgcgtgtacaacaaagctcggaaatcggagattaaaacacgcaccaagaaggttttggaggctcttgaagtgcttaagaagaaacaagatgcgcaggccgaagaaatcctctccattgagaagttgatcggagaggcatactcgataattgacaaagctgtgagagtaggcacactgcacaggaacactggagctaatcgcaagtctcggcttgctcgaagaaagaaggcagtggacatccatcatggctggtataccccaactcctgaagccagtgtctgaaactatccacgtgctagtttacattg

SEQ ID NO: 10041 - DNA, 858 bp, Glycine max
gggtgacaagggagcaagggtcctttgattggttcaaaggggtgatgaatgaggtggctgaagaggatcataagggggtgattgagctccacaactattgcactagtgtctatgaagagggtgatgctcgctcagctcttattgctatgttgcaatctctaaaccatgccaagaatggcgtggacattgtctctggcacgcgtgtaaagtcccactttgctaaacctaattggcgcgctgtctacaagcgcattgcggttagtcatccacgagctcgtgttggggtattttactgtgggccaccagcgctaaccaaagagcttggtcagttagcttcggatttctctcacaacacaaacacgaaatatgatttcctcaaggaaaatttctaataagatggagattgttgagggcaagatggtcttccagctttatatcaccccatgaagattattacaccatatccttgttgataataattaatccatgtgcttcaatgtaggaataataattacgcccctgtataattgcgaaagctttgctttaaggttaaaatggttgtttgtgggctaccagataccaaaggtgtgattggatggcaacggcatcagttccaaaagtgaatcacgagatgatgtgcaatgcgagtagcagaagattacatacttaaacatttcgtggaggggaataatttttccaaccggaaataggtggcagcacttacattacatgaacctcataagaattagtccaggtgcatcatggactctacaaggttgattgtgtttaaatattaagcgatcgatgttatggaaatgaagacctataaccattgtagcaagtaacattttgcattgt

SEQ ID NO: 10042 - DNA, 371 bp, Glycine max
cccaattcgaaaactccgcgcgtgctacaaccgttcgctcctattctattgtaacttcgtattagcacaaaacaaacaaaccctaactctaacccttgtcgaaaccccttatccgatcatggctactgatgcccgtgactcgcgtcgcaagtatcgccgatcatcctctccggaggacgtggacagatcctcgaagcgccacaagcaccgccaccacagccaccgccaccgccacgggagcaaaaaacgcgacgaagagattaaattcgatgatcgaacaattggtgcggttccttctccaactccgcacgggcatctccctgacgacgatgatgtggaggagggagagatccttgaagatgaggctctcg

SEQ ID NO: 10043 - DNA, 495 bp, Glycine max
gacaagaaaactgtagaaagagtaagaaggatttggaattgagaatttccatggcggcggcgacgaacttgttagcaacactgggggatctggagagggactccttcgtggctcttctttcgaagctgatcgctgaatcgaagtacgtccagaacaacccgccggagctcattccccaagaggacagagtggtgaagcacgtcttggacgttctgttaccgttcagcaccaccaccggcggtggacccttgctcgtaaaccacgtcacctaccacgccggcagagggaacctcatcgtggagtaccccggcaccgttcccggcaaaatcctctcgttcgtcggatgccacatggacgtcgtgaccgccaatcccaacgactgggatttcgatcccttttcgttgaccgttgacggggataagcttcggggtcgtggaactaccgattgtttgagacacgtggcacttgtcaccgaactcgtgaggaaactcgggg

SEQ ID NO: 10044 - DNA, 610 bp, Glycine max
acctcgagcgaatcggctcgagaaaagaaaagctagcgtcatcggaccttctccggcgtcgaccatcgccgtcgcagacgacggcgcccatggctcatccgccgttggatccgtactacctttaccaacaacaagatgagcggagcaacatcaacacgttatttgtctccggtctcccagacgacgtgaaggcgcgtgagattcacaacctcttccgccgccgccccggcttcgactcctgccaactcaagtacaccggccgcgccaaccaggtcgtagcgttcgccacgtttttcaaccaccaatcggcaatggcagcgttgcacgccttgaatggtgtgaaatttgatcctcaaactggatctgttttacatattgaacttgccaggtcaaactctaggaggaagcgtaaaccaggtggtgaagcctacgtggttatagataaaaggtccacaggggagcctgatcttcagggatcatcaagtgaggacggtgacagcgaccctgatgaaccatcagacagtggcgacaaccagggtgatttagcaatcatgacaagtgatgaaacggctgttggttctgacaatgctgtatctgtggagcaacatgg

SEQ ID NO: 10045 - DNA, 445 bp, Glycine max
  unsure (1)..(445): unsure at all n locations
ggaagggaagtaaataaacgacactcacactatactaaagaatttcgtttcgtttgtacaaaacaaaagctagcaccgttctgcggcggtcccctccgtcatcgtctttacagagcttccccggtgaccacaatcgccattcgccgccgcagacgacggcgctcatggctcagccgccgttcgatccgttctacctttaccaacatgatgagcagagcaacatcaacacgctatttgtctccggtctaccagacgacgtgaaggcgcgtgagattcacaacctcttccgccgccgccccggcttcgactcctgccaactcaagtacaccggccgcgccaaccaggtcgtagcgtttgccacgtttttcaaccaccaatcgggcatggcaagcgtgcacgccttgaatggtgtgaaattgatcctcanactggatctgtttacata

SEQ ID NO: 10046 - DNA, 687 bp, Glycine max
cccacgcgtccgcacaaatgatgcactagatccagctccagctgacatgtgcttggtgcttggcttggagcagtcaagggttgaaattgctgttcttctgaatgagttggcgtacttaaaatatgaagcacctcaggatacttctgccacagctgaagcaattttttcaaagcgacataatgtggctgttgcttactccttggttgagaggataataaaattaatatcaaatgttgaaggaaatgatggaaacctccttgatgaaggcacattgacaaagctgattcaccaactgaatgagacaattgctgttgtactagagtatttagaagatgcaaaggaacatgggcaaaagaaaggagatgatttacttgcttcagtgcgaattattgggagctatcttgcagaagcacctgtagcatgcaaggagaaggttcaagatcttttagggtatatgctttctctcgaaggtgaagatgaacaaaggcccttctacgctgtttgctttctgctacctatgttgtctcaaattactatggagattgaaggatgcaaagctttggcttcatgtaaaggacttgaggccgttttagattgcttcagtaaattagttgggtcacatgcttttctggttgaggataatggttgcatctttatggcatgtgatacaataatgaatcttttatt

SEQ ID NO: 10047 - DNA, 532 bp, Glycine max
cccacgcgtccgcccacgcgtccgcccctgcgtcgcgaacgaatgaacgaagagcgcagaacgacgcatatccaagactgaaagtttctagattcgtcacctgcgagaggtggagacatattttgtgataaccctatacccaatttggagcagtggtttgaaaagttttgggattgcggaaagaagtttgattgaaacatgcttcagattcggcttagtaaggctcctgcatcagaagggtcggcaggggtgaagctgtcgccggttgagactgttacagttgcgtgccccgaccatctggtccttgctgatcttcctgttgcaaagggcattggcgccgccactgctgcctcccttgttaagactttgggccgtagatctcgccgccagcttggcgagcgagtccatttctgtgttcgctgtgatttcccgatcgctgtttatggacgcctgagcccttgtgagcatgccttttgtctggattgtgctagaagtgattcaatgtgctacctgtgtgatgatcgaatccaga

SEQ ID NO: 10048 - DNA, 397 bp, Glycine max
gggacgcacatccggagggaccaaagtccagtaataaaaagacaaaaacagcttctgacaagcaaaaaccgagcccaaagtgttctcagaagaagatgaaaggcagtatgtctaatagataacgaataagatgatgcctgtctagatactgattagtgatccagaaacgtagaccaaagaggtcaagagaagaatattaatgaaaaggttgaaaactccacattccagagcggacccattttccacctccacgtgatttcagtctggaggttctaaagcagaaaccattcaacacgccttaagatgtggtggtgacttctcacaatagaataatttactaaatacttggccgtaagtattctatcaaacttgtaaattgacatttatggagagattg

SEQ ID NO: 10049 - DNA, 1724 bp, Glycine max
cgatatctccctggctctctctgacccggcccgaacaaaggaattatgattttcggcttggacaatgaatcgataaattaaaaaaaaaggaagggagaaagccccctctatttctccgaaaggaatgtgaaaatccagccgggccacgaaacgacacctctctgcgcttaaaacgactgcggcccacgatcgcgttcttcagttgaggcatgttattcgctgctcactcctcctcctactcttgttcttcttcttcgtcgtcttggccttcgcatcttcacaatcacatccaatagagacacgttgactttagtggaagaagaagaagaagaagagaatggaacaatcggttttggatgatataatcaatcgcctcctcgaagttcctaccctaccggctaagcaggttcagctatcggagtccgagatccgtcaactctgcgtagtttccagagagattttcttgcaacaacctaatttattggagctcgaagcacctattaagatttgtggtgatgtacatgggcaatattctgatcttttaaggctttttgagtacggtggattacctccagaagccaactacttgtttttgtggggattatgtggatcgagggaagcaaagtttagaaacaatttgccttctccttgcttataaaataaaatatcctgagaactttttcctgttaaggggaaaccatgaatgtgcttctataaaccggatatatggattttatgatgagtgcaagagaaggttcaatgtaaggttatggaagacatttacagactgcttcaattgcctgcctgtggcagcccgtgttgatgaaaagattttgtgtatgcatggaggactttctcccgacttaaataatttggatcagattagaaatttacagcggcccacagatgttcctgatacaggtttgctttgtgatctcctttggtctgacccgagcaaagatgttcaaggatggggaatgaatgacagaggagtttcatatacatttggtgctgataaggtctcagagtttcttcagaaacatgatctgtgatcttatttgtcgtgctcatcaggttgtggaagatggatacgagttctttgctaatcgacaacttgtaacaatattttcagcacctaattattgtggggagtttgacaatgctggtgctatgatgagtgttgatgagacactaatgtgctctttccaaatattaaagccagctgataaaaaagcaaagctcaactttggaagtactactactactaagccaggaaactctccagcaggcataaagtccttcctgggtacaaaagtatgaagttaattttggtgaaattgatgccacaaccgtcagcttggtcttgaagatgtaatagttgaagaaaaggaaagtagagttccatttaatcatgatattttggaattgtaaaaacaaagggaaacaccatcatgaactatgtagaccgttgttttccactggtacaaatttgcattttgaggtggacagcctctccttgttttcttttgtacactagtagctggtatatgtcgttctgacttctaaggttctcaagcattgatggatacatctgcatgtgttctgaaaactaattaaaaatgctcttacaattggtgtatgaatggcagttaagccagtaaaaaactaaaaatggatatggtcctcaaaataaaagatcactttacacctaaaaaggactaaaa

SEQ ID NO: 10050 - DNA, 544 bp, Glycine max
ccctcgagccgaatcccctcgagccgctcgagcggctcttcctctaacctaatcaaatcctctcctctcaaaccaattcccacttttcctctcttcgcctcccctcaggaaccaatgtccataatcaccccacgccgtcatcctcaaacgacacccttccgctagcaaaacgactgcggtttggtcgtcgtcttccccgaggcatgctcttgggatattattattcatcatcgtaatcacaccctacagagacgttgactttgtgctttttctgggaggggaacaaatggaccaagctcttctggacgacataatcaatcgccttctcgaagttcgcagccggccggggaagcaggtgcagctgtcggagtcggagatccgccatctctgtgccgcttccagagagattttcttgcagcaacctaatttgttggagcttgaagcacccattaagatttgcggtgatgtacatggtcaatattctgatcttttaagggctatttgagtatggtggactacctcccgaggccaactacttattttt

SEQ ID NO: 10051 - DNA, 434 bp, Glycine max
gatgggtatgagttctttgctaaccggcagcttgtaacaatattttcagcacctaattattgtggagagtttgacaatgctggcgctatgatgagtgtcgatgagacactaatgtgctctttccaaatattaaagccagctgataaaaaagtaaagctcaacttcggaagtactactactactaagccaggaaactctccagcaggcgtaaagtccttcctgggtacaaaagtatgaagttaagtttaagcttggtcttgaagttgtaatacttgcaagaaaaggaaagtagagttccatttggtctcctatgatattttggaattgtaaaaacgaagggaaacaccatcatgaactatgtagaccgttgttttcaactggtacaaatttgcattttgaggtggacagcctctccttgttttcttttgtacact

SEQ ID NO: 10052 - DNA, 446 bp, Glycine max
gaactttttcctgttaaggggaaaccatgaatgtgcttctataaaccggatatatggattttatgatgagtgcaagagaaggttcaatgtaaggttatggaagacatttacagactgcttcaattgcctgcctgtggcagcccgtgttgatgaaattatttaagtcgggagaaagtcctccatgcatacacaaaatcttttggatcagattagaaatttacagcggcccacagatgttcctgatacaggtgtgctatgtgatgtgctttggtctgacccgagtaaagatgttcaaggatggggaatgaatgacagagtagttttcataacacatttggtagctgataagggtctcacacatttcattcagaaacaatgatctgtgatcttcgttgtgtcgtcgctacatcaggtttaaatctcctgcccttgggctgctataatgt

SEQ ID NO: 10053 - DNA, 623 bp, Glycine max
  unsure (1)..(623): unsure at all n locations
agaggattagcttcgtagtttggtccaagcggttgcttttggtttttcttgcacttcacatgtttttttttgtaacggttttgggtgtgagagtgaagagcacacttcaactattgagaaccgttgacctccatggctgtgacatcacctcttgtcgtagcaggttctcaacttcggtgtcacaattttagaagaaccagacactgggctcttacactgagttgggaaaaacagcagctgaagagagcacagaagtgtggtggggatgagaatccatggaagccagtgaagatagtgatgcgtgtggttgatcatcatccaagggatggtgatgtctcctatggactgcacaaggatttggtctcccttccaaagccattatccatatctgatattgtggctgcttctgatgatcatgctaaagtacggatatcatataaggggataccgggatcatacagtgaggatgctgcactcaaagcttaccctaattgtgaaacagtttcatgcaatgactntgaagaagcttttaaggctgttgagatatggtgggctgacaaagttatccttccaatagaaaatacatctggnggaagcattcatcggaactatgatttacttct

SEQ ID NO: 10054 - DNA, 527 bp, Glycine max
gagagtgagagagcacacttcaactattgagaaccgttgacctccatggctgtgacagtgggtggactcgcaagttctcaactttggtgtcacaatttgagaatcagacacagtgctcttacactgagttggggaaaaaaagcagctgacgagagcacagaaatgtggtggggacgagaatccatggaaggcagtgaagatagtgatgcgtgtggttgatcatcctcaaatggatgattatgtctcccgtggagtgcataaggattcggtctcccttccaaagccattatccatatctgatattgtggctgctttggatgatggtgctaaagtacagatatcatataaggggataccaggatcatacagcgaggatgctgcactcaaagcttaccctaattgtgaaacagtttcatgcaatgactttgaagaagcttttaaggcagttgagatatggtgggctgacaaagttatcctttccatagaaaatacatctgggggaagcattcaacggaactatgatttac

SEQ ID NO: 10055 - DNA, 543 bp, Glycine max
gaggggcaaagagatcgaggaaggtgataatggaattttggccagaatttcttgctagtagtacgggtaaagagtttgtggctggaggatttggaggcactgctggtataatctcaggttacccattagacacgctccgtgtgatgcaacaaagctccaacaatggctctgctgccttcaccatcctcagaaatttggtggccaaggaaggaccaactgctctgtaccgtggcatggctgcacctttggcctctgttacatttcagaacgctatggttttccaaatttacgcagttctctctagggcatttagcacgtccgtttctgtcaacgaccctccttcctacaagggtgttgctttaggaggattttgctctggcgctttgcagagcatgctgctctcccctgttgagtagttaaaattcgccttcagcttcagaacacaggacaatccacagaaccacaaaagggtcccataaaggtcgccaacaacatatggaaaagagagggtcttcgtggcatttatcgaggacttggcatcac

SEQ ID NO: 10056 - DNA, 954 bp, Glycine max
gattgattaacatggtggtagtaaagcgcttcagccatacgtgacattgaatgttgcttctccttaattaggatgttactgataccgaataaaggttggatcaagatcagtggggacataacattgtgtccgcaggttccttcactcagtgcaaacatttcaccacacacttttttcaaacccaatcatcgctgttaacttggacaatatttcaaagaagataaacatgtgattctctttcagttccttgccttctatggggttgaacttgggagcacaaccataaccataacaatttcatcatttcatgcacagtggtagtagttattatcctctgctcagctcaccctatataaatccccgaattacggcaacttgaaaacccaccaaagtttccttacgcattctcattgggttcagtgagagttctttcttttgtttgcaactcattaaagttaatgcctttcaagtccattcacactgttgtcagttttcatagagagatctagacactttaaccatttggggtgtgaagaacaatcaaactaacttgtggggtgtgtgtgaggttcatcaatcttcatcaagagtcactgaattggtgaccctttgatcaaagggccaaaagggtacccgggcacctccccaatcggttgaatttcgcccctccaaataatggtgtttggaaatagcctgttttatcccattctgggttttgcatcttttgtggttttcatttacatgtcttttgggggcataaagttcagttttttggaggaagggccagaattgagctttgtggagagaaatggaacacagtttgtgttggatggaaaagcgttttatgtcaatgggtggaactcttactggctaatggtccagtccgtggatgtttattcgagatccaaggttcgggaaatgatgaaaactggtgctaagatgggtctcaccgtg

SEQ ID NO: 10057 - DNA, 720 bp, Glycine max
cactcgagacagattagggtaaccaaagttccaaaccctaaacgctacgattttaattttctggttttctctttttcaatcggtgcttcctccggcggcgcgtgggagtgtctttggcgcgtgattcctagttccccgcttacctatgcttcgctcgacccgcattgtagagttcacgccggagagacggcggaatctcaccggacgatcgtgatttcgcatcttcatggcttccgcctaccggaacgaacctaattggccacggcatagaagcggtggagctggattcatgggaaaagtacctttctctaaccctaaccctaaccctaattctaaccctaaattagcgaatggcaagaagacccaatcggcgtccgatgatgcttcctctatcaaccggagatcgaacgacgccgcaactcactcccagtatgtgaccttcaacgtcgcttcgtgcaccaagaaggagctcaacgacttcaagaatcgcctcgtctcggagctcgaacaaattcagaagctaaggaatcaactcgggtccaccgcgtttcaacccgggcagagcctcaacggacatccaaagaaaccgttaggcaagaaaatttccggcaacaagcgacccttgccatctaattccgcaaaggtactgtacggtcgcattcggaggttggaaacttgatgaagtgttgctcgcaagttttgcaggagctgatcagacac

SEQ ID NO: 10058 - DNA, 493 bp, Glycine max
catcattagatatcccaagatagccttctttatctaactttttagacagtatctcactttaatattttttaaaaatctaggcttaaattcttctgagaaccaatttctggtttttatttcagaaacaattaaggtttattttttatttaattcacaattgactgatgtgtcattggcttcgatgtcagagtactgtgagaagtatgctaaacccgaagacataggggaagccacagaagagaaatccagcgatgaggagatgagtgaagatgaatatgactctagtgatgaacaggttgttggtaaagcagacccctagctttgcatgcatgtcctgttcttaactttgcattttatctgtacatgatgttcttcttctagttctgttaattcacctcaccacatgtgagcttatcatggataaggggggaaattccccttcctttctagtttccctgtcgctgtaaataaagtaccattgatttcctgatgc

SEQ ID NO: 10059 - DNA, 937 bp, Glycine max
ggcacaagcaaagttctcccacaaacctcttctttctcttcctcccaaacatgtttctctttctctctctctctcttaattcctgaaaagcaagtagctaaggaaaacaaaaacatcatcacagaaactcacaaaggaaaaacaaacaaacaaacaaaatgtcttctccaagcaagcggcgagaaatggacttgatgaaactgatgatgagtgactacaaggtggagatgattaatgatggaatgcaagagttttatgtgcacttccatggacccaatgagagtccttatcatggaggtgtatggaaagtaagagttgagctgccagatgcttatccttataaatctccttccataggctttatcaataagatctatcacccaaatgttgatgagatgtcaggatcagtttgtcttgatgttatcaatcaaacctggagtcccatgtttgatcttgtcaatgtgtttgaggtgtttctaccacaacttcttctgtatcccaatccatcagaccccttgaacggagaagctgcagctttaatgatgcgtgatcgagccacttatgaacaaagggttaaagagtactgtgagaagtatgctaaacctgaagacataggagctgccacagaagagaactccagtgatgaagagctaagtgaagatgaatatgattctagtgatgaacaggttgctggtaaggcagacccctagccttgcatgcatgttcctgttcttctcattctatcttaacttgtgcatgatgttctagtcatgttaatttacctcattaaatgaaatgcacttggttgtggataggggaaaattctccttccggttatttagtttaccctgtaaataatgtatcattgatttcctgatgcaatcttatttattcttaatctcctcaagtgaatggattaagtgcttctttggctact

SEQ ID NO: 10060 - DNA, 982 bp, Glycine max
ggaaccaaattctagctcctttcagctgcacaagagtctccaatcccaactctctctctctctccacttgccaaaggaaaaaggctaaagagaaacccaccccacacacacacacacagaaatatgtcttccccaagcaagcgccgagagatggacttgatgaaactgatgatgagtgattacaaggtcgagatgattaatgatggaatgcaagaattttatgtgcaattccatggacccaatgacagtccttatcatggtggtgtgtggaaagtaagagttgagttgccggatgcttatccttacaaatctccttccattggatttatcaacaagatctatcacccgaatgttgatgagatgtcaggatcagtttgtctggatgttatcaatcaaacctggagccccatgttcgatcttgttaatgtgtttgaggtgtttctacctcaacttctgctgtatcccaatccatcagaccccttgaatggagaagctgccgctttaatgatgcgtgaccgaccaagttacgaacaaagggttaaagagtactgtgagaagtatgctaaacccgaagacataggggaagccacagaagagaaatccagtgatgaggagatgagtgaagatgaatatgattctagtgatgaacagggttgttggtaaagcagacccctagctttgcatgcatgctcctgttcttaactttgcattttatctgtacatgatgttcttcttctagttctgttaattcacctcaccacatgtgagcttattatggataaggggggaaattccccttcctttctagtttccctgtcgctgtaaataaagtaccattgatttcctgatgcaatcttatttcatgtttagcactttcaagtgactgtgctgtgctgtttagccatggtaatttaatcaacaatgttagcacacagtgtataaatgacactccttgtattgggtgattcatgtttgttccatt

SEQ ID NO: 10061 - DNA, 518 bp, Glycine max
cggaaccaaattctacttcctttcagctgcacaagagtctccaatcccaactctctctctctctctctccacttgccaaaggaaaaggctaaagagaagaaaaggcaaagcaagggaccaaccaaaacacacacagagaaacatgtcttccccaagcaagcgccgagagatggacttgatgaaactgatgatgagtgattacaaggtggagatgattaatgatggaatgcaagaattttatgtgcaatttcatggacccaatgacagtccttatcatggtggtgtgtggaaagtaagagttgagttgccagatgcttatccttataaatctccttccataggctttatcaataagatctatcacccaaatgttgatgagatgtaaaaatattgtattttttaatattgctgcgaaactctatactttgagtagtttgccttgtgttaattttaagtattgtgtgcgatcatattggattataataatttcaggtcaggatcagtttgtcttgatgtta

SEQ ID NO: 10062 - DNA, 311 bp, Glycine max
gaaaagcaagtagctaaggaaaacaaaaacatcatcacagaaactcacaaaggaaaaacaaacaaacaaacaaaatgtcttctccaagcaagcggcgagaaatggacttgatgaaactgatgatgagtgactacaaggtggagatgattaatgatggaatgcaagagttttatgtgcacttccatggacccaatgagagtaaattctcctttgtttttatctttgttacatgttttgaagctttttgtgaattgttttttgtgaaaaaagttgggttgctattgtgggtatgtggtaattaacatatattg

SEQ ID NO: 10063 - DNA, 332 bp, Glycine max
agtaaacacaacacacacacaaaggaaaaaacaggaaaaccatgtcttctccaagcaagcggcgagagatggacttgatgaaactgttaatccaccacttcttctgttttccttttcccttctatttccattaaagttataatttttttttctctaattgggggtctaagtttgactctcgattctgattttgatgttagttttttttttttttttttttaattaataggatgatgagtgactacaaggtggagatgattaatgatggaatgcaagagttttatgtgcatttccatggacccaatgagagtccttatcatggaggtgtgtgg

SEQ ID NO: 10064 - DNA, 745 bp, Glycine max
gtgggggtggcgccttcggccattggcacgtacacctcctaaaaacgacaacttgtgtcccgcagcttggtggctaaatggcagttccagagaggaaccataaccattatcatcatttctcagtgttgatcgtcctcatactcgtcgacaatgctctctgcatcaggttcccggatcggatcgcccaacccgccctcgacccgggagaccaacaccgcctgcatgtcgccgtcttcgccctcggcagcttctggagatccgaagcggtgttcggctgcttgcccggcgtcgttcgcaccaccgtcggctacgccggcggatccaagcccaaccccgaataccgaagcctcggtgaccacgccgagtccgtcaaggtcgagtatgacccgcagctgattagctttagggaactcctggatgtcttttggtcaagtcacgatcctaggcaagtgtatggccaaggtcctgatgtgggtagtcagtacagatctattatttttgttaatggaaccgaagaatcaagaatggctgctgtcagcaaagaacaggaacaaacccggtcaagaagcagcattgtgactactcaaattctgcaacttggaacattttaccctgcagagccagagcaccagaaatttgaactcaagcaaaataccatccttcttcagttaattgggaaccttcctgcagaggagcttgagaggtctagcctggcaacaaaattgaatggatatgtggccgagct

SEQ ID NO: 10065 - DNA, 487 bp, Glycine max
gatgtgttctagcaattttcctgtgtcgtatcatcaaagcgacggattggtgggggtggcgccttcggccattggcacgtacacctcctaaaaacgacaactcgtttccacggcttggtattttagcaggcaaaacgcaaggacctgggcgagtggcgaaatggcagttccagcagagaggaaccacaaccatttctcagttttgatcgtactctttcttttcctcgtccacaatgctctctgcattaggttcccggatcggatcgcccaacccgccctcgacccgctcgaccaacaccgcctgcgggtcgccgtcttcgccctcggaagcttctggagatccgaagcggtgttcggttgtttaccgggcgttgttcgcaccaccgtcggctacgccggcggatccaagtccaaccccgaataccgaagcctcggtgaccacgccgagtccgttaaggttgagtatgatccgcagctgattagcttt

SEQ ID NO: 10066 - DNA, 423 bp, Glycine max
ataatgtcgtcagagaaggaaactgagagtcggaagttgggttcggacgagattccgcgcgagttcaaaaccctagtcagctccaatgatctccactcccttaacctcatgcaacacaccatattgggaaggttgcaggacagcaatgcggtgttgtcgcatttcaacgacttctctcagcactgcttcgctgagatttccggcgacatcgctagaaacacgcgtgttttgaggtctgtcaagtccgaccttgattatatctttcagaagctcagaagtatgaaataaaaaattatggctacttatcccgatgcattttctgaagactcatcgagcgaagtgattgataggagaccggatcttgaaatgtccaagtaactaacgttatccgaacacagattagaatgagttatactaatgaaa

SEQ ID NO: 10067 - DNA, 641 bp, Glycine max
tgctctttgttgggcgattcgattgagtgcgtgttttttgtgtgtggagaatggatatacagagttcaatttgagaaagaggattcgccatttcaattctctctctctctctttcaattcgcagagaggttcagtttgtgtcatgtgcatacagcaatcggattgtttggatcagaagtcaattcgaggtgtagatggaacttgaagcaagtaatcaacccaagcaagagcgttcaaggacaagatggacagcatcccttgacaagatatttgcagacttggttgtcaagcagattcaactggggaacagaccaaacaatgtttttgacaagaaaacatggaatcacattcgtgatgagtttaataggcaaacagaccttaatttcaacaataatcaattgaggaagcatctagatgttcttcggactcgcttctataatttgaaatctgcttatgatcaaaataatgactttgtaatggatgattcctgttgcattggctttgaacagtgggaagatataggggtgcagcctaggaatgaaactgttaaagcgtaagattgtccaatatatgagcaactctgcacaatattcatagcttcagctgctgatgggaaatatgcccaatctagtcattacgaa

SEQ ID NO: 10068 - DNA, 586 bp, Glycine max
taagttttattttaatgtatgcagagtttgagtacctgacggataaaccaaacaatgggataaaatacaaattgcggaaggaagggaagcaaagagtgataattggaaatcctaataatcaaagccaaactcactcacacactcattggaaatcaactcaggcaaggcaaaggaagaagaaaccctaaaatattagtattgagaataagaagatgcggctgaatttgtgccacgtttcgcttggtttcgttctgaaattcctgaattttcttcaatgcttcgttggcctttccattctgctctattccctatggatgttcaacgaatgggaccatcgtgtccctcccgatcctcctcttcctcccgccttccatttctatctcaaactcaattccatcaacctacccgctccttggtgctactactattttgctcacatttttgttaatttttgttagaaatgtcattttgaagattccaacttgcaatctctcactcttcatttctcttataagttttattctcagtggtagtgttctgatttgggtgctgtcaagtgtattaaatgccatcaactacttttttc

SEQ ID NO: 10069 - DNA, 583 bp, Glycine max
ggtggacgagatctgattatctagtttgctctggcttttggaaatccgaataatcaaaaccaaacacacgcaaggaagaagaagaaaccctaaaaaattattaagaaataagatgcggctgaatttgtgccacgtttcgcttggtttcgttctgaaattcctgaatttccttcaatgcttcgttggcctttccattctgctctattccctatggatgttcaacgaatgggaccatagtgtccctcctgatcctcctcttcctcccgccttccatttctatctcaaactcaattccatcaacctacccgctccatggttcatctacaatttcatgggatttggaatattggtgttatgcatttctttcttgggttgcattgcagctgaaatgattaatggctgctgcttgtgtttttactctatactcgtggcagtgcttcttcttctggaagcttctctggtgggattcattgcacttgatagtgattgggaaaaggatattccactcgatccaaccggtcaacttgacgagcttcgagctttcattgaagataatatagatatctgcacatgggttggcatt

SEQ ID NO: 10070 - DNA, 386 bp, Glycine max
tatcttggttgggatgcttgacacatacttaaatgtcttggctttgtggcttctgtttcttctttttgctagttgggtggcatatgtgttttttgaggatacaatacaggggaaaacagtattcacttcctatggtactacgttgtatcagccatttcttttatttaccacatccaataatccagatgtttgggttcctgcatacaagtcgtcacgttggtattgcctgtttttcgtactctttgtgctggtgggagtttactttgttacaaacttgatccttgctgttgtttatgacagtttcaagagtgagcttgtaaaacatgtttttgagaaggatcgtttgagaagaactatgttggacaaaagctttgatctcttggata

SEQ ID NO: 10071 - DNA, 587 bp, Glycine max
cttgtatgttcataataagactcaataacctaattttcattcatattaagaaagatcattattgatgaatttaattaacagtgatgctaattaggatgaaaactactcacataaattcacaccaattcaaaactgacccatcaagttattacctaaacattcaagtagaagagaaaataaaaactacctctaatcagttaatggcaacataggattcaattcgtagaataatatttcctacttaatattatttttccttaactaatgataataaacattggctgtagtcttagatattttttttataagcaaataaattattgaatgaaagcaagacagaatgggtaaaagatgtaccaagttctgcgtatactgcaaagttaagttataaaaccaatacagacctttacctcataagacatcttttaccataactaaataaaaggagccaagaacacttcaggacaagatatttgtatcaaaacccaatcaggattctacaaaatcagaaaaattgtagtcttagatagagagggacaagaaggaaaaaaagggcataaattattaatatgatatgtgattcgacc

SEQ ID NO: 10072 - DNA, 356 bp, Glycine max
gaagaataagaggaacagggaacaaaaccctgatgttgagataattgttgccacgcagaacggtaacgtggatagtgccaatggaatgcatgttagagaggcaaaaaaggagaaaacttccatcaacaaaaagagaaagagcaaggacaagaatctagttaggaaacgaaaaccgaaaggccaagaggttgatttggatgagcaaagtgatggagtagtggacaatcctcattctaaagctgaggagatccaagggttagatgggcacatagattctgattctggagcagctatcaaaccatgtaggtcaaagaaagacaagaagaaaagaaaggaggttcaagattcaccggaaa

SEQ ID NO: 10073 - DNA, 771 bp, Glycine max
ctcgagccgaatcggcaagtgagcgtaggttggaagcagagagatggaaggttgggacccgaatacgaagtcgacgctgacacagatccctctgctggggacgaaggctggtccacgagacggggcggcatggacgcagaggctgaaggaagagtacaaggctctgatagcgtacacgcaaatgaacaagtccaacgacaacgattggttccgcatctccgccgccaatccggaaggcactcgctggaccggtaaatgctggtacgtctacaacctcctcaagtacgaattcgacctccaattcgatgtccccgtcacttacccttccaccgcccccgaactcgaactccctcaattggatggcaaaacccaaaagatgtataggggtggaaagatctgcttgactgtgcacttcaagcctctctgggccaaaaattgccccagatttggaattgcacatgcactttgcctaggccttgcaccgtggcttgcagcagaggttcccatcctcgtggattctggtatgatcaagcacaaagatgataccgcaaccacatcaactgaatcttagttatcatatgtctcactgaaactgtaaaagtagaattttgttgcctgattggtcaaaggaaataaatgagctgtctgaccacaagtttacaggatcttccttgtgtatccgcagatattgacatattctggcaaattaatatacatgcaacatggctaataccccttttgatctaaacttgattctcaatcaaattcccc

SEQ ID NO: 10074 - DNA, 308 bp, Glycine max
acaagggggcggcgaaatgggaaaacgagagaagcagaagcagaggcacgagaagggacaccgtggaagagggtctttcaactatcttcaagaggaccatgattttgatgacactccaagaccctcaccctctgaagaagaatgtgctgatgacagcaatgaggaaaaagaagaagaagaagaagaagaaggtcatgaaaaccaatctcatgatatgccttccaagttcctcctttaccaacaatctgtgcagtctcccaaaggagacataagttatttgcaaaagttctttctcatgtacgtgggtg

SEQ ID NO: 10075 - DNA, 489 bp, Glycine max
gaggggcaaagagaaaattcaaaataataaagtattcaaatatcatcatccattcctctaaccctctttcaaccttcacagatctcactagccataccacaaatcattcattctccttccctttctaaacccctttttccaaatcaaggagcaacgggacctgctgaagatgactccaggattatagtctttagggtgttttttttttctttatgtttttgctgactatggcttatgatgccattatggactatgttttttctattctgctttagttgtttttgttatctcttatttagcaatagctagttagttggtggaactttgaagtggttaatttgcacttttgcttgaagctgactaaagcttgttggtcgtgttgctgactttttttttttgttttgatgatgactccttggcatgcaccattggtgtatcaccccttatgaaatgacatgcttattaatgaactctatatttctgtttgat

SEQ ID NO: 10076 - DNA, 642 bp, Glycine max
gggctatgtgatatatattgaaattctttagttgtaactgacaaagttttctgagaaaataaggattattattgagagaatggctggctcatcggaagagggacaagtcattagctgccacaccgttgaagaatggaacgatcaactccagaagggcaacgaatccaagaaactcattgttgtggattttactgcttcttggtgtggaccatgccgtttcattgcaccattcttggctgagctggctaagaagttcacaagtgtcatattcctaaaggtggatgtggacgaattaaagagtgtttctcaagattgggctattgaggctatgcccacttttgtgtttgtgaaagagggaacgcttctggacaaagtggtgggagcaaagaaggatgagctgcagcagaaaatacagaaacatgtggcttcagctagtgcttaatctttcaccttcaaaagagacataatatatatgctttctttttataatcttgtactagacttatgttggtatttctgttattgcaccaatcagcttttcaaatgtgatgactcttatcatctatttctgaatagtacctggtcaaaactacgtcttaaaaaaaaaaaaaaaagggcggctccgactagtagctcgcgacc

SEQ ID NO: 10077 - DNA, 568 bp, Glycine max
tgtcatattcctaaaggtggatgtggacgaattaaagagtgtttctcaagattgggctattgaggctatgcccacttttgtgtttgtgaaagagggaacgcttctggacaaagtggtgggagcaaagaaggatgagctgcagcagaaaatacagaaacatgtggcttcagctagtgcttaatctagctcaccttcagaaactttatatatgcgctttcttttcataatcttgtactagacttatgttggtatttctgttattgcaccaatcagcttttcaaaggtgatgactcctatcatctatttctgaatagtagtaactggtcctttcttccgtcttaaataatagtggatggtgctatatcatgaatcttaattacatagaccttcctgttttcccttttagtattagcacatatgggaattctattttactggtatgtgtttcttcttattggtatgtttagaacatgagagagaagttgaagttgaagaatgaataatgggatgcaaggttgttgattactaacctttctcttctttaaaataaataaagcaatggatggtt

SEQ ID NO: 10078 - DNA, 976 bp, Glycine max
tcagactagagagtgagaggtgggaaatggcgtacctgaacgctaggcgcaccttagcatctaccctgtcacgagctctttcttcttcatccgctagcgcctctcgctttcgcttcgcattcgcattcgcgttgctccccgccaaacaaaccgcacccaaccctcactgggcgagtttcgcggttcggactcaatcttcgggttcgggttactcgcccctgaacgacccgtccccgaactggagcaaccgtcccccgaaggagaccattcttctcgatggctgcgactacgagcactggctcatcgtcatggagttccccgataaccctaaaccctctgaggaccacatggtcaacgcctatgtcaaaaccctagctcaagtccttggaagtgaggaggatgccaaaaacaagatatactctgtttccacttctacatacacaggtttcggcgctctcatttccgaagagctttcttataaggtcaaagagttacctggagttctttgggtgctgccagattcatatcttgatgttcccaacaaggattagggtttctggtgatttatttgttgacgggaaagtaattcccaggccacagtatagatattcggataggcaacccagtaggagtagacctcggccacggcatgacagacggcggcaaacgatgcaggttgaaaggagagatcaacagaactggaaccaaggtcaggggggacctatgcagccatccactgcaatgaatggccaaaactttgcttccggtggagagcactaagaaatgcttaataggaactctgctttagaaatcatcacacatagaaaacagaaccatgtttttcttatgggggagtgatgatttaaggttctgaggtcatattttacttatgtcttttttgtgtggagaatggctgtgcctgaccatgaaggactttgataaataatatacgctcataaagttaatattttacttt

SEQ ID NO: 10079 - DNA, 372 bp, Glycine max
  unsure (1)..(372): unsure at all n locations
ggggggaaaacacaatcattccgttctcttaacctaaccggagtagtgatagtattagtatcaattcccccactattccattctagtattctattttatctctttttctttcttcgttttcaaaactctttccgacaactcagaaaccaaagcactcgcttctccttctctctctctctctctcataggcgtgcaggtgcaatggcgggtgcgatgaatatgaaagtcgacaagattcgtcaaatcgtgcgtctcaaacagcttatgacgcgctggaagcacatcagcctccgccgccgctccgacgacgaaccctccgccgcgcgccgccctccccccggcttcatcttcgtctacgtgggcancgaacgc

SEQ ID NO: 10080 - DNA, 921 bp, Glycine max
ggatgatgaatggtttaagaaagattataagcctccagtatctcaggtatagtgatacgagtggtgggatcaggatccaagattcgtatcactatacctgagattttggatgatgaatggtttaagaaagattataagcctcccgtttttgaggagaacggggaaaccaacctcgatgatgttgaagctgtctttaaagattctgaagagcaccatgtgacagagaagaaagaagagcagcctacagccatgaatgcatttgagttaatctccatgtccaaaggactgaaccttgaaaacttgtttgatactgagcagggatttaaaagggaaacaagattcacctcaaaatcccctgcggatgagataatcaacaagattgaggaagccgcaaaacctcttggctttgatgtgcagaagaaaaattacaagatgaggcttgcaaatgtgaaagctggaaggaagggaaaccttaatgttgccacagagatatttcaagtggcaccttctcttcacatggtagaggtacggaaggcaaaaggagatacattggagttccataagttctacaagaaactttcaacaagcctggatgatgttgtttggaaaacagaagatgatatgcaaatgcgagaaacaaagtgatgtggatattattatcattgtctattaagtgtaattttcttcgtgtctgaggttttactattttccaatttcttcattcgttatattcctcccccgtaggtttgtttggacattaattacatagtactcatttattgcataccatgctattattttttgaaagcatgcagagttcatgtaagaattttactcatccaacagtcgcggttatgttcatgaaacaaaaaattgtaagaaatgtgtacactgtatatatctatctatttatatcttttc

SEQ ID NO: 10081 - DNA, 1402 bp, Glycine max
attctctctctcttttttcttcacacatatatttcctcattattatattattattattatattattagacatacattccatgaaaaacagataagtattgatgagtaactgtttcaagttgttgttcccagcataaatagcagaaaatgagaaactctctcatgagttctgtctgattgcatagcattggttggtagttgtctcaaaaatctcttgccctttggccataatcaaaaaccaagacactgttcatcaagctgctcaattatcaagccaactttgcttggttccactgcagaatttcagtttattcttatctcggtagattggattgaagtagattccttataagtgggcataagttcaagtgtagagaatgagtcagcctaagattaaacgccgagttggtaaatacgaggtggggaggaccattggtgaaggtacatttgcaaaggtgaaatttgcaaggaactctgagacaggagagcccgtggctcttaaaattcttgacaaggagaaggtgctaaagcacaagatggctgagcagatcaggagagaagtagctacaatgaaactaatcaagcatccaaatgttgttcgattgtatgaggtcatgggaagcaagaccaaaatatatattgttttggagtttgtaactgggggggaactctttgacaaaattgtaaaccatggaaggatgagtgaaaatgaagcacgtagatatttccagcagcttataaatgctgttgattattgccatagcaggggtgtctaccacagagacctgaagccagaaaatttgctattagatacttatgggaaccttaaagtttctgattttggtttgagtgccctctcccagcaagttagggatgatggacttcttcatactacatgtggcactccaaattatgttgctcctgaggtccttaacgatagaggctatgatggggcaactgcagacttgtggtcatgtggggttattctctttgtattggttgcaggttacttgcctttcgacgaccctaatcttatgaacctgtataaaaagatctcagctgctgaatttacttgccccccatggctttctttcactgccaggaaattgattacacgaatcttggatccagatcccaccactcgtatcactatacctgagattttggatgatgaatggcttaagaaagaatataagcctcccatttttgaggagaatggggaaatcaacctcgatgatgttgaagctgtctttaaagactctgaagagcaccatgtgacagagaataaagaagagcagcctacagccatgaatgcatttgagttaatctccatgtccaaaggactgaaccttgaaaactcgtttgatactgaacagggatttataagggaaacaagattcacc

SEQ ID NO: 10082 - DNA, 888 bp, Glycine max
  unsure (1)..(888): unsure at all n locations
gcattggttggtagttgtctcaaaaatctcttgccctttggccataatcaaaaaccaagacactgttcatcaagctgctcaattatcaagccaactttgcttggttccactgcagaatttcagtttattcttatctccgtagattggattgaagtatttcttctctctttctctctccatctcttttcacgttttttgtttctaatttttttttttttcatcttcatgtctatcttcttctcatatgagtctcaaggtgttgtatatataacatgctgccttgtgcagcttgtgcggtacttgaaatttgaaaacttgatctgcctttgctttgttatttcattaacagcacccctttgggccatatattggttacctcaactgcttttctgttcatctttccagaattattgtaaagttccctttttttgttctgtcttttcattcttttttcaaagtgaattcctgggattttttgttttcaattgagggcactaaaaaaaaagaactgactggaatttccatttgtcttgctgggtccctgagatttgaagtgtgttgttttccttttggtgggtggatcctaagttcatgaattccctcttttctccagccaatttgttttgttgctgattaaattagttctgtctggcaaaggtttgagtctctagtgctggaaaattaatctttgtggtgattcatggtgtttttttttttttttttttaactgaggaccttcaattttgttttttgaacatcgatggttttctcacaatcacaaatctagtctccaaagttggtgatttcataagggtgtgctgntaactttcctgtttctttcatattcaagctcaattctggttgtgggtttatctcttactggaagac

SEQ ID NO: 10083 - DNA, 481 bp, Glycine max
gaatttttgtaaagtttcctttttttattctgtcttttcattctttttttcaaagtgaatttctaggattttttgttttcaattgagggcacaaaaaataaactactgactggaatttccaattgtcttgccgggtccctgagatttgaagtgtgtttttttccttttggtgggtggatccgaagttcatgaattctctcttttccccaaccaatttgttttgttgctgaataaattagttctgtctggcaaaggttgttgagtctctctagtgctggaaaattttgtggtgattcatgattttttttttaactgaggaccttcaattttgtttttgtgcattgatggttgtctcacaatcacaaatctagtctccaaaattggtgatttcacaggggtgtgctgttaactttcctgtttgtttcatcttcaagctcaattctggttctgggtttatcttttactggaagacagactttga

SEQ ID NO: 10084 - DNA, 426 bp, Glycine max
gaaaaacagataagtattgatgagttactgtttcaagttgttgttcccagcagcataaattgagaaaataagacactctctcatgagttctgtctggttgcatagcattggttggtagttgtctcaaaaatctcttcttgccctttggccataatcaaaagccaagacactgttcatacagctgctcaattatcaagccaaccttgctcggttccactgcagaatttcagtttattcttatctaggtagactccttataagtgcgcagaagttcaagtgtagagaatgagtcagcctaagattaaacgccgagttggtaaatacgaggtggggaggaccattggtgaaggtacatttgcaaaggtgaaatttgcaaggaactctgagacaggagagcccgtggctcttaaaattcttgacaaggag

SEQ ID NO: 10085 - DNA, 429 bp, Glycine max
attgcatagcattggttggtagttgtctcaaaaatctcttgccctttggccataatcaaaaaccaagacactgttcatcaagctgctcaattatcaagccaactttgcttggttccactgcagaatttcaggttattcttatctccgtagattggattgaagggtgtgctgttaactttcctgtttgtttcatcttcaagctcaattctggttctgggtttatcttttactggaagacagactttgaggtagattccttataagtgggcataagttcaagtgtagagaatgagtcagcctaagattaagcgccgagttggtaagtatgaggtggggaggaccattggtgaaggtacatttgcaaaggtgaaatttgcaaggaactctgagacgggagaccctgtggctcttaaaattcttgataaggag

SEQ ID NO: 10086 - DNA, 604 bp, Glycine max
cagtattggtctgcttaactataacatccagctatacactgattactcagatttatttaatctcactatcactctcactgcaaaaacaacacacagcaacaatttaataaataaataaataaaagtgggatagatgcaaagcccagatttataatcacaatctagagagagaaacaagcagactatgaaaccttctatctccgaatttctctctctaaaaccaccgtctcgttctcagagcagctgcactttctctccgactctcgctcggaggagcacttggatgtgagtggtttccacatcggttagatcggccatggcggaggtttccggcgaggggggagcagaggcgacggtggccacgccggtgctgccgttggcggtgtctggatcgttcaaggaagggaagagctcgtcgcggaggcgcgcgcattcgatgaggccgagcctcgacgcggacgagttcatgaacctgttgcacggttcggatccggtgaaggtggagctcaatcggttggagaatgaagtgagagataaggacagagaattatcagaagcgcaggcgcagatcaaagccttgaggctctccgaacgactcagagaa

SEQ ID NO: 10087 - DNA, 1033 bp, Glycine max
gcagcgtgtgaaagagaaggtgagggtggtggtggaagtgctgaaggggggaaatctggtgcgggaggctcacagagaaggttgtgggtgaaggatcgttcaggagcatggtgggatgaatgcaacaaagaggattttcctgaagaagattttaagaaggcttttaggatgggaagagaaacctttgacatgatctgtgaggagttgaattcagcaattgtgaaggaagacaccactttgaggaatgctattcctgtgaggcaaagggtggctgtgtgtttgtggcgattagccactggggaccctcttaggattgtttctaagaggtttggtttggggatatcaacttgtcacaagcttgttcttgaggtttgcaccgctattaagtctgtgcttatgccaaagtacttgaattggcctgatgaggttgcattgaggagggtgaagagtgagtttgagggtgtttctgggatccctaatgttgtaggctctatgtacacctctcatgtgcctattatagctcctaagattagtgtggctgcttatttcaacaagaggcacactgagaggaaccagaagacttcttatagtattactgttcaaggggtggtggatcatagaggggtgttcactgatgtgtgcattggttggcctggttcaatgcctgatgatcaggtgttggaaaaaagtgccctttttcaaagggctaatggggggcttctgaagggggattggattgtgggtagttcagggtaccctttgatggattgggttttggtgccttatagccagcagaatctgacttggactcagcatgctttcaatgagaagattggggaggttcagaaggtggctatggatgcttttgctaggttgaaagggaggtggagttgcttgcagaagaggactgaggtgaagctgcaggacttgccagtcgtgcttggggcatgctgcgtgctgcataatatatgcgagttgaagggagagaagattgaccctgagctgaaggttgatctggtggatgatgagatgg

SEQ ID NO: 10088 - DNA, 361 bp, Glycine max
acgcccacgcgtacgttctaagattagtgtggctgcttatttcaacaagaggcacactgagaggaaccagtagacttcttatagtattactgctcactgatgtgtgcattggttggcctggttcaatgcctgatgatcaggtgttggaaaaaagtgcccttttttcaaagggctaatggggggcttctgaaggcggattggattgcgggtagttcagggtaccctttgatggattgggttttggtgccttatagccagcagaatctgacttggactcagcatgctttcaatgacaagattggggaggttcagaaggtggctagggatgcttttgctctgttgaaagggatgtggaattgtc

SEQ ID NO: 10089 - DNA, 388 bp, Glycine max
atcttaaaagcatgttgaagcccctggtcacaattcttgtgttcttgatggttgccagtgctcaagatagtctgagtgataataccatttttgaagggaagcaaactgtgcgtgtctacaatggcatgaatgatggcattcttgtgtatctccattgtcgatccaaggacaatgatcttggccaacatgttcttgcctttggagagttccaaaaatggtccttcaatgataacctttttggcacaactcttttttggtgcacaatgaatgcaagcaatgtgcatgcaagttttgaagtttatcgtgccaaaactgaggaaaataagtgtgatacccaatgcaatagaattctaaaaaaagacggaggctatttttttaatcagttcgt

SEQ ID NO: 10090 - DNA, 863 bp, Glycine max
catcttttgatttgataacaacaatctcgttgtggttttccaatgctgcgaagtcgaagatctagctagaggcagagaacgttctccctaatcttctgccgatggcgatcttctacgctttggtggccagaggcaccgtcgtcctggcggagttcagcgccgtcaccggcaacaccggcgccgtctcccgccgcatcctcgagaagcttccggcggagtccgactccaggctctgcttctctcaggatcgctacatcttccacatactccgatcggatggcatcacctacgtctgtatggccaacgacaccttcggaaggagaattcctttctcgtacttggaagatatccaaatgaggtttatgaagaactacagtagagttgccaattatgcaccagcttatgcaatgaatgatgaattttcaagggttttgcatcagcagatggaatttttttctagtaatacgagtgccgataccctcaatcgtgtgaggggagaagttggtgagatacgcactatcatggtggacaatattgagaaaatattggagagaggtgaccggattgagcttcttgttgataaaacagcaacaatgcaagacagtgcatttcactttaggaaacagtcaaagcgccttcgaagagctctttggatgaaaaattttaaactcctggccttattgacatgcttgattgttgttgttctttatttaataatcgctgcttgttgtggaggcatctctctaccgtcctgcagatcctaattgtcactcttgccagtttatttgttttctgagctctgcaactatcaagatcgtacgataagcatttgacgacacttaagtattccatattcaaattta

SEQ ID NO: 10091 - DNA, 309 bp, Glycine max
gaatttccattgtcaagttctccacgttttgttttgataacaacaatctcgttgtggttttccaatgctgcgagcgcagtcgaagatctagctagaggcagagaacgttctcttctccctgatcctctggaaagttcttagccgatggcgatcttctacgctttggtggccagaggcacggtggtgctggcggagttcagcgccgtcaccggcaacaccggcgccgtctcccgccgcattcttgagaagcttccggcggagtccgactccaggctctgcttctctcaggatcgctacatcttccacata

SEQ ID NO: 10092 - DNA, 939 bp, Glycine max
ctgaaattgatgagaaagttcccatcccaattcggtggtttatcgcgttaagcaaaaaacccaatcaaaattcaaagtctctttgtttaccttgtttccctcattgctttgctcacattcaatttcgaaggcgtagagtgagatccgaacgatgaagagagtattcggcgtcaagaagaacaaggatccacccccttccattcaggatgcttccgaaaggattacaaaacgaggtgacacggtggatgacaagattaagaagcttgatgccgagcttagtagatataaagagcagattaagaaaactagacctggtcctgcccaggaagctgttaaagctagagccatgagagttcttaagcaaaaacgaatgtatgaaggccagcgtgacatgctgtacaatcagacgttcaatctcgatcaagttcaatttgctgctgagggcattaaagatgctcaacaaactatgacagctttgaagtctgccaacaaggagttgaagggaatgatgaaaactgtgaagatccaagacattgataacttgcatgatgagatgatggacctcatggatgtaagtaatgaaatccaagagactttgggtagaagctataatgtgcctgatgacattgatgaggatgaccttatgggtgaacttgatgcattggaattagacatgggaaatgagactgaagctgatggggtcccatcctacctccaacctgataaagaacctgatttggatgcagaacttaacttacctccagctccaacaggacaaacagctgtgccacctggcagatccaatgcgcagactgaggatgagctgggtttacctgctgtccctcaggcatccatacgcggttaaagaatgctttctatatcttggcgtactagtgcagtcacgagcatgcccttgtaaagatgtgcagatctggagaa

SEQ ID NO: 10093 - DNA, 447 bp, Glycine max
cagcagaagtttagtctggtggtaaatgtatccttgttgataaccacgaacaaaaccaaaatttcttgcgttcccatcccaattcggtggtttatcgcgttaagcaaaaaacccaatcaaaattctaagtctctttgtttacgttgttcgtttccctcattgctttgttctcttctctcttctctctcacattcaacttcaaaggcgtagagtgagatccgaacgatgaagagagtattcggcgtcaagaagaacaaggatcctcctccttccattcaggatgcttccgataggattactaaacgaggtgactcggtggatgacaagattaagaagcttgatgccgagcttagtagatataaggagcagattaagaaaactagacctggtcctgcccaggaagctgttaaagctagagccatgagagttcttaagcaaaaacgaatg

SEQ ID NO: 10094 - DNA, 494 bp, Glycine max
agaaaataggaaagaacgaaaagttcacacaaaaatagtagacagtggaatgcagcaataaattatacatatccagaccttgatacaatcattaaaaatatccactaaactattgttgtgcctttaaagatcttgtcttgacacaatttttgagtcaagcaaacaggttctaacaactaggtggatctgccatgcaaacaccagggtcaggagaaaaactgaaagagcccttttcaagaacccaacgcccttctttccactttactctgcagcagtttcgtcactgtcatctccttcatttctggtatccggtagtgtatcaagatcagttagagcctcggccacatcctcgtgtatatgagtatcagaagaatcaattgcatcttgttcagctgaatccatagtttcgttggcagaggaagagtctgatgtttcatcagtttcacctgttagtgtgtcacctttgaacatctcatcctctgtggcatcaacat

SEQ ID NO: 10095 - DNA, 755 bp, Glycine max
ctcactcgtccgcccacgcgtccgctttttctccacaaatcaaaagaaagaaaaaaatactactaataaaatagcttcttctgaatatcgtcccattctttactctgtaattaatgcataatgcatagtctcacaatccttttcgtggatcatgattctgtctgcagatcaaggtaaaaaaaaaaaacaaaaaaaaaaagagatggaatctggaggtaggttctactcagttgacgagttcagattggaccccaaatggctgattgatcctaaccatctctttgttgggccactgattggagagggagctcatgccaaagtctatgagggaaaatacaaaaaccacactgttgcttttaaaattgtacataaaggagaaactacagaagacattgccaagagagaagggcgcttcgcaagggaggtggcaatgttgtctagagtgcaacataagaatttggtgaagtttattggtgcgtgtaaggagccagtaatggtgatagtcactgagctgttattaggaggaacattgcgaaagtatttgtttagcatgcgccccaaatgcttggatagacatgttgcgattggttttgcgcttgatattgctcgggcaatggagtgcctgcattctcatgggatcatccaccgtgatcttaaacctgataacttgctattgactgaagaccagaaaacagtcaagctagcggattttggtttagcaagagaagagtcattaactgagatgatgactgctg

SEQ ID NO: 10096 - DNA, 387 bp, Glycine max
gagaacatagcagctgaaacccacgggaaacaaacccattcataaatgatagacaaatgagttgtttgagaaattgagtgttagaagaggaataagcatagacattggaatttggaagggatgaatctaaggccattggggccattggttaggatggctgcagttatatttggtggagtagccactttgaacttggcttctgctgctaccatcaaagtgcttcggtttgcatctgagaagaaacgggaaaaagttgcgttgccctgttgggtttgtagagggaaggggttttatatatgcaaactgtgcaacgggaactccaccatatcttggtcaccaatgttcgaccctattgcaattaacccctgcgtttgtccgacttgcgaa

SEQ ID NO: 10097 - DNA, 1307 bp, Glycine max
ctggacgacaaaaagcgaagaaaaacgcggtttttgttcccctgctctatctgactctgtctctctttctctctgcaaaaaccttcgttcatcgtcacacccacgaactcaaacaacaaatcattcattctttcaattgtaacatataaaaaaaaatgggttgtttcgccagcaaaaacgctgacaccaaggccagtagggccgcgcgctggcgatccacgggcatcgttgctttgcgcgattccaaattaaagacgtttccggatgaaattctcgagttagacagatctgttcgcactcttgacttgacgcataatcgaatagttgacattcctgtggaaattagcaagttaattaatgtacagcgcctgatattagcggagaacctcattgagagactgccagtaaatttggggaaactccaatctctgaaactgatgaacctggatggaaatcgaattacttccttgcctgatgaattgggccagttagtaaggcttgaacgcatatccatctcagggaatttgttaacatccttgccagcaactattggaagtttgagaaatctggtgcttttaaatgtgtcaaataacaagttacagtctcttccagagtctgttgggagttgcttctctttggaagaattacaagctaatgataatcttattgaagatcttccctcttctgtgtgcaatctctctcacttgaagtcactttgcttggataacaataatgtgaagcagatacccctgaatttattgaaagactgcaaagctcttcagaacatatcactgcatgctaatcctatatcaatggatcaatttcagctgatggaggggtttcaagagtttgaagcaaggaggaaaaagaagtttgacaaacaaattgattcaaatgtgatgatcggttccaaaggtcttgatgagggtgttgatctatgaggtggtcttaggcttgttgatggggttctttcagttgtacatttggatgagcttctggatgtagcgtggaatactgggtgttttgtccatgccttttatttcacaaatgaaataagtgtatggagatccttttgtcacgttgtatattattcttatttttattttttgttaccctatccagatttgcctataaatgtgctggcttgtagatgcaggcaatatccagcactagactaaatttcagaatatggtatttggggccattttgttgataatgaaatatgtatctcagcagctgtaaattacgaactttaaatatgatttgaaaggcagtgcattctatcccgaaaataaaaaaaaaataaa

SEQ ID NO: 10098 - DNA, 393 bp, Glycine max
gggtcttgggtgggacaacaaagcgcatagaaaaacgcggtttttgttcctcctgctctctctgactctgtctcggtgcagcacaaaccttccttcttcatcaattccacgaactcaaacaacaaataattcattctttcaaatttcaattctaacatagaaataagaataaaaatgggttgtttcgccagcaaaaacgctgacaccaaggccagtacggctgcgcgttggcgatccacgggcattgttgctttgcgcgattccaaattaaagacgtttccggatgaaattcttgagttagacacatctgttcgcactcttgacttgacgcataatctgatagttgacattccagtggaaatcagcacattaattaatgtacagcgcctgata

SEQ ID NO: 10099 - DNA, 360 bp, Glycine max
ctgaaacacagcaaagcaatgaggcggttttatctgaaacacaagaaagcaatgaggaggcggttttatctgaaacacagcaaagcaatgaggtggttttatctgaaacacaacagagcaacgaggtgattttatctgaaacacaacaaagcaatgaggtggttttaccagaaacacaacaaagcaacagggtggttttacctgaaacacagcaaacagatgaggcggttttatctgaaacacagcaaagtgatgagctgattacatatgaaactcagcccaacaatgatgtagtcatgtcagatgcacaactgagcagtgagatagtcatgcctgagacacagcccagcagtgagatag

SEQ ID NO: 10100 - DNA, 559 bp, Glycine max
aggggacatggaatcaatttgtccatcattttcaaataaagtacacattgttattcatatttatgtcacccgagaatcagatcctccattggaagagggatatagttacaaaccaataaaatcttcattctgtcctatggctagtgattgtggcatgtctgttttggttggtacaggagacaatttttggtctggactatatgtcatctcatctaccgttggctttgtgatattgctggctttgttgtatgtttactacgtaaccccatttcacatagaaacatggtggtacaggggactactatatgtaatctgcatggttgcaagtgttgttatctttggtggttctgtggttgcaatgtggcatatttgggaaaagcaaaattctttgaaggacaagtccaatgatacaaaggttgataagattcatcaaaatggctctttggctcccaaggctccaagtcaagtcagtagtattgcaaagtcaacggtcattcattatggttccaggccaaactttaaagaaatttatgactcgatatcagagaaatggggcctt

SEQ ID NO: 10101 - DNA, 889 bp, Glycine max
aattgaagcaattcatatcaggaatcacagaattgacacctgatgctgttcaagttttgagagctgcagatcagttggagaaagaccttgtgcagatagcagttgaggattcagtggaaagtgaagatggtggaaaggcaattatccgtgagatgcctccttacgaggctgaaggtgcaattgccaaccttgtgaaaatatggattaagactagaatagacagactgaaggaatgggtcgacagaaatctgcagcaagagctttggagtgctcaagcaaatcaggaaggatatgccccatctgctgttgaagttttgcgaattataaatgaaactttagatgctttctttcagcttccaataccgatgcatcctgcattgcttcctgaagtaatgaatggtcttgacagatgccttcagtactatgttatcaaagcaaaatctggctgcggatcacggaacacatttcttccaacaatgcctgcgttgaccagatgcactattggttcaaagtttcagggctttgggaagaaaaaggataaatctccaaatcctcagaagagaaatcctcaggttgcaacaaatggggatagctcttctggaataccccaactctgtgttcgcataaatactttacaatggatcctgggtgaatttgatgttctggaaaaaagaataattaccctattacggaactctgagtctgctcatgtagaagatttttcaaatggattagcaaagaagtttgaactatctccagccgcatgtcttgaaggaatccagcaactctgtgaggctgcagcatatagaattgtcttccatgatctaagccaggttttatgggatggtttatatgttggggattcatcatcttcaagaatttagccatg

SEQ ID NO: 10102 - DNA, 450 bp, Glycine max
ggatgtgagcatgggaatgtgggtagagcaattcaacagttcaaggccagttgagtatgtgcacagcttcaagttctgccaatttgggtgcattgaagattacttcactgcacattaccaacctccaagacaaatgacctgtatgtgggataagttgcaacaaaagggacaacccctatgttgcaacatgagataataacatagtctatgatcataatattcgtattatatttatgtacataggcactgaggacctttatgatctccacatattcatttattgtttaacctctcttttttttttttcttttcgattctcccaaaaatagaaggcctaggtgtatcatataaagttggatactgcagctattgctgaaggagcaaaccaatggtttgtaaatttgtaatgtagagaatgtaacagaagccgaatgaaatgattttttccgg

SEQ ID NO: 10103 - DNA, 787 bp, Glycine max
gagaaattattaaaaaagcatggaatgaagcagacataattgaagtttcacgaagtgaactagaattccttctagatgaagaatattatgagaggaagagaaattataggccacagtactttgctgaaaattatgaacaaaccaagaatcgacaagagtattaccattacactgctgaagaagtctcgcctttgtggcatgatcgacttaaattcctgtttgtgactgatggaacacttggaattcactactataccccttctttcgatgggtctgtgatgggaactgaagatgtgctcataacaccatatacttgtgatagaacaggctcgggtgatgctgttgtggctgccattttaagaaaactaaccacttgccctgaaatgtttgaaaatcaagatgttttggagagacagctacgctttgctgttgcagcaggaattatatctcaatggactattggtgcagttagaggtttccctactgagagtgctactcagaatctcaaagaacaagtttatgtgccttcattgtggcgattaaaattgtatctgtaacttcaatagagcttagcagagccttgaggcattagttggtactgattgggtgatgatttagttggaacttctctgcaagtgtgtgatataaaatgggggcagatgaacacaatcagatcgcaaaaattgtttggttgtttcgtttggctccaactcatgcatgtatgaacaggaggcggatgtcaattgaaaattctgcaggtaaaattcagatgtacactattcttgcc

SEQ ID NO: 10104 - DNA, 576 bp, Glycine max
  unsure (1)..(576): unsure at all n locations
gtcatcaagaagtcaaggatcaaagcctcttaatgatttagataagatgattcccaaagcaagggtaataagcaaggaggaaatttcagtgaaggaagccaaagagaagctattgcaagatatggaacagatgaaggagagattttccaaactgttgttgggtgaggacatgtccggtggaggaaagggtgtttcgtctgctttggcactgtcaaatgctttcacaaaccttgctgcttctatttttggtgaacaaaagcgcctagaaccgatgccggcagaaaggaaagcaaaatggagaaaagaaattgattggcttctatcagtcacggattacgttgttgaaatggttccttcacaacaaaagtctgaaggatggttcaaatatggagattatgacgacacgacaacgaacggacctccacatgaatgtcnatagattgcgnaagttgatgcaatgcttcttgaatgtctggataatttcaaagatcaaaatgagttctattatgtgtcaaaaggttcagatgattcagatcaagacagtgcaaagacaaaaaatgatgataagtggtggtt

SEQ ID NO: 10105 - DNA, 431 bp, Glycine max
atgctctcgctagttcatgttccagcgtttgaatggatgccgcaactccaaagatacgaactttactccattttagaagacgggtcttaaacaactgcgttcaactcttcccaattttggattctcgtgtaactgaaactgaaactgcttctgcttcggaagcttctttctttgggggcaacaatgatgaacaaaactcttctcctcacttatttctacttgttcatctacattttgctttcttctggagtcattttgtacaacaagtgggttttgtctccaaagtactttaactttccgcttcccatatcactcaccatgattcacatgggcttttctggggcagtggcattttttcttgtccgggtctttaaggttgtcactcctgttaaaatgacatttgaaatatatgctacttgcctgataccaat

SEQ ID NO: 10106 - DNA, 1349 bp, Glycine max
gtgttgtccctgctgccaacaatatgccactagacggacgagaaaagtttcaagacaaatgtttggtgaactataagaaccaaaatctaaatggtacaaaactatgagaaccaaagcctgaacagaatccaactatagagaccaaaagccatacttttaatgtataggaatcaaaaccaaaatcaaggtaatttctatcgaatacgcagtgcttttaagtatggtgcccgtaaacttggctggattcttaggttaccagaagacagaatagctgaggagcttattaggttctttgcaaacactctggaaaggcatggaagcactcaggggaatgtagacaagtcatttttgagcttatctacagcttccggaaaggataggaaacctggaaatcaacataattttgaaagcagagatgaaagagaaagatatgtagtacaagatgcaggggagttctttgactcctctagggatggaaatgcagttacaagttttaaacttggtgaagattctaaggatattgcaacatctggggtcttggatcgcacaagcactaatggttggtcttattgttcaaatgagcaatttgaaaataatatttctgatagtgaacctgccctaaattctgttatcaatgatgagaaagagaagcaagttatggcaggcaattcacccagatcacataccgatgataagcatatggcagtctccgaagcttcaaagtcattgttggaccttactggggattatgacagtcacattgggaacttacaatatggtcatatgtgtaatggttatcctgtctctctcgttgtgcctagtcctcctaggtctccgaagtttccaaataggaatccatgggaaactgttcatcaatgtgtaccgattaatcacagtattcgttctcaggcaaactcaaattgtgtaatgggacaacaagtttacgtcataaatcatcctactctgccaatgacttcttttggttcagaagagaagagaagagtacgaggaacaggcgcatacttcccgaatatgacttcccgtccttacagggacaataggccaataccaggaaggggaaggggtcaagcaccaggtactcatggacatctgcagagacacagccgtaacaatggctttgccctagctccacaagagacaaatttgtctgtggatggaacttttgaacatgctctagaaggatattctggttttggtagtaccaaaaccagatcatctgaaacctatttccctcaaccttctacatggggatcacattatgctaatggtttccttcattcatctgagaaacctgaatctggacctgcaagccctcagcttcgagtagt

SEQ ID NO: 10107 - DNA, 405 bp, Glycine max
ggaccgagaaaacacaatcgagaaaactccgatgtctctgtctcctcgcgttccctctgtttcgattctgtcaccaccgttcagagacatccacgttctcatctgtttctgaatctcttcttagtcgatacactccctcccaatctcacctgaataagaagaacatggcgattatggtgatggtgggattgggcctattggacttcctcgtcgctggggtttctttaatcattggtttgggcttcattgccttcattgcttccattctctgcgccactgcgttcttcaacaacgccaaggacgtctcctgagattgaagcctccattaaatgcgactatgtggccacagttgtcagcaatttacccccacaacatcaaggattgcaacgaaacagcgaccatata

SEQ ID NO: 10108 - DNA, 748 bp, Glycine max
ggctgaaagaattcctgatgcaagctcccagactaatctcttccctgagcattatgggcaggaggatctaatgagtgcacttctaaaacagcaagaaggcatgggaccatctgagaatgagtttgactttgatggatattctctggacaacattcctgtctagaacaaacccttcccgattgaagttgccagtgtaaatagtttgttacacaagcacatgatcatcctgcagttagctattttggaactgagtcaaaaaaatttggttgatgtcaaatattcagacttctgggagtagtagtgtattgtaatggtttagtctggatgctcaacatgaatcagcttcaaacctcaactgcatatattcacaaagcatgtgcaaattttgactgctatttatagcaaaattgctagcaagcttctaattttagggtgttcttgaaggtgttggcttagggcagaattgcagaagcaaggttttgatacatctgcaaagttgtcctaggagcatttctaacttgaataacaaattatgaaatttttttcttctgttccttttgtaatttatgtcattgaaagcaagtaacgacttccgtaagcatgtaaatattgcatttggtagctttagacatctggtctggtcattcttttatggttgattctgtactttccgatagatatgcgctgttttttatgttccctgtgtcttgcattctttgtacatgaacctgattatgtgatttgtgtg

SEQ ID NO: 10109 - DNA, 710 bp, Glycine max
caataaggatcaaggctgaaagaattcctgatgcaagctcccagactaatctcttccctgagcattatgggcaggaggatctgatgactgcacttctaaaacagcaagaaggcatgggaccagctgagaatgagtttgaatttgatggatattctctagacaacattcctgtctagaacaaatcctttctgactgaagttgccagtgtaaatagtttgttacacaagcacatgatcatcctgctgttagctgttttggaattgagtctaattgttcaacaaacagaatttggttgatgtcaaatattcagacttctgggagagtagcatattgtgatggtttactctggatgctcaagatgaatcagctcaaatctcaactgcatatatgcataaagcatgtgctatttttgactgcaatttatagcaaaattgctagcaagcttctaattttagggtgttcttgaaggtatgttggcttagggcagaattgcagaaccaagggtttgatacatctgcaaagttgtcataggagcatttctaacttcaataccaaattatgaaatttttatcttctgttatttcttttgtaatttatttcattcaaagtaagtaccgtaagtttgtaaatattgcatttggttgttctagacattttgtatggccattcttttctggttaaaaaaaaaaaaaaaaaagggcggccgccga

SEQ ID NO: 10110 - DNA, 1018 bp, Glycine max
ttcacgcgttcttataatcacagaaacaacaacgctcactgattaccaatccatcgtttttgaactccacataaggctaaactaaacacctctctctgcaaaacaaaaccactctcttccttccaacgaatctctgccacacaacaaataactctgaacatataatcaacctaagacccgcctctgattctgaacaacaaaaggctaatttggctcttttgacgacaatttttgctgacacctaaagcatctagcagcttatcaaaatggagactaaccatacagcaaaacggtgttgtaggactttagtatgcatttgatcaggagcagctaggaagcatttttacaattacaaagtttgaccactcattgttctgatcactgagtaaataatttctttttagatgcaaacttctaagaagcacccaacttcagctggtatccatttatacctgcagcctgcacaagatattgatccttacactcattaccaaatattgcaaagcaattcatgccatgataatagcagcagccagggaaccactatttcttttgaaaccagcaaggagcaatactttacccttgaatcatccccagcaatcaatgatctcataggttgtgattctccttcctatgctagtgtatcatccaataggagtcctttttctccacaagcttctcattcagaccagcatcagtcatcagacaacacctatggatcaccaacaagtgcacactctagatatgatgatgacggctacgaattgaagaacaagcttagagaactcgagatttcgttgttggggcctgattcagacattgttgatagttggcactgctcctacaagggtggccgccacagagcatcatctccaacggctaaacacaattgggatcagattgtggaaatgattccaaaattagacttgaaagaagtcctcattcggtgtgcacaagccgtggcagatgatgatattgaaacagcagtgggatttatgaacaatgtattggcaaagat

SEQ ID NO: 10111 - DNA, 363 bp, Glycine max
ggatatgatgtaatgtaacattaaaatcacagaaacaacaacgctcactgattaccaatccatcgtttttgaactccacataaggctaaactaagcacctctctctgcaaaacaaaaccactctcttccttccaacgaatctctgccacacaacagataactctgaacatataatcaacctaagacccgcctctgattctgaacaacaaaaggtatgttctgtcctttctctaagattgatgatatgagatgagatgggtttgtgttgttggcaacagatagcacgttgttttttctttctgttcatgttgttggactttgctcatggttttgtttgagcctttgaggaccatgtttgactat

SEQ ID NO: 10112 - DNA, 515 bp, Glycine max
ctcactgattaccaatccatcgttttttggactcctcattcacacaaggctaaactaaactaaacacctctctctgcaaaacaaaacaaaacaaagttactctcttccttcccacgaatctctgccacatagcacataacactgaacatatcaacctaagacctgcctctgattctgagtaacaaaaggctttggctcttttaacacattggtgaacctttgtacacaacacttttgctcatatctaaagcatcctagcagcttaaaaaagggagactaaccatccagaaaaactgtatggtagagctttatgcatttgatgaaagggtgaccaggaactgctaggaatacaattacaaagtttgaccactcattgttctgataacttttctccactaagtaaataatttctttttagatgcaaacttctcagaagcacccaacttcagctggtatccatttataccaccagcctgcacaagatattgatccctacactcattaccaaatactac

SEQ ID NO: 10113 - DNA, 356 bp, Glycine max
ggggctctttcgtggttgtgccacctctataattctcttccactgtcttgtgttctcctgcaagcctgcaaccacaaaaaccaaatagtttttttggtcaaactcaaagcttttaacttaacagaagcaagaatggtaaaacggagttaagcaagacaaaggaagaaagaatggtgagagagcataacattaacagtggatggccaccaataggggccccactactgaacgtgcagagagatgagtatgatcagcattggagcagcttcgatagctctgtgaatgctgtttcttttggctttgttgccactgccattcttgtttccatgttcttagacatggccatctttgagagg

SEQ ID NO: 10114 - DNA, 607 bp, Glycine max
tttccgcgattttgtcgtttgtagcaaacacacacgcagtagctagcgcccccttgtttgtaggtccgaggttaagggaaacatcggtgtggtgtggttttgattcgctgtgtccaatccaatccaatccattctctttccctcttcttctcatatcgttttaaaggtttcatcttttcttaattccagctagtctgacttagatatggcggtaaaaccaacagttgcattaagggctattcttgttggaggcatagcagcatttgctaaaatagcaggtgctatgaaagctgcaggtggtgcaaaaatgggcgcagctgcagctgccatgacagcagcagcaactgcagctgtggcagggtccaaacaagagcaaacagatgcttctcaacagtctccaaaataattatctgtattttttcttccagttttacactgtgtgttggtaagtttctgtagcctagttgaatattccaagtggaagaaagaggccatatgtgaattatagtcttgacacatggtgataacctcttcaaagtctttgtaataagattacactaaatttatacagttcctgaagttttagatggagctatggttggatttc

SEQ ID NO: 10115 - DNA, 535 bp, Glycine max
gcgatttgttaggaggttagtaagagggtgaaatccgaacccagcatcccccaacaaagtgaagaaaagagaagtaggctctacggttttcgcgagtcaaaatccgaatcagcaactccaatccaaaaccggttatccgaattgaaatttataaaaaagtatcaaataccccgtgtctgttagttaatcagagagagtagtgagccaaagctgcgaagttaaacttggttgcatgcgaagagcaagaaatatgagaccaaacatcgtttctgaggccgggtttcctactaggatgagccaatggtgggaaagcattccgtttctcacttctgcagtggtggttgtctgtggagtcatttacttgatttgtcttttggttggatatgattccttctacgaggtttgcttcttgccatctgcggttgtgtcacggtttcaagtttacaggatttatacctccattcttttccatggttcactgcttcatgttgtcttcaacatgatggctttagttcccctgggctctgagctggag

SEQ ID NO: 10116 - DNA, 453 bp, Glycine max
ggttggtaagacggtgaaatccgaacccgaccccctccatcaaagtgaagaaaagagaagtaggctctacggttttcgcgagtaagtgtgggtcagaattcaaaatccgaatcagcaactccaattcaaaaccggttatccgaatcgaaatttataaaagtaccaaatcctctgtgactgctagttaatcagagagagtagtgagccaaagctgggaagttaaacttggttgcatgcgaagagcaagaaatatgagaccaaacatcgtttctgaggccgggttgcctactaggatgagtcaatggtgggaaagcattccgtttctcacttctgcagtggtggttgtctgtggaatcatttacttggtttgtcttttggttggatatgattccttcaacgaggtttgcttcttgccgtctgcggttggttcgcgggttcaagtttaccggattt

SEQ ID NO: 10117 - DNA, 1349 bp, Glycine max
gaccgaagaaataaatagagagttggttaaaagtaggaaatgaaagtgagggagagagaatggaggaagaggcagggatctaccgtctagcggaggacagcctccggcagatattctgcaggctgccactgagggaaataatgatatgccgctcagtgtcaaaattcttcctgcagctgctctcaacaccttcgttcctccaggtcctctccagctcccatccacccctccagctcctggccctccgcaaccgccaccacaccccttctcacacctctctccccctcttcgaccccgccaccaaatcatggctccacttccccctcgacttcctccccttccactcccctctccccgtcgcctcctccctcggcctcctctacctctgggcccacaacaactccaactccaactccaagtccctcatctgttgtaaccctctcacccgcactttccgcgtcctcccccacctcggctccgcctggtcccgccacggctctgtcctcgtcgactccgaggaccgcgtcatggtcctcacggagctcgccgccctctactgccaccgcaacaccaccacctggctcaaattctcctccaacctcccctcaaaaccccgttcatctcttctcatcaacgactccgccttcgccttatgtgatgtcggctccccctggcgcaaccggtggaagctcttctcttgcaccatcaaatccacaactacttcagtcgtccctgtctggtcccccctcgaccgccacgagtggggggacgtcttcgatgtcctcaatcggccccgcctcgtccgtggcggccacggcaatttcatcctcatggtcggcggcctcaagtcctccttcgccctcaacgccctcctgctccaccatcctcgtcctccgcctcgacctcgacaacctccgctgggacgaggccgcccgcatgcctcctgaaatgttccgcgccttccgtgagtcgaccaagttcaaggtcttcggcggcgccggcgacatggtctgcttctccgccaagaggatcgggaaattggcgctctgggaccgccgtgcctccgaggggcacgagtggaggtggatcgataacctccccgagaacggcaaaggcctctaccgcgggtttgtgttcgaagggaggctcaatgctgtcccctgactgaggatttagggtttaatggcttgctgggaattggtaatgctgtgttggattaatattgcttgtggtttttttattattattattatgaaatgtgttgctgtaattgtattgtaccattagtttctacacaatgcaatttttaactgatttgtggaatcttgctttgttcttttgttaagtag

SEQ ID NO: 10118 - DNA, 786 bp, Glycine max
acgagttctacccaagcaatgaaaagcttttcctggtttgcttttcatttgctgaggggccattagcgtgggctttgattgtttggcgctgcagcttagttttcagttcggttgacaagattgtcagtgttcttatccatcttttgcctggattggttttctttaccattcgatggtggaatcctgcaacctttgaagccatgcgtccagagggaactgctagaagacctacgtggccttacatcgaagataaatcctatctctggacgtggctgtttctggtacccttggtagcttacactttgtggcaggttctatacttcctcattgtcaacgtcttacgcagacaaaggtttttaagagatcctgaagtcatgacttcctacagggaactctcaaaaaaggctcagaaagcaaacaacatatggtggcgcctaagtgggttgcttggggatcaaaatcgcatgctgatgtacatttttcttcaaggcatatttacggtggcaaccatggctcttactgtccccatattcttgtcatatgaattgcatgtagttttccaaatactaaaggtttcggcctcaatatggaacggaggaagttttctgttggaagtaatgcctaggcaggcaattcttaaggagaaaaagaaatcagagatgcaacctattgaagaagctcaatctaatcatcaatagacaatagagatggaaaatgatagcaagttaaaacaatgttgttgtgacatgtcaccccttgctcaactaatatccacgtattttgagc

SEQ ID NO: 10119 - DNA, 290 bp, Glycine max
cccaaagttacatctggtgagttacacactaccaccctcttcccttaccttttaataatcctatagatcgataacttctggaacgaatggagggagttcgtatataaagaagagtcagaggaattgaagaaggtacatgaaggtggtatcgatcacaagcaagtgccagaatgaggtttgtggcaattgcattagttttgatgctagcatgctgctgctgctgtatgggttcagataggtggaggaacatagaggccaaaatgcatggaaaaaacaaacaagttagtcgc

SEQ ID NO: 10120 - DNA, 1235 bp, Glycine max
ggaaatctgtttccaaggtcatggctgaaaggggttatcatgtttcacctcagcaatgtgaggataaatttaatgaccttaataaaaggtataaaaagcttaatgatatgctagggaggggcacttcttgtcaggttgttgaaaatcctgtgctgctggatgtaatagattttctttctgagaaagaaaaggacgacgttcggaaaatattgagttcaaaacacttgttctatgaagagatgtgttcttatcataatggcaacaggttgcatttaccccatgatcctgcattgcaacgttcactgcagttagctctccgaaatagagacgatcatgatgatgatatcagaaggtcccatcatgatgatcatgatgaagatgatcaagatgcggaaattgatgatcatgatgactttgaagagaattgtgcttctcatggtgatagtagaggaatatatgggccatcaggcggatctatgaagaaattgaaacaatgccaaggccaagaagatgctaatacttttggtaactctttaaattgtcacgactacaacgaaagttcatggccccatggacagatgatcccagctgatgtgaatcaaggtttacctgaacgcatgaaagcagcttggttacagaagcaatgggttgaatcgcgcacacttcagttagaagaacagaagcggcaaattcaggtcgagatgctggaactagagaaacagagattcaagtggcagaggtttagtaagaaaaaggatcgggagttggagaagctgagtctagaaaatgaaagaatgaagcttgaaaatgaacggatttctttagaactgaagcgaaaggaaatgggcactggctttaaataggtcagcgctcttgcaagctttgtggcaattgcattacatgcatggtgctccatttttcttgtttttgctgtctttggtaagatgtggtttgtttagttgaaactatgggtttttttattggggaactttgcaaatctaactctcactcctgcttgtattgtttaaatttaagagtagtgcataattattaggctctactgaagttttgttgcctatgttcaaagactgggtagctgaaacaccgttaatctttttattttgtaatattaattttctaatattacatattgtctgtcctttcatttttttacagcctgtatatattgttctggttattttttatttccatctatggttagactattgctgctc

SEQ ID NO: 10121 - DNA, 358 bp, Glycine max
gacagccacatcgaaatactgttgtagaaagctttgtgttgtattgtggctgagccaccacaattctgattcctttctcttctcggcagtttgcttcctccgtagcagatcgtaaggaacttttgccttgtaagtgtaactattggtaccatggtgtaaacctaaagcattggaagaactgagacattgccttatgaagactgtgggagtaggctctagtaaagtgacattgtctctaagataaaattctcaactcagaaagatggtcatattctcaataagtaatgccagatatacttatgtgcatgatcagaaatatccctctaaagatgttgacatacaccatatagtttcaagg

SEQ ID NO: 10122 - DNA, 541 bp, Glycine max
cttagcttagccttctcctattctggacctctgtcccttcctcttgattagggttctaattatgttatgaaccttccatgcttttatttttcttttaaaaaaagaataaagaaaaccctacatatgggtttgtggggtatattcagtcttcaatatcatggctctctttgtattcttccacagctttcttgaactgcatccaaagagttcctttgcatgcatgccatggcactcttactcccaaatcttgttttgcggttcaataaagctgtgggaagatacagatagggtcaacaacggactagcttatctcaaactccagattcttctctaaatcttcctatccaattatatatagggataaaattattgcaaagtattttttttcctttttcttttgtgatttgacttaatttaaatcattttcagatttaaaccatcgacttttcagatatatctctatatgtgatcagaattctcagatgcagtattatgagagaataaacttgtaccaattgggtagatttgtgacgatgatgag

SEQ ID NO: 10123 - DNA, 573 bp, Glycine max
gtttttgactaaaattataaataatagtatgctcgatctcatatgacaagaaccatgtaaacacagtcacaaacaagtgaagtgggaaagagacagaaccgaaaatggttgcgactttgagtcttccgatcatagacctctcttctccccatcgtctttccacagccaattccattcgtcaggcatgcgtggaatatggtttcttttaccttgtgaaccatggggtggacaccgattttgtgagcaaagtcttcgaccaaagttgcaagttcttctcgcttccggtccaacgcaaaatggacctggcccgcaaggaatatagaggctacactcctctctatgctgagacacttgatcctacttcactctccaaaggtgatccaaaagagacctattacattggtcctatagaagatacctctattgctcatctgaatcaatggccttctgaagaattactgccaaactggagacctacaatgaaatccttatattggaaactactggctgctggaaaaagtctgctgtctctgattgccttgtccttgaatctggaagaagattactctgaga

SEQ ID NO: 10124 - DNA, 1217 bp, Glycine max
gatgtaacctggttccacataaaagcaagaaaacaaaaccaccctcccgctcggcaacctggatttggactgaatgaaaatataaagaaagagaagagagaaataattttccgggaaaattcaagttccaatcggaaccggaaatgaatagggtttggtttctactattccttctgctgatctcgaaatgcgatcatgtgtggagctcttacgcgggttccgctagctccgtcatcaacccttccaaggtcaaacagatttcctggaagccaagagctttcgtttatgaaggtttcctcacggatttggaatgcgaccacttgatctctctagcgaaatcggagcttaagagatctgccgtagcggataatctctctggagagagccagctaagtgatgttcgaacaagctctggaatgttcatttccaagaacaaggatcctattgttgctggtattgaggacaagatttcgtcatggacctttcttccaaaagaaaatggggaagatatacaagtattgagatatgagcatggccagaaatatgacccgcattatgattacttcactgataaagttaacattgctcggggtggacatcgcatcgcgactgttctcatgtatctcactgatgtagccaaaggcggtgaaactgtcttcccttctgcagaggaacctccacgtcgcagaggtgctgaaacaagcagtgatctttctgaatgtgccaagaaaggaatagcagtgaaaccacgtagaggggacgcacttcttttcttcagtcttcacacaaatgctaccccagacactagcagtctccatgctggatgccctgttatcgaaggtgagaaatggtccgcaacaaagtggattcatgtagactcgtttgataagactgtgggagctggaggtgattgttctgatcatcatgtaagctgtgagagatgggcttcacttggagaatgcactaaaaatcctgagtatatgattggatcttcagacgttcctggctattgtaggaaaagctgcaagtcgtgttagaaattttactgaatgcttcccaagatactacatgttatctctgccacgggtttcaaatttcaactagttcttgattattttttcttggactgtaaagtaattctgcattattataatggttatgggtatttcctatgtataaaacgatataacaaatacaaattaattttttattatctc

SEQ ID NO: 10125 - DNA, 818 bp, Glycine max
  unsure (1)..(818): unsure at all n locations
ggatttggagtagaaagagaaagagaaagagaagagaataataatttttccgggaaaattcaagttccaatcggaatcggaatcggaatctgaaatgagtagtagggtttggtttctactattccttctgctgatctcgaaatgccatcaagtgtggggctcctacgcgggttccgctagctccatcgtcaacccttccaaggtcaaacagatttcctggaagccaagagctttcgtttatgaaggtttcctcacggatttggaatgcgaccacttgatctctttagccaaatcggagcttaagagatctgccgtagcggataatctctctggagagagccagttaagtgatgttcgaacaagctctggaatgttcatttccaagaacaaggatcctattgttgctggtattgaggacaagatttcgtcatggacctttcttccaaaagaaaatggggaagatatacaagtattgagatatgagcatggccagaaatatgacccgcattatgattacttcactgataaagttaacattgctcggggtggacatcgcatcgcgactgttctcatgtatctcactgatgtagccaaaggcggtgaaactgtcttcccttctgcagaggaacctccacgtcgcagaggtgctgaaacaagcagtgatctttctgaatgtgccaagaaaggaatagcagttgttctcttcatcttacctggcattgcatttgcgtagtgaaaccacgtagaggggacgcacttcttttcttcagtcttcacacaaatgctaccccaaacactagcagtctncatgctggatg

SEQ ID NO: 10126 - DNA, 801 bp, Glycine max
agccatttcacacttggggtaacagaattattgtataactgggcccttgaatgtcatgagctccctgtagtacagatgatggaacacatccgccagcagatggtatcgtggtttaatgatcggcaggatatgggcatgacgtggacgtcaattcttgtaccatctgctgagaagcggattatggaagcaattgctgatgctcattgctatcaagtgctccgggcaaatgaagttgagtttgaaattgtgtcaactgagaggaccaatattgtggatatacggagtcgtgagtgctcttgtcgccgttggcagttgtatggcttaccttgtgcccatgctgctgctgcacttatttcttgtgggcacaatgcccacatgtttgctgaaccatgcttcactgtacaaagttacagaatgacttattcacagatgattaatcctataccagataagagccagtggagagatcagggagaaggagcagaaggcggaggaggtgcaagggttgatatcataattcgcccaccaaagactcgccggccgcctggaaggcctaaaaagaaggttctacgagtggagaactttaagcgtcccaaaagagttgttcaatgtggtcgctgtcatatgttaggacattctcaaaagaaatgcacaatgcccatttgaaaaatttgtttacttgttgaaatatcttttgtttctgggacatatatgcgatagatcgaatgttgtgtttgtattgtaatttaaatgtattctgaacaagccaaggacccattaggtttcccctaggttctccgc

SEQ ID NO: 10127 - DNA, 486 bp, Glycine max
ctccatgaaagatatattcaatgttcaccgccttgatttacaggctgttgctgcttcattctgtttttctaacccaccgaaggtgaatctgaacatagatagcagtgcttcaaagcataggaaggaaatacgcaaagtagaaggaaagagaagatgataaaaggcattttctcacgcccgtgcagtggtgtgatccccacattctcccacccacaccacaccaccccataaagttttggtaggcaccccaattttatataaagagatggatttgtaactttatcaaacaaccttggttattagaagcatcagaaaatttaaattagaatgtgttatgcgcatttttgaaccgtaatattccacatgacgaccggtgtcccatcccatgttcgaatttgtaagcttattcttttgttgttgaaaattatatcatgaattttcaagcacttgtgaaaagcaatagtagcactgtactgagctacctac

SEQ ID NO: 10128 - DNA, 273 bp, Glycine max
gaagagagatggatttgtaacttcatcaaacaaccttggttattagaagcatcagaaattttaaattagaatgggttatgcgcatttttgaactgtaatattcaacatgatttgtaagcttattttttagaatgggttatgcctatcccatgctacaatttgtaagcttatttttttgttattgttttgtgttcaacgtgtggtctaattctttgtcgtttgtgttagtttttttggtttagtcttttggtgaggcgacggggggggggggag

SEQ ID NO: 10129 - DNA, 779 bp, Glycine max
attcgttttcatccatcaatgaatttaagtgttgccaagttccttggttttgaacagactttaaagaatgccttatcaccatacaaattaggaggagcagctggtggaagtgatttcgatccaaaaggaaaaagtgataatgagattatgcgattctgccaaagtttcatgagcgaaatgtatcgctacctggggcctgacaaggaccttccgtctgaggaaatgggtgttggtactcgagaaatggggtatctttttggacagtataggcgtctagcaggtcattttcagggaagctttacagggccaaggatattttggtctggctccagtcttcgacctgaagctactggctatgggctggttttctttgcccagctcatgcttgctgacatgaataaagaacttaaaggattaagatgtgctgtgagtggttctggaaagattgcaatgcatgtcttagagaagctaattgcttatggtgctcttcccatttcagtatcagattctagaggatatttggttgatgaggatggatttgactacatgaaaatatcatttttgagagacatcaaagctcaacaaagaagtttacgagactattcaaagacctatgctcggtccaaatattatgatgaagcaaaaccatggagtgaaaggtgtgatgttgcatttgcttgtacttcacagaatgaaattgatcaatctgatgccattaatttggttaattcaggttgtcgtatactagtagaaggttcaaacatgccttgtacccctga

SEQ ID NO: 10130 - DNA, 462 bp, Glycine max
ggagagagagagagagagaatggtttccagggttcacaagagaacagcactgtataggagcatacaacagcttcgttctatcactaactcccatgcgcgccgtaaaacctctgtgatactggatgcatcgaagtacatacgtggtttaaagcagaagttgcaagaattgaaccaattagcagttgctgcagcccaaaaggacattgagtatggtccagtaatgcccatgcttaaagtggaaccacaagaggaggggtttctgatcaaggtgctgagtcaaaggagttgccaggggttgttggcgtttatattggaagcctttgaaaggcttggtcttgtggtgctccaggctagggcttcttgtgtggagagcctttgtttagaagcatttggaatcaaagagagcaatgaagatacccgccttgtggatacacaagtagttgagcaagttgtatttaaagc

SEQ ID NO: 10131 - DNA, 808 bp, Glycine max
  unsure (1)..(808): unsure at all n locations
tccacgcgnnctaccacgcgtccgcccacgggtactactaatatctacattaaaatctacgaataatggagcaagagcttcaacgcaacagtgtccacgacgacgaagccgccaccaccacgagctccggcgacaagcccgccacccctcgcggcggcggaacccgacaccccctcttccgcggcgttcgcaagcgccgctggggcaaatgggtctccgaaatccgggagccgaggaaaaagtcacgcatatggctcggctccttcccggcgccggagatggcggccaaggcctacgacgtcgccgcctactgcctcaagggccgcaaggcgcagctcaacttccccgacgaggtccaccgtcttccgctgctcccctccgcctgcaccgcccgcgacatccaggccgccgccgccaaggccgcccacatgatgatagtccaggccgcctctgtcaccgccgactcgccggagaaaagcagcagcattacctccgactgcggcgacggtggcggtggagacgacttctggggcgaaattgagctgccagagttgctcaacgccaagtggtgggcctccgaccacgacgtcacgccgtggcccgagtccgagctcccgccccagcagcccttcaccacggcgtgcttgtagtttgtaataatcaataatgctcttctctcaagctccgacttggttggtatattaattatatatattagtattttgctcatataattaagtaactctctttgtgttctcttcacaataattaaccattttaattgtgatgattagtgttagtgaagccc

SEQ ID NO: 10132 - DNA, 347 bp, Glycine max
ggtgatatgacttgtttcgtctctttcttccacctgtgattcttaactacgcgcacgttcctccggccaaggcaaatcggaaaatgggtgtggactattacaaacttcttcaagtggatcgaaatgtcagtgatgaggatctcaagaaagcctatcgcaagcttgctatgaagtggcaccctgataagaaccctaacaacagaagggatgctgaagccaaattcaagcaaatctcagaagcctatgatgttttgagtgatccgcaaaagaggggtgtttatgatcagtatggtgaggagggattgaaagggcaggtgccacccccaagtgctggtggattttccggt

SEQ ID NO: 10133 - DNA, 474 bp, Glycine max
cttcttggccttcacatttggctgacatcgcaactgatcgcagagctaagaaagcaagtcgtatcagaagctgcagaagaagaagataacttacaagcatcaatcaggctctcactgctattccccggaatatttcaaaaaacagaacaagaagaagaaaaaactgcaatgtatggaaaagtggttctctcgttcatcttcgtgctcttgctcgtcctctcttactcaattttcattggcaccctcgacattcgatcttatttcttccctcgcctaaagttacccgcggctgcacctgctccctgtgcacccgagcctcctcttcgggttttcatgtacgatctccctcgccgattcaacgtcggcatgattgaccgccggagcgcgtcggagacgcccgtcaccgttgaggactggccggcgtggcccgtgaactgggggcttgaaaagcagcacagcgtggagtactggatg

SEQ ID NO: 10134 - DNA, 525 bp, Glycine max
cgacagaagggggagaaagagaaagcatagaaaggaaacgaaaaaacagagtacccgacagaatttgaaaacaaaggctgaaatttgaagaaactgagatcattgggtgtgaaatatatggcagaggttgtcctgctagtcgatgatttgaaactactttctgcgagtcctcgctgtagaatttgtcatgaagaagagtttgaaagcgtagaaaccttggaagcaccttgtgcttgttctggaaccgttaagtttgctcatagagattgcatacagagatggtgcaacgaaaaaggaaatacaacctgtgaaatatgtctccagcaatacgaacccggatatacagctcctccgccaaagaagtctaagataaatgatgaaacaatgtccattagggaggaggaacttttccattcccgcgttcaatttaatcaaagtgaacttataactaattatttaatcaatcatttcataatgtgaattcttgactttgctacgtgagagggagcaactaataaaatatgt

SEQ ID NO: 10135 - DNA, 651 bp, Glycine max
gatagaaaggaaacgaaaaaacagagtacccgacagaatttgaaaacaaaggctgaaatttgaagaaactgagatcattgggtgtgaaatatatggcagaggttgtcctgctagtcgatgatttgaaattactttctgcgagtcctcgttgtagaatttgtcatgaagaagagtttgaaagcgtagaaaccttggaagcaccttgtgcttgttctgggaccgttaagtttgctcatagagattgcatacagagatggtgcaacgaaaaaggaaatacaacctgtgaaatatgtctccagcaatacgaacccggatatacagctcctccgccaaagaagtctaagataaatgatgaatcaatgtccattagggaggaggaagaaccgtcaaacgcaagaatagagattatggttgaaggagtggaaatggaaagcgattactccgaatgcacctctgccgctgacagaagcgcgtcttgctgtcgatcacttgcaatagcttgctcacttgtcgtacggaagattacccatttacactactaactgtaattatattaaaggctagcggaattattataccaatgtacatagttattaagattatcggagccattcagaacagtattcagcactatcaggattctgctatgac

SEQ ID NO: 10136 - DNA, 371 bp, Glycine max
gtgaaaaacaggaattggacgggccattgataaccttgtgtagttcttgcggcggaagacaaagaagtttaaataaatgggtctagctttaatcgtcggactcctcggccttctgattctatttcacgccgcttattcaactattcagtataggggccttttgaagattacggaggaagagttttcagggcctccattcgacgtggtgattgagctgtttcttggattgttgctttgtttttgggctgccctcactgcgccggggaagtttctatccatacatcctcactctgaagataacagaattgtctctttacctgccaacctagacttcatgatcttcaaccaccgaggcaaggcctttcctgtgg

SEQ ID NO: 10137 - DNA, 340 bp, Glycine max
ggtgtcctattggtggaggaatgcttgttacctactcctttttaagttcccaaattccccaaagaagcctaaggccaaaccaaaccaaacgtatcagaataaacaaagaaagtcctcgctctaatggagcggtacaaatgcgagctctgctccagaacattctccaatggcagagccctcggtggccacatgaacgctcacttagccaccctccctcttcccccccaaaaccaacaaccaccactttctcccgctgctgctgcttccttctcttctaattcctcttcagaacatgaacatgccacacacgatgaagagtccctgatttatgggttaagag

SEQ ID NO: 10138 - DNA, 2005 bp, Glycine max
  unsure (1)..(2005): unsure at all n locations
aattgttttccgaacctgatagatcaacggtggaagaaatgtgtattggctccgaagctggcatggtggtcaaacatggagtcctaacctaggctaggttgcacagattcactgagtgcatgtcgcatgctgccctgtctctacaaaataagagataaaatatttatctttcgatctggcaatcgcagccctgatagccgtcagcacaggtctatggtatacacatgaaattcacgccttcctccaaattcttaggcttttcaaatcacttccactcccttctcgcaccctctttctctccgaccccaaagttctcatcttccttttccgccaccatgtccactctttccactcagaacgacaccgtcacccacaaaacgcagcaacctttgcagattgcaaagcgcttagagaaatttcagacaacaatcttcactcaaatgagcttgcttgccatcaaacatggggccataaaccttggtcaaggctttcccaactttgatggtccagaatttgtaaaggaagcagcgattcaggcaatcagggatgggaaaaatcagtatgcccggggttatggagttccagacctgaacattgccattgctgacagatttaagaaagatactggacttgtggtagaccctgaaaaggaaattactgtcacatctggatgcacagaagcaattgctgcaactatgataggattaataaatcctggtgatgaggttattatgtttgctcctttttatgattcttatgaggccactttgtccatggctggtgcaaaagtaaaaggcatcactttgcgccctccagattttgctgtccctcttgaagagttgaagtccaccatctcgaagaatacccgagccattcttataaatactcctcacaaccctactggaaagatgttcactcgtgaggagctcaattgcattgcatctctttgcatcgagaatgatgttctggttttcactgatgaagtttatgacaagttggcttttgatatggagcacatatcgatggcttctttgcctggaatgttcgaaaggacagtgacattgaactccttggggaagacattctccttaacaggatggaagattggttgggccatagcacccccacacttatcatggggagtgcgacaggcacacgctttcctcactttcgcaactgcccatccttttcagtgtgctgctgcagcagctctgagagcaccagactcttactatgtagagctgaagagggattatatggcaaaagagagctattttgattgaagggttgaaggccgttggcttcaaggtattcccatccagtggaacctactttgtggttgtagatcacaccccttttggactggaaaatgacgttgcattttgtgaatatctagttaaggaagtgggagtggtggcaatccccaccagtgtattttacttgaatccagaagagggaaagaatctagtcagatttactttctgcaaggatgaggatactattaggtctgctgttgagaggatgaaaacgaagcttataaaatgatctcaatgcattatcaagtcattatccgtaattggagtgaagacatttacctttgtagaagcccaaatgtaggattgtaatgacttctggttcattgaattggatgccccgcagtctttagtcactacctacttcctatccccctagattgtttttcttccctgaattggatcatcttctgaagggtatatatacaatgaccagaaatcctgccaaccagctagtgagtgatgccatacagatttgatttaactttaacatttatgggttatatttcaaagatccatgatcattatcttgctgtcttatcccctgattcttgagccttttcttcctttcgtttggatgcaaggaatcaataatgaaacgggacatgaccccttaattatttcctctnnnnnnnnnnnnnnnnnnnnnnnnnnnnnnnnnnnnnnnnnnnnnnnnnnnnnnnnnnnnnnnn

SEQ ID NO: 10139 - DNA, 347 bp, Glycine max
gacagacacaatttctctcgaacaacaaatatgagaataatgtattggttccttgttttgtttcgcaatctcacatatggtagtgttttagatgctagccatggtaaaacacttccttctactgttgtggttggcactgtttactgtgacacgtgttttcaacacactttctccacaagaagccatttcatttcaggtgccctagtagctgtagaatgcaaagttggggattcagtgccaagtttcagtaaagaagtgaagacacatgagcatggtgaattcaaagtggacggtaccattaaaagtgtggatacatgcaaaaagaatcaagggatgcactttcaaat

SEQ ID NO: 10140 - DNA, 473 bp, Glycine max
gatcctaaggttgcgccacgaagaaggcaaaggaaggacagcacttcctcaaagggttggcacataaaaccggttctgcagccagtgctttgtgtcgcaagccaatggtagccttacacggttggatcgttcgggagtgccctaggtgagttgaaagaaagtcctgagactgctaagtaggatgcaaaagttgctggtgatggacctgtatactgtgatgaagccattgccaaagcacatattgttaaccctgccatttctgctcttaaccacaaaaacttcgttgcttagctttattgcattcctagccacaaattgtctttcagatgagtaagggaatgcatgcatatgtgctaggtcaacctaaggtgtgacaattattactatgttttagtgtctcctttggtgtggagaaagagtaattaataaaatcaaatggtagtttactgctatttgttcttggagttttccct

SEQ ID NO: 10141 - DNA, 972 bp, Glycine max
gtcttgattcagagctttctctcttaaaagagatacaggctgagctgactgaacagtgggagcatgaaaagtctgtaatgactcgtatgcaatcaatcaaagaagagatagacagagtgaatcttgagatccaacaggctgaacgggagtatgatcttaatcgtgctgctgaattaaagtatggcagtcttaactccttgcaacggcaacttgaaagtgcagagaaggagttagacgaatatatgaactctgggaagtctatgctgagagaggaagttacgggaaatgatattgctgaaattgtaagcaagtggactggtatccctgtttcaaaacttcaacaatcagagagggagaagttgttgcatttagaggaagtgcttcataagcgtgttgtaggccaagaccctgctgttaaggcaattgctgaggctatccaacgttcaagagcaggtctttcggatcctcatcgtccaattgccagcttcatgtttatgggacctacaggtgtaggaaagacagagctggctaaggcacttgcagcctacttgttcaacactgaagaagctcttgtacggattgatatgagcgagtacatggaaaaacatgctgtttcaagattgattggggctccacctggatatgttgggtacgaagaaggagggcaacttactgagatagttcgccgcagaccatatgctgttattttgtttgatgagattgagaaggcacacgccgatgtcttcaatgtattccttcaaattttggatgatggaagagtaaccgactcacagggtcgcacagtaagttttaccaacactgttatcattatgacctcaaatgttggatcacagtacatcctcaacacagatgatgacactgtgcccaaagagtctgcatatgaaactataaagcagcgggtaatggacgctgcaagatccatctttcgccctgagttcatgaatagagttg

SEQ ID NO: 10142 - DNA, 464 bp, Glycine max
ggaaggctgaattccttgctgggggcctctcagaccccaaaaccctgagaagaaaaaccccttcttatttattaccgttgccccttcctctcagtgtaggaggaaacgatgagcagttggagaagccttcttctgcgaattggggacaagagccccgaatatggaccctcctccgattacaaagatcacattgatacgtgctttggcgcccttcgccgcgagctcgaccactcccaatccgagattctcgagttccttctcatgtgtgctgagcaattgcctcacaagattcctctgtatggtaccctgattggcttaattaacttggaaaatgaagactttgtgaaacaactagtggagaaaactcaaagtaaatttcaggatgccttagattctggaaactgcaacggggttcgtattctaatgcggcttttgactgttatgatgagcagtaaggttcttca

SEQ ID NO: 10143 - DNA, 376 bp, Glycine max
gaggcgtaagaagtcaagttcaaaaggagaagttcaggaacaatgcagaaaaaacgtggaaacttcaactcatatagcagatcaggatgtgacgaaaccatgtgatgtagccttatgcaatacttcagatgattgctcccatggacaggggggaaatattgggctaaagcatttatatcagtcattaggtgatggcaatggcggcatagaggggtgcataagggaagcacttattcattatcctaaacattatcataccactacaggtatggaaacttttaaaattgacaaagatggacaagaatgctctttgcaatttgagccactttctcatagaacagagaaggaagctaatgggcatgcagatgtcaggtgt

SEQ ID NO: 10144 - DNA, 351 bp, Glycine max
gaaccattattccatttcattccttctcgatggctactactcaaggacaagtcattacatgcaaagccgcggtggcctgggaacccaacaagccattgtccatcgaggacgttcaggtggcgccgccgcagaatggagaggtccgtatccaaattctctacactgctctctgtcacaccgatgcttacacttggagcggcaaggatccagaaggtcttttcccatgtatacttggtcatgaggctgcggggattgtggaaagtgtaggagaaggagttactgcagttcagccaggtgatcatgtcatcccttgttaccaggctgagtgtggagagtgcaagttttgcaaat

SEQ ID NO: 10145 - DNA, 298 bp, Glycine max
  unsure (1)..(298): unsure at all n locations
acccacgcgtccgaaaggattaggaaggggatgaggacatttttggaacaaaatgtcattaaaaacccatgtgccagtgacatgagagcttctgtcaacagagtcatcaaatgaaacaacatttgatggtgaggggtagttgctgttatgatagccaataaagtagggagatttttgttgggcgaaaaaaggacaagggattagtataattaacttgtgtagtggcaattcatgcatttataatctcactcaggatcatgtatcaatcaatataattgttctcacacaattcagccna

SEQ ID NO: 10146 - DNA, 761 bp, Glycine max
gtcccaattccatatatacccacccatcaaaacttcgtctctccgattcactacttgtattcttccttctcttttattctattctaaatttcgcattggacatggctttcacacagcttatcccttcaccttcttcttcctccttaaaccctatcacactctccctaaaccctaaatccccaacctctccgccgcagcagcatttcaatctcgatattctccggcaccggcgccggaggcctaattccactcttcggtgctccgcctcctcgttctcggagaagcaccacacgaactcctcgaactccgacgacgtggtggagctccccctgttccctctccctctggtcctcttccctggcgccatcctccccttgcagatcttcgagttccgctaccgcatcatgatgcacacgctcctccacaccgacctacgcttcggcatcatctacaccgacgccgtctctggaaccgccgaggtcggctgcgtcggcgaagtcatcaagcacgagcgcctcgtcgacgaccggttcttcctcatctgcaaggggcaagagcggttccgcgtgcaatggtgttgtccgcaccaaaccctacctcgtcgcgcaggtgacgtggctcgaggaccgcccttctccctccaccgacctcgatctcgacggtctcgccaccgaagtggagacctatatgaaagacgttatccggttatcgaaccggttgggagggaaaccggagaaggaggttggggatttgagacgaaa

SEQ ID NO: 10147 - DNA, 1597 bp, Glycine max
ttacgggctgcgagagacgacagatggggagcgcccaccggaattgaatagaaatagaatcgtcgattttctctttctctgactctagggtttcattattttcttctgtagatccatctatctagcttcggagctgcaaatggacgtcgcagtcactgccttccggtcaccgctgatcatcctccgaagaccggtcaacgagtctgcctcagctcggttcggttccacttttgggttttccagaaagcaacggttcagttcagtatgtatccccaaacacaagcacaagcaaggtcgtagaagagggtttgtagttagagcttctgcatcctcatctccggagtcggatgatgccaagattgctcctcttcagtttgaatcctcaattgggcagttcctttctcagattttgaaagatcatccgcatcttgtgcctgctgccgttgaccagcagctccagcaactccaaactgaccgcgatgctcatctacaaaaccaacaacagccttcttcacccactgatttagttttgtacaggagaattgctgaggtgaaggctaatgaaaggaggaaagctctggaagagatcttgtatgcattggtagtgcagaagttcatggatgctaatatttctttgataccctctgtaaccccagatctttctggtaaggttgatttgtggccaaatgaagatggtaaacttgagctgcttcactcacacgaagcatatgagatgattcaaaaccacctggctctcattctcggtaacagagctggagatttaacatcaatagctgaaatcagcaaattcagggtagggcaggtctacgcagcatcagtgatgtatggttattttcttagacgagttgaccaaaggttccagttggagaagacaatgaaagttcttccaaatgcaacagaaaaagagaatagtgctcatcaaactacaatggacaatgcaagacccagtattgaagaggacacttctcaagtgatgtctcatcctgaagtatctgcctggcctggtggtgatgtcagtcccggtggatttggctatggtgtaaaggcaaccaggttgcgtaactatgtgatgtcctttgatggcgatacactacaaagatatgcagcaattagatccaaagaggctgtcagcatcatcgagaagcacacagaggcattgtttggaagacctgaaattgttgtaacacctgagggggcagtctctaaggatgaaaacatcaaaattagctttggtggtttaaagaagcttgttttagaggctgtgacttttggttcttttctctgggatgttgagagctacgtggactcaaggtaccattttgtgttgaactgagtaaagctttgtatgtctatcttctttagagaccacaggtgggagccttgtgcattcagttgtccttttgatttctgtttgctcccatacatcacaagatacagttcatacttcatagtgtgttggtactgactgatgagtttaaagtccaaatattgtttcactaattcctatgtatatactatagtaatagtggctctggatttcatcaataaagggaagcttattttctagttagatatt

SEQ ID NO: 10148 - DNA, 633 bp, Glycine max
atggtgtaaaggcaaccaggttgcgtaactacgtgatgtcctttgatggtgatacactacaaagatatgcaacaattagatccaaagaggctgtcagcatcatcgagaagcacacagaagcattgtttggaagacctgaaattgttgtaacacctgagggggcagtctctaaggatgaaaacatcaaaattagctttggtggtttaaagaagcttgttttagaggctgtgacatttggttcttttctctgggatgttgagagctatgtggactcaaggtaccattttgtgttgaactgagtaaatctttatatgtgtatcctttttagatcccaccaggtgggagggaacctcgtgcattcagttgtccttttgagttctgtttgctctcatacatcacaaggcatagtttatagtgtgttggtactgactgatggagtaaatttgaatgtaacttcggtgttaaaagtccaaatattgtttcactaattaatatgtatatactgtagtggtagtggctctggatttccctaataaagggaagcttattttctagttaattagtgaaacaatatttggacttttaacaccgaagttacattcaaataagcttccctttattagtgaaatccag

SEQ ID NO: 10149 - DNA, 520 bp, Glycine max
  unsure (1)..(520): unsure at all n locations
cgtccgaattccggtcgaccacccgtccgcccacgcttccgatccaaagaggctctcagcatcattgagaagcacaccgaagcattgtttggaagacctgaaattgttgtaacaccgcagggggtaattgattcttccacggatcagagcatcaaaattagctttggtggtttgaagagacttgttttagaagctattacttttggttcctttctctgggatgttgagagctacgtcgactcaaggtaccattttgtcctcaactgagtcctgctcactcccatgcaccccaaggcaaagtctgtacggactgaaagtacaaatatttttcacctttttgatcagtgacattggaattggttttcactattaaaaggatatcttaaaattagatattcccacattggtttatccttcattatggtgatttttgttggagtattaagtgtgcaaccgatatagacctgtcaacattcagatccagcannattcagattactaatgactgttgtgacaatta

SEQ ID NO: 10150 - DNA, 484 bp, Glycine max
cctataaatatttgacagaacggggaaatcaaattctccctccggaattgaacagaaatagaatcatctctctgtctagggtttcattctttttcagctttatttgttctgtagatccatctagcttcggtgctgcaaatggacgtcgcagtcactgccgttcggtcaccgctgatcgtcctgggaagtccggtcaacgggtccgcctcagctcggttgggttccacttttgggttttccagaaagctatgcttgaattcagtatttatcccgaagcaagttcgtagaagagggtttgttgttagagctgcatcctcatctccggagtgggatgatgccaagatcgctcctcttcagctggagtccccaattgggcagtttctttctcagattttgaaagatcacccgcatcttgtgcctgctgccgtcgaccagcaactccaccagctccaaactgaccgcgatgctcatctacaagaccaac

SEQ ID NO: 10151 - DNA, 1605 bp, Glycine max
cccacgcgtccgctttgataaataaaataaaaaacagttttttgaaggtgatatttttgtttaggaagtggcaaggtgtgagtggagggcgcatgtgtatgtagcgtgcacccttccacattctttctcgttctcgatctctctcgatttttccttcccttttctccataaacgaggtgcttcagatttgctcataataggagggaatcgaatcgaatcgaatcgaaaggaaagtgcagaatggatgacatgccgttgccggcgctctttgagcaagcccgcaagatccacgccgcagccaccgattccggcgccgaccaggaggttgtgaagaaggggtgcgaggctctgcatagatgcgaggacatggtcaataatctaggtttgttctctcccaacgagaccaaagaagatatcagcaccacgaatctcaaatacattctggtgccattttatcttgcggagttgacagaaaaaatagcacaggatgacaggatacagattctaaagtcttcccaggcaaaacttaaggagtttatctcattttgtgaagcaatggagctggtcccaaaagaggagttagaatcttacattgatggggcaccaaaaactgttgctgatcagagggccaggaagatcgctaggttcaaacgtcagagagctgcagaatcaaagttgttggaaataaaagagcgaaaggaacgacgtgggcgttctactaaagcagctgccctgtccacccctgttgaggcaggagaggaagaagtattggatgatgatggggaagaagaaagagaggcttggatcactaccatatctttggcaatctgtaaggcactagatatgctggatatgttgaagaaagaggaagagatgctttctgctgttaaggatagacaatccaaggatggggataaggagttctctaaggatgttcttgatgaacgtgccaagaaagcagaagcttggcatcgtgattctgcagttcgtgcacagtacactaggccatcaccaccaatcacatgtgccactttcgcccaagatgttctagaaggaagagcaaaggcttcacaagcacacgatcacaagcatcaacccctaatatttggaccagctagccttgtaaatggaaacataacaactgagagagaaagaatggcagctcaggtcttccaacctagtcataggatgccaactatgagcattgaggaggccgggctaaaagaaatggaaataatgaacaaatggcaagagagaaatgtcaaactcatggaagaagtcaattcatcttggcacaatgataggaagtcaaagctaggagaagacgatgatgatgaagatgatgatgctgcacaggagaaagcaagggcttgggatgactggaaggatgataatccacgtggtgctggaaataagaaacttaccccttgtgggtaaactgaggtcttccctggcttaagtaacgggcttaggataaaactgtttttaacgaaatcccgtaatttggagttgatatactacttgtagttagattgtgttaagattatatgtataccaggattttcatttgatttacatgtgtttttcttgtgagtgctagtaggg

SEQ ID NO: 10152 - DNA, 435 bp, Glycine max
gcaacgggctgcttcataatcgaatcgaaaggaagctgcagaatggatgacatgccgttgccggcgctctttgagcaagcccgcaagatccacgccgcagccaccgattccggcgccgaccaggaggttgtgaagaaggggtgcgaggctctgcatagatgcgaggacatggtcaataatctaggtttgttctctcccaacgagaccaaagaagatatcagcaccacgaatctcaaatacattctggttcgtatgtttgagtttagttacttttacttttaattaacgccattattttatataatcaaggaaaatgaataccaccatgaacctatttaggtcgtgtttggaagagttaaataggtgtttttacttcatagcaatagagccatcgttggagaaattatttttaactcggacactccatcaaaacat

SEQ ID NO: 10153 - DNA, 490 bp, Glycine max
  unsure (1)..(490): unsure at all n locations
gggctgcttcataatcgaatcgaaaggaagctgcagaatggaggacgtgccgttgccggcgctctttgagcaagcccgcaagatccacaactcagccaccgccaccgcctccgccgccgaccaggtacgctttagtcttctcattctgtctctttttttttttttttgtgttcttcatcgctttgtttttggggttcgggaggttgtgaagaaggggtgcgaggctctgcatagatgcgaggacatggtcaataacctaggtttgttctctcccaacgagaccaaagaagatatcagcaccaccaatctcaagtacattctggtgccattttatcttgcggagttgacagaaaaattagcacaggatgacaggatacatattctaaaggcttcccaggcaaaactaaaggagtttatttcattttgcgaagcaatggagctggtcccaaaagaggagttagaatcttacattgaaggggcatcanaaact

SEQ ID NO: 10154 - DNA, 585 bp, Glycine max
ctcgagccgcaatagttgaaaactctggagcctggttaaatgatttgtgtgatcaagttgatgaaaaagttgtttttaagccattcaactttgattctattgctgagcaagtaattaaaagcattgacacgcaatttcaaaagatgttaggatcagagtttatacttgaaattgagtatgaggtcatgacacagatacttgcagctgcttggttatcagacaagaaaaaagctgtggaggattgggttgaacatgttcttggcagaagctttgctgaagctcatcagaagtaccgctttgtacctgaatttgtgatgaaactggttaactgtgaaagaatttttttggaagaacaatctcctggagtatgccttccagctagaattaacttgaactgaatttttgctcactatgtattttgtaattacttgtaaaatgtagcttgtaggatatagcatttggtagccactagcttttttcggctaatcaatcccacaattttttcttttgtggtgatcctatggtaaaagaatgtatcttcaccagttttcatgttaattctaatgtctttctgcttctgcattt

SEQ ID NO: 10155 - DNA, 467 bp, Glycine max
gagagttctttttttcttctggttcttggtttggtttgttgctcttgttctagagagagagagagggataagtgcctgctccttcggcatttccgtcagacaaagttaacacttccaagaccgattaatcaattcgccccttcaccattccctattacatgaactctcccaagattttaatttgaagctgaaagaagaatgggagaaaatgaagaagcgatgcagaggcttcactttctgaagcagccgttaaacatggagcaacctagcatcccgcaattcaacccctcgcaaatgcgcgcgaggcagcatcatcatcagaatcagttcgacggtggggacagtaacaagcgggctggtataccaccctcccacccgcacccgatccttcccatttccccctactctcagatcccggtggtcgcgtcgcacaacaacatttctgcctacaccagccacacccgatc

SEQ ID NO: 10156 - DNA, 505 bp, Glycine max
ttatgttttaatagtggatgtagagagagaaagaggcagagagagggttcttttcttcttctcgtccttccttcttcgttgttgctcttgttctagagagagaaagagagagtgaatcttggagagataagcgcctgctccttcggcatttccgtcagacaaagttaacacttccaagaccgacgtagctgctactgctattattaatcaattcaattcaattcaattcgcctcttcaccattccctattgtagtagatgaactctcccaagattttgattagtagcggaatttgaaggtgagagagaatgggagaaaatgaagaagctacgacgactgacatgttgcagaggcttcactttctgaagcagccgttaaacatggagcaacttagcatcccgcaattcaacccctcgcaaatgcgcgcgaggcatcatcatcagaatcagaaccagttcgcggtgggaacagtaacaagcgcgccggtataccaccctcgcaccca

SEQ ID NO: 10157 - DNA, 521 bp, Glycine max
gaggtgacctcatccgtggttgttgagattgagaaaaatacagagaggcactgtagatcagatgccagatcgaaccaccaagacctgcaatttttaattttcattcagattcccttttcacttttaattcaaaaccctaattttcttttttccaccctccagcgtcgccgtttctcaacaagtcttaccctaatcgtcaaccattcaccaataacgattcaaaaacccaaactttgtgtgaagtagttcattccccattactcactcgcttgttttgaattttatttgttgcttcgtttcccactatgaaagaaggtaaatcagttaaactcaaccatcaacaaccgcaccagaacggtcacctctcgccttcaaaattcgccaaattgtttgatccagaagcatcctgggacaaggatcaattgggagacgtattgcattggattagacaagtgctcggccttgcgtgtggattcctttggggttccatacctttggttggaggcatatggtttatcctg

SEQ ID NO: 10158 - DNA, 841 bp, Glycine max
cagataactcaggagtatgatcagcatttgggggctgtgagtaccatcacctttgttgataacaacaggaggtttgttacttccagtgatgacaagtccctcagggtctgggaattcggtattcccgtggttataaagtatattagtgagccccacatgcactccatgccttccatttcgcttcaccccaatgccaattggctcgccgcgcagagcttggataaccagatacttatttatagcacaagggagaagttccaacttaacaagaagaagagatttgggggacatattgtggctggatatgcgtgtcaggtcaatttttctccagatggacgatttgtcatgtcgggggatggtgaagggaagtgttggttctgggactggaagacttgcaaggtctacagaactctcaagtgtcacgaaggtgtttgcattggttgcgagtggcatcccttggaacagagcaaggtagccacgtgtggctgggatgggatgattaagtattgggactagtttctcctgatcaacctgttgctggaatcagttggcagaagcagggcaaagaaaggcactacttcacgacagaaaggagaagaaacattgaattcacaatgttgatatattcatccttggtttaaagttcaatggcttttattgaatattatcacgagatttctcttcactcatcatgacatggccacccagtgttatgtgctaattgcaattttgccatctttttagggacttttgtacaatagtcattttaagtttgatattcatctgtgtgaaaattgccctcccatgtttgcagttttaatttaattacgttttatgcttg

SEQ ID NO: 10159 - DNA, 466 bp, Glycine max
aaaaaaaatcatctacgttttggcgctataaaaagggaaagtcgttcagcatttttggttcttccactaacagagccattaaatcttctctcaaaatatttgtgattccatgcccaacgccctaccctgaaaatatggtagccgagagagaggttaacggtaacggcgtcggagagggaagaacaacgctaatattcacctacggaaccctgaagcgaggcttctccaaccacccccttctccaagacctcattcgctccggcgacgcctccttcgtcggaacctaccgcaccgccgccaaatatcctctggtctgtgggccctacaaggtccccttcctcctcaacattcccgggtcgggtcatggggtccatggggagctttactcggtctccacgcgcggcctcgagcgcatggacgaagctcgagggaacctcacgcgcccactacgagcgtctcccgatca

SEQ ID NO: 10160 - DNA, 596 bp, Glycine max
cccacgcgtccgcccacgcgtccggctgcatatgtcttgaaatgtgatgatgacacttttgggagggttgataccgtcttaaaagaaattgaagctgtgcccgagcaaaagcccctttatatgggcaatctcaatctcttgcatcggcctctaagaaacggaaaatgggcagttacttttgaggagtggcctgaatcagtatatcctccttacgcaaatggccctgcatacataatttccagagacattgttactttcatccgatctcaacacaaggagaggagactgcggctccttaaaatggaggatgtaagcatgggaatgtgggttgagcgatataacaataccattgcagcagtccagtactcccacaattggaagttttgtcagtatggatgcatggagggctacttcactgcacattaccaatcaccaaggcagatgatctgtctttgggacaaattgtcaagaggtcgagctcgttgctgcaacttcagatgaccacacgaacaactttgcttcttggacgtgtcactgtatctctgtattctttatacccttgtgctgatcctaagttcacctaggttaatatctgg

SEQ ID NO: 10161 - DNA, 375 bp, Glycine max
gaagggggaacagtggaacaccgcacccgttgttgcgatgctaagctttgcactgacacaacatctttctcttcttcgaagttgtattgtatctgttcacgacgctcttctcgcacattctttcgctcctctctcttttaccgtctctgtacttgctttctctctgactttacctcgctcgcttttcacatctaataagcacagtaagagttgaagaaagacagtaatttcaatgtacttgaggagaatacaatgcagagatcggacatgggctttggtgttgcagccatcgaaatacttctttaggccaagattctctgatcaacgatattttcaatctttgtcccctaagaccactgtggaaaaatatgcttc

SEQ ID NO: 10162 - DNA, 346 bp, Glycine max
gatagaaagagaaaatgaagtcggtgggtagggttggcggaggagaatcagagcaacgtggacattttcagatgccactgcactatccaaggtacacacaggctgactatgaaacaatgcctgagtggaggcttgattctttgctcaaagagtacggcttaccaatcattggagatcttcatcaaaagagaaactttgccatcggagcccttctttggcctcactgaacctcctttgtttgtaatcatcatcactaattaagcttattatctactatttttgtgtgatttggcagtgcggtacatattttcatttcttcgtttcagagatatatatgttagaaact

SEQ ID NO: 10163 - DNA, 588 bp, Glycine max
tgcttcttctggtgaagtaaaactttgtccttctccacaaattcgccttgtctgcgtcaaaaccaatctcaaaacactcaccaaggcttcttctcagaattgcgtcgaaagcatgagttctctcaccagtcttgctccactcgaagcagtgctctttgatgttgatggaactctctgtgattctgatccactccactattatgctttgcgtgaaatgctccaagagcttggttttaatggaggtgctcctataacagaggaattctttgttgagacattttctggcaagcacagtgatgatactgccttggttgtctttcctggtgatctggaacgaggtttaaagtttgtagaagataaggaagccatgttccggagattggcttcagagcaactgaatcccttgaaaggccttgataaagtgaggaaatgggttgaaaaccatggtctgaagagagctgcagtcaccaatgctccaaggaaaaatgcagaactcattatctcaaaacttggtctaacagatttctttgatgctgttattattggtgatgaatgtgaacatgccaaaccttatccagaaccctactt

SEQ ID NO: 10164 - DNA, 498 bp, Glycine max
ggttttcctctgttctttctctctctctctctctgtacacaccacatctttcagtttcactaacaatgacagtttcttctgagaatggcgtctcaagcggccagagttctctcaccggtcttgctccacttgaagctgtgctctttgatatagatggaacactttgtgattctgatccgctccactattatgccttccgtgaaatgcttctagagattggttttaatggaggtgttcctatatcagaggaattctttattgacactgttgctggcaaacacaatgatgatatagcctcggttctctttcctggtgatctggaacgaggtttaaagtttgttgatgataaggaagccatgttccggagattggccgcagagcaactgaagcctttgaatggtcttgataaagtgaggaaatggattgaaaatcatgggcttgagagagctgcagttaccaatgcttcaagagcaaatgcagaactcatgatctcaatac

SEQ ID NO: 10165 - DNA, 553 bp, Glycine max
tatcgagccgaatcggctcgaggagcaatccaagtataccatctgtttgtcccaacaaccatcagcctcaggaggtggaggtgaatcttgttataacagattactgtatgcctggcatgacaggctatgacttgcttaagaaaatcaaggaatcttcatctttgagaaacataccagtggtgattatgtcatctgaaaatgtgccttcaaggattaacagatgtttggaggaaggagccgaagaatttttcttgaagcctgtgaggttgtcagatttgaacaagcttaaaccccacatgaagaaaaccaagttcaaagatcaaaagcaagaaacagtagaaaggtttgaagactcagaagttcaacagcaacagtcacaacaacaaatcatcatccaaaatgagcatcaccaagcaccaaaattacaagttcttcagccagagtcagaatcagagtcacatccacaaccaactattgaacaacagcaacaaattctacaacaagcccaagaatcagtgcatagccccccgtggtatacataaaatattggcaa

SEQ ID NO: 10166 - DNA, 772 bp, Glycine max
ctttcaggtctaatccgcacaaggattgcaagctcctcaaactcttcatggccatgagaagggcatactgagaactcgggggttaagatctggctcgtaattgggtaactcagactgagggtgattatatcttgttcttatgaagggactacatccgagtctactattgaaggtagaaagatgattagcttgcgtgagaatgatgaatgcaactattgacgactatatctttggatctacctcgataaagacgtatctgagaatgtctttatatcatatcaaatgtatgcgttagagatacggcattgacttgccaatgatgactaaggtgctttaatcacagagaatcatcaataatgtgaccatgtcatctgaaaatgtgccttcaaggattaacagatgtttggaggaaggagcctgaagaatttttcttgaagcctgtgaggctgtcagatttgaacaagcttaaaccccacatgaagaaaaccaagttcaaagatcaaaagcaagaaacagtagaaaggtttgaagactcagaagttcaacagcaacagtcacaacaacaaatcatcatccaaaatgagcatcaccaagcaccaaaattacaagttcttcagccagagtcagaatcagagtcacatccacaaccaactattgaacaacagcaacaaattctacaacaagccaacaacaataacaagaggaagaccatggaacagggcctttcacctgagactgacagaacaagaccaagatacagtggcatagccac

SEQ ID NO: 10167 - DNA, 434 bp, Glycine max
acccttccgtccggttgcaaaaagacaacagagggggcaccacaaaccacataattcgacaacactctctcctaattgttcaacttctggagctacttccaccccactagctaccttcattgtattttcagtctccaaactccaaagggaaaatgagcagaccaggagattggaactgcaggacatgcaaccgcctgaacttccagagaagagagtcgtgccagcgatgcggggagcctaggagtggtggcggcggcgactacggcggaggcttcggtggtggcagaggctcttcctcctttggcttcaccactggcccggatgttcgccccggtgactggtactgcaccgtcggaaactgtggagcccacaacttcgccagccgctccagctgcttcaagtgcggtgcccccaaggaggactcctccgccgga

SEQ ID NO: 10168 - DNA, 790 bp, Glycine max
  unsure (1)..(790): unsure at all n locations
agaacacagagaaatatgaaattgatggacaattgctggagtgttcgctagcaaagccacaagcaaattcacaaaaaccagctttacttcccacttatccacctcatcttggttatggtatggttggtggtgctataggtgcaggatatggtgctgctggctttgcacaaccactgatgtatggtcccggaccaacccctggtggcatggcaatgatgccaatgatgttatcagatggaaggattgcatacatagtgcaacagccagggtttcaacagcctgccccagtatcccgacatgggaggagtggtggcagtagctccagtggtgggaaatgcagtaatgatgataatcgcaatcgtgggcatggccgctatcatccctactaacttaatgggctttaaggagctagcaaaacaaggaattgcacctgaggcctaaaagtgttgacgattcaaggcacagcgcccaactgattaagacaaacagggcgctgctgtgaatgcagttatgattttgtaatacatctacctagggccaagattcagttaagcatctaagtcaggttttcgtataattttacttatcttgtccatcaattttttgatctcaaattcttaaagagaccccagtgatctatttgaaggacatgataaatcttactagattgatgaaaaattatgtagaggtgtttcagatggttagcctgcggttcatgtattcatgtttccaaccgtcgttctagaagaattcgaacgatgtttgaatgagtattggtgcccgtggnnnn

SEQ ID NO: 10169 - DNA, 682 bp, Glycine max
  unsure (1)..(682): unsure at all n locations
gaaatggtagcaatgaagcagtgactagaggtggtgaggaaggtgatttggactgtgattcaatgtcataattgtccaatatgtttgaaggatctgaagctcttggttccgttctacaacctcgggcttggcctttcttccccaaccatttcttaacctttcactctctcttatgcatatcaagcatgccttcatcctggacttgtgattcaacatgcaggaaacttgaataacacgccagtaaacaaattgacatgattgctttgtttttatgcaaatgtcttcaattattgactgctgatgctattatgatttggttcatatttgttttttatgtagcatatacagtcaagggttgaaaccttaggtgtcatgagccaggatgcaacggcgggctgtgttccatcaaacttgctcattcttcatataacacttatagagattttgggagtcaagacggaaaggcaatttggtggtgtgcgatgtattttgttatttggtgcctaactgcctattttagattcttcattgtatatgcagagaaattcctgataatggcatgcttgatgaacatttttgtttgctttgctttttataattttgtggccncgtgtttattaccccaaaaaaaaaaaaaaaaaaanngnnnnnagcggccgctctagaggatcctagcttacgt

SEQ ID NO: 10170 - DNA, 684 bp, Glycine max
tcgtagagattcttccacttcctacctctacctctgaacttgccaaaccctctttttaacaaagacaaaggagtcagagaagggagagaaaacttgatcgtttttgttttgtagaaacaacttggtatagttaataataatatttgaggagatcgagagagcaaagacaaagtttgtagtttgtaagtacagagaaagatcacatgattgcgaagacaaacacgattatgcctatcattggcaaactgtactgttcatcgtctgagacggtgcttgtggtgaggaggaggccacacgtggtgaatggtgggggttttgtagtcatggattgtagtgcccagagggttgtgttcagggtcgatggttgtggtgttcgtggcaaaaagggagacttgattctaagagaaggagatggagacgctttgcttctcatgcgtcgaatgggaggcatggttgaggccttaagcatttacaagaagtggaaatgctacagcttggactacgaaggatctcggaagctggttttcagcttgagagaacccaattcttgtttggttaagaacaatgcaatcagaatcttcactaggaacagtggccgtgactttaagatcaggggctgcttcccggataagtgttgtagcattgttgactctaaaggcaacgaggtagcacaggtggggatga

SEQ ID NO: 10171 - DNA, 720 bp, Glycine max
ggacagagaaaggaaaggattaggggatagtggcaagcgaggaaggaagtgaagtttcaaggttgacgcaaagaattgaattgaagtgataagtattatatagcatgcaaagaaaatggtaaggtaaggtaagatcgatagcagaaaaggaaaaaatgacgatggacgatgatagctccatatatgtagggggtcttccctacgacgccaccgaagaaaccattcgcaccgtcttcaatttgtatggcgctatccttgatgttaagataatcaacgacccacgcaccaggggcaagtgctattgttttgttactttcacaaatcctaggtctgcaattgatgccatcaacgacatgaatggcagaaccattgacggccgtgtggttaaagttaacggggtgaggactcgtgggggcaggtcaaattttggcagagaacgttattactatcataatgatgagaggaatggagattgggatcgcagtagggatcgagaccgagattatgatcatgatagtaatgatagggatggatataggaatcggagcagtgattggggtcgagaccgtgacaggtctcgagatcgtgatcaggacagggatagaaggtttgagcatatgcatgattatgatcaagccagagaagctatgctagaaaatgactggatccgagaggatgatagagttgaaaatgaacaagaacatagcaggggacatggtg

SEQ ID NO: 10172 - DNA, 443 bp, Glycine max
ggtacacttcttagcagaaaccaagacaacaagagttgagtatagtgttcttgtaccacagacagcgcacggtgtagcacatcattcctcgatcgagctcgctccaatggcagagacaccaaacaaaggccacatcgtgatggtacctctcatggcacaaggtcacctcatcccatttctcgcactagcaagacaaatccaacaaaacacaagcttcaccatcaccatagccaacacaccccaaaacattcaacaccttcgatctgcactttcttcttctactactcctaatcatcaaatccatcttgctgagttagtacccttcaactctacccaacactccaacaaagacaacaacacacaaaacgctcccctcactgacctattgaaacttggctatgcatcactcacccttgagcctccttttcgctccttgatatcac

SEQ ID NO: 10173 - DNA, 452 bp, Glycine max
  unsure (1)..(452): unsure at all n locations
ctcgacncgctcgagccgaatcggctcgagtgctgagtgctgagagacaatggagctgtgcactcgaaccttcacaagtttctttcttttcaacccttcttcctcttcaaaccccctgtttcttcgtgctaatgccaacgctaaaacacccttcaaattcaattcccttaaactctcatctttcccccctcatattcacctcttccaaccctttctctctcctcacacttcttctcccttcacactctcagctgcttctgcttcttcttcttcttcttcttcttcagttgcagttggcacagaacaggaccgtcttccagcagaattgaatgtcactgaaacagcggaacccaattccagagttagattgcatgtggaggtgccatcattggtatgtgaggattgttacaagagggtcatagcagagtttatgaagcaagcaaagatctctg

SEQ ID NO: 10174 - DNA, 375 bp, Glycine max
gagagcgatgctaataatgtttggtatgtatgtatgtatgtatgaggctggctaacaggtgagagtcagacacgcacacgcgtaggtttaatttcatctctcaaagaaatgaatccattgaatatttgtatccttgcttcgctttgcttgcatgcttccttccccattcaaatctctctcagttgtttgttatttaattgaatttaattttgtgatcggaatcggaatcggaatctgagtggatgtggattgggtggtgaaccggtgaaagatgcgacgacgggctgccgagtatcggcgcccggcacgacggaggttttcatattggatctggcttctccttgctttctcctccatcctcggattgctcctctt

SEQ ID NO: 10175 - DNA, 296 bp, Glycine max
gtatgtaggtttttcacttgatctctcaaatgaatccacatttgtgtccttcccaattatttaattttccgagtgagttggaatcggagtggatgtggattgggtggtgaaccggtgaaagatgcgacgaccgggctgccgagtatcggcgcccggcacgacggaggttttcatattggatctggcttctccttgctttctcctccatcctcgctttgctccttttccttctccaacacaatcaccaccaccaagatccgcttcatcatcctttgtcagagagaaatgcaagagtt

SEQ ID NO: 10176 - DNA, 677 bp, Glycine max
gcagcttattccccaagtacctatcaagaaatggtgtattggcaggcctgctacaagactaatttgcattcccttgttcatgctctcggtattaatcagttttataagtgatatatgcagcacctcattccccaagtgatcctacagtgaagaaagttgctgacaaactggcaagttttgtggctaaaaatggaaggcaatttgaggatgtaacacgccaaaaaaatcctggggatacacctttcaaatttttgtttgatgagagatgtgctgaatacaagtattatgaatatcggcttgctcaagaagaaaatgctcttgtgcaatcaagggaatcacaggtgcctcgtaatgggggtacaagcacttcatcttccaaacaggctagtggtcatcagagatcatctcagcagcatacataccaaattcctgcatctgctttatatgaaagtcctgacaatccaagagcttctggattttcaattcaaacatcatcagtaggaagcagtgaagagcccagtggttcatcaaatgctgattctttggcactaatggagttctacatgaaaaaagctgcacgggaagagaagtataaacaacctaagcattcaaaagatgagatgccccctcctgcttctcttctaggcaaaaaaggccatcacatgggtgatttcatt

SEQ ID NO: 10177 - DNA, 389 bp, Glycine max
gagtaacaagagacccagtctcttttctctctctatgggttctctctgtaaaagactcaatgcagcaagtgcgtcgtcgtggtgattgaggagcgctgagcgaaatgcggggtggtgtttccctgttgttggcgttagcctccgtggcggcggcggcgacggtgtcgtgcggtggtttggcggggacttttcttcctctggaacgggccattcctctgaaccagcaagtggagctggaggcgctgagagctcgcgacagagcacgccacggtcgaatcttgcaaggtgtcgtcggtggcgtcgtcgacttctccgtccaaggaacctccgatccttacttcgttgggtacgggttgtattttaccaaagtgaagttgggatctcctgcg

SEQ ID NO: 10178 - DNA, 583 bp, Glycine max
gttaaatatcaaggaagctatcctggcagctctccatacttcggtcatggatgttttactgccggatccattgacatttggcttcaggcttgttagagatggttctgaatcaggaaaaccttattctgataaagattctgaattagttgaatctcctgcttccaaaggttctgtgattgcacatgaaatgacaccaatggaagttctggttcgcaataacaccaaggatatgatcaaaatgagtcttaatattacatgcagagatgtagctggggaaaattgtgtagatggtaccaaagcaactgttctatggactggtgttctgagtgatattactatggaaattcccccacttcaacaaattaaacactctttctgcctacattttcttgtccccggagagtatacattacttgctgcagcagtgattgatgatgcaaatgacattcttcgagctcgcgcaaagaccacttcagctgctgagccaattttctgtcgcggaccaccatatcatgttcgtgttcttgggactgcatgacgttttggtccataaatctgatgtgaaacttctaaagttttgcgg

SEQ ID NO: 10179 - DNA, 568 bp, Glycine max
ggggagtggaggcagcgaagaggcggagcgaggtaacaaaatttgcattattgaattgaattcctctgttctattcgattccatgcgagacagagacagaagaaaagaataaattataaaagcagcagcaaagagtcttgatcttgatctggtggcaaacgatggcgtttcgtggtctcggtgtgttgttggtgttgttgtttgtgattggcgcgggcgccgacgatgccaaacgcgacgacgacagggctcccaagtcggaatcctgcaataaccccttccaactggtgaaggtggagaactgggtggatggtgaggaagggcatatttataatggcgtcagtgccagatttgggtctgtgttgccggacaaacctgacaacagtgtgaaaactcccgcaatattcgctaatcccatagactgctgttccaattcaacttcaaagttatctggctcagttgctctctgtgtccgtgggggctgtgacttcactgttaaagcttattttgctcaatctggagctgctactgccatcttggtcattaacgactcagaagatctctttga

SEQ ID NO: 10180 - DNA, 367 bp, Glycine max
ccctcgacccgaatcggctcgagcggctcgagaagagtcttcttcatcttgatctggtggcaaggcaacccaaacgatgacgtctcgtgtgttgctgttactggtggtgttgttgtttgtgattggcgcgggcgccgactatgccaaacgcgacgacgacagggctcccaagtcggaatcctgcaataaccccttccaattggtgaaggtggagagctgggtggactgtgaggaagggcatgtccacaatggcgtcagtgccagatttgggtctgtgttgccggtcatacctgtcaagagtgttacaactgccgcaatattcgctaatcccatagactgctgttacaattcaacttcaaagttatct

SEQ ID NO: 10181 - DNA, 469 bp, Glycine max
aaagagggctccaaaagttgaagttgggactaagactactgatgcttcaacagatgaatggctacagggaactgcttatactcagtctctgtcaagcaagtcaaagaagaagaagtagataaacaatttctcacgttcagccactcactagactctaccatggatatggaatacagaatcctgtaactgactagggttgagtatgagagaacacgaggaagtagttgtgaaattttggctgaaggatctagctttttgttgtagcttaagaatttttgcttttctccattcgaatgtagttgaactttttctaaactaacaaggatttcagttaggaaggatacaacttttgagatgtggcataatttttactagataacgtttattctgtgtttgagggagaatttggatttttggtttctagtccatgcctttttctcgttctatatatttataatgacggagctca

SEQ ID NO: 10182 - DNA, 523 bp, Glycine max
gttcctgtgtatgtttttgacttggattacacttcgttgttgttgcttgatcggtatcatcagtcggtcgcctttaaggacatggtgattgctgttaggacgaggaacacgcagaccgtgagtgattatagttgtaatggtaggcatgtgttcacacagacgagggagcttgagcgtcctattgtagggtcgattcttcagagtatgtggggggtgtcgccgactcatttgaattggagcccccagcacaatgagactttggtggattatacgtggagtatggggcagacaccctttgggccgttttctgagatgttgagtttgtcctttgtgcacaaggatgctgccaggaggaatgttctgttgacatcgctgaattacagcataacgagtgctatagatgttctttagagtgttgagacgcatggcggtgctaacaatctgctcaagcagaagcagcatgtggagttcgtgcagagatggaacctttttaagtacaagctgaacaaagccatgtctgcgt

SEQ ID NO: 10183 - DNA, 1811 bp, Glycine max
tgcacgcgcacgtaagctcggaattcagcctgcgcagagtttgaactttgaacgttgaaggaacatagaggcagaggtttttcttctctcaccgtagaatcgaatcgagttcactttgatcgtgtgtgtctccgatcttcaaatccgcaacaaccatggtgaggggattgctcaacaagctcgtctctcgctccctctccgtcgccggaaaatggcagcacaaccaactccgccgcctcaacatccacgagtaccagggcgctgaattgatgagcaaacacggagttaatgttccgagaggcgtggctgtttcctctgttgaagaggtcagaaaggccatcaaggaccttttccctaatgaaaatgagttggtggttaagagtcaaattttagccggtggaagaggtttgggaactttcaaaagcggccttaagggaggagtgcacattgttaagactgaccaggttgaagacatagctgggaagatgcttgggcagatactagttaccaaacagactggtcctcagggaaaaatagttagcaaggtttacttgtgtgaaaagctgtcactagtaaatgagatgtactttgctataacactggatcgtacgagtgctggtccaattataattgcttgtagtaagggaggaaccagcattgaagaccttgcagagaaatttccggacatgattataaaggtacctgttgatgtttttgaaggaattactgatgaagatgctgcaaaggttgttgatggtttggctctcaaagtggctgatagaaataagtcgattgaacaagtgaagaatttgtataaactttttgttgattgtgactgcacccttttggaaatcaatcccattgcggagacagctgataaccaattggtggctgctgatgctaagttgaattttgacgataatgctgcatatcgccagaaagagatattttctctccgtgatacaacacaagaggaccctcgagaggtgactgctgcaaaggcagacttaaattatattgggttagatggagaaataggctgcatggtgaatggagcagggttagcaatggccacaatggatataattaaattgcatgggggtactcctgccaattttttggatgtaggtggcaatgcctctgaaggccaggtggttgaggcatttaaaatattgactgctgatgacaaagtgaaggcaattttggttaacatttttgggggtataatgaagtgtgatgttatagcaagtggaatagtgaatgctgcaaaagaggttgcactgaaagtacccgtagtagttcgtctggaaggcaccaatgttgatcatggaaaaagaattttgaaggaaagtggtatggcgttgataacggctgaagatttagatgatgctgctcagaaagcagtgaaagctgcttacaaatgaagggttacttctgctcaaatttaaaattcagtttagttgcaacattatttttggtgttaaaacatattttcacgagaaagggattgatgcgagaagtcttattgaagctgcagtgcgtaatcaaagcttttccaataagttagtgatttccaagttgtagtacatttgagttgattcacgtggtggttgctatttggcttctgtcacaattcaatatactggtcccttcctttctgatttttcctggttgaattctctttagtctttatgcaaataacatggaaatacttgtttttctcttagacacagtggttcattaagtggccaaaacctgttttctaattgaggttattccattttgaatgtttaatgacaaatatttttagt

SEQ ID NO: 10184 - DNA, 486 bp, Glycine max
tgaaattttcttattttaaaataaaaaaatttgctagggtccggtctttgcgtttggcacaggctgcgcagtgtttgaacgttgaaggagagcgtagaggcagtggttttctttttttgatttctctttgtagaatcgaatcgagttaatttttgatcgtgtgagtgtccgatcttgaaatccacaacaacaatggtgagaggattgctcaacaagctcgtctctcgctccctctcggtcgccggaaaatggcagcacaatcaactccgccgcctcaacatccacgagtaccagggtgctgaattgatgagcaaacacggagtcaacgttccgagaggcgtggctgtttcctctgttgaagaggccagaaaggtcatcaaggaccttttccctaatgaaaatgagttggtggttaagagtcaaattttagccggcggacgaggtttgggaactttcaaaagcggccttaagggaggagtgcacatt

SEQ ID NO: 10185 - DNA, 375 bp, Glycine max
gaaaccaaggaggagattgtttatgatcatgattacccttgtagaagtaatgacagtaatgatggggggacaaagacagagttggatcatcatacacttgcatcagaagagaaattgggaattgaggatgaggcaggagatatgaatgctgatcttaacttcacagagcccgaacttagagataggagctacaatgacagcagtaaccttaaagtgtgtagtggtaggacaattgaatctatgaaggaaacaagtgagacttctggtgctattgtgaatgatgacttggagtcaattctaagacaaagagcattggaaaatctaagacagtctcgggagattcagtctagtgcaaaagctcctgatcagaacaat

SEQ ID NO: 10186 - DNA, 387 bp, Glycine max
agaagatgaagaagcaggtgaaggtgccgaagataggaacgtgacgtgggatgctgaggaagaggaggaaaacaagaagaggttgctgaagggtgttgccaagaacgtgaaatggacggctgagatcacgggaaaaggggagaagagtgggagctcgagaaagtacacgtttcaggtgcagagtggggatgctgagaagaaaaaggagaaggagaaggagaaggagaagaagaagggaaatggatcgcgcattgtggagattcacgagccaagtggtcatagagatgtggttttgagacaggcatttgccaagaggttcggagctgttcaaaatgagaagggcaaaaagaaggacttgtccccctcaagatgctgcattgttgatcc

SEQ ID NO: 10187 - DNA, 721 bp, Glycine max
ctacgaatgtcgtttagcaactaaacccagaaccctattgttgagtgtggttctctcttctctccacgatcgataaggtttggaggaacacaagagggttcgaaaatggtggtgaggattcggctatcccggttgggatgtaagaacaaacccttctatcgggtcatggccgctgatagcagatcccctagagatggcaaacacctcgaagttctcggttactacaatcccttaccaggtcaagatggtggcaagagaatgggtctcaacttcgacagagtgaagtattggctttctgttggagctcagccttcggagcctgtggagcggcttctattccgagctggaatgctgcccccacctccgatggtggcaatggggcgtaaaggtggaccacgtgatactcgcccagttgatgctctcactggacgtgtgctaaatcaagaaaaggcagctaatgccaataacaatgagcagcagcatgaccctcctgaaaacccttaaagtgatgtattttaggattttttcccccttttttcatgaccattttgttcaagatatatctttaatatctatgttcccaattgactttacagaacccaatagaataactcctgtttgtgtggaaaagtcgggttcttttgcgacattgtgggtgtattgtccaaagcaagggctacactccgcccaaatttaggttgtttgatattatgttaagtgt

SEQ ID NO: 10188 - DNA, 974 bp, Glycine max
attaaggagttctcggatgtacagtcacagatccaacaaatatgtggagagatagctggaaacttgaaccttaatgacgtgtcacctgcagttgatgagtctgacctgtccctgaagaagttggatgaatatcaatctgagctccaagaacttcagaaggacaagagtgagaggttgcacaaggttcttgaatttgtgagtactgtgcatgatctatgtgctgtccttggtatggacttcttcactactgcaactgaggttcatccaagtctaaatgactctactggtgttcaatccaagagcattagtaatgacacccttgcaaggctggctaagacagtcttgacgctgaaagaagataaaaaacagaggctgcacaagctccaagaattagcttctcagttaattgatctttggaatctaatggatactcatcccgaggaaaggagactatttgaccatgttacctgtaatatgtcagcttctgttgatgaagtcactgttcctggtgcccttgctctggatctgattgagcaggctgaagtggaagttgagagacttgatcagctgaaagccagcaggatgaaggaaattgctttcaagaagcaagcagagctcgaagagatatttgcccgtgctcatatagaagtagatccagatgctgcccgggagaagattatggccttgattgattcaggaaacattgaaccaactgaattactggctgacatggacaatcagatagcaacagcaaaagaagaagctttaagccgaaaagatatattggacaaggttgagaaatggatgtcagcatgtgaagaagagagttggcttgaagactataaccgggtacttaaaatctcgcttcggctttatttctctttcttagtttgaataattggttgtgcacagccgtggatagagaggtgaagtagtagtattatgatcagaacatttactatcatgttaacaaa

SEQ ID NO: 10189 - DNA, 384 bp, Glycine max
caaaagatatattggacaaggttgagagatggatgtcagcatgtgaagaagaaagttggcttgaagattataatcgggatgataacaggtataatgcaagcagaggtgcacacttaaacctcaaacgtgcagagaaagctcggatattggtcaacaaaattccagctttggtcgatacattggttgctaaaactcgtgcatgggaagaagatcatggcatgtcatttacatatgatggcgttcctcttcttgccatgttagatgaatatgccatgctcagacatgagcgggaagaggaaaaacggaggatgagggatcagaaaaagcatcacgagcagcgaaacacggaacaagaaaccatctttggttcaagacccagccctg

SEQ ID NO: 10190 - DNA, 626 bp, Glycine max
gaaaatgttcaaacattaccggtggccccggttagtggttcataaacctttctctaacacactcacacacacacacacactgggtctttgcattctgtggaagagcttgttgggttctctcagctttcacctttccaggctcggatccaaagaaaaatctcaactttcttcaacaattcatctccacaatttctgggtagtggctttttttagcaggaatggctcaacgttctaatgttccaatgttaggcaagagtgaagagaatgtttcagatacagctcattctgacaaagcccagaaaggtcagccaggttcaaagatgattaatccaaatgacaccaaggaaaattcagatgtagtttcttctgctggcctaccccattcaaaacccagagttcattcagaggatccatctggaaagggatcagtgagatcaatacatgagttacaaatgagtagggaggatggtgatcctaaacaatttactgactctccagctcgccatggtggcggtgattcttcccatcgaggtcatgaagtaggttctgctgacaaccgtaaaagaccttcaagacaaagaactgggcctgagcacaacattgaccgttcaccccttcatcgccag

SEQ ID NO: 10191 - DNA, 283 bp, Glycine max
agaaggagaagaaggactttgaagcagaagaaacatagagtttacagagagaaagaaaatgttcaaacattaccggtggccccggttagtggttcataaacctttctctaagcttccgactctctctctcttacggggtctttgcagtccgtggaagagcttgttgggttatctcagctttcacctttccaggctctgattcaaagaaaaatctcaacttccttccaccaattcatctctacaatttctggatagtgtcttttttttagcaagaatggctcaa

SEQ ID NO: 10192 - DNA, 418 bp, Glycine max
ggatctgagtcagtgtgtgacatttctttcttcatttctctcttacaattttttgcaatggcacaaacacaaacccagagaccctgttcaagcgtcctcgattctctgggggaagaaatcgtgagaatcgtcgcacccgtttcaatatgcatgttcctggtcgtaatcctggtctcaactctcaacaccgattcttctctcttcgtcgcatcgatgagcatggtcaccatcgcgtacaacgaaacaacctcggactccacctgggacaagttcctaggagcccttctgaactccttagccttcgtcgtccttgtcaccttcgcaaccttcgtcttggtcctcctcttctacttccgatgcaccaggttcttaaaactctacatggctttctccactttcatcgtgctgctattcctcg

SEQ ID NO: 10193 - DNA, 676 bp, Glycine max
aaatagaagcataacataacataacgaaaactaaatcccaaataacccaatgaatcatcatcctctgaattcaactcgctcgcacatgggaatcgattgatcaacatcgcccagatctacaactgccttcgactggacatcaactattattcattcgggatttaattgagagtaggtttttcgtttgaagataggctgtctttacctccagtaacttcaaagtaatctctgtgccccagccatggctgcaccgtttttctcaacgccctttcagccttatgtttatcagagtccgcaagatgcaattataccttttcagattttagggggtgaagctcaagtggttcagataatgttgaagccacaagaaaaaatcatcgcaaagcctggttccatgtgctttatgtctggatccgttgaaatggaaaatgcctaccttccagaaaatgaagtaggcatatggcagtggttatttggcaaaactataactagcattgtactttgcaattctggaccaagcgatggatttgttggaattgctgcaccttattttgcaagaattcttccaattgatttggcaatgttcaatggggagattttgtgtcagccagatgcttttctttgctctgtcaatgatgtgaaggtcagcaacatagttgatcaaaggggacgaaat

SEQ ID NO: 10194 - DNA, 468 bp, Glycine max
ggaagcataacataacataacgaaaacgaaatcccaaataacccaatgaatcatcatcctctgaattcaactcgctcgcacatgggaatcgattgatcaacatcgcccagatctacaactgccttcgactggacatcaactattattcattcgataggctgtctttacctccagtaacttcaaagtaatctctgtgccccagccatggctgcaccgtttttctcaacgccctttcagccttatgtttatcagagtccgcaagatgcaattataccttttcagattttagggggtgaagctcaagtggttcagataatgttgaagccacaagaaaaaatcattgcaaagcctggttccatgtgctttatgtctggatccattgaaatggaaaatgcctaccttccagaaaatgaagtaggccattattttgcggggggggccccagtggttatttggcaaactaaacta

SEQ ID NO: 10195 - DNA, 404 bp, Glycine max
acgaaaacgaaaccgaataacccaatgtatcatcatcctctgaattcaactcgctcgcacatgggaatttattgaccagcatcaaccagatctgtgactgtgttcgattgggtaccaactattattcagtgctgcagctactactgtggcacaacattaagcttttagttgaatcagaaaggagagtgagatgaaaatgctcaagtgggtggatcagtggactagatcatcatatattaaaaatacgaatgcagggaagtatttttggggatctagggttttcactcgaatacggaactgtttgtgttagttcacaacctagcaggctgggcttgtatatgttatcacgtgatgcaataatagctagatgtggttgcagtggccaccattatggtggccacatc

SEQ ID NO: 10196 - DNA, 370 bp, Glycine max
ataacgaaaacgaaaccgaataacccaatgtatcatcatcctctgaattcaactcgctcgcacatgggaatttattgaccagcatcaaccagatctgtgactgtgttcgattgggtaccaactattattcagtgctgcagctactactgtggcacaacattaagcttttagttgaatcagataggctgtcagtaacgtaaaagtaatccctgtgccccagccatggctgcaccgtttttctcaacgccctttcagccttatgtttatcagagtccgcaagatgcaattataccttttcagattttagggggtgaagctcaagtggttcagataatgttgaagccacaagaaaaaatcatcgcaaagcctg

SEQ ID NO: 10197 - DNA, 976 bp, Glycine max
gaatgatgttggtaaaaacagggcagcagcttctggtagtaagctgcaggagctcaacaatgcagtgattgtacaaagcttgactactcagctgactaaagaacacctttccaatttccaagctgttgtttttactgatatcagtcttgagaaagcctttgagttcaatgattactgccacagtcatcagcctcctattgcctttattaaaactgaagttagaggcctttttggttctgtgttctgtgattttgggcctgagtttactgttgttgatgtggatggtgaagaaccccatactggcattattgcatccataagcaatgacaaccctgctctagtatcctgtgttgatgatgagaggcttgagtttcaggatggagatcttgttgtattctctgaagttcatggtatgaaagaattgaatgatggaaagccaagaaagattaaagatgctagagcatactcttttactcttgaagaagacaccacaaattatggtacgtatgagaaaggtggtattgtgacgcaggtcaaacaaccaaaggtattgaactttaagccactcaaggaagcaatcactgatcctggtgattttcttctgagtgatttttcgaagtttgatcgcccacctctccttcacttagcattccaggctttggataaattcatttctgagttaggtcgcttccctgttgctggttcagaggatgatgcacagaagcttatatctgttgctagtcatattaatggcagcttaggggatgggaaattagaagacataaatccaaaacttttgcgatactttgcctttggttctagggctgtattgaatcctatggctgccgtgtttggtggaattgttggacaagaggttgtcaaagcatgctccgggaagtttcatccactttttcagttcttctacttcgactctgtggtatcactgccttcagaaccattggacccaaatgatttc

SEQ ID NO: 10198 - DNA, 433 bp, Glycine max
ggaggaaaggcgaggataattttttgcggagggaaggaggaaaacgacgacgcattgaatggagaatcagaaggcatcggcgtattacgagaacagagcggttcagttcggggtagtgagcaccgactggctcgctcaggcccagtccgccaccgtccattctcctcctcacaacaacgatgacgacgaagagataccgttctcggtgatatcggagttcgacaggtggcgcaaacaccccgatttggcggaggccgtggccgccattcgcgccttggccgccgtcatccgctccagcaaggcctccaccatgatgcagctcgaaatccaactcataaacgccttccaataccctcaaatgctgggatacaacctccatctctttaaccgccgcctgcgatctcttcatgcgatacgtcaccagaacttccgc

SEQ ID NO: 10199 - DNA, 373 bp, Glycine max
  unsure (1)..(373): unsure at all n locations
gaagcttaagatgactaaggagttagaaactctcatggggaaagtgagaggtttgagccttctatctcttggtggttgcttcgatggctgctatgaccacactcaagcctatggattcgggacaaggatctggaacttcagtgatcgaccagtggagctgcagataagggtgggatcaatactgaagaaggttcacactttgaagccagggtcatgtaagaggctgagaagtaaacgcatatacaaggcatatatgcctggtaagagtggcaatgatggtgggggattgaagagtttgctgtattactatgatgaaacttgccacccttatgtttggattcatgacatanggggtggttccatgaggatggtt

SEQ ID NO: 10200 - DNA, 848 bp, Glycine max
cttcttcttcttcaccatcatcatcttcatcgatcatcctctattaataggttatctttttcttttctagattaactagctcaatctttctcatcatgtcatcaaatcaagcatcccttaaccttagccaagccaaatttgcccttccaaccaatgacgaccttgagcaacagcaacaacaacaacaacaagcaacaacaactctagagattgaagctgatcatgaggacacctttgactactcaaaaagatctcaatggctccgcgccgctgttctgggagccaatgatgggttggtctcaacagcatcaatcatgatgggtgttggagcagtgaagcatgacatcaaggccatgatcctatcagggtttgcagggttggtggcaggggcatgtagcatggccataggtgagtttgtgtctgtttactcacaactagacattgaggttgctcaaaggaagagggagaaggaaaggggccaaagaagagtgagagatccagaggaagacaccaattatgaagagaaagagagtttgccaaaccctttgcaagcagcagcagcctcagctttggccttttctgttggtgcaatggtgccattgcttgcagcatcatttataagggaatataaggtgaggcttggagtgattgttgctgctgtgacttttgctttggtggtgtttggttggttaggggctctgtggggtaaggctccagtattgaggtctgctttgagggtcttgtttgggggttggatggccatggcaatgacttttgggctaaccaagttgattggatcaagtgcactttagtatagtgtcctataatatgtaattaaggcttgtttt

SEQ ID NO: 10201 - DNA, 536 bp, Glycine max
gggaggttgtttgcctttgccatttttcttcgaatccctggctgaacttgagacttgggagtgaactgaaaaagcataaagtatggcttcgacggcagcgtaccttgctcggcgcgcggcgcagaaggagagggttcggatcctctaccgccgcgccctcaaagacactctcaactgggccgtacatcgccacctcttctacgacgacgcttcaaacctccgcgaaaggttcgaggagaacagacacgtggaagaccctgataccattgacaggctcataacggatgctgaagcttcctacaacaagtggcgccatcccgatccctatattgttccttgggctcctggtggttccaagtttactcgcaacccaactccacctcaaagggattgagaatagtttataattagggccgtgaagatgatgactgaaatcttattttattttttttgcacccttgcaatgaataaaagtctgcaatcaaactgttccgtattcacaaaatgataccgattgagtccatccatgcttatga

SEQ ID NO: 10202 - DNA, 523 bp, Glycine max
attcctgtgtatacagctgcgaaagacggcacgagacgggtgtgtgaattcgatagcataaagtatggcttcgacggcagcgtacctggctcggcgcgcggcgcagaaggagagggttcggatcctctaccgccgcgccctcaaagacactctcaactgggccgtacatcgccacctcttctacgacgacgcttcaaacctccgcgaaaggttcgaggagaacagacacgtggttcgtttccctcttttcacttcccttcccttccaaatcatcgcatctctaacatggtttcgatccacacatcccttgtcatattttgtaccctaattgtttgttatttggactatgtatgttgtaattagggatttgtgtcactcgtattccattcgatttcttatatgttgtctgatgttggttccattacaggaagaccctgataccattgacaggctcatagcggatgctgaagcttcctacaacaagtggcgccatcctgatccttatattggtaaattaaccact

SEQ ID NO: 10203 - DNA, 391 bp, Glycine max
gaaatttgaatgattcaacctgcaaaaccctaaaccctttctctctctgcataagcacagtcacatagatgaggaagaagcttctgttcgcaaccactaaaggcctctcctttcgctccaatcgcaacttcactcccaaatccaatcacttattctatgaggtatgctattctgctgatccgccgaaattccagcagcgtggatggtcacatgctgcttctgtcccttctgaggaaccagaagccccaaaaggccaaaaaagggttccaagacatcaaaggagagctatggtggagtctttcgtgaacaagtatagagcagagaatgctgggaaattcccaaaaatatcagatacccagaaacaagttggtggcagttgttatgttatccg

SEQ ID NO: 10204 - DNA, 293 bp, Glycine max
agcgatgttcattttctgcgcgttttgaaacttgaatgacgcaacccgcaaaaccctaaaccctttctctctctgcatgagcacagaagagcaacgtaaatcacatagatgaggaagaagcttctgatcgaaaccactaaaggcctctccttttgctccaatcgcaacttcactcccaaacccaaccacttatcctatgaggtatgcttttctgttgatccattgacagtccagcagtgtggatggtcacacgctgcttctgtcccttctgaggaaccggaaaccccaaaagg

SEQ ID NO: 10205 - DNA, 383 bp, Glycine max
gggtgaccaaatgcaaagacggcattgaaattgaacacaatccatgactaacacaagcgcagacgacaacataacactgctccaaacatatcaatttcaataatgttttcttctgcaatttctccgaagcccttccttcggtccctcgtcattgatcgttacgctcagagcacaactactgcaaccaggtgggagtgcttggggtttaacaagtcagaaaatttcagtaccaagagagagttgtgtgctgaggggttcaagctgaattgcttggttgaaaatagagagatggatgtggagtcatcatcatcatcatctttggtggatgatgcttccttgagcttaagtgaagaggatttaggggagctagtatttcaacattg

SEQ ID NO: 10206 - DNA, 665 bp, Glycine max
acgtcggacgcatcgcttcgctccctacccttgggctagggttttacttgtgcgtcttctccgaaagcaagctagggtttgtccgtgtggcagaatgggaaggtatcgaagccggagcaggagctatagcccccggcggcgaagcagggagcccaccggcaccgcgcggacggaaccgctatgtcgacgatcgctacggtgacagcaggtcttacagagaccgccgctcacctcttccttccggcttgcttgttcgcaatcttccccttgatgccaggcctgaggatcttaggatcccatttgagcgctatggtcctgtgaaggatgtttatctacctaaaaattactacactggtgagcctcgaggctttggatttgtgaaatatcggtatggtgaagatgcagctgaggcaaagcaacatctcaatcatactatcattggtggacgtgaaataaggattgtttttgctgaggaaaataggaaaacttctcaagaaatgcgtgttaatactcgaggaagtggtcgacatggaggtggtagaaggaggaatcgtactagatccccacgaccccgatcctattctcggtctccatcaccagctagggatgattcaagggatggcaggggtagggatgattattattctcctgagcgatcaagatct

SEQ ID NO: 10207 - DNA, 1208 bp, Glycine max
  unsure (1)..(1208): unsure at all n locations
cccttgcgtctgtttgctggtattatcagagctttgtgaaacataaagttaaagcagggcatattgcagagggagcaaaccgaatatttcaaaacttgttctactttttattatcactgttgcatttatttcagatatttagtatttgcctacaagtttgttctttagtttaaacaccgacaagacgactctttatggcggctataaccaatttgaacttttcttccttgtgtaaaaaaaggttttgtgtgcgtttgtgcgtgttggagttggctttttgaagtgggtgcatgctgaagttatatgtgtatgtgaaagatgaagaacaatagagataaagaaaagggtaacgacgttgaccagagttacagacagcatcacacgttgtcaatgccaatgatgttttctggtttgaacagagagaaggagatgtcagccatgatctctgctttgacacatgtggtttgtggagaagatgagcatcatggtgctgattactctcttcttaatcacaatattaataatactaatagtgcagttgttggtgatgatgattttactgtaacatcaaatatggcttctggttctatgccaccttcttctacttgttcatctcaaggtggcaactctgttctcaagagaagacgggaatatgataatacaaatgatttctcacgtggaggttcattccctgctatttcaacaattgctgaaagttcaagcacggtaacaagaagaacggcgaatacagtatacgattacgaatacagaacagagaacgtgaaagtagtggaggaagaaccgaggagaaaatacagaggagtgagacagaggccatggggaaaatgggctgcggaaataagagaccctttcaaagctactagggtgtggttaggaacatttgaaaccgctgaggacgcagccagagcctacgatcaagcttcactgcgtttcagaggcaacaaagccaaactcaacttccctgaaaacgttagactcagacaacaacaagaacctccgttgaacttgaaccctccaccaccacctaatcatggggctattttgtcaattccttcaaccactgttcacactgaggctcttcagggttcacttggttcaagcaatttttatgagcattcttattcgcatcttcatgagtttccngtgagtctctacgatcagattgcagagtcaacatctactactat

SEQ ID NO: 10208 - DNA, 576 bp, Glycine max
gaagagagaaagacataaagaattggcgtgagtcgggccaagcaagctaaggcaaaccctcgttggcaagtttgtgatggcggcctcttcttcctctctctctgcctccgacgactcttcttctcgccgtcgcaggcgccaccaccgccatcgccgaggccgcgataaggactctctcaagattcgaaagaagagcaagtcccaatcccaatcccgcggaaaacgacgccgtaggcattaccaccactcttccgattcctattcttcatcctccctctctgattactccagaagtgaaagttcttctgatagtgaacatgaaacatctcaccgttcaaagaggcacaaaaagagtgacaggccaaagaagaataaggaaaaagatcaaagtaaaagccaccgtcataagtggcagaagcataaagtaaaagaggtaggtcactttttcatgccatttttgttatcttccataggcttgttcaaaatagtttggtattcttcgtatttaaagtttttaactcaagttaccttgaaatgttgactatgtgcgaggcgtcgtttcatttaaatcttcag

SEQ ID NO: 10209 - DNA, 1047 bp, Glycine max
  unsure (1)..(1047): unsure at all n locations
tttcntcatagtttgaaaacactggtttgaatttgattttgacatcattgatcctgaactaataatgcataccataaaacagcaaattattatttagctgcaaagttgcttacttatttccatgcgcaacgttttttactttctagtctgagatgcttgatactttctgcctattttgtgtattggctctttgaaattggagctgggatctgtgacatgtttgggcgcttgattgacttgcttggatgttgtttcttggtggggtttgtcctggcaatgggagctttatatagaagcagcatgatgagaggagcagcagccctgtgcagctttccaagtttttagggcgtgacaaagatgacggtgtccgtcgcagtgctgtatctggcaagaagattcttctgaaacttgagaaaacaaaggaagataaagtggctgaaagcaagagaaacgaactgctgaactttttaaatgctagttttgattagcattgagaaggtatggatttgatagaagggtacaacaaaatctgggaaggaccacatttacttacacaggtgcagaaattatttttccgttataagaaccgggcagcctaccatttccttggggaaggggagtgggatatcataatattgtgcttaccattgaaagacatgtatggatctcgatcagtggatatgtcttttatgaaatttgttatgagcttttgtctgatgaggagttcttgactcacctgattccatacatggtatttggagattgtgcagtcattgagttatgtgccacataaaatatggcttttggttctatgccaccttcttctacttgttcatctcagggtggcaactctgttctcaagagaagacgggaagatgataatacaagtgatgtcttacgtggaggttcattccctgctattttaacaagtaagcaccataattgataatcatactctaaattctaaaatgataaaatattttgtctttttattgtctggtctaggatatatgttgatgggtccgggcatgttcacaaagagtatac

SEQ ID NO: 10210 - DNA, 630 bp, Glycine max
cctcgagccgaatcggctcgagatcgaagcaaaagccaccgccataagaggcagaagcataaagtaaaagagaagcagcatgatgagaggagcagcagccctgtgcagctttccaagtttttagggcgtgacaaagatgacggtgtccgtcgcagtgctgtatctggcaagaagattcttctgaaacttgagaaaacaaaggaagataaagtggctgaaagcaagagaaatgaactgctgaactttttaaatgctagttttgattagatttgatagggtacaacaaaatctgcaaagaaccaaatttacttacgtgggtgcataaattatttttccattataagaaccgggcagcctgccatttccttgcggaagaggagggggataccataatattatgcgtaccattgaaagacatgtgtggttctcaatcagtggatttctcttttacggaatatgttatgagcttttgtagaatgaggagtttttgacccaacagattccatacatggtattttgagattgggcaatcattgtgttatgtgccaagacttttttttttttcttgtgtttatttgggcacatgtgactgaattattaaaaatttgttcccttcttggtttcccctcc

SEQ ID NO: 10211 - DNA, 718 bp, Glycine max
caacttgttggtattcatcaaagcttttgggaaacaagttaaagcagggcatgcagaggggacaaaccaaatatttcagactccttaaactttttattatcactgttgcatttatttcagatatttagtatttgggtacaagtttgttctttagtttaaacaccgacgtctctccgtggcggctatacccaatttgaactttaattttcttccctttgtgtgaaaaggttttgtgttggagttggctttttgaagggcgtgcatggtgaagttatttgtgtatatgaatgatgaagaacgatagagaaaagggtaacgaggttgaccagagttacatacagcagcaccactcgttgtcaatgccaatgatgttttcgggttttaacagagagaaggagatgtcagccatgatcactgctttgacacgtgtggtttgtggagattattctcttgttcatcacaatattgataatactaatagtgcaattgttggtggtggtggtggtgatgatgtttcaaatatggcttctggttctatgccaccttcgtctacttctttatctcatggtggcaactctgttctcaagagaagaagggaagatgataatacaagtgatttcttacgtggaggttcattccctgctattttaacaactgcggaaggttcaagcacgattagaagaagaagagcgaatacggtatacgattacgaatacag

SEQ ID NO: 10212 - DNA, 299 bp, Glycine max
gctcgaagtaagagagaaagaaataaagaattggcgtgagtcgctcgcaagtttgtgatggcggcctcttcttcctctctctctgcctccgacgactcttcttctcaccgtcgcaggcgtcaccaccgccatcgccgataccgtgataaggactccctcaagattcgaaagaagagcaagtcccaatcccaatcccgcggagaacgacgccgtaggcatcaccgccactcttccgattccgattcctattcttcatcttccctctctgattactccagaagtgaaagttcttctgatag

SEQ ID NO: 10213 - DNA, 406 bp, Glycine max
cacatatttcctctacctttctttctccttcaaaaattcacctcaccttttcttttccctattagctccgaacccgaacctgtaaaatggatctactcgacccgaaccgtttccgcaaccgcaagcaacccaccctctcctcgcgggaacgcttcctcggcgtcccatcccacgcgccgcgactcgaaaacccttcctccgacgacgtcgttttctccaacaacgacgacctaatcgaagacgacgtcgttttctccaacaacgttgactccaccgaaccctcttcttcctcttctccaatccctaatcaccacaaccacaaccacaatagccaccacaaaggctttgcataccgtccctccgacgcgtccttcggcatcctcgccgcgctgccggagaacgacca

SEQ ID NO: 10214 - DNA, 318 bp, Glycine max
ctactagcaccgaacccgaatttgaaaaatggatctacacgacccgaaccggttccgcaaccgcaaacaaaccctctcctcgcgggaacgcttcctcggcgtcccatcatcccacgcgcctcgaatcgaaaactcttcctcctccgccaccgacgacgacgtcgtcgttttctccaacaacgacgacctaatcgaagacgatgtcgttttctccaacaatgacgactccaacgaaccctcttcttcttctcaaatccctaatcgccaccacaaccacaataaccaccatcaagccttcgcgttcggtccctccgacgc

SEQ ID NO: 10215 - DNA, 386 bp, Glycine max
gtcgcttggtagttgtgaatcccttacacggattagaatgggagagaactttttgaatggttccattccgagagggctttttggacttcccaaactaacacaggttgagcttcaggataattatctctctggagagtttcctgaggtgggttctgttgctgttaatcttggtcagattactctctctaacaaccagctttctggggctctgcctccctccattggtaacttctccagcgtgcagaagctccttcttgatggcaacatgttcaccggtcggatacctccccagattgggaggttgcaacagctttctaagattgattttagtggcaacaagttctcgggtcctattgcgcctgagatcagtcagtgtaagctgttaa

SEQ ID NO: 10216 - DNA, 599 bp, Glycine max
ctctgatgatgatgaaaaatataactttcgttcttccgatatttccatgaggaaaacgtttggagacctgaactgaagaggctttcttatgcttgacttcgtattccttctgcccaaagagggtgacctgttatttgtcacaatattcaagtgttttatgttttgttgtatagatattttgttgtttgctcgtagctttatctacatatttccacttttatttggcatcaagtcttatatgttttcttgtatagatactatgcacgtcaaagctagttctagcttaagtatcaaatagccttttaatgtgaatttttggggtggaagatgcagttccaatcatgcacttagcctctgaggatgatcagaaaaatacctttccgaattgtttatgaggaaaatacatggagacctgaactgaataggcaatggctatgtagtggctttttatacgtaggcattctggcttcaaaatattaacatgtacgtctaatgtttgtatggaatagtttcaaaatgtgtagttctttatgttcttgttcttttgtccttgtgtaattacgctgcactatttattattgtagaatatagatttggtc

SEQ ID NO: 10217 - DNA, 356 bp, Glycine max
ggcgggaaaggtttcggtcatttcttttttccttgctttttcttgctagaattgttcaattcggctcctatattcttgggaattttgtaattttttttttatatattaatttaacgcggattgtggaaattactactgatacacctgtgtttctgtctgtaatttgttattcatagaattttgtgaatagtgctgttataatcgaaaatactgatcatttgtggcttaggaaacttgtttttttttttgttttttttttgttttgtcacttggtaatttgctagtgcttctcaattattgaatttgagtccaacaatggtggcagagaaatgtcactttcaagagaacatggtaac

SEQ ID NO: 10218 - DNA, 510 bp, Glycine max
cgggacaacatagccgctgcatctaaacctactcggtctcaccaccctccgtttttcaaactctccatccttttcactcattaataaaccatgataggtccctttggtccaccatgaacatcaagcagaagaattgaactatctcgcagctggccataaccatgaacaagcctagagccttcatgcatggcaaaatactagttaacagttacatacacaagaagtgtatattagaccactgttaaatcagcttactaaacatatatatctctggcaatcattcacatggaaatctaataatcacttccttgaatgtaactgttaatgcttgtgatgatgccagaaacaaaagagatgctgacaagcagtcaacagcacgtaatgtcgattctaggtatctatgctttattatatatttttaattttttcttcttttggttttactgtgaattattgaaatgaaaaaatatacccactcaagtagatggtgctacgtcaggattacctccc

SEQ ID NO: 10219 - DNA, 368 bp, Glycine max
gatcaacacataaatttttcacctcttcacatctcaaagattctgtagcaccctcaaaaagatcgaaaatgacaccatcattttcaacaccaatgaaatccgtgttcctctcaatggttatgatattgatatccatcatcatttatcaaggtaatgctcaattacctcaacctatgcctaatcaaacaaccatggtgttctacctacaagacatagcaaaagggtctagtgccacagttaccccagtggctggcatcaagggaagcgattggacctacaccacatttggatccatatttgtggtggatgaccctgtcacgctgagcataagcccagcctccgaaatggtgggccggggcccaaggcct

SEQ ID NO: 10220 - DNA, 683 bp, Glycine max
aaaatttgagaaaatcacattccttgttgtttgtttccttcttttggaatttaactatgtaggggctctaagctgattttgagagtgttgttaaatatctgctatagtggtattgcattgcagaattccttggatctgtaattgagactccgtccactactgcaactgctatgggtcttgtggttgtggcatgtgtcatacatcctcttgtcatctttgatcctcacccagacaaagaacccctaagttggagtactcgaatgaagattgctgttggagctgctcgtggccttgaatatctccattgtaaagcagatccacctgttatctacagggacttgaaatctgcgaacatcttgttagataatgaattcaacccaaaactgtcagattttgggcttgctaaacttggacctgttggagacaatacccatgtttcaaccagagtgatgggaacatatggttactgtgcaccagagtatgccatgagcggcaaattaactcttaaatctgatatatatagctttggtgtggttttgttggagttgatcactggacgtagggcaatagatactaatagaagaccaggagagcaaaacttggtttcatggtctcgtcaatttttcagtgaccggaaaaagtttgtacaaatggttgaccctctgttacacgaaaacttcccc

SEQ ID NO: 10221 - DNA, 909 bp, Glycine max
gtgagtgagttccatctagttccagaactaacagccaaaacacaaatgcagattgtttcctaggcgtcttaaattctatcttcgagcttgcctctgccaactacatttgaattttgcgcaacctcattcttatttgttatattaaattaaattgatccaggggaaatcagaaatactctgattgacttatatatggatcttattaattgaaacgaaattgagttgtctgtagcgacgatgagttgcttttcgtgctttgtttctcgtgggaaagatgtgagaagggttgaaattgacaatggctctcgatctgctacttcttcttctgaggggaaggggaagaagagtgtgagtaacaaaggaactagtacggcagcggctagttttggttttcccgaactcgcagacgcaacgaaggggtttcaaggaagtgaaccttacttgggggaaggtggttttggaagggtttacaagggtcgtcttcaacgggagagtatgttgccgttaaacaattgattcatgatggtaggcaaggttttcatgagtttgtgacggaggttcttatgttgagcctgctgcacgattctaatcttgtcaagttaattggctactgcactgatggagatcaaaggcttttggtttatgagtacatgcccatgggttcacttgaagaccatctatttgatcctcacccagacaaagaaccactaagttggagtactcgaatgaagattgctgttggagctgctcgtggccttgaatatctccattgtaaagcagatccacctgttatctacagggacttgaaatctgcaaacatcttgttagataatgaattcaacccaaaactgtcagattttgggcttgctaaacttggacctgttggagacaatacccatgtttcaacca

SEQ ID NO: 10222 - DNA, 493 bp, Glycine max
tgaaggtgtttcaagaattaacaagaccaatacaacaacacaaattcagattgtttcctacgcgtcttaaattttatcttcgaggttgcatttgaactttgcgcaacctcattattattaaattaaattcattgatccctcgcctagagaggggaaatccagaaatactctgattgacttatatacggatcttatttttttttattatttaatttaaacgaaatttagttgtctgtagcgccgatgagttgcttttcgtgctttgtttctcgccggaaagatgtgagaagggttgaaattgacaatggctctcgatctgctaccgctactgctacttcttcttctgagagtgaaaggaagagggaatcctcagaggggaaggggaagaagagtgtgagtagtagcagtaacaaaggaagtacggcagcggcaagtttcggttttcgcgaactggcagaggcaacgaggggtttcaaggaagtgaacttactcg

SEQ ID NO: 10223 - DNA, 615 bp, Glycine max
cgggtccctttgaaccacacaatagggagcccgagccctccactgccgattcaaagtgagatgggaggaaaaatgccatccgtcaagccaactgcattgcggttctatgggagttttaatccaacagttacaggcataacaattcaaaatagtccacaatgccatctcaagtttgacagctgtaatggggtcatggtccatgatgtgaccatatcatctcctggggacagtcctaacacagatggaattcaccttcagaactccaaagatgtgttgatatacagcagctctatggcctgcggagatgactgtatttcgatacaaactggatgctcgaacatatatgtacacaatgtcaactgtggaccagggcatggaatcagcattggaagtctaggaaaggataacaccagagcctgtgtctccaacattactgtcagggatgtcaacatgcacaacacaatgaatggtgtcagaatcaaaacatggcagggtggatcaggttctgtacaaggagtgctattctcaaacatacaagtttctgaagttgaactcccaattgtgattgatcaattctactgcgacaaaagaacctgcaaaaaccaaacgtcagct

SEQ ID NO: 10224 - DNA, 625 bp, Glycine max
gacagttcctttttctaactaccatttcctctttttgtgcatcttctctcgtgtcctctccatcttaaaccactactactttatcactacactacaacactgcaacactctctctaatggaacaaaccttcctctttctctttccccccacacattagcaacctacgaccactctgcttcacaattccaaaatgggttgctgcgtcagtagtaccaacagatctcattcttcaccctcaagcaagccttttgaccgaccaagatctaccgcgaaaggttcagaaaacagagcaccgccaccggaggaagaaacggtgaaggaagtgttgtctgaaacacccaaatggaagccaaaattcgaagcggggaagccaacagagagcgatgctgagaacgagaagcgagaagctgttcgtcaaacccgatgagatctctgaggtttctgaagtttgcagtgtaagtgagagcctgtccacactcgccgaagaagaagcacgtcaaagggtcaacagatctccggcaaaggtgcgcaaagcacgctccttttccggcgagttcggctgccggagggaaatgacggcggggaagtctccggcgaggaggccggagcagtctccgggaagaa

SEQ ID NO: 10225 - DNA, 784 bp, Glycine max
gatggggaatgaattttttaaggactatcggcattagggaagcatttatatttatttatgaatgaaaatgaaatgagaacagtaaagccgttggaaaattaatcaatcatagagttaggttttggtttggtttggcagaagaaagtataacggagagaggcttgagtttgtttggtttttcttgcttcctttggtgtcattgctatataatactaatactccttccattcccttcccacacaacattgagatttctgagattcagatgatggcgagtgagtcgcaaaactgggtgttcatggtcactgcacagacaccaaccaacattgccgttatcaagtattgggggaaaagagacgaaaccctcatcttaccggttaacgacagtatcagtgtcactctcgatcccagccacctctgcaccaccaccactgctgccgtcagtcccgctttccaccaagatcgcatgtggctcaatggaaaggagatttctctttctgggggcaggttccagagctgtttaagggagatccgtgctcgtgcttgtgatgttgaggatgaaaaaaagggtataaagatcacaaaggaggattggggcaaattgcatgtacacattgcttcgtacaacaacttccctactgcagcaggactggcttcatcagctgccggttttgcatgccttgcttatgcccttgggaagctaatgaatgtcaaagaagatgaaagccaactatctgctatcgcaaggcaaggatcaggtagtgcttgccgcagcttatttggg

SEQ ID NO: 10226 - DNA, 1448 bp, Glycine max
agacgacagaagggggagaatatggagctattactagtgctgtagtgatgagagatgtagatggtaaatcaaaaggttttggttttgtcaattttgcgaatgtagaatatgctgctaaagctgtggaggctctaaatggaaagaattttgatggtaaggagtggtatgttggaaaagcccagaaaaagtctgaaagggagcttgaactgaaagagcgaaatgagcagagtacgaaggagactgttgataaatatcatggtacaaacttgtatatcaagaacttggatgatagtgttggtgatgaagaactcagggaactgttctctgagtttggtacgataacctcatgcaaggttatgcgagatccaaatggaattagtagaggatctggatttgtttcattttcaattgctgagggagcaactcgggctcttggtgagatgaatggtaaaatggttgctggcaaacctctctatgttgcccttgcacagagaaaagaagatagaagagcaaggttacaggcacaattttcacaatcgaggcctgctgcaataacccctaatgtttcacctcgaatgcctctataccctctaggggctcctgcgataggacaacaatttttgtatgggcaagcagctccagccacgatacctcaagctgcatttggttaccagcagcattttgttcctggaatgaggccaggtggtgctccaaacttctatgttccactggttcagcagggtcaacagggacagcgcccaggaggacaccgaggatcaggtcctatgcaacagctccagcagccattgccattgatgcaccaacagatgcttccaaggggacatgtctaccgatatcctcctggctccaatatgcaaaatattcaactggcaggagtacctggaggaatggtcagttacggcattggtcaaccaatgcccacacaggccctggcctcggcccttgccaatgctactcctgaacagcagaggactatgcttggtgaagctttatacccgttagtagataagctggagcatgaagcagcagcaaaggttactggtatgctcttagagatggatcagcccgaggtattacatctgattgagtcaccagatgctcttaaggcaaaagttgttgaggccatggatgtgttgagaaaagttacacagcagcaatcaaacagcccagccgatcaactggcttcactctctctgaatgataatgtcgagtcttagattctgtacgtcagtttacaggaatacacatgttctttaaacagtcacagttgtgtgtttctggcttttttgtaggattagcaaacactccttggagtagcttattgatttgcattttgctttggtttctcttcagtactacttagtttgacttggccgtcctattttggcccaacctttcttttaaaaaagaatagctttcagcttttt

SEQ ID NO: 10227 - DNA, 602 bp, Glycine max
gaagcacacagtagacaagaaagagtgtgtgtcaacgtagtaacataaatgcaactgcttctctttctcttttcattcagatgagatcaatgcacttccatttccacctcctcctctagggtttctctttatccctttcttccacgcatccctcctccgaattcaattccccttacattcaactctcctttgccgaatctgcaacaattacacaaaatgaattgctaacaacacgcacacacactctccgtgttttttccccctctcttttttaagaagaacgcgctttctcgtatctcctcgtttgaagaagcgaaacggcatcgcattcgatgagtgatgcgaaggaaagaagtgggttttgcgtgtggccagatgcgagacaactttgcttaaggaaaggtcttctgtatggatttatgcgattattttcaataccattaaaaacattgcgcggagctagtcggtcgttgagagtggatcaattttgcagtgtagtgaatctatcttcctcattgcagatagaattggttccatgtcttagggacaattatgcatatcttttacacgatgtggatacggggacagttggtgttgttgat

SEQ ID NO: 10228 - DNA, 265 bp, Glycine max
gtgagatcaatgcacttccatttccacctcttctacctctagggtttctcactttcttccacgcatccttctaacccattcaattccccttacattcaactctcctatgccgaatctgcaacaattacactaaatgaattgctaacaacacgcacacaaactctccgtctttttttctttttcttctctctttctctaagaagagcgcgctttctcgtctctcctcgttttaacaggaagcgcatcgcattcgatgggtgatacg

SEQ ID NO: 10229 - DNA, 810 bp, Glycine max
cgtcgttcttttgcgtttgactctctctttctctttctgtgttcttcgatttcttatcctctcatatccgtgatctctctctgttcccttcttctgtctcatgcacacaccactgtaccttgttctcaccgaaaccttcaactaggaatcgatcgagagtgtcttgtgttgctagtgcaagaggctgcaatatagatagatacgttcgtgcgtacgtaggaagggtacgtacgcggtagtacacaagacacgacgccgttttgcactctgttcttatttccgatcatgagggcgcacaagaagggtgttaccgtggggatcactgttgctgcttcttaagcctttttcttttcttatgtgggttccccccttcccctttcgattttctgcactttagagagacaaccagacatggctggcagtaaccaggtcaatctcaatgaatctaggagtgttgttcctttaaatacatgggtgcttatttccaatttcaagctgtcttacaagcttctcagacgtgacgatggaacgttcaatcgtgagttggcggagtttctggataggaaggtccccgcgaacgcaattcctgttgaaggggtgttttcaatcgatcacgttgatagaaacgcgggtttattctaccgtgtgtacttaccaacctcaggaaacgaggctcaatggggtatcagagaccttgagaagccgttaagtactacagaaattgttcctgtgatcatattcttccacgggggaagcttttcgcattcctcggccaacagtgccatctacgacaccttctgccggcgcctt

SEQ ID NO: 10230 - DNA, 253 bp, Glycine max
cgttcttttgtgtttgactctctctctctctctctctctttcatatcatatcagtcatctctctctgtctcatacatacacataccactgtacctcgttctcacgaaaaccttcaactaggaatccatcgagccagagtgttgtgttgctagtgcaagaggcaccaacatagatagatacatacgtgcgtgcgtacgtaggaagggtacgtacgcggtagtacacaacacaccaacacaccgttttgcactct

SEQ ID NO: 10231 - DNA, 378 bp, Glycine max
gacactcattatttctcatcatccttacccatctccacgcatgatatgatctctgtcacggttacatgcacatgagatttgacttttaacaccatctttgtgttacaggaaaagtactcttttaccatggcttccacttttgaaggtggctcagactcagagaaagagaacactgttgagagtgaagaagaagagtgtccagtaaaacaagttgaactcaccgttcctaaaaccgatgatcccaccatgcagcttctcacgttcagaatgtgggttctgggggttctttcatgcgtgttgttgtcctttgtgaatcagttcttttggtacagaacacagcctctgattgtaacctcaatttcagctcagattgctgtg

SEQ ID NO: 10232 - DNA, 372 bp, Glycine max
aaaaaatccgaccgcatagagtgagacacacacggtcactgcccagattgatccacagaacacagaacacagcaaggtaaaaaaaattcgagctttatttgtctcaaatggcaaaagaagaggagcaacaacaacaacaacaacacccaccttacgcatacaccttaattctgaacatcttcagcaagaggagaacatgggcatgtctatttctggttgtttacggtacccttttggcatcttcatggaacttactcaaatccacgctttcatggtacaatctgcaagttgaatcctccaccacctcggcgtggccggcgctctatgcttcggtgcttctgggtaccgtgttcggggttctgtcgatggtgg

SEQ ID NO: 10233 - DNA, 830 bp, Glycine max
tctttttggtacacaggtatcgaataggcgggcagtagttgatacgttcaataacgatacttcaatttttgcatgcttactttccacaagagctggtggacagggcttaaatttaacaggagctgatacagttgtaattcatgacatggattttaacccacagattgatagacaagccgaagatcgttgccatcgaattggtcaaacaaagcctgtaaccatacatcggctggtgacaaagggaacggttgatgaaaatgtgtacgagattgcaaaaagaaagctagtattagatgctgctgttctcgagtccatggaggagattaatgaaggtgaattgcccgagaagaccatgggagagatattgtctgcaattttattgagttaaaatattgatctaagaaaaacagtttaatttatcatcacttcattcctatagttccaatcttgaattaatctgttgatttgggatagaagagaactggctgcctacaaattggcaagaatgcggtaccagtattgatgtacattataatcaataggagaattagtataaaaagtcatggcgaagattaacaaatttgttgaacattaattattcctgaagcactaatgaagccttaccctttccatacaaggacactgaccaagagaaggcagaaagaaagacagcacgagatccggtgcaaaatgagttggcaaccacacaagaaagaggcaaaagatgaaccaagcggagctggacaagcatgcggcgcgttagcataacacggtggccaaacaagacgtcaccacggctgtgcacatgggacatgggcaccacatcaccg

SEQ ID NO: 10234 - DNA, 607 bp, Glycine max
tgaccaatccctagtacaagaaaaaaaaacgtcttcaaaattacgacaattattatctgataagctgagggtagttatagagaacaaggacatggttttctcttcacttcgcaggtactttagtatgaggcaccaaagctccaaggttcaggctttgtatgaacattgcaaaaccatcttatcgccctctggatcaccccctccttcgtcccaagctttgcagaagctttcttcgattctggacactattcaacctgctgatgttggccttaaagaagaaactgcagacgatgatcgagggcatggattttttggcgctaatgcacttagtagattagctcgatgggctcaaccaataacatatgtggacattcatgaatgtgatagttttacgatgtgtatattttgtttccctacttcttcagttattcctctccatgaccatcctgggatgactgtatttagcaaacttctctatggctctgtacatgtgaaagcttatgactgggttgagcctccctgcatcatagaaagcaaagaaccaggatatgctcaagtaagactagcaaagttagcagttgataaggtcttgaatgcaccgtgtgat

SEQ ID NO: 10235 - DNA, 1187 bp, Glycine max
aatgaatcgaaattacggcttacttgtcaaaacgtagtgtttcagtggttaggtcttcccttcccactgttgccctgacaccgccttgctaatcccatcctccctctttctctctctacattttaataggaatcaatttccaaccatgacggactacaaacaagaacaggatatggagattgaagcattagaagctatactcatggatgagttcaaagaaatacactctggtgaaagtggcctaagtacttccaatcggtgcttccaaataaaggttgttgcgcaggatgacgatgaagatgggccaataactaatccagcacaactggctttgatcttttcacacacagaaacatatcctgatgaacctccacttttaaatttgaaaagtttgcaaggaatatctgctgaagatctaaggattttgaaagaaaaacttcaacaagaggcatctgaaaatcttggtatggctatgatctacacacttgttacctcaactaaagagtggttggctgaccggttttctcaagatgatgttgggagtactgaagcagaagaggcagccaaagaggatgtagtgataccccacggggaaccagttactgttgaaacatttttggcatggagagaaaggtttgaagctgagctagcattggagcgagctaagctaatgccagagtctgtgctctcagctcctaaggaaaagaagctcagtggtagacagtggtttgaaagtggaagagcgaaaggtgtggctgctgtcgctgaggaatctgaaggggaggacgaggaagatattgactttgatgaagatgattttgaagatgatgaagaggaggatatgcttgagcattatctggctgaaaaatccgattcatccacacattcttctatgagggctagttaaattgaatatgtcacataccaggcagagttttacagtatgcctcgctgactttgtgggagtttctgccatctttctaggactggaggatttggttttatgatattatcgaaggcacaatgcagaagtgtttgatgtgtgatattgtatttcacttaaacactgtctgatataaaaagaaatatcttttgtttgtaatcatcatcctcgaattgcatgaaatcagtaacttagggatagacaactcaatttgaagtagcagaaataagacgattttgtttca

SEQ ID NO: 10236 - DNA, 894 bp, Glycine max
gtggtttcttctttttttctctctcacatcctttctgaatctgtttaatcaaatccttccccgttaagattcttctcaccatcgttctttattattatcatcccctcctcttccttccttctcctctcattccatacctcaacaaaacaaggttcagagacttttccgattcctggaagaagagaagagaaaacctaaatcacagatccatggcggaagaacaccgatgtgaacctcccgaaggtcaccgactctgcgtcaacaactgcggcttcttcggtagcaccgccacgatgaacctctgctccaaatgctacagcgcgatccgtttgaaggagcaagaagaagcgtcgacgaaatccacaatcgaaaccgcgctctcttctgcctcctcggcgaaaccgtcgtcgtccacgtcacctccgccgtcggcggtcgatgtgctcatggaatctccaccgccgtctgcggcggaggttgaggttgctgtcacggtcacggtcgcggtggcgtcgagttctatttccataaactcaggttcggttgcgcaaccgaaccggtgtgccacgtgtcggaagcgcgtggggctgaccgggttcaagtgcaggtgcggagtgacgttctgcggggcccacaggtacccggaggagcacgcgtgcgggttcgatttcaagacagtgggaagagaggagattgcacgtgccaaccccgtgatcaaagcggagaagctgcggaggatttgatgatttcaatctgggccgttcgatgggaccggagcttggttgaaagttgaaatgatttgtgataagagtctcagggcaacgatgcagtacggtggagcgttttattgtaatgaatgtgaaagtgaaatatataatactccaagatattttt

SEQ ID NO: 10237 - DNA, 1023 bp, Glycine max
gaacatcgtcctaataaccccctcttccctcttctcattccaaacctcaacaaggttcagatacttttccgattccgtcgcgaatttccgattcatcgaagaagaagagaaaacctaaatcgcagatccgaacgcagtaaaaaaaccatggcggaagaacaccgatgcgaaactcccgaaggtcacctactctgcgccaacaactgcggcttcttcggtagcaccgccacgatgaacctctgctcgaaatgctacggcgcgatccgcttgaaggagcaagaagaagcgtcgacgaaatctacaatcgaaaccgcgctctcttcttcctcgttgaaaccgtcgttctccacgtcacctccaccgtcggcggtcgatgtcctcatcgaatcgccgccgccgtctgcggcggaggttgaggttgctgtcacggtcacggtcgcggtggcgtcgagttctatttccataaactcaggttcggttgcgcaaccgaaccggtgtgccacgtgtcggaagcgcgtggggctgaccgggttcaagtgcaggtgcggagtgacgttctgcggggcccacaggtacccggaggagcacgcgtgcgggttcgatttcaagacagtgggaagagaggagattgcacgtgccaaccccgtgatcaaagcggagaagctgcggaggatttgatgatttcaatctgggccgttcgatgggaccggagcttggtgatttaatctccaccgtcctcgtgtatgcgagagaaagaaaaagagagagtgagagggaaaatgcggttattatgtaacattatgattatgatgatctgtgttttaattaagacgaaagcttgaaaagtcggtttgtctggtctagaagggatgatgaaatgaacgagtcatatttatttggctttggtccactgtcgggggtggttgaaagttgaaatgatttgtgataagagtctcagggcaacgatgcagtacggtggagcgttttattgtaatgaatgtgaaagtgaaattattctactcc

SEQ ID NO: 10238 - DNA, 1030 bp, Glycine max
ctaatttcgcctatttataaccccagcttgttcaatttcgcaacctgtattttttcgtttctcaattttccacttattttcgttccagccagagccagcttttccattttccctttattttttctcggaatccaaacggaaccgtaatcgtgtattccttttttatttttttctctctctctctccccccggcaggttcagatacttttccgattccgtcgcgaatttccgattcatcgaagaagaagagaaaacctaaatcgcagatccgaacgcagtaaaaaaaccatggcggaagaacaccgatgcgaaactcccgaaggtcacctactctgcgccaacaactgcggcttcttcggtagcaccgccacgatgaacctctgctcgaaatgctacggcgcgatccgcttgaaggagcaagaagaagcgtcgacgaaatctacaatcgaaaccgcgctctcttcttcctcgttgaaaccgtcgttctccacgtcacctccaacgttggtggatgtcctcatcgaatcgccgccgccgtctttggcggaggttgcggtcacggtggcggtggaggcgtcgagttctatttccacaagctcaggttcggttgcgaaaccgaaccggtgtgccacgtgtcggaagcgcgtggggctgaccgggttcaagtgcaggtgcggattgacgttctgcggggcccacaggtactcggagaagcacgcgtgcgggttcgattttaagacggtggggagagaggagattgcacgtgccaaccccgtgatcaaagcggagaagctgcggaggatttgatgattcgttctcggccgttcgatgggaccggatttggtgatttgatctcgaccgtccacgtgtactgcgaaagatagagagagaaaatgtcgttattatctaaaattatgatatatgatgatctgtgttttaattaagattaagatgaaagcttgaatagtcggtttgtctggtctagtagggcatgaaaatgaaataaatgagtaatttattttggctttgt

SEQ ID NO: 10239 - DNA, 457 bp, Glycine max
taggttttctcaatttccgcttattttcgttccagccagagccagcttttccattttcccctttaaattttctccgaatccaaacggaaccgtaatcgtttcttattccttttttgtttgtttgtttctttctctctccccgccaggttcagagacttttccgattcctggaagaagagaagagaaaacctaaatcacagatccatggcggaagaacaccgatgtgaacctcccgaaggtcaccgactctgcgtcaacaactgcggcttcttcggtagcaccgccacgatgaacctctgctccaaatgctaacagcgcgatccgtttgaaggagcaagaagaagcgtccacgaaatccacaatcgaaaccgcgctctcttctgcctcctcggcgaaaccgtcgtcgtccacgtcacctccgccgtcggcggtcgatgtgctcatggaatctccaccg

SEQ ID NO: 10240 - DNA, 394 bp, Glycine max
  unsure (1)..(394): unsure at all n locations
cttctcaccatctgaacnttaagattatcattttttacacnanccaccttctcctggcattgtatacctgaacaaagcgaggtgcagagacttttccgattcctgggagaagagaagagaaaacctaaatcacagatccatggcggaagaacaccgatgtgaacctcccgaaggtcaccgactctgcgtcaacaactgcggcttcttcggtagcaccgccacgatgaacctctgctccaaatgcttcagcgcgatccctttgtaggagcaagaagaagcgtcgacgaaatccacaatcgaaaccgcgctctcttcttcctcctcggcgaaaccgccgtcgaccacgtcacctccgtcgacgtacacgttacctccgtcgacgggcacgttacct

SEQ ID NO: 10241 - DNA, 765 bp, Glycine max
gcgttcacgcgtgctcccacgcgtgcgcccacgcgtgcgatttcatttcgtcaatcactcctaacttctgggttgcaaaaatgaattcggacacgacttcctattggtgctacagctgcacgcgcttcgttcacatacaagaacagaacgacgtcgtttgcccgcgctgccacggcggcttcgtcgaaaaggtcaccgccccccaatcgtcaaggcaaggcttccgccgccgacgccgcaacgccgggaaccactcggcgttcaacccggtgatcgtgctccgcggaccgggagaggacgaggagagcagctttgagttatactacgacggcttcgacggcgaggggctccgcccgctgccatccaccatgtcggagttcttgcttggatcgggattcgaccggttgctggagcaggtttcgcagatcgagatcaacggcctcgggagggctgagaatccaccggcgtctaaggcggctatagagtcaatgccgacggtggaaatcaccgagtctcacgtcgcgtcggagacgatctgcgccgtgtgcaaggaagccttcgagcttggcgcgttggcgcgtgagatgccgtgtaagcatctctaccactccgattgcattctcccgtggctttcgatgcgaaactcgtgtccggtgtgccgccacgagttgccgtcggagcaaaccgcgccggaaacaagagtcgccggccagatcgaggaaggaggctgtagggtttaacatatggaggttgccgggcggggga

SEQ ID NO: 10242 - DNA, 457 bp, Glycine max
ctcaaaaaccaaccttcatttctccttcttagttttctctctgtcactctgtctctctgtttttcattcatcgcaggaaaagaaagaaaggaagcaaaaaaccctaatctcccgaatagcgttggattggagcgttttcagggcatcaatggagtgaagcagatcaagaggaggaagagacgcagaaatggggtctactgataaagaattggaagagcagcttctcgaagccggtaacaagctcctagatcctccctcctcagcggaggagctcctcccactcctagaccaagttgagagttgcctatcaagggttgagcagtcacctatcgactccatgcaaaatgcactctctccatcattgaaagcattgattgcagacaaacttttaaggcactcagatgatgatgtcaaagttgcagtagcctcttgcatcagtgaaataacaagaatcact

SEQ ID NO: 10243 - DNA, 518 bp, Glycine max
tctcgagcgaatcggctcgcgagacaattttgttcctctcgaaaaccaaccttcatttcccctttttagttttctctgtgtcactctgtttttcattattatcgcaggaaaagaaaaggaaaaaaaaaaccctaatctctggaatagcgttggattggagcgttttgagggcatcaaatcaatagagtgaagcagatcaagaggaagaggagggcacaaccaatgacaatggggtccaccgataaagaattggaagagcagcttctcgacgccggtaacaagctcctcctagatcctccctcctcagcggaggagctcctcccactcctcgaccaagtagagtgttgcctatcgagggttgagcagtcccctattgactctatgcaaaatgcactctctccatcattgaaagcattgattgcggacaaacttttaagccactcagatgatgatgtcaaagttgcagttgcctcttgcatcagtgaaataacacgaatcactgcacctgaagctcctta

SEQ ID NO: 10244 - DNA, 438 bp, Glycine max
gcctgcagttttctagagtacgattctgatgataatccacaagaagagacaatcaaacctatggtggatggtgggactgaaggtttcaagggccatgctagggttatcttgccagggatcacaccgtgctttgagtgtactgtctggctttttccacctcaagtgaagtttcctttgtgtaccctggctgaaacccctagaactgctgcccactgtattgaatatgcccacttgattaagtggaatgaggttcatggcggagtggcttttgatccagataaccctgagcatatgaaatgggtttatgacgaggctgtcaagagggctgagctttttggcattcctggggttacttattctcttacccagggtgtcgtgaagaacatcataccagctatagcttcaacaaatgcaattatatcagcagcatgtgcacta

SEQ ID NO: 10245 - DNA, 578 bp, Glycine max
gggagtcccacgaaattagataattttcgataaatttgaaggaattaagttctcttatgctgaggaatatttaggtcataaaaaacaagttggaaccctttctgtgtagttccatcgcatcaaaccctggcaatggcagctacggccatacagaggttcccccaacacaaatacgtagacgcagttcgctggcttcccctacaatccgcattcgaccgattcgcagttttggcactcttcgacttcgattccgatgcttcctccatcgaaatccactctctcaacccaaaccccctctcattggaaccacactcttcgtggtcctctccttcccgcgtttcctccctcaaggcctcgcacttcctccagaagcccctcattgtcgcttccacttcctccggttctctccacttcctcttctccgattcctccgtcgcaacgctcgagtccgaggtctccattcccgagggcgcgctgcattccgttcccgcttcttgcgttgacctattggacggtggcgtcgagtgcgtgaccgttggggaagatgggaaggtcaacttggttggtattggggattc

SEQ ID NO: 10246 - DNA, 474 bp, Glycine max
atttctcattagaaatgaacttggaggaaagttcgttcctttccgtgaagaaaaggtggtgcaaggtaaaacctttgtgcctttaaatcctcaatgtccaagtcttgcaaagggttggccatggagctagtcaagtgtctcagtgaatctgattgtgttaaggttgagaagagatcatataaggaatgtgttggagagaagagtccatgtataccaagtgagtgtgttggactcagggaaacctatttcaattgcaagagaggccaggttgacatgagagctaggattcgtggaaacaagggctattaatgatctcatcatacatttgaaaactctgaagttgttctgtccagttgaggttctttcaatttttagctcaagacgaagtcaacaaaagtaagagatgacggtgaatcagagaaatgggaggccttgttagttgtttgatttgatggcattgtaagctacacatgc

SEQ ID NO: 10247 - DNA, 404 bp, Glycine max
acgcgtccgaacacgcctgagtgcggctgttagatgactaccaaacgtcacgcatcagaaaaaccaacattgaatcttctattgagaaacttaaatcagcaggaaccacagcacactgcatcggttgtgggaaacagttctctccaattgtattgtatggatctccctgtcgcatccctcccaaaaagccaacccgtatgttatggcgaatgttacgtgagatatgccccattgtctctcagcaaaatatattgagcataacgaacgaagtttggatgacattcccaacgcaggatgaagcaatgaagtttgccaaaggacaagaagatgttcatgttttcagctatcaagaccactttaatggccaaagaaggttccttgtgtctacatatacagaattctgg

SEQ ID NO: 10248 - DNA, 344 bp, Glycine max
gagatgaatcatatgccggcaagtacaagaaaatattagctgcatgcatgcaatcccagttcacaaagccggcgggcacagttaatttggtgcatggtgactttgttccaagcttcaattatatgtatatataagtcataggcacaatacaattacaaatacaatggcatattattcttattacaggcaccaaagcaagaagttgatatggttcttaatgtttgggtttcttgttttttctctcatggaaacttcattgacagaaggaagggaagtttatcgcttgaaagatataggaagatcaagaagtcaagttgaaaatggaggacaaatgaaaaggctcg

SEQ ID NO: 10249 - DNA, 955 bp, Glycine max
cacgcgtccgcatatttgctatggctccaatgcttcatatatttaaatgaaggaattgagttcgaaagtggttgtcttctgaagagaattttttttttttttatcattcatgggtttttttgtagcacatgtagtgcaaggatcagcactagcccttcttggattatggcacaccatccacaccatcagatcttacctggtgaagggccctgccaacttcactgtaagattctggtaccagtttaacactacccctcagtctagacttaaacacttagaacttgtttctattttatccttttccatccttgcatttttcgatcaaattctagacttccctcatttccactatgcctttaagcttgacaactttgagcatgcaactatgttcatacaccttgctttgtttgctggtttctccctctccactgagttgactgattcacttgacctcttctccggctttgttgggatacttgcatcctcggtgtttagtcaagaactattccttctccattttcactccacagaccatgttggacttgaaggccattaccactggctgctgcagctcatagtgcttgtctcactagtatcatctttggctgcaactatttttcctaacaatttcaacgcggctctcgtgctttctatttcactcatcttccaaggatgttggtttataaacatggggtttatgctatggattccatcttttgtccctgaagggtgtgcggtgaatttggccaaggccaagtggccatgaaatcattggagcagtgacttgtagttccaaagaggctgatttcagggccaggggattggccaatttgcaattcagttggatcctttcttcaattctgatatttgcaggaatcatttgcttgaaactttctaggaaatgtacaattacaacaaaccggttggagtatgagagaattcaaactaaaggtgc

SEQ ID NO: 10250 - DNA, 372 bp, Glycine max
ggaataatcaatcagtgaaatagctaggtagcatgagtagtagaggtgaaagcagtggtggtggccaaagctccttaaattacctctttggatcagaagaacagccaaagcctcctcccccaaagacagtttcatatccattgccaccttatggaattgacatcgataacaaccacaatccccctactggtcaaggccaacacctgggaaacgttctcaccaatcgtccatcgacaaaagttcaatcggttccaggtggacactcatcgcttggatacctgttcggagacaagtgatatcgatcatgttttcattttattatcccgatcgatatatccaattcactgatagtactgcatattggtgcctctg

SEQ ID NO: 10251 - DNA, 694 bp, Glycine max
cggcgtgctgtctccttattttctcaaaaactgcatgaaccctctctttttcaccgaaccttcctttgttctttcccttcaattttttattcacggcaaagatgggtgagagtaacagcaacaagaagaggaagttaatttgccgcgaagaagaacatgaagaggaggaggagaccaaaatggagacgttctttgctctggtgagaaacttccgcgacacacgtgatcggtggatgggtctgaggtcaggtgaccgcaagagcaagaggggtaagattatcactgccaaggaagaaaatatagtttggaaacccacgtttcagcttgaggatttcgctgatgagcaagctcggtgccgaaactctttggaacctagtgcgtcatctcagagcaaaaactgtgataaggaagatgctgcagaaaagggtattgacctcagcctctcactttgacaaacgggtcttttcatgtgaccatggctagcttgctagatgttattgtaatattctatattcagaaaccttaaggtaaaaatgggtctctctttaacttgattttcactgggcaacttaatttgtagatgtgtcatgtgtggttaattagttaatatggtttttggttttgagggttttagtcagtcgtaatgtattttgaaattcaccttgtgaaataattgtaccttttcagttccccc

SEQ ID NO: 10252 - DNA, 398 bp, Glycine max
gaattcctcgaattctagaatccctagaaagaaggcaaggatgtggatggtggtgctttcttccccgcaaaccctagcgcaaacagcgttcctccgaaattcaattcccagcccaaccagagtgtccctttctctcaaaaccccgtgttcttcattaacagcaaaatgccagcaacaacaaaaaactcaagaagacggcattcccgcggacgaggttaaaatccttgcgaaattcaagtcccgccacaactacatccgcgttctagaagtttctagaaaagcagaacaccccttccgcggctccaggctcctccttctcgacacccccggaaacatccacagcatatctttcctcttcaagtccctcaccaatacttacttcgacgtcttcgccacgc

SEQ ID NO: 10253 - DNA, 495 bp, Glycine max
cggacgcgtgggcggacgcgccgaaaacctaatcagaaaaaaaatcgtagttggaggcgccgcactccactccactccaatcaatcagatactagcgatggggaggaagcgaaaggtagcaccgaaatcttctgtatccgccgagcccccgctgaagcaacaccaaccaaaacccgaaaatgccgctcaggaatacgaagaagaggtcgaagaggaagttgaggaagaagaggtagaggaagaggtcgaagaggaagaagaagaagaggaggacgaagaggacgaggaagaagaagaagaagaccaaaaagaccaataccagcaccaacaacaacagcaagacgaagacgacgacccgatctccaagcttctggaaccgttgagcaaggaccagctcctcatccttctctgcgaggcggcggccaagcaccaagacgtggctgagaggatccgaagggcggccgacgaggatccggtgcaccggaagatatttgt

SEQ ID NO: 10254 - DNA, 374 bp, Glycine max
ggggaaaagagaggcacctgagtcaatgctggtcagagacacgcacccctcccccgcaaactctctctcacacaaactgtggcgtgttcgcgaaacccgagacgtttctcttttcaacaccataaaacgcacagcacagcacagcacagcatctccaaaccttcccttttctctccttccgctacgctgcgccatggcccagcgccgcagcccccagcctctcccagagccagacaccacaggatacgattcccaccacaaaccgcagcgcggcagtggaaacagaccgagtcgccgaatcgccttccgccgccgagtcgcagcgtggcgagttacggagctcccaacgagcctcgtaaggagtccaatttaga

SEQ ID NO: 10255 - DNA, 1220 bp, Glycine max
aaaccaccagcacttcaccctttttttagacaatattgttggacccattgacagcataagcaggccgttttgctccagcagcaggtgcagtagatgctgcttatgttgcttcttcccaagaaagattgattctcttatctccaataaaagaaggcactttggcgtgcaatggcttagtcattgtcaaaatgttattacaagtccgcaacccagttgtagcattctgctttttagttttaattttttccttttcttcatcagttttagcaccggccatagatttgttgttttcatccattccttgagttaatttcttgattgtagcccgggtgaactcctcaacattattcaatctctcagtaaaatcattataatgctctgaaaagtcctctccaagcctatcagatggctggccagtaacaattttgtatccacataaactatttgtcgcattaggaaccttatgagctaagtgatgaaatgtgtacaacaagcactcaacataggtaaagttcatctcttctccagtcttcttccaagtcatgtatttcttaagcaactgaacaatagaaggaagcatttggcgtgaatcttgtggtgttgtataaggtgaaaattctgcaaggcttctgagtaaatctactttccgttctccaggaagctggtcaaaaacaggtattatatatttgtttatatagttgagaaatttgttgcttgatgcacccctcactacaaatggaagtgccatgtgaaggcaagatatcaaccggtcaatatgatctgcatctgatacattgaactgtgcatctaaatcagcttgcccttcaatgattccaataagctctttcatccgctcagccggagccttttctccaaataggctcaaactcttcagaaaatccataaacattcgaaattctatgccagttacatcttctaaactctttttaatgagatcagttatgtgtctttccatttcctcctggggtttcaacaattcagctttgatagggaaaaccttatctctaacaaagtttataactttctcacgaatgacatcatccgtgcttggctcttcaacactgccaatgtgcttaaacaaagccgtcaaagaagcttttacatcctgcctcagcaaagacataagagccttatgtactgcatcacgctccacaaattcctcagacccaagaatttgcacaagaatatcaaccctagaa

SEQ ID NO: 10256 - DNA, 830 bp, Glycine max
gttggatatttgctgtctcagacacagacagagagagggaaactctggattccacctcttcccgtccttcgtgacggtcctcttccttcgaccacttcagggtgatcagggtttgaatcttaaggttcttgttatattttttgagacatggaaggaatttgtttcttgtcaagttgcttccagaattggttgctttcattccaagaagtacttgatcgccggttcttcatccttggagattatcttctggtttcctttgctaattgcacctagttttctgttctactttaatgatcagcacattgtacttaatgcttgtttcttctgagactagtgctgcatctttagggaatatatacaatgcattcctgactcaacatcaagttgaaacatttgaaagatccgcttctgggggatgaagtatataaattgatgtgtgaattttggatgctgcctgcttctcaagtattagataagcgattgcattgaaacagtgcagacagtacttattgaccatcattgtgttgttgcttctaatggatattggtggtgacaaaatattatttaccagaaaattctgaaaaatctatgtagcttagatgaagtggatattattgaagtcctcaagtcttgggtcattatgaatttagctgaagattgatgttgctttgatcaatcatttttggttggagctgggaattgttagtatgttctccaggacttgtttgattctaccacatgcatcctgctaccactacgaagctgtggatctattaatcaataaggctcggctgcccctccagccgaatcggctcgaggcggccgctcgc

SEQ ID NO: 10257 - DNA, 404 bp, Glycine max
ttttctcttctggagggagactctctagtgtagtggagtataagatgcttatttcactttcgttgctatgtgatcagattaatcttggaagtttgatgtgattgcttggttttggtttgaagtggttttaatggggaatatactgaatctaaacaattccaagactagacggaatgattcccatggggtcttgcaaggtgaatcctgcaagagacagaggttgtcaccaaactcttgtgaggacaacccaagactgattccgtcccttcctgatgagatatcaatacagattctagctagagttcctcggatttattatttgaatctgaagttagtttgtcgtgcttggaaggaaacctttgttagttctgaactattttgtgtgagaaaagagcttggaagca

SEQ ID NO: 10258 - DNA, 375 bp, Glycine max
gggatgcattcattgtctccaattttttttttcgtgtcgttactttcatctctaactactcttcttctgcatcatttctctgttgcagcaccggttacgaaaattcgtggaaccgatttctggtgttgagctgcgattgcatgtgggaatcgatttctgcagattaatcttggaagtttgatgtgattgcttggttttggtttgaagtggttttaatggggaatatactgaatctaaacaattcaaagactagacggaatgattcccatggggtcttgcaaggtgaatcctgcaagagacagaggttgtcaccaaactcttgtgaggacaacccaagactgattccgtcccttcctgatgagatatcaatacaga

SEQ ID NO: 10259 - DNA, 1426 bp, Glycine max
catgcgcccccctataaaaccctctctcatattattattattattcattccagggtctcttgcaccacttgaagattctccttttcaaatttcaacctttttcccccaaaactaacaaacccctcttcttctcaatcattgcatggctcttcactgattctataataataatttcagattcgtttttcgttttttgttaccatggagttgatttcaggtctaccagaggacgtagcccgagactgtttgattagggttccctatgatcaattcccggcggttgcttcagtctgcaaaggctggagcgcggagattcactcgccggactttcaccgtcggaggagaaccaccaaacaagcccagaaaatcctcgtcacggttcagtccaagatagactccgataaaacccgaaccggtttgctcgcgaagtccaccaccaacccggtttaccggctcagcgtattcgaaccgaagacgggttcatggagcgagttacccttgggacccgaactcgccttcgggttacccatgttctgtcggatagcgggtgtcgggttcgaccttgtcgtaatgggcgggtgggacccagactcgtggaaagcgtcgaattcggtttttatctacaacttcctgtcggccaagtggcggcgtggggccgacatgccgggtgggccccgcacgtttttcgcatgcgcgtcggatcagaatcgcacggtttacgtcgcgggcggacacgacgaggagaagaacgcgctgaggtcagcgcttgcgtatgacgtggccatggacgtgtgggtcccgctccccgacatgtcgcgtgagcgagacgagtgcaaggccgtgttccgacgcggcggcgcgctctgcgtcgtcggagggtactgcacggagatgcaggggcgcttcgagcggagcgcggaggttttcgacgttgccaagtggaagtggggcccagtggaggaggagttcttagatgccgccgcgtgtccgcgcacgtgcgtcgacggcgcggatggtgcggaggggagaatgttcatgtgccggggtggtgacgtggtggcgctgcacggggacacgtggcggaatgtggcgaaggtgccgggtgagatacggaacgttgcgtgcgtgggagtgtgggaagggttgatgctggtaattggatcgagtgggtttggggaaccacatatgggctttgtgttggatctgaaaaatcgggcttggactaaacttgccagcccagaggactacactggtcacgtgcaatctggttgccttctccaaatttagtactacttgacttgttttttttttatcaagttaaaatgctgaatattattggtgcatagtacttcagttttgtttcggggagtttgtgtaaatatggttatatgaagcaacatttttgttttataaaaaaaaaaaaaag

SEQ ID NO: 10260 - DNA, 836 bp, Glycine max
ctggaacaccatgtccatccctataaaaacctctctcatactcatctccacatattctgatccaacagtctttaacactcgaagattctctccttttcaaatttcaaaccttttcccccaaaactaacagacccctcttcttcttctctctctgtaatctcaatcgtgcatgggtcgtcttcactgattcgataataaaaatctcagattcattcttcgttttctgttacgatggagttgatttcaggtctaccagaggacgtagcccgagactgcttaattaggattccctacgagcaattcccagcggttgcttccgtctgcaaaggctggaacacggagattcactcgccggactttcaccggcgtagaagaaccaccaaacaagcccaggaaatcctcgtcacggttcaatccaatatagactccgaaaaaactcgaaccggtttgctcgcgaagtccaccacgaacccggtttaccggctcagcgtattcgaaccgaaaacgggttcatggagcgagttccccatgttctgtcagatagcgggtgtcgggttcgaccttgtcgtaatgggcgggtgggacccagattcgtggaaagcgtcgaattcggtttttatatacaacttcctgtcggccaaatggcgccgtggggccgacatgccgggtgggccccgcacggttttcgcctgcgcgtcggatcagaatcgcacggtttacagtcgcgggcggacacgacgaggagaagaacgcgctgaggtcagcgcttgcgtatgacgtggccatggacgtgtgggtcccgctccccgacatgtcgcgtgagcgagacgagtgca

SEQ ID NO: 10261 - DNA, 468 bp, Glycine max
gacgacagaagggggagctccacgttggttgtttgatatcgattattgaacaagcggaagaaagaaacgcagtgtggaagatgccgacacgttgtgaaatatgctgcgagataatgatcgcgatcttgatccctcctctcggagtttgctttcgccacggttgttgcagcgtcgaattcatcatctgcttgctcctcacaattctaggttatattcctggtataatctatgctctctatgctattatcttcgtcgatcgtgaccagtactttgatgaatacaggcgtcctctctatgcacaatactgatgataattttagtttgtatgcctatgagtgatgctcatgttgatcgtgtgcttaattactgacaatttaagctcgtgtgcttgttgaaattgatggtttgtagaatttattgtttacgctctcgaagcttcaatgacttttatgccataaggattcttct

SEQ ID NO: 10262 - DNA, 964 bp, Glycine max
taggcatcataatgtataaaacatgctacatctttaagttacatcatttataatatcatgtattatcttctctttcctttttatatttctattatatatactcctgtagggtaagatgattcatttttttaataattattaacataataatcttaaagaactagtttaaagtggaagaaagggatgaacacagttgacttgaccttactcgattccttccaacagcactcttcttctccctggtcataattcatttgcaattcttgttgaaacaatgcatctagaggtatatgaacaagtctcactatctttcttggtctgctgtcggtgtttgtgacctcgaaatttcgttcaccagtgttttgggttgaattctgcttacccctcgagtatttttcagtttcccagaaaaatatattggtgtggctagtcaaagttctagagacttggacaattttggttgctattgtgtgcatcttggtatttcttctgaaggagtttgttatgggagggaagagctcaaaagggagtggtaggaggtatgattttggtgcttcttcatcttcaagggataatagctatggtggataccctccgcaatcaccatacacttcttatcaaacacctcagcacccttgtgcatcagcatcagcatcagctccattttatgactatgcacagccaaaaaggaagttggataagaagtattccagaatagctgataattaccgttctttggatgaggttactgctgcacttgcgaatgctgggctggaatcttctaatctcattgttggcattgatttcaccaagagcaatgagtggacagggaagaggtcattcaatcgaaaaagtttacatgacattagaagtggtcaaaacccttatgaacaagcaatttctattatcgggaaaactttatctgctttcgatgaagataacttgattccttgttttggatttg

SEQ ID NO: 10263 - DNA, 387 bp, Glycine max
gaattattaacataataatcttaaagaactagtttgaagtggaagattggggtgaacacagttgacttgaccttgctcgattccttccaacagcgctcttcttctccctggtcataattcatttgcaattcttgttgaaacaatgcatctagagctagagacttggacaattttggttgctattgtgtgcatcttgctatttcttctgaaggagtttgttatgggagggaagagctcaaaagggagtggtaggaggtatgattttggtgcttcttcatcttcaagggataatagctatggtggataccctccgcaatcaccatacacttcttatcacacacctcagcacccttgtgtcatcagcatcagcatcagctccattttatg

SEQ ID NO: 10264 - DNA, 342 bp, Glycine max
gttgaattttgcatacccctcgagtatttttcagtttcccagaaaaattattggtgtggctagtcaaagttgtgagcttatgtcccttttggttattatagttggtttccttccctcccccgagttatataaacatgctgtatgcgttttggagtttcagctagagacttggacaattttggttgctattgtgtgcatcttgctctttcttctgaaggagtttgttatgggagggaagagctcaaaagggagtggtaggaggtatgattttggtgcttcttcatcttcaagggataatagctatggtggataccctccgcaatcaccatacacttcttatca

SEQ ID NO: 10265 - DNA, 441 bp, Glycine max
gccagatttatacagaggctgactcgatttttcgcgagttgtgatcactcgcgaggatttggttgagaaggcaaaagggtttgccttcaaaggaatggatgtgtctcagcggattttcactagtagtagaactgtgcttggaagcagtacaaagtttatgttctccattgcgaattccataatctctggagccgcggaggttttcaattttgtgtctcagtcgatggtgtttatttgggttttgtattacctcatcacatcagagagtggtggagtgacagaacaagtgatgtgcatgcttccaatttcgaactccactatggacagatgtgttgaggttttggataaagctatttcaggagtccttttggccactgctgagattgcattttttcaagggtgtcttacgtggcttttgtttaggttgaacagaatacattt

SEQ ID NO: 10266 - DNA, 389 bp, Glycine max
cttccgtccggttgcaaaagaacaacgaaagggttgattttgaaggtgatccttggaaagtggcagcaggagatgttcctatccatgattccaccgattcggattctccttatctcttggcctggtttactgggaaaacctcttgtaataacctaagatgcttatcacaacattacagtgttgcaggctgacatgccaaatgaacatgctgagtcagctttctctcaatcaatattgtcatcaccagataactcgatcagtgaagatgctgaatcttctgcagaaacacagggagaattttggaaggttcttgcaactaggagtggtagatctgctgaactagttaactgtcaatcccttaaaatatgaaagtaaaaatgggggcaagg

SEQ ID NO: 10267 - DNA, 381 bp, Glycine max
gacaccggatgaagattttggcattctcttagaagctgctgtaatgtatgatagacgtgttgctgccatattaggtgaagatgattcagtagatgaggaggtcatttggaaagaaatatccgatggaaaacaatgtttatatcccagattgttattcatcataactggcaaaggcccagaaaaagagaagtatgaggtaaaaataaagagaatgaaacttaaacgtgtggcatttcgtaccatgtggctgtcagctgatgattatccattactgctaggatcagctgatctaggtgtttgtctgcatacttcatcatcaggattagaccttccaatgaaggttgtggatatgtttggctgtggactgcctgtttgtgctgt

SEQ ID NO: 10268 - DNA, 528 bp, Glycine max
gatatctaaccgaaatgataaaattgaaagctcctccctcagaatacaagaacacataaccacatacacttcggttaatccgaaagaagctcatcggaatcgcaagacaccgccgacgacatggccgccgccgtgaccgatatggcccgccgtcacacgattagccaaatactggtcgacctcgtcaagttcgccgtcggttccgccatcgacggctcacgcagaatcatccctggtaggaagcaggtagataagatggtgccagaaggattaataaacatacccttgccaacccctttaaaggccaagaaacaccctgatttaaaggttgcaaatgacctcccttttgagacaaaaatggaggaagtgaaggaagacatgaataacctaaagcagcagtacgaagcatcaatcaaacgtgttgaagaatcacagccgccaaacaaatctgatggcggctttaaggaaatcaatcttgtgcagggcaatggaaggagggtattcattcgatctcgtctatagaatgga

SEQ ID NO: 10269 - DNA, 771 bp, Glycine max
gagcatgtgaatgaagtcttagatcttttttaatataatttgaatttaaaattatatgtttacctttttttttcggtatatggattgaatgtcattttatcaaatccttcttcattttctgttttgatcttattgtgagggaacccaaaattgataatctttatcatgttctcatttaggaaaaattgactgctgatgggccttgattttgctgggaaggcagtatatactgctgtatgggttgctgctgtgtcattgttcatggagttgctaggtttctccacacagaattgggtaactgctggtggtttgggcacagtattgctcactctagcaggtcgcgagatatttacaaactttctttcgagcataatgatccatgcaactcggccatttattgtgaacgagtggattcaaacgaagattgaaggatatgaggtttctggcacagttgagcatgtacgctggtggtcaccaaccatcatcagaggtgatgatcgcgaggcagttcatattcctaaccacaagtttacagtaaatgttgtgagaaatctgagccagaaatctcattggcgtatcaagagttacattgctatcagtcacttggatgttaacaaagttaataatattgtagctgatatgcgcaaggttttgtctaaaaatcctcaagtagagcagcaaaaattacacagaagggtctttttggagaatgtcaatcctgaaaatcaggctcttatgatattaatatcttgctttgtgaaaacttctcat

SEQ ID NO: 10270 - DNA, 566 bp, Glycine max
gaccgttaaactcttcaattctccaacaactcactccatgagtctctcgttctctctttctctagaaacagtcttctcttttctcttttctcttcttctctctttttcagttgcaacatgagatgatgacagagatcacaaacctaagcacagacctcatagagctgatcctgtccctcctcccaatccccatcctaatcagagcctccacagtgtgcaagctatggcactccataatctcctcatcttccttctccaccctctccaaccacctcaaccaaccatggttcttcctccatggcatccacaacatctcctcaaagaacaaccaatcctttgcctttgaccctgcctccaacacctggttcctcgtcccaatcccccaacaccatcaccatcaccagcagcaataccattccaacacctccttcattggcaccaagtccttcgtcgtcatcactgcccccaacttcctctataccccaattcttcacccctcatggcaccccacccctcacctccacttcccaagaatcaaccctcttctgggtgtcttccatgatgct

SEQ ID NO: 10271 - DNA, 395 bp, Glycine max
ctgccattgaagccacgaagcttagagttggggagtggcaattgcaatgttctcacagtgccattttctctctcactccccaattcccaatactacctttcgtctcagagccatggcgcctcacagcacgcctcttgaactcaatcgcttcgccgaggtcggtaacaaagtcgccgatgctgccggagaagttatccgcaaatacttcagaaaaaacttcgacgttattcacaaacatgatctcagtccagtaaccattgcagatcaatctgctgaggaggctatggtttcaatcatactagacaatttcccttctcatgccatttacggagaggaaaatgggtggaggtgtgaagaaaagaatgctgattatgtttggggattagatcccatag

SEQ ID NO: 10272 - DNA, 444 bp, Glycine max
ccccaacctcccaactccaacaccctctctctctctctctcgtcttcaccaaacaaacaaactccactcatcgcgtgaagacgacgacgatggagatgctacgcagaagcagcagaagaatcttcgtctccgcgtgtgtgtggttgcttctgtcgctgtcaccgtcaccgcccagtgttgttaacgcctcccatggcgtattcaacgtgaagtgcaagtaccaggaccgctccctctccgccctcaaagcccacgactaccgccgccagctctctctcctcgccggcgttgacctccccctcggcggctccggccgccccgacgccgtcgggctttattatgctaaaatagggattggaactcctccgaagaattactatttacaagtggacactggcagtgatattatgtgggtaaattgcattcagtgcaaagagtgcccca

SEQ ID NO: 10273 - DNA, 584 bp, Glycine max
ccgggtcggaccaagccgtcggccaagccttccaacctgtccttgttccaccaggacctatcccaaacctgatggggaaagctgatttttccattggtccaagattgaaagcattctctgattggttactgaaaactatggtgttgggcaaacttgatgccatctttccagctgctactcgtgaatatgcaccattgattgaggaattatggaatgatgctgccattaaggctacatacgaaaggagaagcgaattagaaatgctgcctagtgttgccggttatttcttagagcgggctgttaaaatattaaggacagattatgaactctctgatttagatatcctttatgccgagggagttacttcatctaatggggtggcttgtgtggagttttcatttccccaatcagtgtctgacgaaactgttgacactaccgatcgatatgattctttggtcaggtatcaactaattaaggtgcatgcaagggggctaggagaaaattgcaagtggctagagatgtttgaggatgttgaaatggtcatcttctgtgtttccttgactgactattatcagtttttctgt

SEQ ID NO: 10274 - DNA, 595 bp, Glycine max
cgagcactatttttaagcaggccaatattctgtacaaaagtgtcccattctcagaagatgagcgtgaaaatataaagctgaccattcagagtaatgtttatgcttatcttggcatactccttgagggtcgtgagcgttttgaagaagaaagcttcgggaatttaaagaaaagtcaatcttctgtgcttgacactacaggaaccagtccaaaactgggtgacaagactgtttattccattggcccaagactgaaagcattctctgattggcttctgaaaactatggtgtcgggcaaacttgatgccatctttccagctgctactcgtgaatatgcaccattgattgaggaattatggaatgatgctgccattaaggctacatacgaaaggagaagcgaattagaaatgctgcctagtgttgccagttatttcttagagcgggctgttaaaatattaaggacagattatgaaccctcaaatttagacatcctttatgctgaaggagttacttcatctaatggggtggcttgtgtggaagtttcatttcccccatcagtttttgactaaactgttgacactactgatctacatgattc

SEQ ID NO: 10275 - DNA, 650 bp, Glycine max
ctgcgtctcgagtccgcaacgagcagcagctcctggacgatgaacatagccaccaacacaaccttcataaacttccccttccaactctcaccactcgcatctcgcgcgtgccaccaacgcgccactctctccctctctttccctcctcttcctctctccaaacccgccatgtcctccgccgctccggtcaccgaactcagcgacgagtccgacttcgaatctctcctctctcccgacggccacatctccatctgcggcttcggctctctcctctccgagagaagcgcccgaagcactttccccgacttggccaacttccggaccgcacggttgaaccggttccgccgcgtcttcgcgcacgtcgctccggttttcttcgagcgcggcattgccaagccagaaaccatggagatttccagcttgagtgtggagccatgtgaaggagaaactcttggggtgacagtctttgagattagaaaatcggagattccaagattttatcaagagggaggttgagtttcggtttcttgctgttcttcctgaaacacttgatggcaaggcttttgaattttcagccggcctttgtgctcgttattgtgatgagggaatttttcgaccactagatgtaaaggaaaccaaggaatctattt

SEQ ID NO: 10276 - DNA, 936 bp, Glycine max
gaaagaagaagctacttgttggctcgcaaatgaagttgtgtgagaactgagaagggtacttggtgtggtgggtcttcctaatccattgaagataaattattaaaagatgaagtctgctcttatctaaatcacccttatttatccagattaagacagtctttagctgaacataagaagctgcaaagttcccttcttttggggcagagtcaattcatcaattaggagttgggtgagagaatggaagcctcagagcagaacaattcaaaggtagtgttgattgattctttgcagtcatgggagttccacgtcaaccaagcctataatcagaatactcctgttgttgttcacttcactgcttcatggtgcatgccatcggtggctatgactcctgtttttgaagaactggcttcaagctatccggaagttctgtttctcactgttgatgttgatgaagtcaaggaggtagccaccaaaatggatgtaaaggcaatgccaacatttttgctgctgaaggacggtgctgcggtggacaaggtggttggtgccaatccagaagagataaagaaaaggatagatggggttgctgagtccactcgtgtctcactggcatagttaagcatctgtatgatattctactgttgcaagttgcaagatatgtgcttgtggtcctgcactgcactatggcatctgagtcaaagctttttgtgatgttgtatgctgttgaatatcagttcaagtgtaatttccaattttcataagctcaatgctttggttactgattaatatcggcagtttttgtaccagccaaaattttacatttcataattttggttgctgtggatttatggtgctctttccctgcaagttgtgaattcaaggtttatgtcctgctgtctttctattggttctttcgcaaatgaaatatatatgtatatt

SEQ ID NO: 10277 - DNA, 447 bp, Glycine max
gtcctttctttctttctgctacttttttttctctcacctcacagcagaagcagcaatgaagaagaagatgatggcaagcacggccatctccctcgtcttcgccgcgctcttcctcttctcctccgtccactctttctacctccctggtgtcgctcctcgcgatttccaaattggtgaccccctctttgtcaaagtgaacaagttatcatctaccaagactcaacttccatatgactactacttcttgaagtattgcaaacccaaaacgatattgaacaatgcagaaaatttgggagaggttcttagaggtgatcgtattgagaattcagtatatacatttcatatgaggaaggaacagtcttgtactggtgtttgtcatgaaattttggatgctgaatctgcaaagagttttaaggaaaaattgatgatgaatatcgagtgaacatg

SEQ ID NO: 10278 - DNA, 362 bp, Glycine max
ggtgtgtggctgtaaaacttctctagttggccctgacactgaaactctctctgtcacttcccattcccaaacgatgccgtacccgtggttaagcttaacccctaactcctccacacgcgtgaggatcgccgctagaggcagaggatccgacggcaatccgcacctttgtgggtgtatgcggtttcagtttcagtttcagtgagagtgaaagagttaaaagctgctgggaaagcttcttgaaaagatgaatgttcctggtttgacaagagaaaatgttgctagttatttgcaggttcaattttatgtgtatttaatcttgaatacttgccccctttggtaacaaagatcgttgaatttgagcc

SEQ ID NO: 10279 - DNA, 377 bp, Glycine max
  unsure (1)..(377): unsure at all n locations
ggctgcatcctacattatagttgagacttttgaactaaaatcctgcagtagggtttatactcattcacgcaaaccctaatcccaaatgctttccttctctgtttctggtttccctccattcccacttcgcagggcatatccaagaagagtaagtgcaagccttgacattgacaccccacaagaccccaattcagtcaaccctaatggctcgaatgctaaatttgaagatgaagaagaagaatttcgaaagggaaaggagagagggagagtgatacgtggtggtggggttttcattggaaggaagaagaaggcggcgaacgagaaagttcaatgggtttgctgcaattgtgggtacagtgcanggcaatggtggggca

SEQ ID NO: 10280 - DNA, 379 bp, Glycine max
  unsure (1)..(379): unsure at all n locations
gggtactgacaatggaacaacaaaaggaaaccttccgggtcgggaaataaaaacccgaacttgaaaagaggcaaaactccgatccacgttgaggttggagcttggagtgagtcaaacacgaaggaagaagaatggcgtctctgaggagtggagcttcttcgttgttgaatcgcctttcgaaatcgcttcttcttcattccaacaaaaaccctaatcctcaatctcagttattactcccttctctctctagactccccggtgcgatttctccccaaaacgacgccgaattcccccacacacaaggctttctctaaccctgtggcctcncctctctccgcttcttcctacctcatggggaaagctcctccgtcagatgatc

SEQ ID NO: 10281 - DNA, 1659 bp, Glycine max
attttacgcccctcctctgttcttcgctctctccactctgtttccacgtggggaaaaaaaaaaaaagcatgaagaaaatccgcaactcgatcctactcttatcattcgtgctggcagcctcggcggcggtttcatccgcagagcagattccttccgctgcttacgaccgcgtgctgttcccggaccgccggtgccagaagacggcgtcggagaacatgacgcggcgaggatcctctgcggcggcggcggagtgtgaggtgtggagtgagtcatgttcggaggcggtgctgagcgtggcgcggcggccggagacggcggagtggctgaagaagattcggcggaagattcacgcgaatccggagctggcgttcgaggaaatcgagacgagtggtttgataagagaagagttggatctgatggaagttagttatcgataccctctagccaagaccggtattcgagcctggatcggcacggggggtccgccttttgttgcgatcagagctgacatggacgcacttccaatccaggaagctgtggaatgggagtacaaatctaaagttgccggcaaaatgcatgcttgtgggcacgacgcacatgtggctatgcttatcggcgctgccaagattttgaaaactcgagagcatttattaaagggaactgtaattctgttattccagccagcagaggaagctggtaatggagcaaaaagaatgatgcaagatggtgctttggaggacgtggaggctatatttgcagctcatgtatcccatgaacatccaactggtataattggctcaaggcctggacccctccttgcaggttgtggattcttcagagctgtcattagtggcaaaaagggtcttgctgccaatcctcaccgttctgttgatccagttttggctgcttcagctgcagttatcagcttacagggtattgtctcccgcgaagcaaatccattggattctcaggttgtctctgtgacttcgtttaatggacgcaacaatcttgacatgatacctgactcggtggtcctattggggactttcagagcgttctctaacaccagcttttaccagctacttgaaagaatagagcaggtgattgtggaacacgctagtgtctacagatgcttggcagaagttgacttctttgaaaaggagtacactatttaccctcccacggttaatgataaccgaatgtatgagcatgtgaaaaaggtgtccattgatttgctgggtcataagaatttcagggtagttccacctatgatgggtgctgaagatttctctttctactccgaggtggttccctcagctttcttctacataggagtaaggaatgaaacactggggtctactcatacgggacactctccatatttcatgattgatgaagacgttctaccaataggtgctgctgctcatgctagtattgcagagaggtacctcattgaacatggttgatgttggaaaatagttgaaagaaccctgctcttgttgtcacgtcttctcaaattcgtacaaaattggtacacgagttcacccgtccccctcatgtttctcacacgagtaaattctcagtttagttcgtgatattgcaagtgtttgtcactttagttattaaattaataaaatctttactttagtctctaccttt

SEQ ID NO: 10282 - DNA, 416 bp, Glycine max
tcttcctctatataaaccctaccctcaccttcaatttccgtttctctcgtcaaatttatccattcaccacagagtttcttcaatggcccagcctcaaccagagtcccacgccaccaatggctcacacgagccattgctcaaaatcccaaagctccaccaaaacggcgacgtttccgcaaccgctccctttctccgcgtcaagaagctctccgacaaggccgttttgccctctagggcttcccctctctccgccggttacgatctctctagcgcggtggagacgaaggtcccggcgagagggaaggctctggtggccactgacatcagcatcgcgattccagagggcacatatgctcgcgttgcgccgcgttcggggttggcgtggaagcactcgatcgacgtgggtgcgggggtga

SEQ ID NO: 10283 - DNA, 404 bp, Glycine max
gatggtaacatagtaacacatagtttcaggtgggttctaaaacaaaagaaaaaccgagaaagagttctaagctttgtctgtgactggtgagagccagtagcgaaagaaagtgaagatggcgctatggatggaaaagggttcagagccattaaccgaaaccgagaaggcagaccttgaagccattgctgcactcaaagagtctgctgcctttgaattcaaggaaaagggtaatcaatatgtgaagatgggcaagaagcattactctgatgccattgattactacacgagggcaattgatcagaaagccttgagtgactctgagacctctattctctttgcaaatagagcccatgtgaatttgcttctagggaatcttagacgtgctctaacagattctaatgagg

SEQ ID NO: 10284 - DNA, 426 bp, Glycine max
gaagaagaacgaacagaaaggggtacagaagttaaaagggcccaaggagggtttttcaagggcaaggggagaagcccttggaccaaggaagggaaatatttccaaaattcacccacttactgtcaatctccatgtgtatgatgaacgagatttctgatcttgagtctgcaaaactcactactctaaagtttgagtacttgatgcagttgaatattatatgtgttggaaacaaagcatctaatgatggtcccgagaatgacatcttaagcgatttattccctgatgacacaggccttgagcttcctcaccagtcagctaagctctttgttggggatgctataatgttcaatggtgatagaacttcacgtccttacaaatgggctcagcacttagcgggtattgacttcatgcctgaggtggctccct

SEQ ID NO: 10285 - DNA, 471 bp, Glycine max
gaagtgaggtggtgattgaaacgaaacgcacagggccatcggcgatgggagacgacagtggcagcaaccggtcaaagccggagtggctgcagcagtatgatctaatagggaagattggagaaggcacctacggtctcgtcttcctcgctcgcatcaagtcttccaccaatcgcggaaaatccatcgccataaaaaaattcaagcaatccaaggatggcgatggtgtctctcccaccgccatacgtgaaatcatgttactcagggagataacgcacgagaatgttgtgaagcttgtgaatgttcacattaatcatatggacatgtctctctatctggcttttgattatgcagaacacgacctttttgaaataataagacatcatagggacaaagtcaatcaatccattaaccagtatactgttaaatcgttactctggcagttgctcaatggactaaactatctacacagta

SEQ ID NO: 10286 - DNA, 403 bp, Glycine max
caacctcacagcaagtgggcctaggcccaacccgcaaggctcctaccattacggtctcataaacacaaccaggaccatcatactgtcgggttcaccaggtatagtgaatggcaaacaaagatacgcaatcaatagcgtgtcttacgttgctccggacactcctcttaagctcgccgactacttcaaaatccctggcgttttccgtgtcggaagcttttccgacaggcccactggcggtggcatataccttgacacatctgtgctgcaaactgactacagaacatttgtggagtttgtcttccaaaacgacgaagacatcattcagagctatcatctcgatggctactctttcttcgtggttggtatggatggaggacagtggacacctgctagcaggaacacg

SEQ ID NO: 10287 - DNA, 532 bp, Glycine max
cacgactgatgttgcgacccaggtcatctcgggtgacacttgacctcttgtccatcatggaggagcctgtgacaacaatccgaattttgggtattgagattcaaccttacctcccaccaccacctgggtctgtccgaattttgggtgttgagcttcgaccttaccttccaccacctgggccattgtgggaacctgacgctcctgtatccaacacaaacatgaagccacaaccctcataattggtctaccctgttccgagaaggaagcaattcggatggcagagctggatttgagtttgaagatttagggaatttcgtgtctaaggttttcaatcgagtttgcttgagacttaattgagtttctacattttgtttgtttttctaatttatgtttcacaaggccttgtgaatttagtccaagctaattcaagttggtgataggtcgtggttagtctggtagttggtcgtggattttcaataacaattatgtcctttgaacccaatttcaatcgattaattaatatggtttggcc

SEQ ID NO: 10288 - DNA, 542 bp, Glycine max
gaaagagacctggtgaaaaatccaaggttcacgcgtccgaagaaaaagcagctctaaaggcaagagaggctgcaaggaaaagagtacaggagagggagaaacccttgcttggcctttacaacaagccttactaactgcaaaatttacttaacagccttgtcttcccccagaaatatgaggttgtttcttttttgtttgattcctttatgctggtcggtgtcctaattcttcaagtgtttcccatgtgactctaccttgtacaatgtaactgttccgtttctttttttagtttttgcaatacatgctaattttcagccttagaggagaaaataagggcttagaagtcttcgctaggctgatgaaaccaagttaaatccctgttgcagaagcttttagaaaacacatccaaataagttaatcttatgtggatacaaaagcaatgctcattttacgttctttaatgtgttaaatcatatgatgtacaagaagggaaaacttacagtccactatcctgaactttattcttttatttttaggtcccc

SEQ ID NO: 10289 - DNA, 351 bp, Glycine max
ggaaataaaccaacatcaaaccaagccattttttcttctcccttgtagcaatgaaacaccactccttgtcatttaaatggcttcttctgattttcctcacacactcaacccttctcaccgcaacacactcgttgacaattccaaggatgagtccaattcctgaatgggaaacaacactacacaaccaccctgcaattaatacagaggaagtgaaaacattttacttcaaacaggttctggatcacttcaactacaggccagaaagctacacaacgtttcaacaaagatatctaatcaatttcaagtactggggtggagccaattctagtgctcccatatttgcatactttg

SEQ ID NO: 10290 - DNA, 499 bp, Glycine max
aagtgttcgttttgtatctgatatctcggtctgagtggcagatccgcgccgatggtgtgagcgaaaacgttattggggcagaaataaaaaaccatagaatagatagagttattactccctataacatgtggcagtgatttggagatggcagacttaccagggtatcttcatgcctgtttgaacacagggaagcttgcctccttggcaattttggtgtctggaggaatcgtcttgcaaattttggcatgtgccttgtataataactggtggccgatgctgagtgtgttaacgtatgtgcttctgccaatgcctttgctgttctttgcggggtctgatgattctatattttctgaatctgataatagctgggtgaattttactaagttcttgactggagcctcaactgtgggaggcattgccattccaagcatattaaagcatgctggggttatcggttggggagcctttgtaatggaactctcttcctactttgtgtttg

SEQ ID NO: 10291 - DNA, 289 bp, Glycine max
gaatttttgcttcagttattactccctataacatgtggcagtgatttggagatggcagacttaccagggtatcttcatgcctgtttgaacacagggaagcttgcctccttggcaattttggtgtctggaggaatcgtcttgcaaattttggtctggattgcattttatgttcttgttttattagtgcataaatagatgacaacttcttggtaaaaataccactgtttacttacatctgtcatctgtgttgtgtcaggcatgtgctttgtataataactggtggccgatg

SEQ ID NO: 10292 - DNA, 546 bp, Glycine max
cgtggggtcgcgtcgcaaaaacgacggggccgacgcccttgtttgaaattgtgcagagcgaaaagtaacaaagtgaagaaaagagcagatagaagaaaaagctcggtgcatagttccgaatccttgttcttctgatagtgaaggtagcttgaggtttatttaatttaattcggttcgagaaaagtgctgagagagagaaaatagaaaaggtgaaaaatcgaaggtcggagatgcaaatggaagctagggttggtatggcggtggatggtggtggtgtacggaagttggtgcagccgccgccgaagcagattggaactgtttctcagcttctcgccggaggagtcgccggcgcgttcagcaaaacctgtacggcgcctcttgcgagacttaccatcctctttcagattcagggaatgcatattcagggaatgcattccaatgttgcagctttgagaaaagtcagtatatggaatgaggcttcacgaattatccatgaagaggggtttagggctttctggaaagggaatctggttaccattgctcacc

SEQ ID NO: 10293 - DNA, 392 bp, Glycine max
cccacgcgtccgcgcttccatcgtaaaccctcctttcaacgcaaaactaccctgcaacccactgcagcgaataaaacccacgctgctttaacttttccggtgaaccgccccaacaatatacgtcaccgttttgctcgagccgggtcgcaaaaacgacgtcgccgacctcctcgtttgaaactgcgcagagcgaaaagtaacaaagtgaagaaaatgctcgatgcatagttgcgaatccttgttcttctgatagtgaaggtagcttgaggtttattttaatttaatttaattcggttagagaaaagtgcggagagataaaagaaaatagaaaaggtgaaaaattgaagctcggagatgcaaatggaagctagggttggtgtggcggtggatgg

SEQ ID NO: 10294 - DNA, 659 bp, Glycine max
cggggactgggaagaattaccttctgtgctgtctattgcgataagtgatggatatgtagtgatggggaaggggagtttgagcttttctgaggaagattttatggatgggtgtagtagtcaagatggtagcatcattggacacgaatctcactcaaggcggtctaggaagctctcaggaagtcgagcatgggaaagaggtagtgaggcagatcaaggagagggtggctatgatattattttgatgacagagattccatactctgttacctctttgaagaagctgtatgcacttattaagaagtgcttgaggcctccatatggggtggtatatctagctcctactaagaggcactatgttggcttcagtaatggcgtacgacagctgagaagtctggtagatgaggagggcatttttggagctcatttagtcaaggatttggctgacagggatgtctggaagttctttcacaagtaaacaagaatttgaaaatcagatgactccctcagcaaacatacgatagaatattctaatggcaccatacatttttataatatgaatcacaggcattcttttgttttttaaatccttgatttttcttattgcttagtaataatggaggtctgaacttgaatgctcagtttacgtgcatcatcagcat

SEQ ID NO: 10295 - DNA, 347 bp, Glycine max
ggtaacacaagaacatatcgctccccttcgttctgctctctattgggctggattttaccgatcaatctctctgttcttcggttgcaatctcgttctctcttttggaatcgtttcctctccatctaatctctctggtcttcggtttcaatcactgctgtttagtccttaggttgtgtctacatattgaccttccttgatccgcatatctatgaattgtttggttttgtataaagaagagaagagaggttggggttgggggcaatagcaatagagcaatggagggcgagggaggaggagaggggttgaaccaggcagtgcagcagcaactgaatctgaagcaagtgaag

SEQ ID NO: 10296 - DNA, 598 bp, Glycine max
agttttcggtggtttgtggtgaaaatttgcataataatcttttgcagaaagcaagcaagaaagaaaaagggccatggaggccctgcacttgcaccgcgtgcttctcatgcctgtttcccaaaaaacctcaatctttttgcgcgccagtggcaccccattatccacacttgcaaggccaccattgcgttggagctctcaaacttgcagtgccagagcaaggtggtttttgggtcttggagcagacagcaagaagaccaatttacctgataccgtcaaagccggtgaccccgttctgcacgagccagcccaggatgttgatcctaacgaaataaagtcggagagagtgcagaagattattgatgacatgatccaggtcatgagaaaggctcctggtgttggtcttgctgctccccagattggaattcctttgaggataattgttttggaagatacaaaagagtacattagttatgtctcaaaggaagaggctaaaactcaagatagaagaccttttgatcttttggtgatcctgaatcccaagctagagaagaagggcaagaggactgctctgttttttgaagggtgcttgagtgttgat

SEQ ID NO: 10297 - DNA, 483 bp, Glycine max
gacttcacaaattgccagtgcctactaatagcaattgcaaccaaacagtgtctcatgatactgtttgttctgatgccccaccgtcgaagccctcctccgccgccactcgccgccatcgtagctctcccttctcacaccgtggaatcaaatcacgatgtcgagcccagattctcgatcattcagttggcactacacggaactcgatgacagagacctcgagatccgaggtaggactctgttttttgtcatcgtactcttctccattattctcctcgtcactgttctcttcatctacacgcgctgggtttgccgctaccagggacgcctccccaccaccgcgttcaccgccgcagccgcccacgcgccgccgctcgcgcagcctcagggaatggacccagcttccatcaagaaattgcccataatcctccaccacgcgccgtcggaccgcgaggaaagcgcgtgggacgaaacggagtgctgcat

SEQ ID NO: 10298 - DNA, 527 bp, Glycine max
ggaggaaacacaaacagtcgaagcagggtgttatcgtctggcagatccaaatctggaactgaaatccccttctccattcattgagtgaagcttcagcttcgataacgaacacagtccttttccatggcaaatgcctggaaaagagataaggccaccagactcctctccccaaagctactgttcctactcttctcctccactctcatagtcttcttcttcttcgcattccttacctcacgcccctcaaaccccgccaccaccctcaccgccttcaacacccgcctctccttcaatgcaatctcccccttcgactgcaccgcctcccctcaggcccaccccgtcgtcgccaacaccgtcgagggcgtccgctaccccttcctcttctcgctctccgattttggaaccttaccagacaagccccacaagaacatcgtgaggatgctcaagggcaaaccctttcggaaacccgacatctccgttacggttcatgaggttctcgagaaggccaggactgatggtaaggatgg

SEQ ID NO: 10299 - DNA, 411 bp, Glycine max
gtgagaaattgtgaatcggagggcgttgaagagttgtgagcataataaattgagaagcaaaagcgaaagggtctgtgtcttcactcattcttctattctattccatcatcaatggagaacaccgagggatccggatctgcgacgaacggggtgctggctccgccgcgcaaggtggcattgataaccggaattaccggacaagacggttcgtacctgacggaattcctcctggacaaggggtacgaggtgcacggcctgatccgccgctcgtcgaacttcaacacgcagcgcatcgaccacatatacgtggatccccacaacgcccacaagggccgcatgaagcttcaactacgccgttctctccgacgcctcctccctccgccgctggctcgacaccatcctccccgacga

SEQ ID NO: 10300 - DNA, 678 bp, Glycine max
gaacacagaagtaacaacagaccattaaaaacacaaaacgaggaaagccagccaagttccgcgtgtcttcttagaatgctcgcgtgtcaaccttatctgtggtgtgctccatttgtattggagctcctatataaccaactttcctgacccatcgttttcttcaattcaatccttaacttcaatttattgctctgtctttaattattatcctatcgatggcgttcaggaaaacccttgctcaacggctccttaacatcaccaaagtgtcatcacaagcgctcaccaattgtcggatttcctcttcctccgtcatcggaaggctttcaccgcgggccgacgagcccgttgatcccggagaaaatggcctcttccgtgcgccgcaactcgccggaaacctcctcgacaggctcaggacgatgggtattgcccacaaccggatccggttggatgggttgacgccgcctccgccgatggaaatggtggacacagtcaccgtcaaggacgcgagaaaattgctaaaggtggcgcaggtggagatggtgaaagcgaagctgagagagacccgaaagagttgcataacgttctcggagttcattgggatctgcgatgagcattgctcggatcaggatcaagcggtggagattgcaaagatgttggacaattccgcggctgtgattg

SEQ ID NO: 10301 - DNA, 399 bp, Glycine max
tcagtcacattaaaacgattgggcgtgaaagatagtcgaggattggaacagttcaagaatgaaatagagttgctctgccagcttcgccaccctaattgtgtctctcttataggattttgcaaccacaaaaaagagaagattcttgtgtacgagtacatgtctaatggatctctacatcaacacctacgaggtggcctattgtcatggatgataaggctagagatttgtatagaagcagcgcatggactacactaccttcacactggagctaaacgcaccatcattcaccgcaacatcaaccctagcaacattcttttggatcacaacatgaagtccaaaacttactgatttccgccttagcatacagggaccacgttatgggtcaaagccaaaaccaat

SEQ ID NO: 10302 - DNA, 716 bp, Glycine max
gttccgtgttccaaacagtaaggaactactctcttctctccgcataggttccgtgttccaaacaatgagtttgagtatgagcttgtgcggtaattacagtcttcagcttcaaaatcgcagaatcgtaagctgcaatcttcaccaggatggcaggcatattgttcccatcaatacgcaccaaaaaccttccaaacctgaaaagtgtcttcggtccaaatggaagattaatggcaataacattgggacatgcattggagtcatgacagtggcacacttggttgctccagtcgctgcaaaagctgaagtggctgcttctatttatgctttggctgatggaagcctcggtgactggtttggaggctttctattttcagctggacagcaggccaatgaagctgttcagggccaattaacctctctcagtttcactagtttggctgtaatttatggggctgggcttgttaccagcctttctccctgtacacttagtgtcttaccactgacccttggttacattggggcatttggctctggcaaaagcagagcacaggttgtaggagattccattgcattctccttaggccttgcaaccacgttagcactgttgggtgtaggagcttcatttgcaggaaaggcttatggacagattggccaaagattacctttggcagcttctggtttggctataattattggtctgaatcttcttgagatca

SEQ ID NO: 10303 - DNA, 972 bp, Glycine max
gcaagagagagaaactaagacagaaagagagagaaagagtggttgaaagcgtccattgaaggtatagagagagaggttttgtgaattggtgctgcttcgtgtctgtttatttcctcgcgaggtttgaattccggaacagtgaagagaaacggaggttccgatcctgcgatgtgatatatgagagatctgtgaggaaattgaactggaaaaaaaaaatggcgacgtcggaggtatccatcaagggaaattcggtgaacggaaaaggagataatagttctggtggctacaccaacgatgttaggaacggttctggtggaggcgaggctcggaattcttcttcttcgtcttcatccgcgagagacgcggaagctgcgctttacagggagctgtggcacgcgtgtgcaggtcctctggtgacggtgcccagagaaggagagcgcgtgttctactttcctcaaggacacatcgagcaggtggaagcgtccacaaatcaggtagcggaacagcatatgccggtttacgatctaccacccaagatcctttgtcgggttatcaacgtcatgctcaaggcggagccagacacggatgaggtgtttgctcaagtgactttacttcctgagccaaatcaagatgagaatgcggtggagaaagagggtcctccggcggcgcctcctcggtttcacgtgcattcgttttgtaaaacgctgacggcgtctgatacgagcactcacggtgggttttcggtgctgaggcgacatgccgatgaatgcctccctccgctggacatgaccaagcagccacctacccaggagttggtggccaaggatctgcacggcaacgagtggcgattcaggcatatctttcggggtcaaccgcgtatgacacttgctgcaaagtggttggagtgtttttgttaactccaagaggttatttgctggcgatgcgtttatattttcaaggggtgagaatggg

SEQ ID NO: 10304 - DNA, 400 bp, Glycine max
ggagagaaagagtggttgaaagcgtccattgaaggtagagagagagaggttttgggaattggtgctgcttcgtgtctgtttatttcctcgcgaggtttgagaattcagtgaagagaaaacggagtttccgatcctgcgatgtcctatatgatagatctgtgaggaaattgaactgaaaaaaaaaatggcgacgtcggaggtatcgatcaagggaaattcggtaaacggaaaaggagataacagttctggtgatgctagaaacagtggaggcgaggctcagaatgcttcttcatcatcatcatccgcgagaggtaacgtggtttcctctgcgtgtgccttgtggcctgttcggcgtgacgataacaagtttttttttggttcagacgcggaagctgcgctt

SEQ ID NO: 10305 - DNA, 471 bp, Glycine max
ggtactccatcatttccttgttcttcttccttctcttcattctgtctctacccttcaacgcaactttctttcttttctattgagcttccaatattctcacgccttgcaatcgtagttgcaccctccaaactccttcccttttctttcatctgttcaggtacttgcagtaagagaacatattgtaaaactaaaagggaaaaatggccttagatcactttgaggagactgtgcaccaaaaaggaaattggaaatcttccagtgaaatcattgcagattctgatagaaatgcctctggtgactttgactgcaacatctgcctggagtgtgtgcaagatccagtggtgacactttgtggtcatctttattgctggccctgcatatacaaatggcttcattttcaaagcacctctttggatgatgaagaacaacagaggccacaatgtcctgtatgcaaatcagaagtttctcaat

SEQ ID NO: 10306 - DNA, 411 bp, Glycine max
cttgttcttcttccttctcttcatctgtctctacccttctacgcaactttccttctttgtctattgagcttccaaatattctcacggcttgctatagtagttgcaccctccaaacacaaactgattcccttgtcttttcatctaattgcttggtctttaatggacgcgctttaactttacgcacggaaactgataaggttcaggtacttgtaagagaacatactgtaaaactaaaaggaaaaaatggccttagatcacttcgaggagagtgtgcaccaaaaaggaaattggaaatcttccagtgaaatcattgcagattctggtagaaatgcctctggtagctttgactgcaacatctgcctggagtgtgttcaagatccagtggtgacactttgtggtcatgtttattgc

SEQ ID NO: 10307 - DNA, 406 bp, Glycine max
ggagcggaagcatattcctaaaactttcttcaaaacagcgttgtgtcacgcacgccactgctcatccaacttcttcttcttcttcttcgctctctgtttctgcgtgtgcgcgaaaaagaaaagcaaaaatgcattccggtcacttacttctcgaggaacccattcgcatggtttccatcctcgaaccatccaagcccaatttctttcccgcaatgacgaagatcgttggtaccctgggtcctaaatctcggtcggtcgaggttatttctgcttgtctcaaagctggaatgtcagtggctcgtttcgacttctcttggggtgaccctgaatatcatcaggaaactttggagaatctgaagaatgctatcaagactactaagaaactctgtgcctgtatgcttgacac

SEQ ID NO: 10308 - DNA, 1148 bp, Glycine max
aacaatctcttaccaagatgttgtccagctatgggaaaatctcaagttcaatctcctctcagtgactctatgttccagccttatagtgttccttgtcaccttttacttcatgagccgtccaaggggtgtttacttggtggattttgcgtgttacaagccagagccagagtgcacttgcacgagggagattttcatgaacaggtctgtggaaactggtgtgttttcagaggagaacttggcctttcagaagaagatacttgagaggtctggtttggggcaaaagacttacttgcccccagcaatcttgagtatccctccaaacccttgtatggctgaagcaaggaaagaagctgagcaagtgatgtttggagccattgaccagcttctggagaaaactggggtcaaggctaaggatattgggattttggtggtgaattgcagcttgttcaatcccacaccttctctctctgcaatgattgtgaaccactacaagctaagagggaatatccaaagttataatcttggtggcatgggttgcagtgctggactaatctctatagaccttgccaaacagctcctccaggttcatccaaactcttatgccttagtggtgagcatggagaacatcactctcaactggtattttggcaacaacaggtcaatgctagtctcaaattgtctcttcagaatgggtggagctgcagtcctcctctccaacaagtcttctgatcgcagaagagccaaataccaactgatccatacagtgcgtactcacaagggtgcagatgacagatcatatggttgtgtcttccaagaagaagatgagaagaaaacaattggtgtggcactctcaaaggacttaatggctgttgcaggagaagccctcaagaccaacatcacaacacttggcccattagtccttcccatgtcagagcagcttcttttttttgcaactttggtggctagaaaagtgtttaagatgaaaataaagccatacatccctgactttaagctagcttttgagcacttttgcatccatgctggaggaagagcagtgttggatgagttggagaagaatctagagctctctgattggcacatggagccttcaagaatgacactaaacaggttcggcaatacttctagca

SEQ ID NO: 10309 - DNA, 410 bp, Glycine max
cggccggaatccggtcgcccccccgtccgaaagaacaacggaggggtcccattgaaaatgatttgggccctttttgtcagagcaaagctgaatctgcctcccacttattcttcctgtgtcataaagttatgcctctatggtgggaattcagctcatgggtaaaggaacctagagtgctccattggaggcctatggataatttcatccagcactattccatgtcaggattgaaagacactaacagaaggtggaaaatcgggtggatagcagctacaacatcaatatggaagcttagaaacgacattatcttcaacaatcagccttttgtcatctccaagctggtggataatacaattttcctctcttggtcctggatgagggggtgggaaaaggattttactgttcctttt

SEQ ID NO: 10310 - DNA, 763 bp, Glycine max
atctccgcccgctccgtcaccgctgtgctcggcctcgactggcacctgaatacacctcctcttccagatacggggcaatggttgctcttggcgttaaatgagaaacttccttctccaattgttgagatattaagagctcgaatcattggactgcaccattacttgatgctgtttatgatgctggctttctctgtgctatttgattctgtgaaagctccaggcctcggattaggtgctaggtacatgtttaccatggcagttggtcgccttcttcgtgccataacttttgcatctacaattctgccatcagctcgcccttggtgtgctggttctcggttcagagttccgggatatcctcatcgttgggctcagaaatattatgttccctatgctacagatcatgatgctatcagccgggtgataaagctcgatacagcttacgttgacattggaaaaccagttggtgactaccagccaaattggggttcgatgagctttctaattgattttatgcgacccactgtctccgaaggaccttcatggtacagtctgttaaagaaagctggaggtggctgcaatgacctcctatacagtggccacatgcttgtagccgtactcacagccatggcttggacggaagcatatggaggattcagttctgctcttgtatggcttcttgtgatgcacagtgcccaaagagaaatacgagaacgccatcattacactgtagactgcattgtggccatctatgtggggattctct

SEQ ID NO: 10311 - DNA, 592 bp, Glycine max
gtagataaagctgatgttttggtgcagaatagtttgttgcaggcattaagaacaggaaaattttcatattcgcatggaagggcgattagcatcaataacactatctttgttgtaacctcaactgtctgtaaaggtaatgactcttttgttttggaagagtctaagatgttttctgaggaaagaatgcttgaagccaaaagatgccaaatgcaattattaattggacgtgcttctgaggatgccaaaagaattggtggcacaaatgttaaggttgtacccagaaaagggttttccaaatcatcatctctgaacaaaagaaagcaggctgatattagtgactccaaggagggagcaacaagcaagatgcagaaacaagacagcgaggcatctcgatcctttctagatctaaatatgcctgtagaggagggtgaagagggtgtcaatgacaatgaccatgaaagtgaatccatgtcagaaaacacagacgcctggttgagtgatttctttgatcaaattgacgagaaagtggtttttaagccattcaattttcattgaacttgctgagcaagtattgaaaagaattggcatgcta

SEQ ID NO: 10312 - DNA, 641 bp, Glycine max
gaactacgtgtataggttggatcacatagaagaatacgcccattcatacttcaacaatggtgaaattcatacctcaagtgatctccatcgctgggttgatgcaactgatagaagataaacctcaacgtgttttaaaaaatatcatatgtgcatgtggtttggaaacaaagctccttggcagcggacaaccttgttactactaagccctgcctttctttgtctcgacctctttgctatcacttgcagccatggagtgacaagtgattgtgaagtctgcttggttggatcgtaatggaaggtttagtaataacaataggagtacaggacaaatgcatccaagtctaaaacagaggaagcatatatctttaattgttgatgatttctgtccttagaacagaaagcaactgattgtgtcactatccaagaatgccctataaataggaggtgcataggaggaaggttataatcaatagtccatgcttggtaaaccttaagctgtgcaatgtaatgtaatatttgtacgtacaagactgacaacaaacactatcttattcttagtgaagaaggtgctactgcttccgaaactgtaaattctcaaataggaaattgttccttgaacattgaggattgaaggaaaaaaa

SEQ ID NO: 10313 - DNA, 1821 bp, Glycine max
gcagtttcaaaggtgtttgactttattgttcagaaactttatgcactgagaaagcccaaaacaaatatccaaatacttcaacaaagtgtccttttaaaatacaagtatgttgtttccttcctcaaggaacatggcaaggaaatatataatgaagttcatgcagcatacattgatacgatgaacaaggttcttagtgctcatttccgtgcttatatacaagcattggagaaactacaattggatatagcaacatataatgatttaattggtgtagagactagaagcagtggcctgttcataagagcaagggaaccgctgaagaatcgatctgctgtatttgctcttggggataggattagtatattgaaggatattgatgaacctgcattaattcctcatatagctgaagccagctccaataaatatccatatgaggtcctgttcaggagcttgcagaagctgctgatggatactgctacttcagaatataatttctgtgatgatttctttggagaagaatctatattttatgaaattttttcaggtccatttggtgtcattgatgagcacttcgattctatacttccaaattgttatgatgctataggcctcatgcttatgattcaaataatacacaagcatcagctcatcatgtctcgaagacggattccatgcttggattcatatttagacaaggtcaatatatccttgtggcctcgatttaaattggtatttgacatgcacctcaacagcttgcgtaatgcaaatgtgaagacattatgggaagacgatgttcatcctcactatgtcatgaggcgttatgctgagtttactgcttcgcttatccatttaaacgctgaatgtggagatggtcagcttgatttgaatttggaacgacttagaatggctgttgatgacttacttatcaagcttgcgaagaacttcccaaaaccaaaatcacaaacagtgtttcttataaacaattatgatatgacaattactgttctgaaggaagcaggtcctgaaggtgggaaaattcaaatgcactttgaggaactgctgaagagcaatacaacaatctttgtggaagaactgcttcaagaacattttaataatttaatcaagttcgtaaagtccaaagcctccgaggacccaacatcaaatccggataagcccataactgttgccgaagtcgagccactagtgaaggattttgcgagtaggtggaaggctgcaatagagctgatgcataaagacgttatcacttctttcagcaacttcttgtgtggtatggagatcttaagggctgcgttgactcagttgttgctttattacacaagactctcggattgcatcaagaggatcgttggtggttctgcattgaacaaggatcttgtttccatatcttcaatcatgtatgaaattaggaaatactcgcggactttctaatttgtcgaagatgccatagttatatactggatctaattcacaatcaatgctattccatgtagtattatgccaaaaaacaactctcttggatcctgtatgtaaatgaaaagatagtttgcttctttcgggaaacccaaataagtgagcttttttttgtgcaacctatttgggaattacaaaagtacaagtaaaagagaaagcacactgttgttgtataatggaagacacatcagttgttcatgtttgtttttttcttatatatattttgagtattttcttgtagacttttttttatcaaaccatgatttaagcattctctatatatagccaatgacacttgatgcaataatagtgaaaaccatgaattcacag

SEQ ID NO: 10314 - DNA, 493 bp, Glycine max
cagaatgctgacattcctatgtctgatgccgtttcggatgaatttgcatttggaagcaacgtgttggggcttgtcaagccttgggaaggagaaaggatccatgaggaatttggatcagatgatcttgaactcacacttgatgaagtcacaaatatgaattgaatgtgataatgtaaacattgacttttgttggttttgatcagtagatatgttagaaggtaagtgaggtggtgagtgcaggcagttgttttcttttatccttttatttatttttattttggtgactttcccttttcattctatagttctccagtaatatacatgcttatttagatgtggagtggatttgcaacccattcatttcatcgttgtacgtgttgttaaaccttaattattggaaacatcagtatacattgtatggattggcttggtttgccactgacagaactccacagattgcaacctaactcaatggcaaaaaccccctgggtcc

SEQ ID NO: 10315 - DNA, 703 bp, Glycine max
gtctcacatttttacagaacctcgttgtggacagacctattagttatgaggaggttgaggttgagacacgtctcattagactttgtcaggaggtgttggagttctatattgaagttgcaggttctggaacagtatctgaatcttctcatggtaaacagctgcattggttaattcctcttggctcggggaagcgaagagaattggctgcacgtgcaccgcttgttgtgaccactcttcaagctatttgtaatttgggagagatatctttcgagaagaacctggctcattttttccctctcctctcaagcttgataagttgcgaacatggatcagctgaggttcaggtagctttcagtgatatgcttagtttatcagttggtcctcttttgctacggtcatgctgattgattacgttaagatcgacaatgaattttgagatataggatatttttcctctaaatctcttttggtcaaattttcctcctttcctttgcctcgggttacttgcaaaagtatagttcgatagtgtttgaatagttggcagtgattttgtgtttagaataccttcccggtccttctatattttagaagcctaagattaccaatccgaattgatctgtattaccagaaggtttaatgttggatcttgtatgcttaattattttatccccattttttaaaagaattttgagtttttcggccc

SEQ ID NO: 10316 - DNA, 529 bp, Glycine max
gattgatgatttgagcgtgcatgggtgagatgataagcacgcaacgcaattaaaaagaattaatatgcaacgaatgcctgtgtttgaagctggcctcatatatcaataatggatttgatctgattctggctcaacgttcatgacgatcaccacccactactccattccgggaagctctgggtatctggacatatacccagagaggaaagtctctgcctttcaaaacccttacattatgggcttcactgctgtcgctagcattggtggattgctctttggctacgacactggtgttatatctggagcccttctctatatcaaagatgattttccggaggtcaggcacagtaattttctccaggaaacaattgtcagcatggcagtggctggtgcaattgttggggcagcagcaggtggttggattaatgacgtttatgggagaaagaaggcaaccctcattgcagatgttatctttactctgggagcaattgtaatggctgctgccccagatccttatattctcataatg

SEQ ID NO: 10317 - DNA, 493 bp, Glycine max
cacaaagccaccgcaacacaacagaagaatcctcaattctcattgtccctgttttttgtttggaggggaaaaaaagatattctttcttctttttgctgaaacccaataaagcgaaatcgcaaagggtgtcttggaaaagggtggtttcattaaaaagcagggatctttgggggggaaagagaagagaataggggcaagctttgttttggggcaatgggagatttggagaagcaagagagggtggaagaggatgcggaaggagagaaggagaggcttttggagggtatggcggttttggattttgacatgctttgttcctctgtggcgttgcaaagttcgcatgggagttgggggaagcttgggggtggggatggtgatgaggagcaacaaggtggggttttgaggatgtgggagggtgaacttctcgattgctttgatgatcgccgcatcgcttttgaatcggcatgttgtcctcgttacggttttgggaaga

SEQ ID NO: 10318 - DNA, 969 bp, Glycine max
cccaagagggagagaggatccaaatccaagtacggttgggttggagagaaaatgcgtccctgctgaaaacaccaaaccctaaaacgcgaaaagggttctaagaatttgcgaaggaaagagctagcggagatggagattcactacagtaacagctatttcgagaggcgccccatcctcaagtccaaggctgccgctgtcaaatgggtcaaagaatgggttccccaagatcttgtgacaacaggagggaagtgcatgatcttaaaatgggtaacagaggataccttgaagaccttgaaagaaaaggtaaaagagccttcagtgccagagccagaacctgagccaactactgaagtactttttctttgcagctatgatggctgtggaaagacattcatagatgctggtgcattgaggaaacattctcacatccatggagagaggcaatatgtttgtcactacgatggatgtggaaagaaatttctggatagctcaaagttgataagacattttctcattcatacaggggagagggattttgtgtgtcctcatgaaggctgtggtaaggccttctccctggatttcaacttaaggtctcacatgaaaacacattcccaagagaactatcatatctgcccatatccagattgtggaaagagatatgctcatgaatacaagctaaagaatcacattgcatctcatcatgaaaagaatgcacccttggatgtggcaaagtacactactccacctccagagaagcaaacataaacttctaaaccatctggaggggcatacggttctgcatcatctgaccgtccctatgcatgtccctatgatgggtgtgaaaaggcatacatccatgaatacaagcttagactccatttgaagagggagcacccggggcttatggctgatgaaaatgcagagcatgctcaggctaatgttggcaatgaaatggatgaagcaagtgac

SEQ ID NO: 10319 - DNA, 1197 bp, Glycine max
caaattccacccctccttctgatcctccagtgcaaactcagtgagtttatcttttttgaggttgatttctatatcagccgggttttttccttaattatcttatctggttttgcagagctgcaaacaacagtacatctagcacagatgccccaactacaaatgtgtctgcagataccgatggtctggctgcttcgaatttagttgctggtagtaatcttgagcagactattcaacaaattatggacatgggtggtggcaattgggaacagagacacagttagtcgtgctcttcgagcagcttataataacccagagcgtgctatagattacttgtattctggaatccctgaagcagcagaagttgctgtgccagttcctcaaacagctgggatttcttctggagcagttcctgtaggacctaattcatctcccttaaatatgtttccacaggagacgatttctagcactggtgctggacttggatcgctagacttccttagaaataacccccagtttcaagcattgcgttcaatggtgcaatccaatccacaaattctacagcctgtgcttcaggaacttggtaagcagaatcctggtcttttaagactgattcaagagcatcatggggagtttctgcagttgataaatgaacctgttgatggttctgaaggagatatatttgagcagcccgagcaagacatgccccatgccatcaatgtgactccagcggagcaggaggcaattggaaggctcgaggctatgggatttgatagagcctcggtgatagaggcatttttggcatgtgaccgtgatgagcaattggcagccaactatttattggagaatgctggagactttgaggattaaatgactctcggaaggaaaataactactgatttcctggcgaagcttggagttaggagctctctctctctaagggatagatccactcctcccccttatttgcttgcagatgccattgggggtaactctgctgctgcggctttagttctttttcatttttatgtgccaaaaaaagagtctctaacttacattacttccattgattcatagttttgtttggcccttttttccttaatttttttaaactttaatgtgacttgttggataatatatggagtagagtttggatttaaaaaagactgaaataaagtaagctcacataaattaaaaact

SEQ ID NO: 10320 - DNA, 534 bp, Glycine max
cttctctcattctttttttctttctcttaaattaactacaaaaccaacaaccctcctccaacttcactcatattttttctttctcttaaacttttttaaggaaaaaaaaaatctaaatccttttaaaaccctattaatactaaacatcatataacattcattgttcatcaagaactatctttgtggtcgtgtttgttcaataatgctacaaaattcctccatgtcttccctcctcctccaccggatcaacggtggcggtggtgcaaccacggccaccaactgtcacgacaccgtctttatgacggtgccggatggcgtagcgcgctaccacacccacgcggtagcgccgaaccagtgctgctcctcggtagcgcaagagatcggggcctcggtcgccaccgtgtggtcagtgttgcgccgcttcgacaacccgcaggcctacaagcaacttttaagaacctgcaatttcatccgcggggacggcgacgtcggcacgctccgggaggttcacgtcatctccggcctgcccgctgc

SEQ ID NO: 10321 - DNA, 361 bp, Glycine max
gattcttccaaacgtggagaatctcttgaccctgaagtgtaccctcgtcccacaggggaggtgtatatatgtgggatgtcgaaggaggaagaggtgccggatgatccagaggagataagaggaaaccctgaatcgattgcgatgcttaagaaagtgacgaagacggtgtcgagctatcttggggaaggagtggcacgtatgaaggcagagcaagcgtgtttcttgccgtgcacggatgatggggtacctgtcataggagaggttccaggggtgaaggggtgttatgtggcaacggggcataactggtggggtattctcaatggtcctgccactggtgctgctgttgctgagcttgttattg

SEQ ID NO: 10322 - DNA, 357 bp, Glycine max
gaccgagacattagaatatcgtatctttgcttttccttctctttctcttttttcctccaacttggagtttttctctcttcaaaggcaatgttccctgcagttatgtccaattccaattcctgctccgaagaggccactgtctcctgtggtacaagaatcactggactcaatcacgttggtcacaacgaccatttctccacaacaacctcaaaagatcaagaaaaagagaaacctccctggaaaccctgacccagatgctgaagtgattgctttgtcaccgaagactcttctagctaccaatagatttgtgtgtgagatctgcaacaagggtttccagagagatcagaaccttcagct

SEQ ID NO: 10323 - DNA, 1865 bp, Glycine max
gagccgctcgagccgcaaaattacagacgattggacattcactcactaataagatttccccatttaacaatattttccaaagtccaaagtcaaacacattcaatgattcaaatagcatcgtgtgttcactctgtttagtagcatccaaaatggcgcattcttctgttatagtcttcctctgcactctccttctcttcttttctccgtcaattcgtgcctccgacgatgacgtggcgctgcacgcgaagaagctcatcagagacctcaacttgttccccgacgctgacgtcaacatcgttcccgttgctaattgcaccctccaaccccgcaggatcgtcgagaagcgcctgaggttcccgaagctgctagcttcggattccgagccttcggttgaggatttgggtcaccacgctggctattaccccattcagcattcacatgccgcaaggatgttctactttttcttcgaatcacgcaataggaaggaggatcctgtcgtaatttggttgactgggggacctgggtgtagcagtgaattggctttgttttatgaaaatggccctttcaaaattgctgacaacttgtctcttgtgtggaatgagtatggttgggacaaggcatcaaaccttttatatgttgatcaaccaactggaactggctttagctacagttctgatttgcgtgacattcgtcataatgaagagggtgtcagcaatgacctgtatgactttattcaggccttctttgtagagcatccccaatacgccaagaatgacttttttattacaggagaatcatatgctggacactatattcctgcctttgcaactcgtatccatcgaggaaacaaagctaaagaaggaattcatataaacctgaagggattggccattggtaatggacttactaaccctgcaattcagtataaagcttaccctgattatgcactggaaatgggcataattaagaaggctacacgtaacctccttaacttagtattggttccagcctgtgaatcggcaataaagctgtgtggcactaatggaaagacttcctgtatggctgcatatgtagtttgtaatgtcatattcagtgacatcatgttacatgctggagatacaaattactatgatatcagaaaaaagtgtgagggaagcctttgctatgatttttcaaacatggataagttcctgaaccaacaatctgttcgggattcactaggcgttgggaaaattcattttgtttcttgtagcactgaagtttatgcggctatgttggtggattggatgaggaatcttgaagttggtattcctgaccttcttgaggacggaatcaatttgcttgtttatgctggggaatatgatctaatctgcaactggcttggtaattcaagatgggttcatgccatggaatggtctggtcagaaagagtttgcaacctcacttgaagttccttttgttgttgatggatcagaagccggattactgaagagctatggacctctaagtttccttaaggtccataatgcgggtcacatggttccaatggaccagcccaaggctgcattagagatgctgaagaagtggattaatggaacccttgctgaacctagggatgataaggaaaaattggttgctgagatgtgatctcttttattgcttatttaattagtctagcaaaagggaacataaatgagaaaagaaattgcagaagtgtgacctgtatgtagtttgtgtgatatgataccacccccacagcacaattctaaaatgacattgtactaagaacttctatcatggaagaaaacctactattctaaaggaattccgtattttctgctttacatgctttattttgtttcacat

SEQ ID NO: 10324 - DNA, 285 bp, Glycine max
ggtatcagtgaattgaatctaacgagcatcgaagctcacgaattgaattgaattgagtttctttgtctccagagatgaagaagggcgtccatccacagaagcaatggatatcctacgttacacaaacgggtaggttgatgcatgtgatgatgacaaagatacaccctgttgggaaagtttaccacttccgagctaagcgccaaatggccgagagtttaggacagattgctaagttcagacgtcgctttgggctagaaaatccagagggcaatgaaaaatgacagc

SEQ ID NO: 10325 - DNA, 321 bp, Glycine max
acgagccctagccccacatctggtctccctctctcaaaatctcacaacgtcgccgcactgcaccgcaccgcaccgcacgtaagcacccacggagatgaagaagggagtccatccacagaagcaatggatatcctacgttacacaaacgggtaggttgatgcatgtgatgatgacaaagatacaccctgttgggaaggtttatcacttccgggctaagcgtcaaatggccgagagtttaggacagattgctaagttcagacgccgctttgggctagaaaatccagagggcaatgaaaaatgacagcatagggaactttggtt

SEQ ID NO: 10326 - DNA, 813 bp, Glycine max
acgcccacgcgtccgcccacgcgtccgcccacgcgtccgcccacgcgtccgcggacgcgtgtcgtttcggtgaataagtgtcgtttaaagatgcagagtctgcaacagaaggcttccgaatggagcggtgtttccatagacgacgctttcggcatcgacgacaccaatctcttccagaaactcggcctccaaaccttcattaacctctccaccaatttctacaacagggtttacgatgacgaggaagaatggtttcgttcaatattcgcgaattctgagaaggagaatgccattcaaaaccaatacgagttcttcgtgcagcgaatgggtggtcctcctctcttttctcagagaagaggacatcctgctctaattgctcgacatcgaccatttcctgtcacgcatcaagctgcagagaggtggttacatcacatgcaacatgcattagacagtactacagatatagatgatgactcaaagaccaaaatgatgaactttttcaggcacactgcatattttttggtggctggagatgagctaaagaatcaaaaccaacatattccatgcatacatgcagcagccaaaaaggatgattcttgattcataaaactgtttcaattttctttaattaattgcctttatccataaaactttgtatcagagtagaagcattgtccaagtgttggggagatgaaaacaaagccacattacacacatgccaactttgaaaccaaatagttagtaagacgaggttgatgattgtaagcatacaatcgataaaatacactaagaaaatacaaatagtgttttgac

SEQ ID NO: 10327 - DNA, 458 bp, Glycine max
agacgacagaaggggatccaatacatacatcagtgccgtcgtttcggtgaataagtgtcgtttaaagatgcagagtctgcaacagaaggcttccgaatggagcggtgtttccatagacgacgctttcggcatcgacgacaccaatctcttccagaaactcggcctccaaaccttcattaacctctccaccaatttctacaacagggtttacgatgacgaggaagaatggtttcgttcaatattcgcgaattctgagaaggagaatgccattcaaaaccaatacgagttcttcgtgcagcgaatgggtggtcctcctctcttttctcagagaagaggtaacatttttttgctgactcgaaatatttccaatttacagtagatagtgtaattgctccgtgaaaattataacatctttagtgcatgcatagatacatattattccttctaatcagcgttac

SEQ ID NO: 10328 - DNA, 741 bp, Glycine max
cttcatctcttccacatttcaatattgtcttttcttcttttatatcatcaaaacttcaaaaagcacagtcaaaagctaacacttatagactcatagttgttccaacacacaaagtgtgtgtgagagagagagagagagagagagtagtgatgggtggttgtgaagtagagtttgaggcagatcagtgcaagataccaaagctacccttgttgaaccctcctacaatgcattctccagagagatcagggatgaaaactccaccacttttcacctcagcttcagttccatttggttgggaagaggagccagggaagccaaggccttgcactgatattgtgagcttctccaaccctactccaaagtgcttggaacttcctccaaggttgctacttgattcccaaagcaacaacaacaaaagcatcaaactttcatcacccaccaacggttttggagggaccatacccctatgtggctaccaccaacacttgcaactctccttcttttagaatgaatgaagacttgtacggttcttttgggtctgaaagagggaaacttgggaccatggttttgaaccaaggagtggggatcaaggaggaggagaaggagaaagggtggtttggttcatggagggaaaaggccttgaaaagagaggctagtggtggtgggggtaagtatgtctttccatcttctgttgaaaaagatcctgaatgtgttggcactcacaagaaggtgaggagtatg

SEQ ID NO: 10329 - DNA, 412 bp, Glycine max
gactgacatatttacgtgtagtctcgctggttttcgttgcttcctttcttcgttgcgacgccaatggcttctacgggcgaaaaagcaatggatgtcgaagatgcagagaatgaagtttcagtttcatctgctattctcaattcgatagcatctcggcagaatgaagttctttctccagaagatcttgcttgggttgaatcctgcctagttaaagattctgatatttcagacactgattggatccctttgaaaaatgctttattagatattatcagctcccaccctcaatctgtcagcactgaaggagaagacgttaaaattcctccctacattattagctctgaatatgctaatactgccacaacttctgatgagaaacttaatctgcaatcttcaacttctgatgagaaac

SEQ ID NO: 10330 - DNA, 455 bp, Glycine max
tgacgctgcaataataggcaaaggtggaattgaaggtgcggcatggcagcaggcacagcataggcagtgacacaacacaacacagccgcccttggaattaaccatgaaaggcgtgttttcggcgcccggtgattacgtccacttcaagtcccaagtccctcttcacaaaattcctattggcactaagcagtggcggtattacgatttcggtccaaaagccgtgcctccgcttatatgtcttcctggaaccgccggaaccgccgatgtatactataaacagatcatgtcattatctatgaagggttaccgtgtcatatctgttgacatacctcgtgtatggaataatactgagtggattcaagcatttgaaaagttcttggatgctattgatgtacaccatatacatctttatggtcgtcacttggtggtttcctagcacaactctttgctcagca

SEQ ID NO: 10331 - DNA, 872 bp, Glycine max
gtttcctttttcattagagccaacctccttaatatatatatatatatatatatatatatatatatatatatatattaattaaggactgtgctcaaactccaaagtcattgcagatgccgtactactaaaaaattctggtgattattaaacgcagaaaaaaattaaaaactaaaaataaaaaccctcaaaacactgtgcatgcctttaaaagcccttgtcatttgaacagaacttcacacccgtggcttcttcattcctttattcattcgtctcactgctgaacacaagagaaacaatggaacttttgcaaaatggccacaaaaatttcgtcagcatcaaaccctccgagttacccctcacgaatggggcagcgttaactctcctcaactcgctctccaaaactcagtacttgggcaacatagatccttccagagtttttgtcaccaaagttaagcgtatcattgtaaaggttggaacagctgttgttactcgaagtgatggaagattagcattgggcacaattggagctctctgtgagcagcttaaagaacttagcagtcaagggtatgaagtcatattggtaacttcaggtgctgttggtcttggcaggcaaaggcttagataccgcagattggccaatagcagcttttctgatcttcaaaagccacagggagagcgtgatggaagagcatgcgcggctgttgggcagagtagtctcagggcgctctatgataccatgttcagccagcttgatgtgacgtcttcccaacttcttgtgaatgatgggtttttcagagattctggctctagaatacaactttcagacacggtgaactcattgttagacttaaaggttatccttattttcaatg

SEQ ID NO: 10332 - DNA, 640 bp, Glycine max
tcttaagcaggcttctgaagatgcaaagaaacttgtgaatgaagaaagagcttttgctcgtgttgaaatagaaaatgccagagcagcagttcagagagtggaggaagcacttcaggagcatgagagaatgtctcaagcttcagggaagcaggatctggaacagtgaatgaaggaagttcaagaggcccggagaatcttgataaaagcgcattcactcctcttactctcattgcctttgcgctcctcaaaaacagagtagcctacacgtatcagagagagtgagagaagagagagaatatttctgttcgtgcagatagatagatagatggctcggagctccacaagaatgaaatgggtctccatcttcacacttctattcctctcccactcgcccctcacaaccttcgcagaagatgggctagtggcgaatggagattttgaggttagcccatcaagtgggttccctaacgaggcgattgtggagggccccagcgaggtcccaaactggaagtcaaacggcaacgttgagctagtggaatcggggcaaaaacagggtgggatgatcctcattgtaccgcagggtagacacgcggtgaggctcggcaacgacgctgagatcagccaggagctaccggttgag

SEQ ID NO: 10333 - DNA, 1758 bp, Glycine max
gaagaagttaaacccagcaaaatggactctgaagcagtagccaatcctgaggatcagtcatctattgtggggcctggttgctaatgtcttaggtcttccaacatttcagttgttatatatatatacaatagatattggcatgaaaataggaagtagaacgtgagagaaacgagtatgtacctggcaagcccttcatcatggcctataaggagcatatggttagtgtattctgcatctatacaggagcagcataacagcaccaaagcagagggcttggggtattgtggcttttctctttctttcatagctctgtaatcaccgagtttcgatgccttgcttgttcagttttgtattggttgcgagcgtgcagaaatgtcttgtttttttttttttggttgcgagcagcataacagcaccgaagtatcttactatgtatgcatttggatttttttttttggttcttttgtaattcacttgttaacactggctgagtggaatttccgccgccattcgaagctacagcgatggccataaccgccaccatttccgttcccttcacatcccccagtcgccgcactctcgcctccgtcaatagcctctctccgcgttctacccgatccactttgcccacaccgcaacgcactttcaaataccctaattcgcgcctcgtcgtgtcttccatgagcaccgaaacagccgtcaaaacttcatccgcctccttcctcaaccgcaaggagtccggcttcctccatttcgccaagtaccacggcctcggaaacgaccccgttttgattgacaacagagactcctccgagcccaagatcagtgctgagaaagcggtgcaactgtgtgatcggaacttcggcgttggagctgacggagttatctttgtcttgcctggcatcagtggcaccgattataccatgaggatttttaactctgatggtagtgagcctgagatgtgtggcaatggagtgcgatgctttgccaaatttgtttctcagcttgagaatttacatgggaggcatagttttaccattcatactggtgctggtctgattattcctgaagtcttggaggatggaaatgtcagagttgatatgggggaaccaattcttaaagcctcagatgtgcctactaaattacatgcaaataaggataatgctgttgttaaatcagaactagttgtagatggagttatctggcatgtgacctgtgtcagcatgggaaatccacactgtgtaactttcagtagagaaggaagccagaatttgcttgttgatgaattgaagctagcagaaattggcccaaaatttgaacatcatgaggtgttccctgcacgaactaacacagagtttgtacaagtgttgtctaattctcacttgaaaatgtgtgtctgggagcggggagcaggagcaaccctagcctgtggaactggagcttgtgctactgttgttgcagcagttcttgagggtcgtgctgggaggaattgcacggttgatctacctggaggacctcttcagattgaatggagggaggaagataatcatgtttatatgacaggctcagccgatgtagtttattacggatctttgcccctttaatatgttgcccccattgttaaacccaatatggaattaggaattgctgaataatatttgtatgagaggtggactttctgcttgttcttactattttgccacatatttatatcttcctacccttttttggttgaatgtgtcacaacaacggtttgtt

SEQ ID NO: 10334 - DNA, 665 bp, Glycine max
atttcatcaggaaataaataaccatttccaagatgcgtgattaaacggctgagattgtgtacagttatccagaaacagaaaccgtagacaacccgaatcccttattaagcaggggtttcgcggcgcgagacggtgacactggcagagtggaatttccgccgccattcgaagctacagcgatggccataaccgccaccatttccgttcccttcacatcccccagtcgccgcactctcgcctccgtcaatagcctctctccgcgttctacccgatccactttgcccacaccgcaacgcactttcaaataccctaattcgcgcctcgtcgtgtcttccatgagcaccgaaacagccgtcaaaacttcatccgcctccttcctcaaccgcaaggagtccggcttcctccatttcgccaagtaccacggcctcggaaacgacttcgttttgattgacaacagagactcctccgagcccaagatcagtgctgagaaagcggtgcaactgtgtgatcggaacttcggcgttggagctgacggagttatctttgtcttgcctggcatcagtggcaccgattataccatgaggatttttaactctgatggtagtgagcctgagatgtgtggccatggagtgcgatgctttgccaaatctgtttctcagcttgag

SEQ ID NO: 10335 - DNA, 330 bp, Glycine max
attgcgtacagttatccagaaacaaaaaccgtagagaatcctgaatcccttatcaagcaggggtttcgcggcccgagaccaagtcaaaccgagacggtgacactggctgagtggaatttccgccgccattcgaagctacagcgatggccatagccgccaccatttccgttcctctcacatcccccacccgccgcactctcgcctccgtcaatagcctctctccccattctcccagatccactttgcccacaccgcaacgcactttcaaataccctaattcggcgcctcgtcgcgtcctctatgagcaccgaaaccgccgtcaaaacctcc

SEQ ID NO: 10336 - DNA, 407 bp, Glycine max
ctagaaatgaagcagcacggtgttgttcgacttcatttcgaagatccactcaagagaggaagagaaaaaaaaaaaaagagagataattaataattaacaaatatttagtgttggtgttagtgagagtggagatgaaggcggagacggtgacgctgttgctggtgaacctggcggggataatggagacggccgacgagtcgctgcttccgggagtgtacaacgaagttggcacggcgctccacaccgaccccaccggtttgggttacctcactctcttccgatccatcgtacagtcctcctgggagcccgtcgccgcgtagctcgccgtgcgccacaaccgcgcccacgtcaacgccgtcggggccttcctctgggccgccgccaccttcctcgtcgcgttctcctcc

SEQ ID NO: 10337 - DNA, 1343 bp, Glycine max
ggcagtgttgccattaacacaaacatcttcaatcttcatctccacctgcattcccaattcctctctctatccatggccgattcaacctcaagcgattcactctctttagacatcgattccttatctccttcacctcaggaacatatcatcagaacacgtcatggttccgtatctgttgctgtatatggagaccaggataagccagctctaatcacatacccagatttggctttaaattatgtctcctgctttcaggggttattattttgtcccgaggcatattaccttctgctccacaatttctgcatttatcatattagtccacctgggcatgagttgggagctgctgcaatcgatcaagatcacccaattctttctgtagatgacttagctgatcaaatagctgaggttctcaacttttttggtcttagtgcagtcatgtgtatgggagtaactgctggggcttacattcttaccttatttgctatgaagtatagacaacgtgttcttggtttgatacttgtttctcctctatgtaaagaaccgtcttggactgaatggttgtacaacaaggtcatgtcaaatttactctacttttatggcatgtgtggggtggtaaaagaaatattgctaaagcggtactttagcaaggaagttcgaggcagtgattatttgtcagagtcagatgtagttcaagcatgccaaaggtcattggatgagaggcagagtttgaatgtgtggcggttccttgaagcaattaatgggagatatgacataagtgaaggattgagaaaattacagtgtcgttcactaatttttgttggggatatgtctcctttccacgctgaggctcttcatatgacgtccaagttggatagacgactcagtgccctagtcgaggttcaagcgtgtggatcaatggtaacagaggagcaacctcatgccatgttaataccgatggagtattttctcatgggatatggcttgtacaggccatccaagctgagtgtcagcccaagaagccccctgagcccctcttgcatttctcccgagctttactcgccagagagtatgggtttgaaattgaaacccataaagacacgaatttctctggaaatctagaagtagatgaataaaaggctgggaaaatggtgccccttctcatctgttcatgaaagaacaagttcatgattgtatggttagtgggaatgaatgaggggatgccatgccagatcgttgtagatagggggagataaggaaataagaaatcaacaaaagaggaaagaaatgggaagcggttagtagaaatcaacatatagtgattctttcatttgtaatcaatc

SEQ ID NO: 10338 - DNA, 454 bp, Glycine max
cccacgcgtccgcggacgcgtgggcgctattgagagtaaaatggcggattcagtgtcggtggacatggaagccatctctcctccacccgaggaacatgttgttagaactcgtcatggttgtgtctcagttgctgtgtatggggaccaggacaagccagcgcttatcacgtatcctgatttggctttaaattatgtctcctgctttcaggggttattattttgtccagaagcctgttcattgctgctccacaatttctgcatatatcatatcagtccacctgggcatgagttgggagctgctgccattgatccagatgatccaattctttctgctgatgacttggctgatcaaatagctgaagttcttaactattttggtcatagtacagtcatgtgtatgggagtaactgctggggcttacattcttaccttatttgctatgaagtatagacat

SEQ ID NO: 10339 - DNA, 517 bp, Glycine max
attttctcatgggatatggcttgtacagaccatctaagctgagtgtcagcccaagaagtcccctgagtccctcttgcatttctcctgagctttactctccagagagtatgggtttgaaattgaaaccaataaagacacggatttccgtggagatatagtagtagtagtaggtgaataaagattgccgctctttttgttttgattgttgaacaagtttatatatagttctttgttttgtcaaaaatctgacaagggagggatgtcataaccttgtagatagagggagacttggaaagaaataaacagagggaaaaaaagggggaagagtttagttgaaagcagctgtagtcattctttgatttgtaatcatagactttcgtttggttggtaaagcttcgaaattgttgtttttggacaaataaaaataataaagttcttgttaccactgtaaagctaacacggtgagcaagcataatgccgcccccatgcaatgctacacattgttttcatgtcgtcc

SEQ ID NO: 10340 - DNA, 336 bp, Glycine max
  unsure (1)..(336): unsure at all n locations
tgcattcccaatttcattccatggccgattcaacctcaagcgattcactctctttagacatcgattccttatctccttcacctcaggaacatatcatcagaacacgtcatggttccgtatctgttgctgtatatggagaccaggataagccagctcttatcacatacccagatttggctttaaattgtaagttagacggatttttcgtcttatgtatatcaaatgatcctcccccctccccctttaattttgcatcagagcattgcacttagtttgtcttagaattacagcatttacagatttatttcaattacggtanaaattcgtcctagtaga

SEQ ID NO: 10341 - DNA, 418 bp, Glycine max
cggacgcgtgggcatctctcctccacctgaggaacatgttgttagagctcgtcatggtcgtgtctccgttgctgtgtatggggaccaggacaagccagcgcttatcacgtatcctgatttggctttaaattatgtctcctgctttcaggggttattattttgtccagaagcctgttcactgctgctccacaatttctgcatatatcatattagtccacctgggcatgaggtctctaactttatgtcttgaaactttgggagctgctgccattgatcctgatgatccaattctttctgctgatgacttggctgatcaaatagctgaagttcttaactattttggtcatagtacagtcatgtgtatgggagtaactggctgggcttacattcttaccttatttgctatgaagtatagaca

SEQ ID NO: 10342 - DNA, 783 bp, Glycine max
  unsure (1)..(783): unsure at all n locations
gacatttgaacctaaacccacgtcaaaactgaaactgaaactcaacgaacccaaaaaaacacatgttttctctttcactcttaaactcttcccacacaaaaccgaaataattacccccataataattattctgggggcaatttggtttcttaatgcccatctgagttataaaaaaaatggagactccagttgaagtgaaacctactcgagttgcatctggattcttagatgacttgtctgagacttgcaagatgggtactccgaacggaagagcaatgtgtaggtctgacgatgaagttccttttgactccgaaataaattttcacccgtcagaatcgagtctggtggatgtacgtggatcacattctggagaatctcggactgcccgtcatgaaacgttggcgggtatgatttacaggagcatacgagttgtagtcttttctaacaaactcaacttgcttatgcctttttggctcttgcattcttgtgcagagttgactggccatcttggttggtctttgttcgagtttngtgggatagtgcctctggcgggagcggtagttatgctactgagcagctagcattntacaccggagatactgtntgggtcttctaaatgctacattttgaaatgcgacagaaatgtcatctcatatatgcatttaaaagtggatgacacgagtgtccagctctcttttctggttccattttgccatatgttactgtgcctgatgccgatcctcatgtggggggatgtatacagaaagggacaggttaaaaagc

SEQ ID NO: 10343 - DNA, 451 bp, Glycine max
ggatcatgtccatggaacgagaggactatggaatgaagtaactaacccaaacctagtccccttacttggctcgctggttggatttgattcgactcgattctcgctgatgaagaagcatttgatgcacagctatggcgttgccgtgattgtggtgttggctttgagtttgagtttgggtgcatcagcggaacaactcagttcacgagaatgcgagaatctcggtttcaccggactcgccttgtgctccgactgcaacactctctccgagtacgtcaaggacaaagagttgattatttgaatcgtctaaatcaatatcgccagagagtttggacttgtaaaattactggaaaatctggcttgacttatgaagaggctctggtgttagagaagcatgctgctgagaaagttcaacagattccggaagaattagtggcacctgctctaaggatta

SEQ ID NO: 10344 - DNA, 519 bp, Glycine max
agggcctggagcccatatagtgaagcctaatatgatagagcgtgaggatcatgcccatggaatgaagtaactaacccagtcccttgacttggctcgctagttcgattcgattcgattctcggagatgaagaagggcttgtgttggctttgagtttgtgtttgggttcatcatcggagcaattaaattcgcgagaatgcgagaatctcggtttcatcggacttgtcttgtgctccgactgcaacactctctctgagtacgtcaaggacaaagtgattatttgaatcgtctaaatcaatatcgccagagggtttggacttgtaaaattactggaaaatctggcttgacttatgaagaggctctggtgtcagagaagcatgctgctgagaaagttcaacagattccggaagaattagtggcacctgctctaaggattatccattacaccgacaggttggcgggtatgatttacaggagcatacaagttgtagtcctttctaacaaactcaacttgcttatgc

SEQ ID NO: 10345 - DNA, 562 bp, Glycine max
ctagttctagatcgccgggcggccgcccgcgatctagaacggaatgaagtaactaacccaagtcccttgacttggctttctggttcgattcgattcgattcgattctcggagatgaagaagggcttgatgcatagctatggcgttgctgtgattgtgttggctttgagtttgtgtttgggttcatcatcggagcaattaagttcacgagaatgcgagaatctcggtttcaccggactcgccttgtgctccgactgcaacactctctccgagtacgtcaaggacaaagagttggtatcggattgtttcaagtgttgcaccgaagactccaacgatgccactaccaaggttacttactctggagctgtgttggaagtctgcatgaggaaacttgttttctatcctgaagttgtaagctttattgaagatgaaaaagatcaatttccatcagttaaagttcaatatgtttttaactctccaccaaagctaattatgctggatgatgcgggtcagcaaaaggagacagtcaggattgataattggaaacgtgagcatatactgcag

SEQ ID NO: 10346 - DNA, 637 bp, Glycine max
tcgcacatttcttgagaacatagaaaaaatatgccactatgtcttttaggaagacgctgtgggggattcagactctccggggcgggaggcagagatgatcaaacgaaccgtagggcgctgcattattacagaataataacacaaaccctagtcccaaaaatcaaaaaggaaaaaaaaaatcagataacaaacttatcacttcgctgcgagattcaattcccatctttaaaattctcaaatccgaattcgattcccaattccgcctcttgttcagaaattgattctgtgtcgttacaggtcattcttaaggtgacaatttctctgcacgacatgtctgatgaacgagctgtgcatcctgattgccggaatgctagtaacccttatcatgaatgcagtgattactgttttagagtaatagctgaagctaaaattaggtcacaacaacaggaatcagaagttggacaagctagtggtggaagcaactctaagcaagctatcccagatgaatcctatctcggtgaggaaatacacgacgacagacctgatcttgaagaaaactctgatagtgatcctgaccagcccgtccttcatgaagcagagcaagaagaggttgattacacaaaaacttttgcgagac

SEQ ID NO: 10347 - DNA, 277 bp, Glycine max
ggagtgacagacgacgctaacagaagccgatcaagtcaacgtaagagagttccactgtctttccacgtccacaattttcatctcccgtggtgtttggttcctcttaaattctaaactaatctagttagcttctttttttctttctctcctcaaattgtgtgtgcaacaaaaattttgtagaatggaggaacttcaagggtctcaaacccaatcatcgctcggtcaagaagatgaaaatgaagtgattactgaaagttcagcatttgttaaaggggaa

SEQ ID NO: 10348 - DNA, 520 bp, Glycine max
agggaccagtcaacagagaaaggatcattattttgatgatttttcggtagttttctgccaatattcttttcattatttatcttccatttccttcgacagcatttgaggggggggggggggggcgcgtaatatatatttcttatctggaggaaaaggggtaccgggctttttttttttgttgctggaggtcattttccttctctgtatatttggtagatttggagtttttgtagatccaagtctctagattaatattatatagtctgttctgaaatctgccgtttttcatttgcatcattcttaggttatagtttccaatttagtcagtagtgaaaactgaaaagaattggatttatttcttatggacctgagtcaggtttttgtacctccatgttgtgttgctgtcagagattaatgatattgttgtctgtgtgatcctattgtgggttttgtgtggaaatcttactctgaaggaaatttgtctttaaggtataccagtaaaactgtatttaccttttga

SEQ ID NO: 10349 - DNA, 501 bp, Glycine max
cgaccgacgcgtccgcccacgcgtccggttggggtaggtggtggtggcgccgaaccgcaatggagaagccatcgtcgtcgtcgtcgtcgcgaagaaaatcgagcacgaaggtgaaagcttcaaccgatgcgaacacgaacctgagcatgctcaacgaggaccttctccagaacattctagcgaggcttcctgctctgcatttcgcttccgcagcttgcgtcagcaaatcatggaactctctctgcaatcgcatcctcactcgccccaaactctcttccgcgatttctctcaacccttcgctccccgatgctgtcaacgaggttgttcacaaggttctttcggagccaattcgaccccatttcgctattgccaatatcggaactggattcagcactgccaagactttgtgccttattagacagtcgttgggatccaatattcctgttattgttaccgttgcgagtggtattatgggaagggatgctggaaccgatgagttta

SEQ ID NO: 10350 - DNA, 736 bp, Glycine max
gatccagcatttgtttgacaatgagacatcagtgcctccttctggtctccctggtgttggtctcctacgctgcccggtcggaatcagcgctgggcggctggagccccatcaaggacgtaaacgacagccacgtggcggagatcgccaactacgcgctgagcgagtacgacaagcgttctggggccaagctcacccttgtcaaggtcgtcaagggcgagactcaggtcgtttccggcaccaactaccgtctcgtcctcaaagccaaggatggatccgccacggccagttacgaagccatcgtctgggagaagccttggctccatttcatgaatctcacttccttcaaaccccttcattaatcttagacccatacttttcttcactttctctcttatcatatttcatgtgttagctattctgtttttctcaataaggttcctgtcatgtgctaatgaatctcaaattgtatgttggattatggattcctctattctctcgctctcgggtttttctggaaattttgtttgtggtttctgcttttcaggttttcatatttatttctgtgggcgattcgactttgtaatttcaatgtctaagtgtgtatttagttacccatatcaatttgaaatagtaattaatgaattttacctgtcaaaaaagatatatattttgtctcttcaaaccacctattccctcgctattctatttctataacacaaaaattctacaaaaaaaa

SEQ ID NO: 10351 - DNA, 416 bp, Glycine max
ggaatgaatgagttgtgtaagaaagagatccatccaatgttgcaagtcaactgagtagtcctgctatgctctgctctgctctcccaaacatctctgacacaacacacaccaaaatgcataattgaaatgacccttttgcccttccttccttccctacttctcctttgactctccgcaacgccaccgcccacaatggacggcaccaccaactccggcgaaccccgctccagttcggtgctccaaaatactggggcatccgaggatccgaatcgaagcgggtcgggtcagaattcgatggcgaggtacaagctgatgtcaccggcgaagcttccgatctcgaggtcgccgtgcatcacgattcctccggggctcagtccgacgtcgtttctggaatccccggttcttcttccaacatg

SEQ ID NO: 10352 - DNA, 530 bp, Glycine max
tatttctctgatgatttctctcttacattccatatgcactactataaactgttgaagtggcatcatgttcttccaatgcttgggatgtttggtgtgcttgtaatccttcgcccacaaggctcaatgccattgccatctttttcaaggaacattgattaacgatgattactttgtttcatacattaggcatcattcagttcagaaaatgtgaatattttcatgccaaattgagtagaatctgctatggtgtctgccttgggtgctgcggtgaaccttgaccacggagttgaaacaatcttttacaagctgaagaattagttcagataaagttgaggttactttagagatagtcgaagattgcaacagagtgaacggccaccttaatgtcgggattttgcccttaaatgttgtagtgtagttaatccgatactgtaatgttttactgagttacatatacttttttccataattgaatcagaatagatatttataattaatacacagttctctccgcgtttgcccttttccaa

SEQ ID NO: 10353 - DNA, 548 bp, Glycine max
  unsure (1)..(548): unsure at all n locations
ctccaaagcctgacagacaaaaaaaatcatctttctctttctcatattttctctgtgtgtgaatctgttgttctttcacaatggaacaacctccttcctcgtctcttcaggtggagacagcacaacaaccgggacctagtcctctccgaaaaatgttcgctgtctcgtcaatcgccgcgggaattcaattcgggtgggccctacagctctctcttctgacaccgtacgtccagaccctcggcgtccctcacgcatgggcgtcgttcatttggctctgcggcccaatctctgggctgcttgtgcagcccattgtagggtacagcagcgaccgatgcagatcccgctttggtcgccgccgtcccttcatcttcgtcggagccatcgccgtcgcaattgctgtgttcctcatcggctatgcagccgatataggacacgcggcgggtgatgacctcacgaaggagacccgtccacgcgcggtggtggtttttgtggtcggcttctggattctggacgtggccaacaacttgctccagggtcnatgccgcgcc

SEQ ID NO: 10354 - DNA, 1406 bp, Glycine max
  unsure (1)..(1406): unsure at all n locations
cttcaaaaaattgactgaaagtatatcataattgatgaagcacagagaatgaaggatagagattcagttttagctcgtgatcttgatagatatcgttgtcaaagacgcctgcttctgacaggaacacctttacagaatgatttgaaggaactgtggtcgcttttaaatttacttcttccagaggtttttgacaataagaaagcctttaatgattggttctcaaagccatttcaaaaggaaggtcccacctcaaaatacagaggatgattggcttgagactgagaaaaaagttatcattatccaccgtcttcatcagattcttgagcctttcatgctcaggcgtcgtgttgaagatgttgagggttcactaccaccaaaggtctctatagttttacgatgtaagatgtcagctgtccagagtgccatttatgactgggtcaaatcaactggtacccttcgtcttgatcctgagggtgagaacagtaagattcaaaagaatcctcattaccaggcaaaagagtacaagactttaaataacagatgtatggagctacgtaaaacttgcaatcatccatccctgaattacccattacttagtgaattatctacaaattcaattgtaaaatcttgcgggaaattgtggatcctggataggatccttataaagcttcaaagaactggtcatcgagttttgctgtttagtaccatgacaaaactcctagacctcttggaagattacctgaattggcgaagacttgtttacagaagaattgatgggacaactagtttggatgaccgtgaatcagctataatggactttaatagccctgattcagactgtttcatcttcttgcttagtattcgagctgctgggagaggccttaaccttcagtctgctgacacagttgtcatttatgatcctgacccaaaccctaaaaatgaggagcaggctgtggccagagctcatcgtattggacagaaaagagaagtcagagttatctacatggaagctgttgttgacaaaatctctagccatcagaaggaggatgagttgagaagtggaggcactgttgatatggaggatgaacttgtgggtaaggatcgctatataggatccattgagagcctcataaggaacaatattcaacaatataagatagatatggccgatgaggttatcaatgctggacgtttcgatcaaaggacaacacatgaagagaggcgtttgaccttagagacattgttacatgatgaagaacggtatcaagataatgtccatgatgttccttctcttcaggaggtaaatcgcatgattgctangagtgaagaagaatttgaattgttcgatcaaatggatgaagaactggattggcctgaggacgtgatgcaacatgatgatgtgcctg

SEQ ID NO: 10355 - DNA, 388 bp, Glycine max
cttttgacgcatgcggtttttggagtgttatcggtcttcccaacatggctcctcgagaagaaaatggcagcggatgagccagcatttgcttctattacaattacaaaagctaatcatctccgttttcttcatcttccccaaaccctcgccgcaaaggccaaatacccaacctctgatacatacttcccaacttcaacacaccacacaatactaacggcacggaaccccttcctccgtctacaccttctttccctttgatcccacactcctatgcccaaaagggttagcgctaacaacagagaaggaaaataaaattcgcgccaacattgagcggaataaatagtggtttttgagggttttccctcgggagtgattggaagtgcaacag

SEQ ID NO: 10356 - DNA, 270 bp, Glycine max
gttttgacgcatgcggttttttgagtgtaatcggtcttccatatatggctccttgagaagaatgagtagcagatgaccccttatttgcttctattacaattacaaaagctcatctccgttttcgtcatcttccccaaaccctcgccgcaaaggccaaatactcccacacccaaattcctcaacttcaacacaccacacaataataacggaatcccttcttccgctttgatcccactcctatgcccaaaacggttagcgctaacaacagag

SEQ ID NO: 10357 - DNA, 470 bp, Glycine max
gggacagctcacagtgacagcaaattgcttatcttgttttgtttttcttttcctccttgctttccccttcaatagcaatggcctctgcaacagaagccattaataaattgttgttcatattcctctttcttcaacaatattccttattaataatggcggatgattcagtttcagttccagttccagctgattggccgcaacagttccactcggttctgttcataaaccgaagcggcgatctccagaaaacggacttgtggtacgactggcccaacggtcgcaacttcaacatcattcaacaccagttgggtgtgctcaaatacgacctcgaatgggacaatggaacctccttttactacaccctcgaacccttcgacaaaacctgcaaaatcgtccatttcgaggttggcattctccgccccaactggctccacggcgccaactacctcggtcaggagcatgtcgacaac

SEQ ID NO: 10358 - DNA, 1231 bp, Glycine max
ctcgagccgccaaaagatgcatgctaatcattttcttgtcactaattacctcaagaacaaactgaagttcaggggttatgtcatatcagattggctaggcattgaccggattacctctcctcctcatgctaactattcatactctgttcaagctggtgtcagtgctggaattgatatgattatggttcccttcaactacactgagttcattgatgaactaacccgtcaagtaaagaacaatattatcccaatcagcaggattgatgatgccgtggcaagaatcttaagagtaaaatttgtcatgggcctatttgaaaatccatatgctgatccaagcctcgcaaaccaactgggtagcaaggaacatagagaaatagcaagggaagctgtacggaaatccctagtgttgctaaagaatggtaaatcttacaagaaaccactgcttcctcttcccaaaaagtccacaaaaatactggtagcaggaagtcatgctaacaatttgggttatcaatgtggaggatggacaattacctggcaggggcttggtggcaatgatctcacttcaggtacaaccatccttgatgctgtgaaacaaaccgttgatcctgccactgaagttgtcttcaatgaaaatcctgataagaactttgtcaagtcatacaaatttgactatgccattgttgttgtgggagaacacacttatgccgaaacatttggtgacagtttgaatctgactatggctgatcctggtccaagtaccatcaccaatgtgtgtggggctattcgatgcctagttgttcttgtcactggccgcccagttgtgattaagccatatctacccaaaatcgatgcacttgtagctgcatggcttcctggcacccgagggtcaaggtgtccccgacgttctctacggcgactatgagttcactggcaagctggcaagaacatggttcaagacagttgaccagctcccaatgaatgttggtgataaacattatgatcctctatttccatttggatatgggttaactacaaacatcactaaatattgaaagtgaaacctcatgtaacatgtccaagagcacactaccttttttttccacttggagccttgaaattgtctattgatgagtgaattgttaatttatgctttcgtatatgtataactagcatcagaacccttcaaaatatcaattcattatccttaactagggcagacttttcattttgt

SEQ ID NO: 10359 - DNA, 366 bp, Glycine max
gaagaaaaggtaagggaaggttccgagaaagaaaaatccaagacttcggttagcggggagcgcccctgtcctcttttctccccccctttcttattagttagaagccgaacctagtctttgtttgtgtgagttgtagcggatcacgtggctcgatggaggttcctcagcgtcttttgtttgaatgactaccgcgtgccattttacctcagtcattttgtcctacttgctttttttcgaatatcctataacgtaccatctaggtctcgtcttgtaagcccggaagggaagatgaaagtgctccttcttcttcttactcccgcccgatcagggagaatgactcttttaaatataagattcgaccaataa

SEQ ID NO: 10360 - DNA, 351 bp, Glycine max
tccgtccacttattggtgatattgttgttgcattggaatacctagcttctcatagtaatccctgaagtccatagacatggtggtgcagctcaccacaacaacctccttttgaaatggacataaattaatatttacaggtatctgattctagcttgagctcccatttctgtatgattctgggtgctgatttccttaccggtttggtcagtgtaagctaccaacttggctatttaaagtgtcatatgttattgctttaattaacttattgccacagcagtagtgaagataaacttcttgatatagcactagtaaacatgtggattgatttaattgcaatggatgagtttatgc

SEQ ID NO: 10361 - DNA, 480 bp, Glycine max
gaagcttgaacatgatagacatgatacctttttcagaagcctaatatttctctttgctgggcccctgcgggggattacgatatatatttagtgcaaaagacatagctattaacagttcgctttcactctctgtagatttggtttttgtgtgatagcttcatagttatttcactctccagatcatgccttcaggtgctaggaagagaaaagctgccaaaaaaaataaggcaaagaaaaacagcatcaacccatcaaccaacaagcccaaaggaaatggtgatttgaagtcgcgggatgagaaaggaagtgatggtggtgagggtaattctcctgcatttcgtgaacatggtgaccatcgtaatccattcaatgatgggagtgaagatctggaagagagagggccatcagctgctcaaccacatgctcctgatgtcgtcgggtccctggaagaactccctaatgatacttcaagagaattat

SEQ ID NO: 10362 - DNA, 608 bp, Glycine max
gacactgcacacatctcaagcaggcagagagaaaggcaaagtggaccgacttgcgtgtttcagttgataggcacaccacaacacaacacacagatctcttctttaacgtttacttttggtgtctgagaagaaagaaaaaagaaaataaaaatagagtagaggctctctaatcagtgagcgatcggagagtttggtttcatccttgctgtgctgctcagatggattacaacaataatgaccatggtgctagggagccatgggactggcaaggaaagaaatatagtctcagaaggacttttgattttgaaatttcagaagagctgtggaatgatgtccctcaaaatgaagaagatctttcatacatgttagatgatgaaacaactccagttaaggcttgtggtgatttggcatataatgtcaataatgctgataatatgcaaaaggaactggaggaatgtagggagacttattcgcaagccaagaggcggcggatgctacagttcaacagccaagagagcgatcaatctctatccaatgaagggatgtctttgtcatatttaaaaaatgggaaggcagacccagttaaggagatttttccagaggtgtcg

SEQ ID NO: 10363 - DNA, 1393 bp, Glycine max
taaagccattccacaaacgaactaaaacattctttcttgcactaaagagcagctgcagacaaacaagcctcttttggggttggattagctggtgagatccatggaagatataggtccgaattcatgcacaaggccagtgacagagaagaaagcaagaccccaagaacaattgaattgtccaaggtgcagttcaaccaacacaaagttctgttattacaacaactacagcctcacacagccaagatacttctgcaagacttgtagaaggtattggacagaaggagggtctctgagaaacgttcccgttggaggtggctctaggaaaaacaagagggtcacctcatcaaaggttcctgacttgaatccaccaattagcctctcatcagtctcagccatttcttcccaaaaccctaaaatgcaaggagtccatgaccttaatctggcttttcctgcagctatggacaagtatcatcatggcacgtctccgtatgttgagatgccaaaacttgaaattggtggtgatcacagtactagtcatcatagtcaccaccatagccatagcccttcttctgcagttgagctactacggtctggcatggattctaggggtttgaatccttatgctcctaattccttgatgtcaggctcagatcattccctttatacacctggctatcccatgcaggaaattaaaccaaaccttagcttttcagttgatgatggatttggaaatagatcatatggggttcaagagaatggtggagggaggcttttgttcccttttggagacatcaagcacctttctgcaggtcttgaagtggaacacattaaagaacgaggaaacaattcaactggatattggactggttggtgaagggtcttcatggtaaggaaagaaaagaaatattgggagaacataaatatcaacctgcattgttttctttctcttcactgtttcgatctatcctatctatccgcttgaagttgttcagatcactaacaataggatacacatggttactctattttgtatacattattattattattacatttctattcgagcaatgtgaggattttacagctcatcttggttatttttaatatgtttagagagagagagatagaagaagaggtgaatatagggtctgcttttgtccaagtcatgcaatgcaatgacctgtattcatgaattcttctgtcaaggagtagatacatatctatcgatcacctttattgatgtatgcatgctttcaaagatttggtacaaaatgacttttgatgattaaggaaagagtcagatattcaagtttgtaaccataattatacatgtattggattggtttgtgtgttctttcctattacaaaaatttctatctatgtcgatctatgc

SEQ ID NO: 10364 - DNA, 478 bp, Glycine max
gggaaaaagaaaaggattaattattgatttgttattattgttgattcttaaagtttactcattcctcttgttttgactgtcttgtaaattacctccttaatctgttcgcgtaatgaagttaattattaccaagtcatatgcatggtcttgaaattttaatttttatctgtgtggattcttatcacgtacatgtgaacattacgtaattatagcctcttttggggttggattagctggtgagatccatggaagatataggtccgaattcatgcacaaggccagtgacagagaagaaagcaagaccccaagaacaattgaattgtccaaggtgcagttcaaccaacacaaagttctgttattacaacaactacagcctcacacagccaagatacttctgcaagacttgtagaaggtattggacagaaggagggtctctgagaaacgttcccgttggaggtggctctaggaaaaacaagag

SEQ ID NO: 10365 - DNA, 429 bp, Glycine max
gttgcactaaagagcagctgcagaccaaccaggtgggatcagctagcgagatcctccacggaagatatcggtccgaactcatgcacgaggcaagtggcagagaagaaagcaagacctcaagagcaattgaattgtccaaggtgcagttcaaccaacacaaaggtctgttattacaacaactatagcctcacacagcccagatacatctgcaagacttgtagaaggtattggacagaaggagggtctctcagaaacgttcccgttggaggtggctctaggaagaacaagagggtcacctcatcaaaggttcctcctgacttgaatccaccaagcctctcatcagtctcagctatttcttcccaaaaccctaaaatgcaaggagtccatgaccttaatctagcttttcctacagctatagacaattatcat

SEQ ID NO: 10366 - DNA, 1300 bp, Glycine max
cttgtcctggatcagacgttgcagctgaaactgcagcagcaatggcctcagcatctttggtctttaaaaagactgatcctacatagtcgagcactcgactcaagcatgcagaacagttgtttacatgggctgacgggaatagaggttcctatagtgagagtctacccgaagtccagacatattataactcaactggatatggtgatgagcttttatgggcagctagttggctctatcatgctacgggtgatgattcttaccttcagtttgtgactggccaagatggagaagactatgctcaatggggaagcccaacctggttcagttgggataacaagcttgctggaactcaggttttgttatctagattaagcttttttaaggcaaaggacatttcgaattcatatagctctgggctccatagttacaggaaaactgctgaggctgtaatgtgtggtcttcttccggattctccaacagccacaaaaagcagaacagatgatggtcttatatgggtgagccaatggaactctttgcaacatcctgttgcatccgcattcttagctgctgtttacagtgactatatgctaacatcgcagacaccaaaactaaaatgtggttcagattcctttaccccatcagatcttcgagactttgccaaatctcaggctgattacgtattgggcaagaatcctatgcatatgagttttctggtgggctatggagataaataccctcaatttgtgcatcataggggtgcttcaattcctgctgatgcaaaaactggctgcaaggatggcttccagtggcttgagtcatctgatcctaatcccaatgtagctactggagcacttgttggtggacccttcttaaatgagactttcattgattccaggaacaattccatgcaaacagaaccaagcacgtacaacagtgctgtcatagtcggtctcttatcaagtttagttaccacgtcttctgccgttcaatcctttacctaagctgtagcttcctatccgtcctgagttgcacttgttgacgtagatttatgttttttgttgctttattcacttcccaatccttacaaatgaagtgttgtcaaaagcacgaaacataatattgtaacgatatgcatgattgtatgagtgtaaaccctgaggtttggataggtttatcgtgaatatgtacgggtgtagtttgctttggcattattagctcagcaggtgtggagctattttgttgtagtatgtagagcaaatctttaaaatttattattattataaccactgcttttattatt

SEQ ID NO: 10367 - DNA, 714 bp, Glycine max
gacaccacactactatgagttcaccgctactccctgttgccacctcctccgacgcccacgcgccaaacccgcgcgtgctgccactttatgacatctttagttttctcagcaccacaatcagcagcggcatcataacctacctcgcctacaccaaaaacgacaccccaatgctcctcttcgccgccttcatctacgtcgtttacttctccgtcgacttctccccaccaccacaacaacccaaggcgcgtgggctccacgccgtgaaactcgcgtcgtgggcgttgctgagttccacgatgttgggattcgcgtgttcgttctcgacctctttaacgccgccggagtcgctgtgcttcttctgggtggtgctcggtggcagcgcgttgctacacggcgcgtggatgggggacgagaactttgtttcgaagaaggaacagtacgcggacatggttcggtcgtttgctccgattatgttaatgtttttcggtctggggagacattacctctcgactcaactcatcctacatgctgccatcatgaatgcgaggaacctcgttcggccaacaacaatttgtgtaaatataaatactaaacaattaagtggttgattttcggttttcgtgttcttgagactttaatttggactcgtgtgttcagtcatttgaatgaataatatggaccttgatcatttaagggtttaaacttttttgagtt

SEQ ID NO: 10368 - DNA, 454 bp, Glycine max
gatgcccaaattgtcatcataacataactccttcaatattcaatattccagaagcatggtaacttcaccaccagccatgcccaccaagggtcgtgttctcatcatcggagcaacaggtttcataggcaaatttgtggccgaggaaagcctcatctcagcacaccccacttatttgcttgttcggccaggacctcttaacccttccaaggatgccattgttaaaaacttccaagacaaaggtgccattgtcattcacggtgtgataaataacaaggactttgtggaaaagattttgaaagagtatgaaatagacattgtcatttctgctattggggccaagagcttgctggatcagcttatacttgttgaggccatgaaatcggttaagactattaagaggtttttgccttcagagtttgggcatgatgtgtacaaagcagattctgtggagcca

SEQ ID NO: 10369 - DNA, 620 bp, Glycine max
  unsure (1)..(620): unsure at all n locations
gacataagcgccttttatcttgcaatcgcgtntgaataaaaacaaaagaaattcctcttctgattctccctcgcgcgattcatttcattttctctttggaataacctgcagggttgcttccatttcaacatgtagagcgcgctctttgttgttttcatttctgacaagttctttttttttgttgcgttgcaaaatccttctcctcgaggcggcggcatggaaagcattgccgcgcagctgaagcgcggcatctcgcggcagttctcgtcggggtcgctgcggaggaacctctcgtggcagttcacgcgccaggcctcgctggatcctcgccggaacaaccagcgcttcagcttcggccgccagtcctcgctcgatccgattcgccgcagcccctgctccggcaacgccgagctcaccgtgccggagaacctggactccaccatgcagctcctcttcatggcctgccgcggcgacgtcaagggagttgaggatttgctcaacgaaggcatcgacgtcaacagcatcgacctcgacggccgcaccgccctccacgtcgccgcctgcgaaggccacgtcgaagtcgccaggctacttctcagccgcaagccaacctcgacgct

SEQ ID NO: 10370 - DNA, 1465 bp, Glycine max
  unsure (1)..(1465): unsure at all n locations
tttttaaataatgtttttgtgtctctctccgtatatcatgaacacaataatagacaacccctgttaaattaaatcaactttaggacaaaacttgacccttaaaaagagatagtaactccaactccaagtcacattggtgacaaagttagaaacaaggagaaagaaagaagatggcaggaaagaaaatcccagatgtgttgctgaattcaggacacaaaatgccagttataggcatgggaacttcagtggagaatcgtccatcaaatgagacccttgcttctatctatgttgaagccattgaggtgggttaccgtcattttgacactgctgcagtgtatggaacagaggaagccataggcctagccgtggccaaagccatagacaaaggccttataaagagtagagatgaagttttcatcacttcaaagccttggaacacagatgcacaccgtgaccttattgtcccagctcttaagaccacattaaagaagctggggacggagtatgtggatctttatctgattcattggccagtgaggctgagacatgatcttgaaaatcctactgtttttaccaaggaagatgtgctgccctttgatatagaagggacatggaaagctatggaagagtgttacaagttgggaatagcaaagtccattggcatatgcaattatggtatcaaaaaactcactaaactcttggaaatagccaccattcctcctgcagtcaatcaggtggaaatgaacccatcttggcagcaagggaaactcagggagttctgcaagcagaaaggaattcatgttagtgcttggtcagctcttggtgcttataagatattttggggctctggagctgtcatggagaatccaatcctccaagacatagcaaaggcaaaagggaagaccatagctcaggttgcacttagatgggtgtaccaacaagggtcaagtgccatggctaaaagcaccaacagcgagaggatgaagcagaacctggacatatttgattttgtgctgagtgaagaggatttagagaggatcagtcaggttccacaacgcaggcaatacacaggggacatatggctatctgaaaatgggtcttgcaagaccttggaagaactttgggatggagacgtttaagtatttcttcaaggataaaactatgttttgggatataaactatgaaaataagcaagatttgaattccatgttattaagatgtcttgtattattattatcattatggttggctataacttcatataaggacctggctgcccttagtatttatttcacaagtgcccttgattgagaccttgagtagaataagagtgtggcatgtttatcattggagtgaggttgtggtgcctcttccattcaaaggaaatataaaaaatccacctttgtcatcnnnnnnntttnaaaagaaaaaaaaaaaaaaaaaaaaaaaaaaaaaancgcccgct

SEQ ID NO: 10371 - DNA, 395 bp, Glycine max
gggcaatggcaatggcaatggcacttggcaggctttcatcttccttcaacaagcctttacgtcctctcttcaatgctggctcagtttactacaagtcctctttgcctgctgaagctgcgtacgacaatgagaaaagctgtgatacggaattgaatgctccacttgaggttgttgatcctgagattgctgatataattgagcttgaaaaagctagacaatggaagggactggaactgataccctccgagaatttcacttctgtctctgtaatgcaagctattggctctatcattactaacactcggaatgaaggatatcccggtgcaagatattatgggggaaatgagtatattgacatggcagaaacactatgtcaaaaacgtgccttggaagca

SEQ ID NO: 10372 - DNA, 325 bp, Glycine max
ggtatgaattgggttgggtactatattactactctagtgcctgcaatttctctctaaaaccctaaacctcattctcctgatttctgttacattgagtttaggaaacaaaaaacaacacagtcaattggcaaatgtctaactctaacccgttacccctcaagagacaaggagaacaatcgtccgatgatggcgcctctgccattaaaccttctcgcctcaaaatcgcaataccctctgaggattccgacaagaagaatgcgaacaggaggctcaaagatgttgaaatctgtgtcccaatagtgtatgggaccattgcattctatct

SEQ ID NO: 10373 - DNA, 647 bp, Glycine max
tttctctttctcttctctcttcactatgtgtgactctccctctcacacaaactagagcgagaaatattatagtagctctgcgtttttggggtatcattattcaaccacccattttctctcttcttcttcttccattgagaaaattctctttcatcgtgtgtgatcggtgagatgtacgtagcttccatgcgcaagtctttcaaggactccttgaaagtccttgaagctgatatccagcacgccaataccctggcttcagattttccaagggagtatgatggtgcatgccttcagatgagaatgtcatacagtccagctgcacacctgtttcttttcttggtgcaatggacagattgtcatcttgctggagcccttggactgttaagaatcctaatttacaaggtctatgtggatgggacaactaccatgtctacccttgaaagaaaagcaagtattagggaattctatgcaatcatatatccctctttagtgcaactgcaagaaagtgtggcagatacagaggataaaaaacagaaggctgtatgcatggagaggtatcgcaaaagagatgatgaggagcacagacagccttcagacatagacattgaaagagaagaagaatgtggaatatgcatggagatgaatag

SEQ ID NO: 10374 - DNA, 553 bp, Glycine max
gtagagggaaagctatcaaagcctaaaaataaggtaaagtgaataagaattagttaatattaatttaattgtttaattaattaattttataacatatagtatttgcggtagctgcgccacgtgtcctaccgaaagattttggtgatggctttgaagaagtgtgcgtgatatgcctatagttcagttgagagagagaaagcatgaaaatttgtagtgggttttggttttggttttggagttgggtttataatcttcaatcttgtttgggagagagagagagagagagagatgtacatagcttccatgggaaggtctttcaaggactccttgaaactgcttgaagctgatattcaccatgccaataccctggcgtcagattttccaagggaatatgatgggaccgagccttcagatgagaatgtcatacagtccagcagcacacctgtttctctttttggtgcaatggacagactgctaatcttgccggagcccttggactgttaagaatcctaatatacaaggtgtatgcggatgggacaactaccatgtctac

SEQ ID NO: 10375 - DNA, 1179 bp, Glycine max
ggagggaaagcgttcttcaatttcagagttcgggcttcatttcagactcagagtaacactacagtacagagtacaaacatcaaacaccttctctgcacgcaaaaaccgcgaaaagaactagaaccaaagatgcagagatttaaagctctgctacctcaacaaactaggtcctcacttcgcactttctgttctcaccgtcgagctttctccgctcaacgaaattactcagagcaccacgacgacgattctcaggaacagattttggtcgaaggaagagcgaaatcgcgagcagccattctcaacaggccgtcttcgctgaactcgctcaatgcttcaatggttgctcggttgaagaggctgtatgattcctgggaagaaaactctgatattggctttgttttgatgaagggtagtggcagagctttctgttctggtgcagatgttgttaggctgtatcactcactcaatgaaggaaatactgacgaagctgaacagtttttcaaaacattatattcatttgtatatcttcaagggacatatcttaaaccacatgttgccattgtggatggaataacaatgggaggtggatctggaatttctctaccaggaatgttccgtgtggtaactgataaaactgtgttttctcacccagaagctcaaataggtttccacccagatgcaggagcttcttatgttttgtctcgtctacctggctacttaggggaatacttggcccttacaggagataagcttaatggtgttgaaatgattgcctgccgccttgctactcattattcactaaatgcaaggctctgtttgcttgaagaacgtcttggtaaactaatcacagacgaaccttctgttgtggagtcatccctcgcacagtatggtgatcttgtttatccagataggagcagtgtccttcacaggattgatactattgatagatgtttcagtcacgaaactgtggaggaaattattgaagctttggggaaagaggctgctgagtcttgtgacgaatggtgctcgactactctaaggagaataagagaagcctccccgttgagtttgaaagttactttacaatctatacgtgaaggtagatttgaaacacttgataaatgtcttgtacgtgagtatcgcatgtccctacgtggtatttcaaagcatgtctcctct

SEQ ID NO: 10376 - DNA, 745 bp, Glycine max
cccacgcgtccgcccacgcgtccgggttgctggttttgacattgactttcttgtgttgcaattttcttcactggctttccttttgcttttgtctttcattttttctgccattggtagttaatttaatcatgtgctctcaaaggtagatgaagcatttgtagaaggcagagtgggtattgtaattttaatgtagggtagcttgcataagtatgatggtatcttgatgtgaattacttgatcttccttacctcagttatttatgtgaaaccttagctcggtcaaattcaaatgtgatcataccaatgcatagattctggcctgatgccttcattgtgtaccatttcagagtgcccgagaatttagcaagagccttaagcaagccgagaaaggaaaagatgcaacaacctaaaggggtgcttaaaggttagtgtgtggagcattcaagcgtatgcaatgtacttgaaaatgctcgagtgctaccagaagattgtgaagagagagtaatggacgaactcaactcagacttagatttgcatgtttcaatcacagggataatgatgtattttaataggctgtgtggttctttccaattttgcagtcttcacgaagtgaggagtagtaaatcgaaacacgaccttttgaacagacaaattgaactgagcatgctcttctgtttagctttattccacaacatctaaattataaatctctcacgtttctataaagtacatttctttcttggacc

SEQ ID NO: 10377 - DNA, 1100 bp, Glycine max
gtgaccaatatgacccgatttttgacagcattgaaccatcatcctcttctctgaaaaaaagtgattttgatcagaagaaggaagttacaggtgaatccaacatcagcctaaggcccaaaagttcttacatgtctttggactcggatgagaagaacaagcaggaggaggttggggctgttgcctctaccacttctcaaaatattgatgaatatggtgaaacagcagatgcagaagttggtgctgttgaaaatgagagcctaagtgatgatgtggatgttgcaaaactgacttcaggggaggttgagattaatcaggtcaagtctcctgggaggggaaaaaagagtaaggattccagatcgatgaaattgttcaaagtttccattgcgaattttgtaaaggaggttttgaaaccatcatggcggcaaggtaatatgagtaaggtggctttcaaaaccattgtgaaaaagactgtggataaagtgtcaggagccatgaaaggccaccgtgtacccaagtcccaagtgaagataagtcaatatattgattcatcacagcgaaagttgactaaacttgtgatgggttatgttgacaagtatgtcaaggtatgaaagtgaagtatgcaaatgtttctccaacattaaatgtcaatataggtgcatcatttcaacaggaaacgtcaatgcttacttctctggagttgtctcctctcagttgaaggcgtactacgtaggtgcgagaatgattgatcaacattcaagttcctgaagaagttttggtcgtccccgatattgacctcatcaaatatcttccgcgaactgaaccatggaaatgaagaagcttttcttgcagagatgctgttaatcaaatttgtttttaatcgtggaggattggtgatgcattattatattctgattaattataatgtaaattgcccttggtcttttattttatcaaatatttgatttgaagcaagtcctctctccggcagaaataccggctaccatttgagcttgttacttaagtgacaatatccctggtttttgtatagtgcacgagtttagcttgtgtgaaaatttctcaaaaggaaatatttcttgcgg

SEQ ID NO: 10378 - DNA, 390 bp, Glycine max
ggacgagaaatgagtagaaaacaaatgaaatggaaacggtgttgtaagaaagagatttggagaggtttgactttttgagagttggaagatctcatcctctctatattcctcttctcgtctcagagagaaagagaaccagaaaagaccaaagcaacaacatcaccagacaatacaaacgcagatagatcactttgacgccaccctgaatcttgatacctttgaccgcaacaaaattcttaattgatcactgggtatgtttttgatcgtgcaccttgtgggccagtaatcgttcaaaacgtgaacaagtcttacttttgattccgaattcctcttatcacttgatgcttaagtttgctgctttcaccaattgttctaggattaccaagttga

SEQ ID NO: 10379 - DNA, 348 bp, Glycine max
ggtcccataccagagctatctattcatctggactcaacagtttggtggatggcttcctcttcttcttattctttttctctgcttcgttccattcccatttcctttccgcacacccaatgcgctctcaaatcccagcgcctctcgcttcgtgcttcggccactccgagccagaaggctcggttcgtcgctcgccgcaaggagtccctttcggttcggcaactgcaacgccccctaattgagtacatgcggttaccggcgagtcagtattcggtgttggacgcggagaggattgagcgggtaaacgaaaacacgtttaggtgttatgtttataggttcaagttcttcaac

SEQ ID NO: 10380 - DNA, 867 bp, Glycine max
agacgacagaaggggaaagaaaaagattgttagtttttgtgttgtgttgtgtacagagagagagagagagagagagagagagagagagagaggctgctatggggaacagagctatgttaaccttgctactactcctcttcttctcgaccaatttggttccttccgcccttgctatctggctgacgttacccaccactggcactaagtgcgtctccgatgaaatccaacacaacgtcgtcgttttggccgactacgtcgttatccccagtgatcacgcccacaacctcaccatcgccgtcaaggtgacatcaccgtatggaaacaatcttcatcacaaggagaacacaacacatggtagtattgcatttacaactcaagaggctgggaactaccttgcatgcttctgggtggatagccctagtcaaggagttggtgaggttaatgtaaaccttgattggaaaattggaattgcagctaaggattgggattcagttgctagaaaagagaagattgagggagttgagcttgagctgagaaagctagagggagcagtagaggccatccatgagaatttgctctatcttaagggcagggaagctgagatgaggattgtgagtgacaaaacaaatggcagagtggcatcgtttagcattatgtccttggctatgtgcattgcagtctctggtttgcaattgtgggctttgaagcggtacttccagaagaggaaccttatttggattaggttatttaatttggttagtgatactgcaaccttttattaccttaaaaggaatttccaggaaccatcattaccaggggtggccagaaatggtggttaccccaaaacacaaacaagtacaaccaaaa

SEQ ID NO: 10381 - DNA, 442 bp, Glycine max
actcgagccgaatcggctcgaggaagacgacagaagggggagagaaactagattgtttgttgctcgtgttgtgtgcatagaggggtgagagagagtgtggaggctgctatggggaacagagctatgttaacgctgctactcttcttcttctcgaccaaattgtttccttccgctctggctatctggctgtcgttacccaccactggcaccaagtgcgtctctgaagaaatccaacacaacgttgtccttttggccgattacgtcgttatccccagtgatcacacccacaaccccaccatcgccgtcaaggtgacatcaccatatggaaacaatcttcatcacaaggagaacacaacacatggtaatattgcatttacgactcaagaggctgggaactaccttgcatgcttctgggtgggtagccatagtcaaggagttggtg

SEQ ID NO: 10382 - DNA, 465 bp, Glycine max
acgatgaacaaggcctgtcgtacgcgcattacgtgctccaacaccaccaggatgcgttgatgagagcgtggccaatggtgcacgaggcagtagtggaccctacaaaggagcccttcgagagggcaaatggggagccagcatatggatactatctgaagcacccagagatgaatgacctaatggtgagggccatgtcaggggtgtcagtgcccttcattagggccatgttggagggctatgatggctttcaaggcgtggagaagcttgtggatgtgggtggtagtggcggtgattgccttcgtatgatcttggaaaaacaccccaccatcaaagaagggatcaactttgacctacctgaagttgtggccaaagccccacaaatcccatttgttacccatgtgggtggtgacatgttcaagtttattccccaaggagatgctatcttcatgaagtgggtgctaacaa

SEQ ID NO: 10383 - DNA, 585 bp, Glycine max
agggccagagtggcattttgtgttttgtcactttttctgtgtcttcttttcttttctattctcttttgtgtgggtagtgattttcagtttcaatcttggaaagccaacctttgcaattttcaacccgaaatcgtcgatttcttctaaaatatatactgtgcattggtctccttttcgaattgtggttgagggattaaagtaccgttattggtagagatggcttgtagggggtgctgggagtgccttttgaagctgtttaacttcatactgaccctcactggtctggccattgtgggctacggaatctatctttttgttgaattctctaaagcttcggatgatgacaacacgcctgcaatttctcccgtcagtgatgattctgctctgattcaacttggccggcctgtgcttatggccgtgtctctatccaacgacttttttgataacttgccccgtgcttggttatttacttatttattggtattggagtggttctctttcttatttcttgttttggttgtattggagctgcaacacgaaatggatgctgcctgagctgttattcaatttggtggcattattgat

SEQ ID NO: 10384 - DNA, 425 bp, Glycine max
gcgcccacgcgtccgcccacgcgtttttgtttgtaccgcgaaagagaaggcaagcaaaaaacgtcatcctcggcggaacaggcgcggaggctaatcgttaaccaaaccaacacagatcccataacgcttcgtctagggtttcgctgaatccccaattttcctaaccccgaccggacatgctccttccccgatggccgtcgtaaccagcaacggcaagcgccgccaacattggccatccgcgaattaccactttccatctcccaattccaaaagacccagagtttcaacaatgtcccaaaaccacgcgcaatccttgttatcctcgactagtatcatttcaagaatctctaagtaccccgaaaccaagccaccactgcatagggaggttcacgccccgtgtagaccacgtaagtttgattctcctg

SEQ ID NO: 10385 - DNA, 853 bp, Glycine max
tcgcccacgcgccgcccacgcgtccgctggcaatgaaaagagagagaaaaagattttgaattttaattgaacacttaagattgcaggcagtgacgtagtttccctgtaacgttgtgaactccgtttctcatgcttttttgtccctcatcggatctcgccttctttctcttcccttcaagcaagggtcagtccattcctgggtttactttttttattttgtgatatcttttgttgaggaggtggattgagtttaaggatttagttaagggagacagtttagaggacaaaattttgtagggtaggtaacaagaagggagaaaagttggattagttttgtttctatcatttgtgggtttgagatggatcttaagagtgccaaggatgaggatactgaagttgatcttgaaagtgggttggttttgacagatgatgagtcaaaggatgtctctactgaaggtaacagaaaacaaggaaagatattacttaataagatttcttgtgggtttgttggagattgtataaaaggtgaagataggtatagtggattctgcaaggagtcaaaattaactgtagtttcaatggacatggtgaaagtgacaaacaagttgtactcagtagaatatgcagagaataataccccagaaaaggagaaacgtaaaaagtccagtaataagaagtctccgaagcctccaagacctccgcgagctccatcgttggatgctgctgaccaaaagctaatcagggagatcactgaacttgccatgttaaagcgtgcgaggatagagcgaatgaaagccttgaagaagatgaaagttgctaaggcatcatcatcttccagtagcagcatgcttgc

SEQ ID NO: 10386 - DNA, 513 bp, Glycine max
ccacttttccgcaatgccgtcctcaacctagtttaaaaatttaaactttatgtctttctccaattttcataagtgcccagttatatctacttaacttcagttcatttttctttggcttactaattagaagtaagaatttttcttttgggaaactgattgaactatgtctcttgttatgatgcagggtcagtccattcctgggttcactttttttattttgtgatatcttttgttgaggaggtggattgagtttaaggatttagttaagggaaacactgtagaggaaataattttgcagggtaggtaacaagaagggataaaagttggattagttttgtttttatcaattgtgggtttgagatggatcataagagtgcaaaggatgaggatgctgaagttgatcttgaaagtgggttggtcttgactgattatgagtcataggatgtctctactcaagggtacacaaatcaaggaaagataatactgactaagatttcttgtgggtttgctgga

SEQ ID NO: 10387 - DNA, 700 bp, Glycine max
gagaatcgaattcattactatacaactttttgtgttgggaacgaaaaatacatttatttaattctgaaacgctctttatcttctcttcctcctcataggccttactatgacctcactcacgcattgaagaaggcaacgctccttgcagctcaaatctgcaaattaggctttttttccccccaacagtgggttttgcttttctctggaattttaagttttggggttttctttcaatcagggttcagtttattcaagttttacaatttcgcggctctgaaactattagatggggaattgtttgcgtaaggctcaagcggatgatgattctgatcataatgtggagtttgcttctgggaatgtgcaagttattactaccaaagaatcttgggaccaaaagttggatcaagcgaggaaggagagtaaaattgtaattgcaaatttcagtgcaacatggtgtggtccttgtaaggtgattgcaccacattattgcgagttgtccgtgaaatacccgtctatcatgttcttattagtcgatgtggatgaactagctgacttcagcacttcgtgggacatcaaagccacaccaactttcttctttcttaaagatggaaaagaagttgacaaacttgtaggagccaacaagccagagctggagaagaagattgttgtggttaatgatgtagtgcctcataagcaatag

SEQ ID NO: 10388 - DNA, 404 bp, Glycine max
gggctcctgggtacatttgtgctcgctagctttcaagattgctttgaaccctaaactgcttgctccttgctccttcgtttgaaccctccctttctgcttgctccttcgtttgaaccctccctctctttgacattgaatccctaccccttcttccattgaagctccttcacttgttcttccattgaagctcctaccccttcttccattgaagctccttcacctcttcgacttcatcgctccaacttctggttcagcttattcaagttttacaatttcgtggctctgaaactattagatggggaattgtttgcgcaagatcaatcaggctttacaagattgtgaattcatcatcagctcagttctaacgtgactgggaagagcaaactggtggactttgtgaacat

SEQ ID NO: 10389 - DNA, 379 bp, Glycine max
cgctcgagccgaatcggctcgagcaactttttgtgttgggaacaaaaaagacatttatttaatacttttgaaacgctctttatcttctcctcctcatccttggtctagttatatatacctcactcacggattgaagaaggcaacgctcatttcagctcaaatctgcaaactaggctttttcccaacgggttcagtttattcaagttttacaatttcgtggctctgaaactattagatggggaattgtttgcgcaaggctcatgcggatgatgattctgatcatattgtggagctcgcttctgggaatgtgcaacttattactaccaaagaatcttgggaccaaaagttggatcaagcgaggaaggagagtaaaattgta

SEQ ID NO: 10390 - DNA, 383 bp, Glycine max
catacagaagtgtcatattgacagcatattcacggagagtaaattcctgcaagctgaatctctattgcagctagcaagagcactcatttgggctgcggggagaccacaaaaagggaacagcacacccgaggatgaagatacagcagttttctgcctggagttgctgattgcaatcactttgaataacagggatagaattgggattctttggcagggtgtgtatgaacacatatccaacattgttcagtcaactgtaatgccctgtgccctggtagagaaggctgtttttggactcctgcggatttgccagcggttgcttccctacaaggagaacattgctgatgaacttctgaggtcattgcaacttgtcttgaagcttgatg

SEQ ID NO: 10391 - DNA, 571 bp, Glycine max
gcgtccgcccgggcgtccgcggacgcgtgggttgctttggacctttttcaggttcataggaacactgatgctgtgggagttagcactgagaacattactcagaattggtactttgggaacaagaaatccatgctcattcccaattgcctatttcgtgtgggctgctctgcgctgcttctctctaacaagccggcagatcgaaggagggccaagtaccggcttgtccacgtcgtgaggactcatcgcggggccgacgacaaggcgttccggtgtgtttaccaggagcaggatgatgctgggaaaactggtgtttccttgtctaaggatttgatggcaattgctggtggagcattgaagactaacatcaccacacttggtcctctggtgctgccaattagtgagcagcttctgtttttcgtgactctgctgatgaacaagttatttaaggctggtgtgaagccttacataccggatttcaagcttgcatttgatcatttttgtatccatgctggtggcagggctgtgattgatgagttggtgaacaacctgcagctgcttcctgatcatgtgg

SEQ ID NO: 10392 - DNA, 303 bp, Glycine max
agggaagagcaacccttaaccacaacaaacaacatcgtttcatatatagtgagtgagagaatctaccatcaaccatgtctgatattgctatgttggtagcagaagaatatgagaggaggacaatgaattttaagaaggctggcgctgtacaagagaggaacttgaacgtggtttcttgtgcttctttgttggttctgaaggagaagattgaggtgcagaagaaggagcttgtcaagtgggttttggaacccaaaacccaatttgcaattgctgcttctaacagtttcttttctgcttgaacaa

SEQ ID NO: 10393 - DNA, 411 bp, Glycine max
gtaacttggtaatatattttgttgcactctatggcctcagagacagaagctgctcttgctgccactccctctgatggtcccaccgtatttgacaagatcatcaataaggaaattccttctactgtggtctatgaggatgataaggtccttgcctttagggacatagatccacaagctcctacccatattctaatcattcctaaagttagggatgggttaactggtctgtccaaggctgaggagaggcactgtgagattctaggtcgacttttgtgcactgctaagctggttgcaaagcaagaaggtcttgatgatggcttcaggattgtaattaatgatggacgagacgggggccaatcagtttaccacattcatgtgcacctcattgggggacgacagatgggctggccc

SEQ ID NO: 10394 - DNA, 396 bp, Glycine max
gattgcatttcactgaaacgagaaaagcgtgtcgaatggatttcacggagaaggatctattcggcgaagattccgacaacgacaacgggtcccactcctccggttcctcttcttcttcctccgccgcttcctcttcctcatcgtcctccgcctcctcttccgcctcttcctccaaagccagcgacgccgccgccgactcctcctccgccagcggcagcgccagcagcggcgccgaagacgacgacgagaatggcgacgtcgtagatagcaccaaagtccgcgcccatcaccatcacgactacgaacaccaagatctgtttggctccgattattaaaaatacggtaaaaccctcgctaaaagtccttaccccattccggtattgcctgccatccgca

SEQ ID NO: 10395 - DNA, 675 bp, Glycine max
gcgagatgacgacagaaggggggaaaaggatcgataatccgcgtctttttctgtgtatccaagaagcatcttcaagctctgaatctgcaatggcttctctactcaacatggtttcggttccaccaagaatatcaccaacctcacacaccagaatcgcttcgcttcaagctcgacccgttttgccacccttttctgtctcattttccaggaggagactatcaattagagcaacagaaactgataccaatgaagttcaatctcaggcaccgggtgcagcgccatctaaagatggttcaagcttcaatcagcttcttggtatcaaaggagctgcccaagaaacaaataaatggaagattcgtcttcaacttacaaagccagtcacttggcctccattagtttggggtgtagtttgtggagctgctgcttctggaaattttcattggaattttgaagatgttgctaaatcaattgtgtgcatgatgatgtctggcccattcttgacaggatatacccagactatgaatgattggtacgaccgagaaattgatgcaataaatgaaccttatagaccaattccttctggggcaatatctgagaatgaggtaatcactcaaatatgggtgttgctgcttggtggtctttctctggctggtatattggacatatgggcagggc

SEQ ID NO: 10396 - DNA, 422 bp, Glycine max
gtcctctcattcattcattcattccatcctctgttgtacggccagaacagaacaagatgagaggccatttgttagaacttgaaacaaaaacatcgagtctttaagataagagcgagaaatagagacaagttcaggtaatggcgagtgggtggatgaagtcattgcaatgcaagtccagagcataccaagacgtataccaccctaactctaaatacctcattcccagttccagctgcagaaagaccatcaaagacgtcgtcgtcgacacaaccaagcccaggcccaagcccaatcccaagcccgaaaagcctctccagaaacaccccagctccagatacccttcatccgccgccaagcccgacttcgaaaccactatcaaccgatcgaggagcgtgaccgccacgcgccacgccgaccctcgc

SEQ ID NO: 10397 - DNA, 189 bp, Glycine max
cagtctgagcacccatttgttagaagttgaataagcatcagcgtcagaagtattcttacttgttcctctcgttcaggtaatggcgagtgggtgggttacgtcattgcaatgcaagtccagagcataccaagacgtcataccatcccagttccagctgcagaaacaccgttcagaacatcagagacgtag

SEQ ID NO: 10398 - DNA, 712 bp, Glycine max
gttctaacgtataagttatgattattcataaactttctgctttcttttgcagacatatgaaagatcttgcattcaaaaatggcttgatgctggtcacaaaacctgccccgaagacacagcagacacttgtgcatacagcccttacccctaactatgttttgaagagtttgattgctttgtggtgtgaaagcaatggcattgagctaccaaagaagcaagggagctgtagaacaaagaaatgtggtggcagcagtctttcagattgtgatcgaactgctattagtgctttattggataaactaatgagtaacgatatagaacagcaaagggcagctgctggtgagctcaggctgttggctaagaggaatgcagacaaccgagtatgcattgctgaggcaggagcaataccacctcttgtagatttgttgtcttcttcagaccctcgaactcaggagcacgctgttacagcacttctcaatctttccatcaacgagagtaacaaaggaactatagtaaatgctggagccataccggatattgtagatgtactgaaaaatggaagcatggaggctagagaaaatgcagctgcaactctcttcagtttatcggttctagacgagaataaggtgcaaatagggcagctggagctatccctgctctaataatgttactttgtgaaggtactcccagaggatgctgggggtggaatggt

SEQ ID NO: 10399 - DNA, 1407 bp, Glycine max
aactcggacgcgtgggcggacgcgtgggctgcctttatattttcttctgtattaagctgaccaaaggcaaatccatttgtatctgtagctggaattttcgtcattcttactttaccttccttcctcaccttctaattctgcaacaagttccaaactttcaaatctcaccgccccaaaaattttcttttttggttacccatttgactttagcctctacagcagagtcccagatctctgcattccaattcccatggctggtcgctatgacagtaaccccttcgatgaggaagaagttaaccccttctataatcctggaagtgttcccgctgccactaattcaaggctttcacctctgaagccagaacctgttgattataattatggctttggtgcgacagttgatatacctcttgattcatcaacggatttgaaaaagaaggagaaggaacttcaagccaaggaaactgaattgagaaaaagggaacaggaagtgagacggaaagaagaagctgcttcacgagctggaattgttcttgaggagaagaattggccgccttttttcccaataatccatcatgacattgctaatgaaattccaattcatcttcaaaaattgcaatatgttgcatttactacattgttaggattagtgttgtgccttttttggaatgttatagctgttactgcagcttggattaagggtgaaggtgtaaaaatatggtttcttgccattatctacttcatagcaggggttcctggagcatatgttctgtggtatcgcccattatatcgtgcttttaggaatgaaagtgctttgaaatttggatggtttttcatgttttatctgcttcacataggattctgcatcttagctgcagttgctcctcctatagttttcaaaggcaaatccctgacgggcattctggctgccatagatgtgctgggcgaccatgctttgattgggatcttctacttcattggatttggattgttctgcgttgaaactttgatcagcatttgggttattcagcaagtatacatgtacttccgcggcagtggtaaggccgctgagatgaaacgggaggccgcaaggggagcactgagggctgcaatatgattcatcagtcttgtggagaaggaagtgtggataacttgtgtatggatcaatgttgtatattagaagccacacacagaaattgtgaacaaaaatatttcactgagcatgatttttgtttacagctgttatttgtttatttatttttctgtttagcatgctacctattaatgtggtttgttagtgtatatcgaaagctgagagcttggacatactagtggctggtagaaacatgctataatttatggaaattaatcctctatatagtttaaaaggttcacttgtcttgttcc

SEQ ID NO: 10400 - DNA, 571 bp, Glycine max
attctcctgtctaatttgctggcattattgccttcttgttgtttttgctgccaattcccttcccttgcatgacaagtttcaatatttccaatttcaagattccaaaaccccttattattatttgtttatttttatctcttttgtactttgttctctgtagagtaccagatctttgcattccctggttataattccgaggctggtttcttgttaggaccgttaacttcttctcatggctcatcgctacgatagtaaccccttcgacgaagaagaagtcaatcccttctctgaaccagctgtaaggggaaaaacatcaagccaatcaagttatagcgggggtgcattttacactacaaatcctggaagtgttgcccctgccacaaattcaaggctatctcctcttaatcctgaacccgctgattataactatggctttggtgcgacagttgatatacgtcttgatccatcaatggatttgaaaaagaaggagaaggaactccaagccaaggaggctgaattgagaaaaagggaacaggaagtcagacggaaagaagaagctgctgcacgagct

SEQ ID NO: 10401 - DNA, 518 bp, Glycine max
gcaacgttgaaaacagagtctctgtttctctgaagctgaccaaagaccattctcctgtctaatttgctggcattattgccgtcttgttgtttttgcacccaaattcccttcccttgcataacaagtttcaatatttccaattttaagattccaaacacacccccccttcctcttttttttatcccttttctgctttgttctctgtagagtaacagatctttgcattctctggttataattccgagccgggtttcttgttagcactgttaacttcctctaatggctcatcgctacgatagtaatcccttcgacgaagaagaagtcaaccccttctccgaaccagctgtaaggggaaaaacatcaagccaatcaagttatagcgggggtgcattttacactacaaatcctggaagtgttgcccctgccacaaattcaaggctatctcctcttaatcctgaacccgctgattataactatggctttggtgcgacagttgatatacctcttgatccatcaac

SEQ ID NO: 10402 - DNA, 605 bp, Glycine max
cctggagcatatgtcttgtggtatcgcccattatatcgtgcttttaggactgacagtgctttgaattttggatggtttttcttgttttacctgcttcacctaggattctgtatcttagctgcagttgctcctcccatagttttcaaaggaaaatccttgacaggcattctgtcagccatagatgtggtgggtgaccatgcagtgattggaattttctactttgttggatttggattgttctgcattgaaacattgatcagtatctgggttattcagcaagtatatatgtacttccgtggcagtggtaaggctgctgagatgaagcaggaggctgcaagaggagcaatgagggatgcaatatgataaattactttgtgaatccctgtgtttgaattgctgttgtaaattactagacacatgtattgcggataaagttattttactgaggtcttttttgtttttagttgtttctctattgtctaaaacatgctacctgttcaccccgtctgttaaatgtatttgttgatgtatattttaagtagaaagcatacacatagtacagtggttggaagaaaaaaaaaaaaaaagggcgccgctcgcgatct

SEQ ID NO: 10403 - DNA, 939 bp, Glycine max
tcacagttctttgttttcatcacaattctcaattctgattttgaaataccaaccctttttttcttctgaagatggttgcgaaaagcaggggaattccattgacgacgcttttactcattctgttcctttctgccattgtcccaacctctctctcggatcaggttctcaactccaagaatccaagaccttcaagctctgcttcttcccttggttcctctgttgcttttcagattaaaggaaatgtatatccacttgggtattacacggtgagccttgccattggcaatccccccaaggtttatgatcttgacattgacacaggtagtgatctcacttgggttcagtgtgatgcaccatgccaaggttgcaccctacctcgcaatcgactttataaaccccatggcgaccttgtgaaatgtggggatcccttgtgtgctgcaatccagtcagcaccaaaccatcactgtgctggaccaaatgagcaatgcgactatgaggttgagtatgcagaccaaggatcatctctcggtgtgctactccgagataatattccccttaaactcaccaacggaactttaacacattccatgctcgccttcgggtgtggatatgatcaaactcatgttggtcataatccaccaccttccgcagcaggggttcttggccttggaaatggcagagcaagcattttgtctcagcttatttctaaaggcctaattcgtaatgtcgttggccactgcttaagtgggacaggagggggctttttattctttggagatcaactcattccacagtctggagttgtttggacacccatattgcagagttcctcttccttgcgaaaacactaccaaacaggtccagcagacatgttttttaaatgggaaaggctacttcggtgaagggtcttgaacttacctttgatagtgggagctccta

SEQ ID NO: 10404 - DNA, 536 bp, Glycine max
gcacgcctacgtaagcccggaattcggctcgagtggatgtgaaaaacagtggcaggggaattccattcatgaccttttatctctttcttcttctcctttctgccatctctgttttgtcccatgcttcctctattgcttttcagattaaaggaaatgtgtatccacttgggtattacacggtgaacctcgccattggcaatccccctaaggcttatgaacttgacattgacacaggtagtgatctcacttgggttcagtgtgatgcgccatgcaaaggttgcaccctacctcgcgatcgacaatataaaccacatggcaaccttgtgaaatgtgtggatcccttgtgtgctgcaatccaatcagcaccaaacccctccctgtgttaacccaaatgagcaatgtgactatgaggttgagtatgcagaccaaggatcttctctcggtgtcttagtttgagatattattccacttaaactcaccaacggaactttaacacattccatgctcgcctttcggtgtggatatgatcaaactca

SEQ ID NO: 10405 - DNA, 594 bp, Glycine max
gaattaaccggccgacgcacgcgtccggacgacagggaggcagagcactgcagcctcatcatttcaaggccaacacaaagcatagaaagcaaaaaaaaaaaagagagggttagagagataataaagtgaaggaagaagaaagggtttgtttgtgtgaaagaaaggatgcagagtgagaaccagaacaaccagctggtagtgcagaattcggggagcctgagcttcagcagccatttgtcgaaggaagatgaagagatttcacggtctgctctctccaccttcagggcaaaggaggaagagattgaaaggaagaagatggaggtcagagaaaaggttcagcttcagcttggtcgtgtcgaagaagaaactaagcgtcttgcaaccattcgtgaggagcttgaagccctggcagatccaatgaggaaagaagttgcgcttgttcgaaaaagaattgattccgtaaacaaagaattaaagccactgggtcatacttgccagaagaaggagaaagaatacaaagacgcccttgaagcttttaatgaaaagaacagggaaaaagtacagctaatcaccaagttaatggagttggtgagt

SEQ ID NO: 10406 - DNA, 416 bp, Glycine max
gaagaagcgcactcgcaacaggggaggaagcagagcactgcagcctcatcatttcaaggccaacacaaagcagagaaagcaaaaaagaaaaaaaagcaaagagagagagagagataataaagagaaaaaactgaaggaagaagaaagggtttgtttgtgtgaaagaaagagaaagagaggatgcagagtgagaaccagaacaaccagttggtggtgcagaattcggggagcctgagcttcagcagccatttgtcgaaggaagacgaagagatgtcaaggtctgctctctccaccttcagagccaaggaggaagagattgaaaggaagaagatggaggtcagagaaaaggttcagcttcagttaggtcgagtcgaagaagaaactaagcgtcttgcaaccattcgtgaggaagcttt

SEQ ID NO: 10407 - DNA, 927 bp, Glycine max
taactttccccacacacacacggcaacacccgtgttgcatttgccctctcttccttcctatttcttcaatcttccaccacttttcatctttccacacaattgaataacagtaggacacaaaaaggaggaagagagaaaaggagatcagattcaatctcgaaaatccattttgtgcatgtatatttttgtctcttttgcgcaatttccttttggttaattaaacacattgccattaaatggaaaagaaagtccttgatctcatattagtcccaagtggtttccttgtgttgttggcttaccatttctggcttctccaccaagtcatgaaacaacccaccaaaacagtcattggtgtcaatgcaatcaatcgccgtttctgggtccaagccatgatggaggatgcgtccaagaatgggattctagctgtgcaatcattgaggaacaacataatggcatcgacccttttggcatccacagctataatgctgagttccctcattgctgtgttgatgagcagtggcaatgagagaaaaaccgtggtttctgaggtttttggggatagaactgagcttggtttgtccataaagttcttttccatattggtgtgtttcttgttggcatttttgctgaatgtgcagtccataagatactatagccatgcaagcatcttaatcaacgtgcccttcaagaaagtgtccccaaacctaaggcatcaaatgctcacagctgagtatgttgccaacactgtgaaccgaggtagttacttctggtccctcggattgcgtgccttctacttctctttccctctcttcatgtggctctttggacccattcctgtgttcttctcttgctttgcccttgttttcatgctatacttcttggatgttacatttgagcgtggatgtgctggggtttctgatactgatg

SEQ ID NO: 10408 - DNA, 426 bp, Glycine max
gttttagaatgacacccaatacccctggacttatcacactcgtgacctaacgctgggtgcttctcttctctgcagcctctttgatctgttggtgctcacttcgatcccgttgtgccctcttcagtttaggtgttttcattttagtgatattgttgaactgaacatactctgcccagttctcagcttaaagcatggatccggaggctgcacgaactgcacgagaatctctagacctggcattccatatgtccaatatacttgatactggtctagaccgtcacacactttctgttcttatagcactttgtgatcttggagtcaatcctgaagcgcttgctgctgttgtcaaggaactaagaaaagagaaaccctcactatcatcatcacttcccgtagctccttttttgccataaataaatggatttt

SEQ ID NO: 10409 - DNA, 285 bp, Glycine max
ctctctctctctctctctctctctctctctcatccgcattacctctcggtgtcacccccgacaaaggagatctgatttttgttgttcgtctcacgggcctcggcaacggcaacagcaacaacaacaacaacggcagtgagtcaccggattcaggtgttttcattttagtgatactggtgagttgagcatactctgcccagttctcagctttaaagcatggatccggaggctgcacgaactgctcgagaatctcttgacctggcgttccatatgtccaatatactt

SEQ ID NO: 10410 - DNA, 465 bp, Glycine max
gatatcaccctttttgtttctctctttgtcattgaaaccttttcacccccttgataccgcttcaattcaccaatggcaagtcgaggaaaaacccagggatctggcacaaccaaaaagggcatctcccgaagcaacaaagctggtctccaattcccagttggtcgtattgctcgatacctcaagattggcaagtatgctgaccgtatcggttctggcgctcccgtgtatctcgcctctgttcttgaatatcttgctgctgaggttttggagttagcggggaatgccgcaatggacaacaagaagactcgtattatgcctcgccatatccaattggctgttaggaatgatgaagagttgagcaggcttctcggagatgtgactatcgccagtggtggtgtgacacctaacattcacaacatgttgctgcctaagaaggttgggacctcgaccttaacctttatgggt

SEQ ID NO: 10411 - DNA, 1299 bp, Glycine max
gcgtacgctttcgtccacgcgtccgcccacgcgtccgttcacgcgtccgcccaaatcaggaaacactttctcatcttccctttcccagtctcacaccctacctcatggaaggctctgtcaacgaacgtcttgattttgggaagatgggatatgggtgcaatcattaccggagaagatgcaggattcgtgctccctgctgcaacgagatctactcatgccgtcactgtcataacgacgctgcgagcttgttgaagaatccctttgatcgccacgagctcgttcgccaagatgttaaacaagttgtttgttcagtttgtgacactgagcaacctgttgctcaagtttgcacaaactgtggcgtcaaaatgggagaatacttctgcaacatctgcaaattcttcgatgatgatgttgagaaagaacaatttcactgtgatgattgtgggatctgcagggttggtggtcgagataattttttccactgcaagaagtgtggatcttgttatgcaattggtctgcgtgataatcatttgtgtgtggagaactccatgcggcatcactgtcccatttgttacgagtacctttttgattcattgaaagacaccattgttatgaaatgtggtcacacaatgcaccatgaatgttacgtagagatgataaaaaatgacaaatattgttgtcccatatgctccaagtcagtgattgacatgtctaagacgtggaagagaattgatgaagagattgaagcaactgtcatgcctgaagattatcgaaacaggaaggtttggatactatgtaatgactgcaatgacacaacagaagtttacttccacattcttggccaaaaatgtggtcactgcagatcatataatactcgtgcagttgcgcctccagttcttccccaatgaccagattcttgggttcaagaagggaaaactgtcagcagaaaattaaagttagcaccctgttattattatagagggctattgaattaattgagcatcaaaagtgattggtgtattgtgtcctagatagttttcttaggttattcttcctccaacatatggagtgggattgttgtctcttggttattgggctggtatgaacatctttatactgtaacagagggaaaacatttttcccggtcatgaattgctggtaatagtgatgtatttgatactgggtgattgattgcattgtcagccattgtggttctctataatttggtcgggattatttgatccttgtagtttttctcgcacattgcaatacactgtgatcgttagttttgatcattct

SEQ ID NO: 10412 - DNA, 530 bp, Glycine max
ggtgtgtgaaattgagtgacttggttttgtagatctctggtatcccaagtgggcgatcctacagcgatattctcttctctcctcctatgcgccttatctcatcccaagtggtcattctctttttctctatcactgctgcctgcaaacaaaagatatttatattgcattaaaaagatgaaaaaaaagggcaagagtgtgtggtccttttaagttgaacatgatggaatggccgtctttctcttttgggtatcttcccaaatcaggaaacactttctcatcttccctttcccagtttcacaccctacctcatggaaggctctgtcaacgaacgtcttcattttgggaagattggatatgggagaagatgcaggattcctgctccctgctgcaacgagatctactcatgccgtcactgtcataacgaggccgcgagcttgttgcagaatccctttgatcgccacgagctcgttcgccaagatgttaaacaagttatttgttcagtttgtgacactgagcaacctgttgctcaa

SEQ ID NO: 10413 - DNA, 751 bp, Glycine max
gaaagtcgaagaagcaaaaagggggtgggtcaaaattccgccggagaaaatctttgttcggtgtttgcaatcgggagagagagcaaggtcccttctcaaggatggcgatgactgtacacgtccttgctgggttggcttttatgttttcagctagcattttgcttcagattctggcatgtgcaatatataacaattggtggccaatgttatcagctctgatgtatgtgctggttcctatgccttgcttattctttggaggtggatccactcaatttctaatgagccgtgatggtggtggttggatagatgctgcaaaatttttgactggagcatcagctgttgggagcatagccattcctataatcctcaagcacgctcatatgattgagacaggcgcgatgctcattgaacttgtatcgttcttcatttttatatgtactgttttatgtttccaccaagccggccttgatgatgattggtaacagcgaaatccacaaagttctgacaccctgctagtcattagggtttcttacccgtaaaaagggaaaccagatagtgaaacttacgacatccatgggagaagaaatgtatgttcaaacctctgtaaagctctcctgtaattgctttttttgtcaatgtgtattctcgttatagtaaggtatttgtggtaattttgatttgtggagaacacgtgacatttgagttccttggtttctttattgttcataagatgtgtataacgttcatgtat

SEQ ID NO: 10414 - DNA, 413 bp, Glycine max
ctcgaaagtggaaggaaaaagggagggtcaaaattccgccggagaaaatctttgttcggtatttgcaatcgggagaggcgagcgagcgagccggcgagcgacataaggtcccttctcaggcatggcgatgacagtacacgtccttgctgggttggcttttatgttttcagctagcattttgcttcagattctggcatgtgcaatatataacaattggtggccaatgttatcagctctgatgtatgtgcttgttcctatgccttgcttattctttggaggtggatccactcaatttctaatgacccgtgatggtgggtggttggatagatgctgcaaaatttttgactggagcatcagctggtgggaggcctagccattcctatcattctcaagcacgctcatatgattgagac

SEQ ID NO: 10415 - DNA, 380 bp, Glycine max
gacgaataagatggactcttcaatgtattcagttggcaagttggcaatcttattagctttcttcatcgtagcttcagatgtgtgcatggaatcagaagcacttggaaagggctgcgacttcgacttcgagtgtcgatatggatgtcaaaatgttccaaattgtggctgcaaagtgaaatgtattaaccacatatgtcggtgtccaaggtcaacaacctccaacaataattttcttaatcgaggcccccctaaattgagtgccgagatcttgtgatgcaattatcatgtgcttgatattcattgttttttataatgaatagtgaatgattgcatgcatgttgatttgtacccaaacgttcaaccatgaatgccaaataaaa

SEQ ID NO: 10416 - DNA, 491 bp, Glycine max
actcgagccgaatcggctcgttgcacaagtgagagaggttgaaggcggcgtgagaatgttggacatcaacctattcagagaggagaagggccacaaccctgaactcatacgcgaatcccaacgccgtcgtttcgccagcgtcgaaatcgtcgacgaggtcatcaatctcgacaaagaatggcgaaaacgtcaattcgagttggaaaatctccgcaaggaattcaacaagatcaacaaggaagtctccaaactcaagcgtgctggggaggatgcttctaagttcattactgaatcagaggagaccaaaaaatcgatagcggagaaagaggttgaagtgcgggaaactctgaatctcttgaattccaagttggaaactattggaaacctcgtccacgattccgttccaattagccaggatgaggccaacaatgttgtcgttagatcgtggggagagaaaagagtggagcctaagctgaagaatcatgtggatc

SEQ ID NO: 10417 - DNA, 625 bp, Glycine max
gacggaccagtttttatgggacttgagcagctttgagagtgaccctgaagagtttgccacagtcttcagcacggacaccggcactgcagatcctgaggttggaccagctattgcctttgctatcagagagcagctttatgagattgcaattcaaagtgtggtttcagcaagagaaagcagaatgagcaagaagggtcgtcgaggggctgaatatactccagtcagtaaaggaggtgcagcagcagtggacttggtcaagttgtttggtccgaaatctagtgtagttcggaaaagaaaggagtgggacgtatatgaacctattgtggacctactatccaacgaggaagttgatgcccttgaagcgaaggaagagagaaatttcaggtgaattcgccccatggtcagccacgccacatcagaagggtatatagttcaatgacaacatatattggagggttagagttcgaagttattgtagtatatacaagctggttttttagtacgggcaatcaatgattcagaatattgttatcgtttgatttctttggtttgtagtcttgtagagtttcttatttgttctctgtaccctcggcagaagaggagggaaaaaaatagcacccccacg

SEQ ID NO: 10418 - DNA, 361 bp, Glycine max
cctattggtcttcatattgccatagcagctgcggctgtcatgacagcagctctaggtggtcctcagcttcgcatccagtcaaatcaaaacagtttgcagagtcagtcagcattggcacatgatcctttaactctgcatctggccaaaatgtccaggagtcagctgacagagattatctctgagctgaagggaatggctacacaaaacaaagaactggctcgccagctgttgctttcaaggccgcagttgcccaaggctctttttcaggctcagataatgctaggaatggtgactctccaagtgttacaaatgccaaaccttaggctggtttgtgatcaaacctcacagtcttcaatgaatg

SEQ ID NO: 10419 - DNA, 443 bp, Glycine max
  unsure (1)..(443): unsure at all n locations
gctttcaattttcgtgaatcccttcgaaccgcttttacgttggtttattcggtttgtgttgctctgttatgctgctcctccctgtttgatttcaagggtaaaggataaagggatgatctacacagcaattgacacgttctacctcacagatgagcagctagcaaactcaccttctagaaaagatggcatagatgaagccactgagaccacccttagaatctatggttgtgatctcatccaagaaagtggcattttgctcagattgccacaagcagtcatggctactgggcaggttctatttcatcgtttctattgtacgaagtcatttgcacggttcaatgtcaagaaagttgctgccagctgtgtatggtcggcttcaaaactggaggaaaaccctagaanagccagacaagtaatcattgtgtgtcacaggatggaatgca

SEQ ID NO: 10420 - DNA, 471 bp, Glycine max
cgcttttacgttggtttattcggtttgtgttgctctgttatgctgctcctccctgtttgatttcaaggtatttgcccgaatcttctttctcgaagggtaaaggataaagggatgatctacacagcaattgacacgttctacctcacagatgagcagctagcaaactcaccttctagaaaagatggcatagatggagccactgagaccacccttagaatctatggctgtgatctcatccaagaaagtagcattttgctcagattgtatccttctgattgtgttcattttcattttaaattaccgtgtttggtccaaattgttacattaattatgtgacaggccacaagcagtcatggctactgggcaggttctattccattgtttctattgtaagaagtcatttgcacgtttcaatgtcaagaaagttgctgcaagctgtgtatggtccggcttcaaaactggaggaaaacc

SEQ ID NO: 10421 - DNA, 362 bp, Glycine max
gtttgtgactttgtgttgctcgctccctactctgttatgctgctccttcctttctgatttcaaggtatttgcctgaattttctttctagaaggtgatttgaaacacccttttactttgattccaaggtaattgccccttctcatttctagggtttaaaccctaaaaaggacccacggcgagaagcttccaactcctctctcacgcgcggacctccccctccggcgacttctgcaccgacggacgggtaaaggataaagggatgatctacacagcaattgacacattctacctcacagatgagcagctagcaatctcaccttctagaaatgatggcatacatgaagccactgagaccagcctt

SEQ ID NO: 10422 - DNA, 271 bp, Glycine max
catcgaacagttgggtgatcaccgtcctgtgactttgtgttgctcgctccctactctgttatgctgctccttcctttctgatttcaagggtttaaaccctaaaaaggacccacggcgagaagcttccaactcctctctcacgcgcggacctccccctccggcgacttctgcaccgacggacgggtaaaggataaagggatgatctacacagcaattgacacattctacctcacagatgagcagctagcaatctcaccttctagaaaagatg

SEQ ID NO: 10423 - DNA, 1170 bp, Glycine max
acaagctcgcgaaccaagctcgaactcgagccgctagagccgattcggctcgacattgggttgggttatctgaagctttttcagcggaggaaacataactgcgcacgtttgggaaccctattttggtgaacatctcaagaatcagagttttttttaccactatcaggtttaggattattatctgaaatggcatcggtgtctactcagcaacagttccgttacacgcagccaccatcaaaggtgcttcatttgagaaatttgccgtgggagtgcacagaggacgaactaattgagcttgggaagccatttgggaaagttgtgaacacaaagtgcaacgttggagcaaatcggaatcaagcttttatagaatttgcagatttaaatcaggcgatcgcaatgatatcatattatgcctcatcgtcggagcctgctcaagtacgagggaaaactgtgtatcttcagtattccaataggcaagaaatagtgaataacataactgcagcagatgttgctggaaatgtactgttggttacaatcgagggtgaagatgcacgccttgtcagcattgatgtcttacacttggtcttttcagcctttgggtttgtgcataagattactacttttgagaagacagcaggattccaggcattggtgcaattctcagatgcagaaactgctacttctgcaaaggatgctttggatggaagaagcatacctaggtacctgcttcctgaacatatgggaccatgtggccttaagatcacatattctggacattcagacttaagtgtcaagtttcaaagtcacagaagcaggtttcctgattcctctggactctgagtttcttaggcctacatggatccatatttttatagaatttgtattgctctttttacctgtgttctctcttttccctgctggtatttaatttattccttatcacgggtattgctgtccatatagtttcttagcctttatttttatggttattatatcacattctttattgtttttaattattgtaacttttcttggttttttcttcttctagagactacactaatccttaccttcctgttgctcaatctgctatggagggaagtggacagcccatggtgggtttggatgggaagagactggaggccgagagtaatgttctttttgcatcta

SEQ ID NO: 10424 - DNA, 365 bp, Glycine max
gacgcccaacacaacacaccatcttctagctcctttctaacgagtctctattactattggagtcattgttttcttctctctctctctctctctcttacacaccaaactcctgttgttgtttctctccttcccaaatcgcatacacacaccaacaaggttgttgttagccatcacgaacatcaccacgaccatgcctgaggcaccgagggactacaacctttttgagcaaaacaagaaaactctcgagttcattgaggatgtcactgccaacgcagaccaagttcagaagagggtcctctccgaaatcctctgcaacaatgcatacgttgagtacctgaagagacacgaccttcacggccaaaccg

SEQ ID NO: 10425 - DNA, 535 bp, Glycine max
  unsure (1)..(535): unsure at all n locations
catgaagtgcctctccctgtaaccgtcaacggagatttcgacatgcaagttgctttattaggaggatgtctctgcgtggtggagcataggggaactggatttgatgtttgggtcatgagagtgtacggatctagaaattcatgggagaaactgtttacgctattagagaacaacgaccatcatgagatgatgggatcagggaaattgaaatatgtgaggcctttggctttggatggggacagggttttgttcgaacacaaccgtagcaagctctgttggtataacctcaaaactggtgacgtgagttgcgttaaaataactgctgcaattggaaacacgattgaaggcacggtttgtgtagaaagccttgttccgccaactttactgaatctgcgtgatgagagccagagccaggagaaaaatgggaagaaaaggtaccaattcctctctcaagggttcaaattgaccttgtaaagcgagcaaaacaagaggaaatggattgaatttgaaagggaaacanagtgctacagttcac

SEQ ID NO: 10426 - DNA, 899 bp, Glycine max
actcgagccgattcggctcgagatggtttccttcattcatctgagaaacctgaatctggacctgcaagccctcagcttcgagtagtgccaagaaatgaaatgagcaattacccagagtcaggcatttctactcctagggacactgtgcctaacactgaggaggtgacagaggagaagtctgattcattgtcagcagttgattccaaaaggattgaagagcaagcttatcgtttgaagaatgatgatgactttcctccactttcccattgaatgccagtgaaggatggtgaatatgtaatagcattaacagtaatggtcatacatggaaactattatgactttgcctgcttttcatcaggtgctaccaaaggatggcgattttgtaagaagtaagaagtaagaacaatgtgcattcttctcaaaaatgaagatagcttccctcaactctgggtctcttctagagattgttgaacacataaaaaatgagagtaccaactaagtagaaaagtgctgggagtagccttagaaactaacgaactagactaaactagattgggtgttatgttatctttattctctcttttcttacttaagttggtcctttgtacaaaagtgcatgtatattctcgttactttttttggctcttacatccgtgtttatttttcattatttagggatgtatatatcaggtgatttcctgaggttgagtttatagttctcttctgtttgtagctttgaagtataaaaccgaaagtttagatatcttacttgaatggatacccaaaaatcttacttgaatggatacccaaaattttctgtcagttgcaggaagtatatttagtacttttttggaaaaaaaaaaaaaaaaaaaaaaactcgagactagttctctcctcgt

SEQ ID NO: 10427 - DNA, 645 bp, Glycine max
cagtaatgatcaatacatggaaactattaatgctattacaaattcaccatccttcactgtgcctaacactggggaggtgatggagaagtctgattcattgtcagtagttgattccaaaaggattgaagagcaagcttatcgtttgaagaatgacgttgactttcctccactttcccattgagtgccagtgaaggatggtgaatttgtaatagcattaacagtaatgatcaatacatggaaactattaagactttgcctacctttcagcaggtgctaccaaaagatggcgattttgtaagaatgtctttggtggagtccatggccattcaaattgccgtgatgatgcccccgagaaacaggcgtggtagttttcatcttgttgtgtagctcataatgataatgttgtcagtagacataggctttgttgaacctaatcctggcaaaagcaggattcgaagtagaagaattagcatattctgagtcgacgtaagttgtatctttatactagtaaagattttatcgttgtacataaggaacctgtcatgaagagggaccctggtagaatgtttcatcaggctagctagtgttataggcagagtttgatgcgaagacaagccgagcagaactgcttagttattttgtccc

SEQ ID NO: 10428 - DNA, 320 bp, Glycine max
caaagcttgaaggagcatacacagcacttcaggcatggaaatctgcagtcactgaggaccctcttaagattttatcaagttggattggtcccaatgtgtgtgcttacaaaggagtcttctgtgctgcaaaccctcaagatgaaacggttggtgcatcagcagcattcccagttgtagtagcaggcatagatctcaaccatgcaaatctgaaaggaactcttgtgaaggagctctctctactcagtgatttgtcccttctccacctcaacagtaacagattcactggcactgttcctgaaacattcagagaccttgtgttt

SEQ ID NO: 10429 - DNA, 698 bp, Glycine max
ttttcaattcctcaagagtatacaagggatggttctgtttggaagagtgatgagacttctgcccagtcatccagccatgtggtagatttgcttttcttatcacagaggtgtctagtatccaaagcagccaaacaattgatggagctagttcatcagacgctacaggatgtttgcctgtcatctacaagagttgcttttgaattttatcacacagctagagatgctgtactactttatgaagtagttgtccctgtcaagctagagaggcagctcaatggcatcaatcaagtagccattctgttgcataatgactgtctttatctctcccaggagattcttgggtttgcatttgagtatcgaacagactttccaagttccatgaaggagcatgctgtgtttgttgatttagctccaagatttcagctgttggcagaagaaatattgcagagacaagttcaccttgttatttataatttgaaggaggctatagatggtgctgatggatttcagaatactcatcagatgaaacagtttgagtcagctaaattcagcatagaccatgttgttatcattctggaaaaagtacatatcatatgggagccacttttgctgccttcaacttacaggagaagcatgtgtacagtcttagagtcaattttctcaaaaattgctagagatatacttctggtagatgacat

SEQ ID NO: 10430 - DNA, 584 bp, Glycine max
cacgaactagatttaacgaaactttggagtccggacatgagagagaaagatgaggagggaggtgtaagaaactgggaagagaaggtggtggtcttgttgccattctgatctaaagcttgtgtctttctgcttcgtttgcatcttctgctgcgtaaagttgattcttttctgattcttccgtagatttcatctctgaaactagttctaatactttatctacagatctctatattctaggtgaaggtttgcttttgatccggcttgggagttttgatagacttgattttaactctttaagagccatatgctcacagtggtcggatatagtacatcagaagttcacacaagagatatatataattattcttgggtaccacctgcagaatgtcattccgcagcatagttcgtgatgtaagggatagtttcgggagcttatctaggcgtagttttgatgtcagacttactgggcatcatagaggaaaatctcaaggatcagtgcaggatttgcatgaccaacctctataattcagaatagccgttgggccagcttacccccggaattatatctgatatcattagacggc

SEQ ID NO: 10431 - DNA, 529 bp, Glycine max
ggacatgagagagagagagagatgagggaggtgtaagagactggaaggagtaggtgtaggtgttgttggcattctgacctaaagcttgtgtctttctgcttcgtttgtatcttctgctgcgtaaagaggatccctttctgattcttccgtaaatttcgtctctgaaactagggctaatacttcatctaccgatctctatattctggatgaaggtttgcttttgatccggcttgggagttttgatcgacttgattttaactccaacttttaagaaatgtcattccgcagcatagttcgtgatgtaagggatagtttcgggagcttatctaggcgtagttttgatgtcagacttactgggcatcatagaggaaaatctcaaggatcagtgcaggatttgcatgaccagcctctagtaattcaaaatagccgctgggccagcttacccccggaattactatttgatatcattagacggctagaggagagtgagaatacatggcctgctcgaaagcatgttgttgcatgtgct

SEQ ID NO: 10432 - DNA, 386 bp, Glycine max
cggctcgagttggagtccggacatgagagagagagagagatgagggaggtgtaagaaactggacggagtaggtgtaggtgttgggggcattctgacctaaagcttgtgtctttctgcttcgtttgtatcttctgctgcgtaaagaggatccctttctgattcttccgtaaatttcgtctctgaaactagggctaatacttcatctaccgatctctatattctggtttttccaagttcttggaaggaaaatgatgaaggtttgcttttgatccggcttgggagttttgatcgacttgatattaactccaacttttaaggccatctgctcacagtggttggatttttctcgtctgaagctcacaccaagatatttatataattattta

SEQ ID NO: 10433 - DNA, 334 bp, Glycine max
ggctccaaaaagtcctagctcaacaacaagcatatccttcatcattgtcaccacccctttgcacaatggagagggagagagcattgtttgagagggtgagaaagaatagcacagtggaagaggaagtggaaaatgaagtagaggaggaggatgaaagtggcgttagtattactgaagaagagaagaagaaaggggttggtagtagtggtgggagaagagggtcaagtggaggtagtggaggggtttctccaccttcatgtcaagcacaaaaggtttgtggcgaattaactgatgcaaaagggtaacatccgccgccacaaggtgtgtgagtttc

SEQ ID NO: 10434 - DNA, 870 bp, Glycine max
ctcgagccgttggatctgatctgctgaaacacgccacactcttcttaccatgggcctcctcgatcacttgtgggatgacaccgtcgccggtcctcgcccggagaacggccttggcaagctccgaaagcaccacaccttcgctttccgatctgcctccggcaaggaatcagacagcggaagcgtgaaatcgtacggtgaagatttgccggaggatgcggtgagagtgacgcgaagtatcatgatcgtgaaaccacctggtaaccagagtcccagtggatccgctccggcttcccccgccggttctactcctccggtgtctccgttttcgggagctagagagtccttccgttttcggagaaggtcgacatcagatgcgtacgagaagacaggccagaacagaccaagctcttcttctcctttcgatgtgtgacaaatgagcccgaccactatctcctccatatatggatgactgaaaatacaaatatatagtttgttttcctctggcctttgctgatgatgctgtgtccatttttgtttatcttttgtgcatatagtatatagtatatagtatatatatgaatatgtttacgagttcatcagttgagcggtttaagtcctgagacgatcgaggtagctgtgtgtgtggtttaacagctcagtcttgttttactgttgaacttggttatggttctcaagctgtaaataagtaataacgtagtgtacgtaggtgtgttttggttatgtgtactttgtatataaaagcctttccaaggtttgttctttgtggttatttgcctttcaagctctcagcatcctatttgtgggtaatttttttaatttctattaaaatattttgtttatctttttagt

SEQ ID NO: 10435 - DNA, 841 bp, Glycine max
acgagctgctgaaacacgccacactcttcttaccatgggcctcctcgatcacttgtgggatgacaccgtcgccggtcctcgcccggagaacggccttggcaagctccgaaagcaccacaccttcgctttccgatctgcctccggcaagggtgaaggcgttttcgttgtgtggttttggtggattcagaatcagacagcggaaggcgtgaaatcgtacggtgaagatttgccggaggatgcggtgagagtgacgcgaagtatcatgatcgtgaaaccacctggtggtaaccagagtccgagcggatccgctccggcttcccccgccggttctactcctccggtgtctcctttttcgggagctagagagtccttccgttttcggagaaggtcgacatcagatgcgtacgagaagacaggccagaacagaccaagctcttcttctcctttcgatgtgtgacaaatgagcccgaccactatctatcctccatggatcgatgactgaaataaaatatatatagtagtttgtttttctctagcctttgcggatgatgctgtatccatttttgtttatgttaattttgtgcatatatatagtatatagtatatagcatatgtatgaatatgtttacgagttcatcagttgagccattgaagtcctgaaacgatcgaggaagctgtgtgtggtttaccaagcttgggtctttgttttaatttgtttaaacatggttatataggtatcgagaacgctggtaaattaagatatataaccgtagatataggtggtgttctttgtccccgatgtgactattggtaatatgatataaagagccttaaccattcc

SEQ ID NO: 10436 - DNA, 303 bp, Glycine max
catctgatctgctgaaacacgccacactcttcttaccatgggcctcctcgatcacttgtgggatgacaccgtcgccggtcctcgcccggagaacggccttggcaagctccgaaagcaccacaccttcgctttccgatctgcctcccgcaagggtacgcatgcgcatgcccttgctgaacttaatttcccaaattcattttagttattctaaaaataatgataataataataacaagaaccgcagcaagaattagttcttatgatctcacgcgatcataaaacgaagcaagatttgtgaggttt

SEQ ID NO: 10437 - DNA, 581 bp, Glycine max
ggtgggtttcaactttcaattcagaacgaacgattccttcatttcccgagtgattcaccgatctgataatcgattgaatttagggtttgggagatggcgtcgagtgtgttgaagagcctcctcctgagattttcctcatcgaggaacacgacgaccaccagaagtttcagcctcgttacccctcaaatcagcaaccacaccgccaagtggatgcaggatacaagcaagaaatctccgatggagctgattaatgaagttcctccaattaaggttgaaagcaggatagttgcttgtgaaggagataccgatcctgcccttggacacccgattgaatttatatgccttgacttgcccgagccagctgtttgcaaatattgtggccttcgttatgttcaggatcatcaccattaggactgctttctacaagtattctggtgtgtgtgcatgtacggaatttctgctgaacattaatgttttgggttacaatgttttctgactaaatcatggtttaacaaatatactttggtacaatttgctaaataagatgttcatgtaccatatgctggtgatgttggtttaca

SEQ ID NO: 10438 - DNA, 1022 bp, Glycine max
ggagtgagtgagagaaagaagagaaggagttgaagtggttgttgtattgtagtagtgtgtaaagtcttggtgatggatagacacaaatgcaagctttgttcaaggtctttcagcaatggcagagcccttggtgggcacatgaaggctcaccttgcttctctccctctccctctccctccaaagcttcactcttgtttctcttcctctgactcagaacaagaacaatctttaagggagaatcctaagaaaaccttgaggattctggatcctgaagacagagagagcgagacagagtctaataagaacccgactcgtcaacgatccaagcgcaactggaaatctaccatgcccaagctcagcctcggacaccccgaagccgaacctctcagctccgtctccgacacctcccccgaagaagacctcgccatgtgcctcatgatgctctcccgcgacacgtggcaggaacacaaactcgccaatgcaggtccccccaagactcgctgcagcagcggatcagagatcaagctcaagaacaaagtccgctccaagcacctctgccacgcttgtcacaaatcctttcgatcctctcgcgctcttgggagccacagaaccctgtgctctccccgtctggaagcccaaaataacagcatcattagtaataacaacattaaggtttttgaatgccccttctgttacaagctgtttggttctggccaagcgctcggtggacacaagagatctcacctaattccttcttcctcttcaaccgttaatcattctgtcaagttgaaacagagcttcatagatctcaacttgcctgctccggccgaagacgacgatcttagcgttgtttctgatgcctaattcgatctggcatatgttttaattgtttaatgtttagttgtctggtggtgttactcataaagtgaatttttcttcttcttcttcttcttcttcttctttataaaagtagctgagaatatttcattatgtttattgcaagatcgaaaaaaaaaaaagaa

SEQ ID NO: 10439 - DNA, 1103 bp, Glycine max
cccacgcgtccgccctgcattagttaaatccttctgctctgcgtcttcttgttcctctcgcccagaatccgagatcaaccctgacgcctaaggccaggggtttttctcggcttcttcagattcctgaaatggcgtctgtttcagctttagccaagtacaagctcgtcttcctgggtgaccaatccgtgggcaaaaccagcatcatcactcgcttcatgtatgataaattcgataacacctatcaggctacaattggtattgattttctatcaaaaactatgtatcttgaagatcgaactgttcgactgcagttgtgggatacagctggccaggaaagatttagaagtcttattccaagctacattagggactcatctgtagctgttattgtatatgatgttgcaagccggcagactttcttaaatactgctaagtggattgaagaggtgcgaacagaaagaggcagtgatgtcattattgttcttgttgggaacaaaactgatcttgttgagaaaagacaagtctctatagaggaaggagaagcaaaagcacgtgagctcaatgtcatgtttattgaaactagtgctaaggctgggtttaatataaaggccctatttcgaaaaattgctgcagcattacctggaatggaaacactatcttctgcaaaacaagaagacatggttgatgtaaacttaaagtctacaaatggcagtgctcagtctcaacctcagtcaagtggatgtgcttgttaagtatactttatcatgtgcggtccacctttttgtgtcatgctttttgttttatgcgggtttttctatagtcttctacagcattatatgaaaagatgaaagaatatataagcggatcagggtaggggttgataaaagttctgtctagacaatttctgttgttagttggttttttgcctataatgtgtactaatgaattttttttttttttgaacggcataatgtagtaaaggtacccaacccaaaattgaattgtgttcattgtaccctgtaaaacgtgtgatatgtttaaaatttaacttgttcatctggattgacgtaaaaaaaaaaaaaaaggggggccgccgattagtg

SEQ ID NO: 10440 - DNA, 459 bp, Glycine max
  unsure (1)..(459): unsure at all n locations
ggttttganatanaaaagaatactaattattaaatcctggtagacatgcactaaaaataaatctaaaatttcacttgcacccacccacacaccctcgcatccatcgtaatcaaaacttaattcacatttttgtttgggttttttcatcacagtgcttttctttccttccttctgagattgctgaagagagaaaagcaaaatcgaaagaactgaattggatttcattggcggagtgaaagtgaagtgttgcgcaaatctgattggcaagaatggcgccagtgtcagctctcgcaaagtacaagctggtgttcttgggcgatcaatccgttgggaaaaccagcatcatcactcgcttcatgtacgacaaattcgacagcacttatcaggctacaatcggtatcgattttctgtcaaaaactatgtatcttgaagatcgaactgttcgactgcaattgtggg

SEQ ID NO: 10441 - DNA, 413 bp, Glycine max
tcttaattaacattattttttcacagtgcttttctttctttccttctgagattgctagctgaagagagaaaagcaaaatcgaattatcatagaaagaagtgaattgaatttcattgacagagtcagagtgaagtgttgcgcaaatctgaggtgcgcattgcattgtggttgatttgtaagaatggcgccagtgtcggctctcgcaaagtacaagctggtgttcttgggtgatcagtccgttgggaaaaccagcatcatcactcgcttcatgtacgacaaattcgacaacacttatcaggctacaatcggtatcgattttctgtcaaaaactatgtatcttgaagatcgaactgttcgactgcagttgtgggatacagctggacagggatggatttagaaatcttattccaagc

SEQ ID NO: 10442 - DNA, 957 bp, Glycine max
gatcttcaagcgttctactatttcgtcaattccaacaacaccacaatgggaagaagaccggcgaggtgttaccggcagataaagaacaaaccgtacccgaaatcccgtttctgccgcggcgtgccggagccgaagatccgaatctacgacgtgggaatgaagaagaaaggcgtggacgagttcccgttctgcgtgcacctggtctcgtgggagaaggagaacgtctccagcgaggctttggaggcggcgcgcatcgcatgcaacaagtacatggccaagttcgccggaaaagatgccttccacctgcgcgtgagggtgcatcccttccacgtgctccgcatcaacaagatgctatcgtgcgccggggccgacaggctccagaccggcatgaggggcgcctttgggaagccgcaggggacgtgcgctagggttaacattggtcaggtgctgctctcggtgaggtgtaaggatgctaacagtcaccatgctcaggaggctcttcgtagggccaagttcaagttccccggccgccagaagatcattcttagcagaaaatggggatttacaaagttcagtcgaagtgagtatttgaagttgaagtctgagaacagaattgtgccggatggggtcaatgccaaggttcttgggtgtcacggacctttggcaaatcgtgagcctggaagagctttcttaccagctactgcttaggccatttagcagttagcactaggatactcattgaatatgtggtttttcttttcacctggtgaatggatatgttgtaactataaaatgtgtttctgtctgcgttttgttagaagatatttgaattatgtatctatctgtcttccaagatgtcctgggggcatgaaagatgcacattcgatgtatttagatctcattattctgtaagagtttgaacagaatggaaataaatatatatggtctttattgtgt

SEQ ID NO: 10443 - DNA, 530 bp, Glycine max
  unsure (1)..(530): unsure at all n locations
atttcgtcaattccaacaacaccacaatgggaagaagtaagnccacaacatacctctcgggggctttcaatttccctattatatctgttggaagtaccattgagttaatcttataatggattatgtgttatctttctgttaacggttaaggtgtatgtagattcaggaccggcgagggtgttaccggcagataaagaacataccgtactcgaaatcccgtttctgccgcggcgtgccggagccgaggatccgaatctacgacgtgggaatgaacaagaaaggcgtggacgagtacccgttctgcgtgcacctggtctcgtgggagaaggagaacgtctccagcgaggctttggacgcggcgcgcatctcatgcaacaagtacatggccaagttcgccggaaaagatgccttccacctgcgcgtgacggtacatcacttccacgtgctccgcatcaacaagatgctatcgtgcgccagggccgacaggctccatatcggtatgaagggcacctttgggaaaccgcaaggga

SEQ ID NO: 10444 - DNA, 921 bp, Glycine max
acgagcctaaactggcatatgtaggtttaggactaaatatatccagagttccagataaaatgaccactgttgtcgcatgcatacacagaaggacatcaaacaagactcttacaacgaaagcaagatctatatctacaaattctggtgttgctgaacatgtcaacagttccatttctccagatgactcacctgccttggactctttctattcaaaatttcaccacctgaaaaggattttggaagaagactcgtcaagtgataattcatcccttatcagcagcaactccgatgaaggttcttgtagtacagatagcacccgtgattcaactagcacagatgacttctctgaatatctttttggtgattcagggaatggctggagtagtgtgtggaggaattctgattctgacacatcttcatcatcctcatcttctcccttgaatttgcgacattcacccctatctgatatggacaggtatgattcagtttctcctgatgcagaaggctcgcgagggatagatgtttctcgtttgtcttctaacacaactttacagcatagaaagttagatagtaggattagtagcaacagtagtagtagtagggagactgactcttgtctgaaactaggatctaaccattttaatgatatagactatggtgtattatgtagaaagccaaggaaaagaacggatttatattttatcaacagggagttccggagctaataacgagggatgctctaccaatgtactcgttggaggcggcattctttttacaaaggaaaattagacacatcagtttgctaacaactaactagatgtagatatagattgctgtaacttttataaaggttcggtggaatttattctattattttaaatacgattacttgaaataaaggataatatattatttttcgcc

SEQ ID NO: 10445 - DNA, 660 bp, Glycine max
cgaccgacgcgtgcgcggacgcgtgggtttcagaggcaccgaatgttcttacagttgcattaaagagatttcagtcggggaagtttgggaagctcaacaagcctattcaatttcctgaaatacttaacttggcacctttcatgagcgggactagtgataaatcacccatatacagattgtatggggtagttgttcacttagatatcatgaatgctgccttttcgggtcactatgtgtgctatgtgaagaatatccaaaacaagtggttcaaggttgatgacagtgtggtgacagctgttgaattggatagagtcttgacaaaaggagcatatatgcttttctatgcaaggtgctcgccaagggccccaagattaattaggaacagaatactgtccccagattcaaaacgtaaagtcagtggaaagactcttacaacgaaagcaagatctatatctacaaattctggtgttgctgaacatgtgaacagctccatttctccagatgactcacctgccttggcctctttctattcaaagtttcaccacctgaaaaggattttggaagaagactcgtcaagtgataattcatcccttatcagcagcaactccgatgaaggttcttgtcgtacagatagcacccgtgattcaactagcacagatg

SEQ ID NO: 10446 - DNA, 396 bp, Glycine max
gccttcccaaatcaccaatttaacagcatacattcacaagacggttgatttgcttgtcttgtgttaaatctcttaacaggatttgggttttgaagcttactgggatgtaacaaacagaaacagctttctttttgggatgcccctttgatttctggttctggacacaagctgtaggtgttacttcaactggattctggatagatattagatacagcttgaagttatgtctgcttatggccatcaaatggagcagatgtattctgcacggagtctctcaagtggtggttctgagttgaggaagagcagttttgtttttggaatcgggattctatatcacatcctttgtcgccaccatctttgttgctgcattagccgctgcaggacttctattgatta

SEQ ID NO: 10447 - DNA, 399 bp, Glycine max
ggaacccgcagagtgagtgagtaggttactggaaagaggaatggagaaggaagccgaattgggtgaaaaggagtttgaacaaatggtgcgggctttgccttccgatgctgtcaaggagttattgtcgcacggggtatgcactcgctgcatctttcgcctcttcggcctccaaggccccgtctatgcttctcctccctccctctcttccctcttcgatgcaacacaacaagattgcctttgcacactttgcttagggattctgcagttcacatattctaatgttcaaaacgacaatctccctcttctcattgctgacatggttaaacgacaagcctatcagttcgataccttttcccttgaaagttccaattccacctatcattatcgatgatgttaact

SEQ ID NO: 10448 - DNA, 634 bp, Glycine max
ggtcttccgcagcggtgttagggcttgtaaagttacactttgctttcagtttcggtgaaatagaattacatcgtaagcatcgtgcttctgcttttcgttacggatctctatattctcaattggagctcatggatcagaaagcaggagatgatagcagcagcgtgaagaaaataatttcagcatgtgatgtggaggctttaaaaaagtgtttggaagagaataagggagactatgtcaaatgtcattcacagattgaggctttcaaatcatcatgctcactcaagaaaccaaacccctctcttgattccgcttcacgttagattaaattagatggtttgattttgaattgtcatttctggcttttccatctttggcttaaggggacacactatctaatgatattcataagttgtatcaatacttaataatcattgtgaatgaataatatattctcaagttgtggctttctacaattataaatttcaggagttctcattcatagcagtggttatttaggacgagaatcaaccctgtgcagaaggattctgatgctgttgccacacttttgtggcattgaagtttccatctgttttgttcccccgcaaatgaaattataatcttttcaatggccggc

SEQ ID NO: 10449 - DNA, 401 bp, Glycine max
ttggggaataaaaaatggctctgaatccaagatcacttcggttcttaaacgctgtccacagtttaaattgttgaaacatgctggatctttaaactacaagagattgcttccatttatattggataccatgaaagatgattcttgcaattcttgtcctcagcaacaatcagggttgcaggcttgtgatttaaacaatggtagttcaagcccaaaatctcaaattcctgaatttcagtcatctcatgattcatgcaaagtgattcaactgcaagatgaacaggttgtattaaatggactcctgcatgccagaaagctccactgatccatcaatttctgttcatggaatagacttaccaatcacaaccttggcacctatgattaatgaagttaccaccagagag

SEQ ID NO: 10450 - DNA, 336 bp, Glycine max
ggacgatcgctttctgagtcaaccctagaaccttacacgcgtctgggtaaagacttttccttatctctgcgtacacttcacccacccacttcctccgtgccaactgctcccccaggcgcattgcagcctccaccgtgctctccgcgctatcgtgcgccgaatccacgattcccatcctcaccgcctccgccgccgttagcttcgcgccgcccagcaccaagtcgcgcatcaccgccggggacctgatcttggaccttatgacggcggcgaagtagcccggcagcggcagcccgaggtctacctccggcatgtagagcacgccgcggtcgctgcgca

SEQ ID NO: 10451 - DNA, 463 bp, Glycine max
gggggcaaggaggatcagaggagttaccgggatccattgttgtgctctcgcgctctattgttttcatttcctgtctctagaattttctatccgctcatccccctcacaaattagggtttttgcgaatcttttatcgtctgaaatcgaatccaacgtttcagccatggtttccgattcaatcgccgccgtaccgattccctccgccgcaaacaccaagaacccggggaagaagaagaggactaacaggtccgcgaaattgaagcagtacaaaatcgatgcgcgccgcgagcaatggttatctcaaggtgcggtgaagagcaaggggtgcaaggacggattggacgatgacggccacgcaccgccgccgtctccagcggtggtgaaacactcgttggagccgctgaacacgaggcgcagaggcgaagaggacgatggattgatccatcatgacagcgattcggag

SEQ ID NO: 10452 - DNA, 379 bp, Glycine max
ggagccacaagcttcgtacacaagaatgactcgcacacttgtctcaatgattttgctgaaattttttatctttgcagccatggtgattgttctattctcacttggtgtgagtagcaatcaggtttgtcctggacaatgcgatgatttttctgattgtaatgcctactgcgtggcccacaaccataagacagggaaatgcgtcgtcgcacctgaagtagggtttatttgttgttgcttctaagatggtgaacaaactttttagtaagagttctcttcatatggttgtaagcaagcaatgtaatttttgaataatcattagcttcattggcggaaatcaaaagtatcgtgagaagctgagtttaattccaaaaaaaaaaaa

SEQ ID NO: 10453 - DNA, 962 bp, Glycine max
atcagaatcattttggaccaactttcctaattgctttaaagcatattatttctgcaaacttgtacatattcttattaagacttgaattttcataagaacatcaatgcctctcatcccttttggatgctattcctttaaaaggaaaatcatgtagttacattacatctaacaaataatgaatcaaatttatttttttcaatttaagctttcagctgtctatcttagtagtccttcagtgtaaggtatatctgtgtcaggaagccaagtatttcccaatgtaaaattaaggactgtgaagttccaagcttgagtagcattcaacagagagtaaccaggccatgttactctattgctagtgttagaaccaggtccatagttgttgaattcaccataaaagagagtgtctaatccaactgttccattccactctagccacccagcaggttgaattacatttccaatgtatgactgcagatagacagtcctcgaatacaccttccatggacggcctaagaaactcatcgtggatttcaagtccgcgaccaagtccggtgcagcatcaatgctgcagttttggatcgaaatgccagtgttttgatttggatcagttcttccttgtgctgtgacagcattcttctggtttggcaatggttttctggcatagattttgcaaccctggaagaccacagctgcattgccgaaaatgaagtccacagttccatagatttcacattccctatagaattgcctcaaggagtgaacatagagtgtgtcttgatatccttcaaaactgcaacggtagaatgtggagagatcagcattgttcctcactgccactgcttggtgcttttcgggtccagctgtgtttctgaatgtaacatccactgctataaatttctttttctccccccctttctgttcgttctttctcgccaagccggtacggaccggggttggttcga

SEQ ID NO: 10454 - DNA, 565 bp, Glycine max
atctagtgaaagtgaactattacaatatttgaggattgcttttgaatgtctggatgagagaccataccggcggccaactatgatacaagtgatggctatgtttaaagagcttcaggttgacacagataatgatatgcttgatagcttctctctcagagacaatgttattgatgaagcttgagaagaggatcttttctacaagactcaaagccctttgacagttgagaaggaaataaagaggttctcaaaatttggagtgttgctgactaagttgacaattctggtgacactgatctatatctatcctatctgaaattggaggagggttctttcacctttttttgatgtatataagacacttaatgagtccaagagatcaaaggcaatcatggattgaattgaaggttgagacttaaggttatagacagttttgtatgcttcttttttgccgatctagtgttcagccacttgaaattggtagataaatatgtatttttcctatggacttcacacactccatcatcaatgccccctttggtggtccattccaaaatttggttacggg

SEQ ID NO: 10455 - DNA, 688 bp, Glycine max
agccttccgaccggttgcaaaaaaacaacagaagggggagtcaacaacaacctaggtcacaaccgaggcagtcttttattttatagtataattcattctgtcatatatctgtgtagcaatggtggtctttatttgcaaggaagaatatggtgtgctcttgggcaatgactgggctgcaactcatgaatttggccacaacttttgtatctcaaatgaaggtgacgatgacgatgatgataatggcgtcattgatgtggccccagcggcatagaagaatttcgcaaaacatgcataaatgaggaggatgaggagggatatagtagtagtcagtgtaagcttcattctgtggtcttgcttagtaattacattacatttgtgtttactcttggaataggttctagtgttatgcttaattacggtcactataaatttgagacataatacatgttttattagtaattatggcttaattccactctctctctctctctctctctctctctctctcggacccaggaattttcttgtcgatcgtctttgactctattatctgatcatagttttttatttataataatttgatggcaattggcaatgtacttgtaatggggtgcaggcaaatttgataaatttgacatgacccaattataaaaggtttcctttaataaacttattatgatgatttaag

SEQ ID NO: 10456 - DNA, 430 bp, Glycine max
cttccgaccggtggcaaaagaacaccaaagggggaaagaagtgaattattagaaaattcgcataaattagcttgaaaatatcttttgaaataaatgagtgtttagcatttgcggattattagggtcaagtcaccaaggtggccgtggcagcagcatatgcatgtggctcattctcaagaagaaaggctttggtggatccagtttccattgacaactcttgtagtctatcattttggtggatgcagcatatgccactgcctcaaattcctcatttttgtccccatcaacaacaaaaaattcctcagaggacgtaatggaagaaacatattctggtatcactaccaacatcaacagcgagcttcatagtaaaggccaatgaattcctttaaattgccaattgtcataatgacacaatgttgccaagcatata

SEQ ID NO: 10457 - DNA, 380 bp, Glycine max
caattgagttcacagtcaaggtgtgggactatcttgaggaagtggtggttgctgttctgaagcgtcactcagaacactaccaccaacttcagacaagtacaaaacgagcagggaagaacctcattgctaagatgaaggagaattctatgaaatatgtgatggaggttgtggaaatggaaaagctaactgattacactagtaatcctgaatacatgagtgagtataacgagctaatggccaaccaggatgaattcgtggagaaagttaatacaggcaactatcatgaagttgcccttgatggttttgagcaggcgattaaggttggtcatccgagtcagtactcaactttacttccgcaggcatttgacttgaaaatgaga

SEQ ID NO: 10458 - DNA, 856 bp, Glycine max
gacccttcagtttctgcacacaccatcgtaccttttaaaatcttcacgaatcagaaaaatctcctcacacaccacaccactccctcgccccgaggatctttcttctctttttctctctctatcctcatggctgagaatttggacgacggcgagttctggctgccgccgcagttcctcgtcgacgacgacgtcgtcgtatttccgacaccctttgaagcaaagtttccgcctttgtccgacgacgccgttttgttcccgtacggttctcccgttgattccaccgttggtggctccagcgagaccgagagcgacgaggaagagcaactcgttgccgagttaactcgccacttaactcgctcctctcttcaacctgacaccgagtctgtgggtcggtttgtgtctggttctcctcaatccacgctttgcgcgtttggaagtgggtgtagttgcggcaaagggtcgagccagggtagcccagatggtgtttgcaagttgtcctctgcgaagaccacttgggatctgctgcatgcggctgcaggggaagttgagaggatgaggttgaagcaagaaggttatgctctcaaccatcacaatggaaactttgttccccaaagaaaaccctctccagtcaccactttaccctccaaaaacaccaccgcaaatccaaaccctgatgtgggtggtttctacacccaacaacaatcactctctcaccagctattgcagatagcacaatttcagttgctgaggcagcaacagctggcaaagcagcagaactccgtctggaaatgtgaagaagcaatgtgatggggtttactctcagaggcagcaacaaagcaaccaaatggttcccaat

SEQ ID NO: 10459 - DNA, 507 bp, Glycine max
ctctcttttgcgtttcgatgggacccttcagtttctgcacacaccatcatatcttttaaaatcttcacgaatcagcaaaatcccctcacacactctcttcctcccaaagatcttttctctttcgatattttatctctctctcttttcctcatggctgagaacttggacgacggcgagttctggctcccgccgcagttcctcgccgacgacgacgttttgccgacaccctttgaagcaaagttcccatctttgcccgacgacactgttttgttcccctccgagtggccgtacggttccccagttgattctaccgttggtggctccagtgagaccgagagcgacgaggaggagcaactcgtcgctgagttaactcgccgcttaactcgctcctctcttcaatctgataccaagtctgcgggtcgggttgtgtctagttctacacaatccacgctttgcgcgttcagaagtgggtgtggttgcggcaaagggttgagccagggaagccct

SEQ ID NO: 10460 - DNA, 1131 bp, Glycine max
attaaattggcggaaataaaaaaacaataaacgaaggtcacagactcacaagacaagaacaacctctttcctatttacattttggttccgcttcattctcgtacaactaatcagaactgctctcaaggatccctcgttttttccctttcttttctgcgtttaattttacgtcccatgctcgaagcttaaaccaattttattaattggtgtttgtttcagagatttccttagttagggttttattcatcgggttcattaattttctcaattattgcgattattattcgaaatttgaagttaagcatatatattcatggcttcgagttttgaccggtgggaaaaggatcctttctttaacgctgccgaagaagttcaggaatctgcagacaggatggaatctacatataggacatggttacatgcaacaaaagatgcatccagcatgtggaactctgatgaattgtgcagagatctacgcactgcacttagcactgccaaatggcagttagaggaatttgcacgggcggtgaggtcaagttatggcaaaagctcaagtgaggaagcgagaaataggcaccgagattttatcactgcaattgaggataatataatgaaagttgagcattcgttgagtgaatcagttgttcctggaggcaaggcgtctctgccttggttgcgtttagatgaaggagaacaggatgaacttgctttgtttctttcaggaatgccagcagctaacaacaggaacattgaagatccacggttaagtgaaaacgtttcagccagtgattgtctgaaggattttcatgtttcatctgtgtggggcgactcaaaggaggatatatcacatgggcatcgtcgggcagccagtgctagtgctgatattggtttttataaaatttcagttcatgatgatgcacagcagtggagttcctcaagtggttcttctggtccaatacacaaggtaccaagtttatcaggatttcttagatccatggaatccgtctctaggttgaagtggcctaggaatggttatagaaagctgaaagcagaggatcatcataaagaaactgatggtgaactacttccaacagctggattgaataggggcaacaatgcacgctgtgaaag

SEQ ID NO: 10461 - DNA, 490 bp, Glycine max
ggctcaaaataattttgggagaacaaaacacagaaaaataagaacttctcttcttgtaattacgtttggctccaactaatcggatccatcatttaattcaccaccttcccctgtaacccaacacagattacatacatcggattcatcgattctttccttctccagattccgattattattaattatcatattattgttattcaatattcatggcgtcgagttttgatcgatgggaaaaagatcctttctttaacgccgcggaagaagttcaggaatctgcagacaggatggaatctacgtatagaacatggattcatgcaatgagagatgcgtccagcccatggaactgtgatgaactccgccgagatctacaaactacccttggcactgctaaatgttagaggaatttgaacgggcagctaggtcaagttatagcaaagtttcaagtgaggatgcgagaaataggcaccgggattttattcatgccatc

SEQ ID NO: 10462 - DNA, 846 bp, Glycine max
gggtggtaggggaagggcaaaaggttatggtataatccgcggaagcgcaagtgaaggtgctggtcttgtcgtcgtacgcgtagctataagcgcgtgggcaagcgctcttgaatatcgctgagtaagccgatggcttgcacgtgtcgggcgtgccgtacgcgccgctgcagcaatactgcggcgagttgaacgcctcgcaggcgctcttgcacgccaccacgccctctctcccatccccgcccatcaccttcagctccgagggacacgcgccgttcaggtcccccacgcaccccgtcgcgctgcacttcccgccggagccaccctgcggcaccaccagcatcggcacgttgtagccgtcgacaaggcttacatcgaagaaatcgagtcctccggcgccgtccagggtgaactcggccagggtggcaggcggcgcggcgccgtttccggagcactcgagcttgccggagccgcagtcgccggtgacgcaggagaacttgccgctggttgagtcctgggagcataatgttctgccccagaaacggccaccccaagacgcgggtgcggcgattgtagtggacgcgccggtttggagaacgaagcctgtggtggaaagaggaggaacaccagcattggaaagaattcccggccacaccgtgtactcacatttgttaactagagtgaaagtggttgaaattacccctgatagtgatagatggagtgttagtaggaatgaaaataatgatagtgttgggcgatccataatcagagaaataagaaggcgaagaactgagagaattaattagttataattaacaattatccaagttcttcttcttcttcttcttc

SEQ ID NO: 10463 - DNA, 501 bp, Glycine max
gtttccggagcactcgagcttgccggagccgcagtcgccggtgacgcaggagaatttgccggtggagtcttcggagcagagtgttctgccccagaagcggccaccccaagacgcgggtgcggcgattgtggtggaggcgccggtttggagaaccaagccggtggttgaaagaggaggaacacccgcattggaaagaattcccggccacacggtgtagtcacatttgttaactagagtgaatgttgttgaaattacccctgataatgatagatgaagtgttagtaggaatgaaaataatgatgatagtgttgggcgatccatagtctgatctaatgtgaataaggaaaaggagaaagaagaagaagagagaaaattaattatatgaatgaatagtccaagttcttcttcttctaaaattaattttaacaagaatccttggagtgagagggggtatttatgcaagaaataaaaggagagggagggcgctcgagctcgagcctt

SEQ ID NO: 10464 - DNA, 308 bp, Glycine max
tggggaacaagttgaacaaagaaatcatatcatggcttcttggaattcagttccactccatgtctcctatgaagttctgggttgggttgcttttgcttgctggtctatcagtttctacccacaagtcattttgaactttcgcaggaaaagtgtggtggggctgaactttgattttgtgatgctgaatttgacgaagcactcctcctatctcatatacaatgcttctctgtacttcagttctgctgttcagaagcagtacagagacaaatacggtcagaatgagatgatacccgtggcagcaaatgatg

SEQ ID NO: 10465 - DNA, 461 bp, Glycine max
gaatgccaaagttggtcacgctctctgaaaatgcagcaacagcaacagcagcagcaggcatgaagagcaacatacacaacaccactccttcaaatatcatcatcatttctcacttctcatccttcactctcttcttctctttcttcccttcactctctctttcgcttcatggctggtctcatcgatctcaacaacgccaccgaggacgatgaaacgccgtcgtctggctcctcctcctcctcctcctcctccaccgtctgccttgaactctggcacgcttgcgcgggtccaatgatttcattgcccaagaaagggagcgttgtcgtgtacttccctcagggacacttggagcaacacctccacgattttccgctccctgcctctgccaacatcccttcccatgtcttctgtcgcgtcctcgatgtcaagcttcatgctgaggaagggagtgatgaagttta

SEQ ID NO: 10466 - DNA, 1013 bp, Glycine max
caaaaacttcagagttcaaagctgtgaagtaaaagctgctaacccaaattcttgtcagtggtaaccatgacagttggttccttcttcatcaggacctccagggttctcaactcctccaactttctgcttctctgcactctcagtggtggtggtgtagtggcatactcagaatcacaatcaggagctgaacgtcctagtattgaagctaatgagcctgccaaaaagaaagtggtggttcttggaacaggatgggctgctaccagtttccttaaggatctggatgcttcattatatgatgttcaagttgtttcacctcgtaactactttgcatttactcccttattacccagtgtcacttgtgggacagttgaagcacggagcattgtagagccggtccgaaacatcattaaaaagagaaaaggagaagtgaatttttgggaggcagaatgtgtcaagattgattattcgaacaaaaaggttttctgtcggtccaatattgacaacttggtgggaagtaacgaattttccttggactatgacttcttggttgtagcagtaggagcacaagtaaacacttttaacacccctggtgtcaaggagaactgtcattttctgaaggatgttgaggatgctcagaagattagactgtctgtgattgattgctttgagaaggctgttcttcctagtctatctgatgatgagcgaaggtcaaatcttcattttgtagttgttggaggaggtccaactggtgtggaatttgcagccgagctgcatgattatgtccaagaagatctaatcaaactatatccaactgttaaagataaagtgaaaataacattgattcaatctggagatcatatcttgaacatgtttgatgaaagaataagttcatttgcggagcaaaagtttacaagagatggggtagaagttcaaacaggatgccgggttgtcgctgttaatgacaaggatattacagtgaaggtgaaatcaacgggagatgtttgctcggtgcc

SEQ ID NO: 10467 - DNA, 387 bp, Glycine max
gtgaagtaaaagctgctaacccaaattcttgtcagtggtaaccatgacagttggttccttcttcatcaggacctccagggttctcaactcctccaactttctgcttctctgcactctcagagaaaaggagaagtgaatttttgggaggcagaatgtgtcaagattgattattcgaacaaaaaggttttctgtcggtccaatattgacaacttggtgggaagtaacgaattttccttggactatgacttcttggttgtagcagtaggagcacaagtaaacacttttaacacccctggtgtcaaggagaactgtcattttctgaaggatgttgaggatgctcagaagattagactgtctgtgattgattgctttgagaaggctgttctt

SEQ ID NO: 10468 - DNA, 1454 bp, Glycine max
tcgcccacgcgtccgcccacgcgtccgcggacgcgtgggtcaaaattgagtttaatgtttgatggaagaattttcagattttggttctcatttatctatataaataggtctatgatcatggagtggtaagacaagagtgattagggttttggtttggtgtttttcttaagcttgagatcaggaattaatttcagaggttcagagaatggcaacggattcttctaatggtaatggacatcaccaaacaacaacaaagcaacctcctttgccgtctcccctgcgcttttccaaattttttcagtccaacatgagaatcttggttactggaggagctggattcattgggtctcacttagttgacagattgatggaaaatgaaaaaaatgaggtaattgttgctgacaactacttcactggatccaaggacaacctcaaaaaatggataggtcatccaagatttgagcttatccgtcatgatgtcacggagcctttattgatcgaggttgatcagatctaccatcttgcatgccctgcctctcctattttctacaaatacaatccagtaaagacaataaagacaaatgtgattggcacactgaacatgcttgggcttgcaaagcgagtaggagcaaggattttgcttacatcaacttcagaggtatatggggatcctcttgtgcatccccaacctgaaagttattggggcaatgttaaccctattggagttcgtagttgctatgatgaggggaaacgggtggccgagacattgatgtttgattaccataggcagcatgggattgaaatacgcattgcaagaatctttaacacatatggaccacgcatgaatattgatgatgggcgtgttgtcagcaacttcattgctcaagcacttcggggggaaccattgacagtccaatgtccaggaacacaaactcgaagtttctgctatgtctctgacctggttgatggccttatccgtctcatggaaggatcaaacaccggaccaatcaaccttggaaacccaggtgaatttacaatgactgaacttgctgagacagtgaaagagcttattaatccaggtgtggagatcaagatggtggagaacactcctgatgatccgcgacaaagaaaaccagacatcacaaaagcaaaggaattgttgggctgggagccaaaggtcaagttgcgtgatggtcttcctcgtatggaagaggatttccgtctgaggcttggagttggcaaaaagaattaacttgttttcgctccttttatatctagtcaaaatattcagataataagtgggatggattattctattaagttttcctatttttccttttcataattatgatacttaggaagtaggggtacctgtattttggcttcctcaatcaagatcgtactcttgtttcaccacccattcacgcaatcatgcctttgcaaattttgccggt

SEQ ID NO: 10469 - DNA, 650 bp, Glycine max
tgattatgggcgtgtttattttaactacattgctcaagcaatgggtgctgaaccctagactgtccaagttccaggaactcaaactcgcagtttctgctatgtctctgacatggttgatggacttatacgtctaatggaaggggaaaacactggtccaatcaacattgggaacccaggtgaatttacaatgattgaacttgccgagaatgtgaaagagcttatcaatccaaaagtgcagataaatatggttgagaacactcctgacgatcctcgtcagagaaaaccagacattacaaaagcaaaggaattgctgagatgggaaccaaaggtcaagttgtatgatggccttcctctcatggaagaggatttccgtcagaggcttggagttcccaagagcaactaagctccttttactccttcatttcttatcatataatcataatgaatattttgatagtaacggggatgtggatgaacctgttaagtgttaagagatgttttatattgaaaattatggagaggaaggttaaacttgcagccggcaaagccaacttgaacttgctcttcaaattgatacaataagattgcttctccacccaacttctattggaaatgctgttgttgagatgagttgaaattattttttattg

SEQ ID NO: 10470 - DNA, 674 bp, Glycine max
gagcttgacggagatgccccccgccgtaagctcggaattcggttcgagcttcattgctcaagcattttttggggaaccattgacagtccaatgtccaggaacacaaactcgaagtttctgctatgtctctgacctggttgatggccttatccgtctcatgggaggatcaaacaccggaccaatcaaccttggaaacccaggtgaatttacaatgactgaacttgctgagaccgtgaaagagcttattaatccaggtgtggagatcaagatggtggagaacactcctgatgacccgcgacaaagaaaaccagacatcacaaaagcaaaggaattgttgggctgggagccaaaggtcaagttgcgtgatggtcttcctcgtatggaagaggatttccgtctgaggcttggagttggcaaaaagaattaacttgtttttcgctcctttggtgacatgttaaagtagaataataagtgagatgggtctggcccgttttcaaaattttcgtcattatagttattgttacgattatgatactgagaaagttggggggcctgaaatttggcatctacagctatcagattgctatatttgttgttttgtttagcaaaagactgcagcatgtcactacaaattttgctgtttgtaagacgattgaattgaaattctttccttt

SEQ ID NO: 10471 - DNA, 427 bp, Glycine max
gacataatagtgcattgcactcacatcgcatccccttgcttgcttatttcattactcatccccagttcccgattttgcttaaccttcaattccaatcgaattgaacgtcagaggtccttgcaatggcagggaattcttctgatgtactgtcgccgaagcaacctcccttgccatctcccttgcgtttctccaaattctttcagtctaacatgagaattttgattacgggaggagctggattcattggttctcacctagtcgatagattgatggaaaatgaaaaaaatgaggtcattgttgctgataactacttcactggatcaaaggacaacctcaaaaaatggattggtcatccaagattcgagcttattcggcatgatgtcactgaacctttgacgattgaggttgatcagatctaccatcttgc

SEQ ID NO: 10472 - DNA, 330 bp, Glycine max
atataatcataatgactattttgatagtaactgggatgaatctgttaagtgttaagatgatttatatcgaaaattatgtagaggattgcttctccacccaacttctatgggaaatactgttgttgagatgagttgaagttatttttattcaaaactctaaggtgttacaaagttctctttcaactttgtttacgcattgtatgtcagggtaggtgtgtcgtaatgtgtttctctgtaccgaatacaaatgcagattgttgggtgggttcatctttggatttgaggaggtctggatactcctatagaaataaagttatgattttttttccc

SEQ ID NO: 10473 - DNA, 469 bp, Glycine max
cttaaaaacacaattaatcaacctcagccactgcatttacgttttctcattaatcctttcactttgcttgctactactctaatatctatatccctgtatacaatttttcccccctctctctctgtctaacaaacaggatttgagcttcagtgggtttttttttttttttactatggcaacgaattcttctaatggagcaacaaagcaacctcccatgccatctcccttgcggttttccaagttctttcagtccaatatgagaattctggttactggaggagctggatttattggctctcacctagttgacaaattgatggaaaatgaaaaaaatgaggtcattgttgctgacaactacttcactggatctaaagacaaccttaaaagatggattggccatccaagatttgagctaaattcgcatgatgtcacagagcaaattgtgattgaagttgatcaaatctatcat

SEQ ID NO: 10474 - DNA, 978 bp, Glycine max
ggaaaaaatggcgatgctcaagagatgctgtagtagatcagaagtattgcgaacggcacatgaaccgaggacgccatcgttcaagaaagcctgtggaaggccaatcaggccatgccctcaccaccactaacacacctaatgcttcctcaaactcaaccgtggtgcccggcaaccacaacaacaacacctttgcacacatcaatgtgcaccaccctcttcctcctcattcctctccagccaataccatcaataggatgtttatgagtaataataaagagaacaacaacacgagtgagaggacgaaggatggccttgcccttcccatgctacctcctactcttgagctgaaaccaaaggacaacaacaactctttcatggttcataaacaccaagaaccatatgatgaatcctcaaggaacaagaatgagtttggactcgtcacttctgattccttgcttaaccctacacagaaaagaagctttgattcttcttcttcacaaaaggatgattcttctgagtcccaacaacaacattccctcaggcacttcattgatgactctcccaaaccacagtctcatcataatcatcatcgttcgtcgtcctatttggcctgaactcgacaacatgcagtcagacaggactcagttatcaatctccataccaatatcttcctcagatcacttcatgtcatttgcaacttcctcgccctcgaatgaaaaactcacgttgtcgccactaaggctttcgagggagttcgaccccattcaaatggggttgggagtggggaagtgcccccaatgaagcaaacactaggcaagccaattggattccaatcacttgggagagttcaatggcgtggtcctcttggagaggttttgaaccttagtaacaataacaacagcatgctagtgatcaatgtggcaagaacaacaacaacacttcagctctcaacctcatgaaagatggatgggacaataa

SEQ ID NO: 10475 - DNA, 738 bp, Glycine max
gaagttaaggagagtgctttggtgtggcatcatcaagatgcagaccctgattttggttcttgccaagccaaagaattgttggatcacttggaaagtgtgcttgctaatgaaccagcagctgttacgagaggccagcatattgttgaagttaagccacagggaataagcaagggtttggtagctgaacaggttcttatgaccatggttaatggtgccaatccaccagattttgtgctgtgcattggagatgataggtccgacgaggacatgtttgagagcattttgaggacggttacgtgcccgtcattaccatcagctccagagatctttgcctgcactgtgggtaggaagcctagcaaggccaagtattttcttgatgatgcttctgatgttgtgaagttgcttcagggccttgctgcttcatccaatccaaaacccaggcttcttgctcattctcaagtctcttttgagagcacagtttgagttatagacaagttaagacagcatttattggtcgtctcctgtgaatcaatgaaatttttggttattaatcttaacctgacaaacaaatggtgcggatctaattcttttttgggctcctgaaccggtttgcgtggcatcgatctgggaggttttttgttaaatagtgcggttcattggtgcctaacaattcttctcttgtacatggtaacatcaattgttatctttgctggtgccaccgagagatttcgttgtccc

SEQ ID NO: 10476 - DNA, 401 bp, Glycine max
gtccacccttctcctcagaagccatggtcgtaaatctctctccctctccctctccacctttacattccagttccataatcagattggcaaattcaaagtcacccatttcagaaccatggttgagactcaaaacccacttcccaaaaccactcctttccccaacaagtgtgaacttcacttgcaacaagaatcaatttttgcacggtaaaaacaggaacaggttggatttcaggacttggtctattgctggttttgattatggaaactttgaagggcctcagtctgtgcttgaggctgctgcagtgttgacagcaatcattgttgtgcatgagagtggccacttccttgctgcttctctccaaggaatccatgtgagtaagtttgctgttgggtttgggcca

SEQ ID NO: 10477 - DNA, 1106 bp, Glycine max
ctcaaatcctatctcgtataagaggaacaaaacaaccacccaactaaccctaattcaacttttccgatctgatcacttcgagtaaaaattccaaatgagtcgggcacaggatgcaaaccgatcattcttcccttttggaaatccttttaggatgatatcacctaaaagccctaaaatttcttcacagctgttgttaattctacatgcttttgaagcaactttggaagagaggctgaaaaagcttattcccaagagcaaggatgagatcctcagcttgtcttggatgactttggctatgcagtcactttgtgagagccataatgacattaaaaccatcataacagagcttgagcttcctgtacatgattgggatgagaaatggatagacgtgtacttggacattagtgtgaagttgctagatatatgcattgcatttagctctgaattatcacgcctgaaccagggtcatcttttacttcagtgtgcattgcacaatttaggttcttcctcttcagagcagtatgttcgggcatgttcttcacttgatggttggaaacagcatattggttctggaaaccctaggattgagaaatgtggcagcattttggatgatcttctgcggtcacttgatctgccaaaggttaaaaagtctgctaaagggaaggttttgatgcaagctatgtatggagtaaaggtgcagacagtatttttatgcagtgtgtttgctgcggctttttcgggctctacaaagaatatgtcagatttggatgtggctgatgtatattcttgggctccaacctttaaaagtttgcaagatcttgtaaatgaggaaattagagtaagattttcaagtgggagatttactatattgaatgagttggaagtagttgattcctctgtgaaggaattatatcctattatccagggcattgcagataccattgagacagaatcacttgcgaagattgttggggaattaagcagagcaacagagaagctttcacaaggactagatcttcttacaaaggaagtcgatagctttttccaagtggtcttgactggtcgtgatgccttgctatctagtttgaggtcaggtgcactttcat

SEQ ID NO: 10478 - DNA, 444 bp, Glycine max
tctcgagccgaatcggctcgagaaaacaaccacccaactaaccctaattcaacttttccgatctgatcacttcgaggtgctttctttcactctttgatcatctcgctttccccttttcctcaaccaaagttttcgatctttcatttatttatttattctctgaaaatctatcgaaatagaattgcctacccccaatttttgtcctttagtggaaaatctgagaattgctcaagtttttcgctttgattgattttccagctactcgatctattgtatttgtaaaaattccaaatgagtcgggcacaggatgcaaaccaatcattcttcccttttggaaatccttttaggatgatatcacctaaaagccctaaaatttcttcacagctgttgttaattctacatgcttttgaagcaactttggaagagaggctgaaaaagcttatt

SEQ ID NO: 10479 - DNA, 1010 bp, Glycine max
cccacgcgtccgcccacgcgtccgcccacgcgtccgcccacgcgtccggttgagaacgccgctatgtgacccataagggggtctgcgtgtaaagtcccaagcatttgtcatcactcaaagagtggacaagtccggtcaaaattgctgcaccttggcctgcaccttccttgctccgtcccttctttctctaattcttcaccctcttaattaaaaccttctccctcgttccccttgtgaccacaacacacaacaacacatcacatatatagttatttcttttgcaacaaaccctcatatattataagctgagccaggattagaattggatcattcattccaacatgggtttttcctcaaaagaagagaagtccaaaagaatattgaggggcttgaagactctcttcttcttgatcactatggttatatcgcttcttcttttctccgccccggttctccttgttattgccgatgcacttgttccttctgctctgctctcctcgctttctcaatcttctttctccttggaaactctcgcttcccatttccacaactacgattttcgatactctctcattgatattccccttgtgtcaataatacgatccttcatcatcttctgtgtttatagtttgtgtgatggaccaaggctttcgcatggaccttatttggggatcacgaccatgtgctctgttttgtctctgatgtttgtgtcgttcaaagcagtttacatcttcagtgtttcgggtattgatcgaagtgggtatgttcgtgccaccgaaatagctctgttcgtgtgttcttgtgcgttggccgtggggcatgttgtggtggcctacagaacaagttgcagggaaagaagaaagcttttggtctacaaaattgatattgaagctatttcagcttgcaaaaatgggtatcctaggtatctgaagattcctcaagaagaaagaatcaaatgaagtcactgtgccactacaacattaaaggatatatcaatatcaatttatacg

SEQ ID NO: 10480 - DNA, 604 bp, Glycine max
aggattattataacagaggtattgggtggggaaatccagtttgacttttatcaccggtggtttgatgcaatttttgtggctagtgcattcctttcacggcttttactttcggcacattatacatctcgccaaattgacaaacatccaattgattaacaggaaacacacgccgtagatgcttgtatagtttttaatgccgcgggaggtttgatatcaggccagtgaacatatatgtttaaatcttccagatggatgcatttgaattcatttgatagttgatagaggtcgttcaatttttttatgtgccagtgaatagcttgttagaacatctgatgctactggagctaatcaccagtgagagggttgatattgttatagttaatatcaacagatgcgcattgtgcaaaatcttttagtatacccatttgtttttgttgattttctgagcagaaatattgttggacaatatgttgaatgtagatttgcttttgcattgttaagtatagaatgaattggatgagaatagtttttgcacatgggattggtaccataagaacagatgaatagttattggcgattggtaattttggattatcagtggtcc

SEQ ID NO: 10481 - DNA, 424 bp, Glycine max
agacgacagaagggcatatcgtaaagcaaatttccagacctggtctggcccattggtggaacctagtgtggatgcaccaaggagaaagaagaacatggcagggaatgggcacagacaatcaaagaaggattcttatagatagaatgtgtcaaagagtattagaaaataactaaagaattgcaatataacaccaattatttatcacaagcattggtgaagctacaaaaatgctgctgatttctttctcaattgtcaaaggtttattttctatcttgtataacaatcacccataattttcctcccttcaacctctgctttaatcatgggaattgtgtagaattttacagactttattttttattttttaaactttggaatatcatgtcttgctccttattcaacttctagtcggttatgtttatcc

SEQ ID NO: 10482 - DNA, 1348 bp, Glycine max
ctttcaattatccaacagaactgaagatatcgtagctggaaacgtctagcacccacaaatgggtaactcccatggacaccggcatcgcaaacacggtaactccgttcctcccaacacggttcctcctccccataaatacaatcctcacccaaccacctccaattccaccatgctttctcttccttacacccacgtcgacaccaccctccgctccctcgccgcccaagccgagggcttcggtcgcttcgctatcggcggcctccacggtccccttcaccccgtcacatctctcgcagatgatggaccggggtcactgcgtgacgcgtgtcgcagaaaagaacctttgtggattgtgttcgaagtttccggcaccattcaactctcctcgtacttgaacgtgtcgtctcacaagaccatcgatggtcgtggccagaggatcaaactcagcggaaaaggcttgcggctgaaggaatgcgagcacgtgataatttgcaatctggagttcgaaggaggcatgagggcatgatgttgatgccattcagatcaaacctaattccaagcacatatggatcgatcgttgcacgctcagtgattttgatgatgggctcatagatatcacccgagaaagcacagacattactatttcaaggtgccacttctctcagcatgacaaagccatgctcattggggctgatcccacgcatgttggagataggtgcatgagggtgaccatacaccattgttttttcaatgggactcgacagaggcaacctcgtgttaggtttgcaaaagtgcatctgtacaataactatatcagaaactggggcatatatgctgtttgtgctagtgtggaatcccagatattctcgcaacataatatctatgaagcaggacagaagaaagtggcatttaagtaccttactgagaaggcagcagacaaggaagtgggagcaactggtaccatagggtctgaaggggacatatccttaaatggtgctcaaaaagggttaatgactgaggatgttgggtgcaacatgtttcaccccagtgaacactatccctcttggacagtggaagcccctacagacgatctgaaacagattcttcatcactgcactggatggcaatctcttgctaagccagcagatcaaacactatgagcacaatagaagcttaagctgttgcataaatgcaggggtaacagaactaacatcattgatctcctgcccccccaaagtctattctagcaagatactttcctgtgtatataaaatatagattagtagcggattattaaatattaataagtactacacgtttgttaaactattatggctattgacaagag

SEQ ID NO: 10483 - DNA, 445 bp, Glycine max
tctttttcttacacccacgtcgacaccaccctccgctccctcgccgcccaagccgagggcttcggtcgcttcgctatcggcggcctccacggtccccttcaccccgtcacatctctcgcaggttcattaatttttcacctcttcccccaatcccctcttaattcatgttgaagatcccacatcggccaatagtacgatcaaaataaagcatataagtagaggacaatcctcgtcttccaagctagatttgtagggttgatttgtagttcattggttagagctacctttaatgattgcagatgatggaccggggtcactgcgtgacgcgtgtcgcagaaaagaacctttgtggattgtgttcgaagtttccggcaccattcaactctcctcggacttgaacgtgtcgtctcacaagaccatcgatggtcgtggccagaggatcaaa

SEQ ID NO: 10484 - DNA, 525 bp, Glycine max
ggtgttggtccacacatatatatagagcagaaagttaaggtgttgttggcgtcgcttcagatttcaaagtgtgacacttcgaagaacaaaaaaagaggccaagtcctcctccgttccagtggcaatggatgcaccgaatccttcttcttccggcgcttctccgttcctcgccaatcttccctctcgcggcctcttctcttccaccgtcgtttcttccaatccgggtggaatgcgggtctatgtatgcaatcatgatacctcaccaccagaaggtcaacatattaagacaaaccaacaaaacatactgattagatcactcaccctcaagaaacaaaggggtgattccagctcaaaggatggatctgatggttcaagaaagaggaatgctgaaaagggtttggaaagagcatcagccaagaaaacaaataaccaaataaattccagacaagagggatcaaacagtcaaacaaccactagggacttccacaacctgactgtagagaggcttcgtgctcttttgaaatc

SEQ ID NO: 10485 - DNA, 528 bp, Glycine max
cgcaccgcaccgcaccgatggaaacacaatgatccaaccctaacccaagcgcctcttacctccaaggtcttccattttcttcttaattcctcttccatatcccctcttttctttctctcatctattttattttcttcttttaattgcatatatgtcaaaaacaattttctgcttttttttttcttcctaaaatcgttatcgcgaaaaccctaatcggcgacactttaacacggcttcccttcaattcgagttgaattcaccatgggttctccatacaattgtggtcaaccctgtgtattggatctggggtccttcatgtttgcgacgaaattagggtttactcccaatttcgccccaaattttgggggttttcgtttctgattgttcaatttcatcacccgaccccccgtagaacctgggtttcttcgatttgtgttaaactcgagctttttggtggaaaaatactcgctttccttttccctttgttgttccctttccctgcaattgaaatttgtaataaaggaagct

SEQ ID NO: 10486 - DNA, 741 bp, Glycine max
tgcgatccctcccaagaacggctctgatagctctttggtgcagcaagcggcgtaggaatatcaaagacaaagccattcgtgcctcatacctcatttcatcacacccattcatctccatcacaacacaacatacatacgaaccagatccaaccgcaccgatggaaacacaatgatccaaccctaatccaagcgcctcttacctccaagttttgtgattgaagctgcgatggaggaagagacctccgatgcaatgaaccttgatttgaatctgggcccaggcccagaacccgaaactgggcccataagcaatgaagctgtgaacttggacgattggataggggagcctcttcagagaatcagcgaagctgtgaggtatagggcacggcaacggtggagatggcgccaacttccgctaccgcctcctgaatttcatgctcactttccaactgaagctacgcggcattttcaaataccacctgaggctcgtaatatctccgtggaattgaaccactttttggtcaattctggcaatggaagcgccttgcaggccggcgaagggagcgtggcggccgaggagagaatggaggaggtgccgaaggcgtgtgacaatgtcaatggtgtggcagaggatgagacttcacagaagaaggaggatgtagaaaagggtagtggcaatgatggggacttttttgattgtaacatctgtttggacctggctagggatcctgttgtaacttgttg

SEQ ID NO: 10487 - DNA, 332 bp, Glycine max
cacacccattcatctccatcacaacacaacatacatacgagccaggtgaagctcaggttcttcttcctcctcacttcccttttccattttcattttcctctataaacccctcccctctctctctctctagatccaaccgcaccgatggaaacacaatgatccaaccctaatccaagcgcctcttacctccaagttttgtgattgaagctgcgatggaggaggagacctccgatgcaatgaaccttgatttgaatctgggcccaggcccagagcccgaaactgggcccaatgagcaatggagctgtgaacttggacgatgggataggggagcc

SEQ ID NO: 10488 - DNA, 418 bp, Glycine max
  unsure (1)..(418): unsure at all n locations
ggcccactcccagaatctactcttctgttcttgggatgggtttccttcttcaccctcttccctgaagccacataaccccatggccatggcactcgacgcggcactctggatcgtgaagatgacgtggattgctctcagtggctggatttcttcttgtttaactgtcgctgacgaattcgcctcttctctacgctctggcgatattggcccctttcatgtgggttgatccatttacgctctctttcctccaagatgggtactttacttattgggtatgctgcaagttttgtaattttatattgcccttcaaaataggcttggtttgatgtagtgggtatgaaccaaaatctctctcttttttctttttttataagtctggcttgtgtgtttttgagctggngtgaagtgggtggtcatg

SEQ ID NO: 10489 - DNA, 369 bp, Glycine max
gggctttctcttcaatattgttacctgtgcaagttatacggctgagatctatcagtggttgggattcaacattgcaacacaaactgtggcaggctatattttccttgtggttgctacttttatcatgaccaattgggctttagccaagcacaggcgtttaaagaaggtatgcctccttaccttttatatttcagctcactaatacggcttacagtcttagaaaaaatatctaagagccaaacatatactccacctgaactttcttgtaaaggaataacttgatcgggctttttcctaaactgtctggttttagattttgaggatttcaaagttttgtggcttacttgattttcagactccatcatgttg

SEQ ID NO: 10490 - DNA, 359 bp, Glycine max
gacacaagaagtcatcttttattgtacgccaaagaaaagaaaagaaagaaatcatagtttttttgggttgtgtgtgtcttttggtggaggaatgcttgtcacctactccttttaagttcccccaaaaacacttttgtgagtgagagaaagaagaagaagaagaagaagaagaagtagcataagtgatggatagacacaaatgcaagctttgttcaaggtctttctccaatggcagagcccttggtggccacatgaaggctcaccttgctactctccctctccctccaaagcctcactcttattcctcttcctctgactcagaacaagaacaagaacaagaatctcttaattatgcttta

SEQ ID NO: 10491 - DNA, 347 bp, Glycine max
ggaacacggaaacagataagatttaagacaatggaggattaatctgaatttaagtcccgctggtctttgtaattactacgccatatcaagcaaaatcgaagaaacgcgacgatccacttgcacaaaatccgcggtggaggcagatcacatagatggaggcacagtctcagagcaacaatcctaaccctaaccctaaccctaaccctaaccctaaccctaaccctaaccctaaccctcatcggaataattcggtagcgtcatcgatgccgctgtggccaacgatcgacggcccattgggcctgtcggaggaagagtcagtgggctacgctcgcaggttctacactttc

SEQ ID NO: 10492 - DNA, 391 bp, Glycine max
gcagccgtcgaacgcctaatcggttgcctcctgctcctccgggttcttcaggttacaaatattaacaggtggctgactagtgattgcttgacagttactgtttgatacatttttggagggtgaggctgctcccaccccatttcatacggtcatccccaattctttgtttctgccggtatatttaggtgaggaaatgtttgtgtaaatagaagacgactatagtttattagtataagttttctgggcattcgtctcattatccggaagtttggtatcgaggtggacttgattacattaatcaggttttgcttttttggtttacaaaccattaaccaggtttggcaatccaaaatcctttcaactttacaacctttaatggttcccttttccc

SEQ ID NO: 10493 - DNA, 583 bp, Glycine max
agcaagcagtctccagcaggctctccctccatgccacggcggctggatgcctcggagcagccttaatttcatcattcacataccatatgctccgggaactcaactacaacgaccgtgacgtgatgagtctctgggctgtctcaatctttagtggcctaatttggcttgttggggttttgcacattgtcacagccataggaagaaccactgattccatctcattctcctcaaggctccaccctttctccatcttcaagtaccctcatgcaattggaggccttgcaggggttttcctctcctcattcaccaccatgtcaattttcactggaggagttattttcatagtgggacaactctgcattaagccactgcacttgctctatctctggctaacctacttcctttttcctcttgtttctttgtcactgctacaacccttgttgcacgtgatcaagatgaattctgtgaagatgcaaattgtggggtttcttttgtcactcttgtcatcagggtttggattctactacggtcacagtcactggaaatggggccacttggtgctaattggtgcaattcaaagcac

SEQ ID NO: 10494 - DNA, 834 bp, Glycine max
accacgcgtccgcccacgcgtccgcaaagtccaaccaatacaaatctctagctctccctccctctctcttgtatccctttatatgaatcttctcagacacgttttcgagagcccctttttccttatcatagcctcgcagcagctgatatctcatgttgttcttgttcctaacaaagtagcattaaaaaccatggcatcttcaccggacaccagcaaaaccataaagctgatgcgttacaacagctacctccgcagactcaacagcttcaaactccttaagacatccttcatcctcctcctcctcctctacaccctctccacccaccacctcctcctctcctccgccttccacggccccgcatgggagaatcaggtccgccactccgccctcccccgccgcccccacggcatgtcggtgctggtcaccggcgcggcgggcttcgttggctcccactgctccctctccctgaagaagcgcggcgacggcgtcctcgggctcgacaacttcaactcctactacgacccctccctaaaacgcgcacgccagcacctcctcgccaaacaccaaatcctcatcatcgaagccgacctaaacgacgccccgttgctcgccaagatcttcgacgtcgtttccttctcccacgtcctccacctcgcagcacaagcgggcgtccgctacgccatgcagaacccccagtcctacgtggcatccaacatcgcggcttcgtcacccttctagaagcttccaaaacctccaacccccagcccgccatcgtttgggcctcttccagttccgtctatgggctcaataatgaaagcccattctccgaactc

SEQ ID NO: 10495 - DNA, 364 bp, Glycine max
tattaaatgtccatgcatgtgtgtggtagtgagaaggattgagaaaaagaaagtggtgtccaagcaatggcaattatctctggtatcccttaatttatatgaatgttgtcacagaggcctttcttttccttatgatgttgctcttgttcctaccaaagcagcaacattaaaattaaaacatggcatcttcaccggacaccagcaaaaccataaagctggtgcgtaacaacagctacctccgcagactcaacatatccttcaaaatcctcttcctcctcctcgccctcctcctcctttacactctttccaaccaccagcaccaactccccctctcctccgcctgggagaatcaagtccggcaatc

SEQ ID NO: 10496 - DNA, 564 bp, Glycine max
atttctttcaaccactcgtgttttttaactaatgctctcattcattcatgttttttcataatcctatggatttgagtcccttttgtctcactcgctctctctgatggggtcacggtcaccaccctatgcaacttgccaaactcattctgtgtaatgaagaagcagaactactgcccctcacactgaacttgagagttttcaaggtgtttgataatagtatggtttggtatttttgaatttttttcccctttgatctctctcgtgaaacatgttttgcttctaggtagcccctttgatgcacatatagttgagttagtgaagggagtttgaggaaagaaaaagggaaagttcaaagttgttgtctttcttgagttttttattttttcattgtctcagctttcacttaggaaaaggaaggggaaaggtggaaaagggaaaacacggagatgaacccttttgagaatgaggattgtgagagttaagttgaagaacacagaaacatagaagagtctagtagctgaagtgaatggagaaagaagagaaaaagaagataaagggaaacgt

SEQ ID NO: 10497 - DNA, 267 bp, Glycine max
gtcccttttgtctcacttgctgctctctctgatggggtcacggacacatcctatgcaacttgccaaactcattctgtgtgatgaacaagcagatctgtgccccctcccactgctcttcatggctccttcgccgcctggctgagttgatttcagttgcgaaagtgaagggaatttgaggaaagaaacaaaaggggaagttgttgtctttttgagttttttacattctctcagctttcattaaggaaaaggtggaaaagggaaacatgg

SEQ ID NO: 10498 - DNA, 377 bp, Glycine max
gatggttgactggttgttttttaaattgcatgaaacatttatttgttcttatagaaaaagttacaagtaagtcttcactgcaagtagaagatattggatccagttccagggttgaactccatacgattattttttaatagaaaaattgactgtgacgtagctgtggaggacacgattggtaaagtattgaatccttcctgcgactcttttctcattggttctctgtgttctccaaccacacctcagaatctcttgtattattattcaaccaatcaatggcttcttcaatccctaatggacctccctctgcgttgaattcccagttctacgatgatctcagaccgccacagaggaccttcaacttttcctttcttcaa

SEQ ID NO: 10499 - DNA, 645 bp, Glycine max
gaagctggaattggtcagcaaaatttttttaccgcatatgatcgcgggggggggatatgtctacttgggaccgctcaacgccacctgaggaagttgcttttgagggaagcacatgaacaagcaaagcataagtcaatggactgcttttaatgctattgccataagagttggttcagccaggaagacatatgaggccctccttcttaaattcttcaaaaaggcatttgaggattataggaaagatgctttcatggaagcagatctgcagtgctctaatgcgatacagtctatggaaaaaaggctgagggcagcttgtaatgcttctgacgcaaagattgataatgtcgctaaggttcttgatgcccttttatctgaatatgaaaaaactattcaaggtccagggaagtggcaaagacttgctgtcttcttacaacaaagttttgaaggccctgtgcttgaccttgtcaagaggctaatagctaccatcgaatcagagaagaggtctcatgctttacaatatcggtctattgaagaaaaagtggaccttctgacaaaacggctggaagccactgaaggtgaaaaatccaactacattaagcgatatgaggatgccatcaatgataagaagaaactcatggatgaata

SEQ ID NO: 10500 - DNA, 360 bp, Glycine max
ggaataagatagctgttggaattgctcatggattggcttatctccattatgactgtgatcctcccatagtgcaccgagacatcaagccaagcaatatacttctagactctgatatggagcctcacattgctgactttggtattgccaaacttctggatcagtcttctgcttcaaatccttccatttctgttccgggtacaattggttatattgcaccagagaatgcttatacaacaacaaatagtagggagtctgatgtatacagttaccgggtagttttgcttgagctgataaccagaaagaaggcagcagaatcagatccttccttcatggagggtactatagtagtggattgggtta

SEQ ID NO: 10501 - DNA, 709 bp, Glycine max
gggtcactactttgcagcacactcttgactcttaactctccctcccgagtttcatggcttcttcagggacaagagcagcctcaggcttcagcttctcagagatctggctcttgatagtagccacagcactcatctgtggctttctcgggtacatagtttatgatgcaatcatggccactgcttctgagttgctgcaacgtttgctggtaatttctccactgttcttgatcatcattgttcactggctctccactgcaacccaaataagcttccccatgccaggatctgagcctagtgccatccacagagctggtggttccccttggggtgttgcctttgttcttcttctgcttttccttctcatttcttaccaaccttccctgcatgaccttatttcttagctagcatgcactcaaggttttaaatacggtcgcggtcatattcgttgatatcggataaatgcgaccgatgtggttccaatttcgattgtgttacagtcacggagaccttttttaaaaccttgcatgtactatatagtttagtgcatgtcacttttgtgtaggggtgtggtgcttcttattttagagttgatatgggtacatttggttgctgtactgtagctcataatggacctgttaatttctatgtgaatttgggtgtaaaaacttgcaatgtctctctctctaaaagggccttttgccctatagcc

SEQ ID NO: 10502 - DNA, 567 bp, Glycine max
gagagcttccaagattgcagccgatttcactccctctctcctctctttcactctctcgaatgcgggtggagagtgcggaccggaagttctgccgtgtgcgcgacgtgcggcgtacagcggcagcgcgagccagcatcaacaggagaactgcactccagaaggttgtgcggtggcggcgtacggcgtacacgagcaagagaatcgcgcgtgcgaagctggcggagtgcgggttgacgcagtgggaacacgggttgacgaggtgggagcgcggtggagaaccacgaggcactagccaggtggctacattatttgatatatactaatgccactatgccagggacagaagtcaatcatatctgtcattatccgatcattaaggatgtctggaagtcattgatgacctaacaactcaaattagtgacaaaaatccataatattgtgaattcatctacttttctttttctttctttggataggctgagatgctaattaataatagtattatgttattataaaaacatgtgacaagtcccctggggggccatggaactattttgtttttagccc

SEQ ID NO: 10503 - DNA, 1521 bp, Glycine max
  unsure (1)..(1521): unsure at all n locations
ccctcctttcttttactagcacctagctaggactcaattctttggttacttaatagtagttcctttttaactatctttcttcaatggctgactcagcctcagcctcagcctcttcttccagaatgtggtgctccatccccgaacgggttcagctgcatgcggccatgttggccctgcagtttggctatgccggcttccatgttgtctcaagagctgcccttaacatgggcattagcaaacttgttttcccagtctaccgcaacattattgcttttctcctcctccttccttttgcctacttcttggaaaagaaggagagacctgccattactttaaacttcctcttacagttctttcttctggcacttgtcgggattacagcgaaccaaggtttttacttgcttggcttggacaacacatccccaacctttgcatcagcgattcagaactctgtcccagccattacatttctcatggcagtcatactcaggatagagcaagtgaggctgaacagaaaggatgggatagcgaaggtggcgggaacgatattctgtgtggctggggcgacggtgattacactatacaagggtccaacaatatatagcccaagtccacctctacagagtgagagctcagtagtagttgagtttgggacactctcatcactgggagatgcaaaggggaagaactggacccttgggtgcctctacctcatagggcattgcttgtcctggtctgcttggcttgtgctccaagcaccggttctcaagaagtacccggctcgcctctctgtcacttcctacacctgtttctttggactcttgcagtttctcgtcattgctttgctccttgaaagagacgcgcaggcatggcttttccactctggtggagaagctttcactattttatacgcgggagtggtggcatctggaattgccttcgctgtacaaatatggtgcattgacagaggtggtcctgtgtttgttgccgtctatcaacctgttcagacttttgttgtcgccatcatggcttccattgctttaggagaagagttttacttgggcgggatcattggtgccgtgttgattgtagcgggactgtaccttgtcttgtggggtaagagtgaagagaggaagtttgcaagggagcagcttgcgattgcatccactgagcatagcatcataaggcccgcaagccacgccaaagcatcacttgctcagccactcctttcttcatcaacagagaatgtttgaacaagatcaaaattccaacttcaaaccacacaccattttcttggtgagaagaaagtaaagaaaaaggggaaaaagataccagctatacctactagttactactgctactactacattatgtcagcaagnttgtgtggtgttggacccggtttcatcttttccttttctttttttttatttaaatcaaatgctnntntagtangtcatttagaatatgagagattngtggaatggtgtaatgtggatgccacttaagtggctagagctg

SEQ ID NO: 10504 - DNA, 730 bp, Glycine max
aatgattccgcgttctagctagagggttaaaaaagttataaatttctttcataggatgttgaatggaaggtgccgtgcctcctttgatgtttttctctttaggcacactatactttattacaaaaaaagaaaagtcccttccagaatttgattgataatggctatgtgggtcaaatttgtgatgttattataggatcataggagcagtgttgatcgttgtgggactgtactttgtcttgtggggtaaaagcgaagagagaaagtttgcaaaggaacatgctgctattacgtccaccccagagcacagtggcatcaggtcctcaagccatgccaaaacatcactcactcagccacttctcccttcatctacggagaatgtctgatcaacaaaaccatgacttcaagctggggcaccattttctgggagagaaaaagggaaaaaggagataaaaagaagaaaataatacccagttatacattattactactttgtgtcaggaagcttgtgtgtgtacgaaggggttttcatcttttttattttactttattttggttaattcacatgctttctttctaggacttttagaatgagggttttctatgggaatcattacaatgatggatgccacgtaaaagcgggctttaaagactgaaatcccatatgcttttatatgttaattaatggtttgatttacaaaaggagatttttaatttaaaaaaaaaagacgaa

SEQ ID NO: 10505 - DNA, 676 bp, Glycine max
acgagacccagctcgcctctctgtcacttcctatacatgtttctttggactcatccaattccttgtcattgctctcatcgttgaaagagatgctcaggcttggattttccaatctggtggagaagttttcactattttatatgcgggagtggtggcatctggaattgccttcgctgtacagatatggtgcattgacagaggtggccctgtgttcgttgcggtgtatcagcctgttcaaactcttgttgtcgctattatggcttcccttgctttaggcgaagagttctacttgcgcggcatcataggagcagtgttgatcgttgtgggactgtactttgtcttgtggggtaaaagcgaagagagaaagtttgcaaaggaacatgctgcaattacgtctactccagagcacagtggtatcaggtcctcaagccatgccaaaacattactcactcagccacttctcccttcatctacggagaatgtctgatcaacaaaaccatgacttcaagctggggcaccattctctgggagagaagaagggaaaaaggaggaaaaagaagaaaatactacccagttatacatcattactacttcatgtcaggaagctagggcgtgtactaaggggctaccatctttgaatctacaattatataggtaattcacatgctatctttct

SEQ ID NO: 10506 - DNA, 456 bp, Glycine max
gaccacttcctactacacaagaactagctataggcctcaattagttattatattaatttggtctaagtagttgttattacttgtgtagtagttcttctccaatggctgatttaggttcagcctcttccaagagaatgtggtgttccgttccagaaagaatgcagcttcacttggccatgttggccttgcagtttggctatgctggattccatgttgtctcaagagctgcacttaacatgggcgttagcaagcttgttttcccagtctatcggaacatcattgccttgcttctgctccttccctttgcctacttcttggaaaagaaggataggccagccatgactttaaacttcgtctgccagttctttcttctggcacttgtcgggattacagcaaacccaaggtttctacttgcctagggttgagaacacatcccctaccttcgcatcagcaata

SEQ ID NO: 10507 - DNA, 362 bp, Glycine max
ctcgagccggatcggctcgaggcaatacagaactcagtcccagccattacatttctcatagcagccatattgagaatagactcggtgagattgaatcgaaaagatgggttgggtaaggtggcgggaacagtgctatgtgtggttggagccaccgtgatcacactatacaaaggtccaacaatatatagcccaacaactggtgtgaacataaacaacacaagagtgacacaagtgtttgaattggggtcagtgtcactgggagatgcaaaggggaagaactggaccctagggtgcttatacctcattggacactgcttgtcgtggtctggttggcttgtgttgcaagcaccggttctcaagaa

SEQ ID NO: 10508 - DNA, 910 bp, Glycine max
agggggacctacagacacaggcccaacttgaacaccctcaagcacttcggtcaaaaattgattcctgcccgcctgcttgattgggagaattttcaacaatcgtcagagatcatagatgttttgagtactattcattcagaaatccccagaggggtggttctaggagattatgtgattgaatatggggatgatgatgctagagacgagtttgaagacttccctggagatgagggcaactggtggacctcatgtattctctatttcgacaactttagaagatccagaaatagaagaaggacaagagtcagtcatacaagaagggataatcgccgtttaagttatgatacttcaaattctgatgaaggttctgtagtatctatggagtatgcagattataggatagaagagattgatgatgagtttgttagtactagtggctcttcaaggggtagcagtggttatcgcagatcccatagatgccgttcccgcttttatgacaattaggcagcatgtgaattgaatgaaagaaaaagtcaagggggcatggaaaacattgtgtttcaccatgcaaagatattacatttagcttgtttgttgcttttaccatgagatgtggtgattggagaactctataaatttgacagttccttgtggtcacatactcaatttcttttgttttttgcttttagctttaaaatcacagtttctgtctgaatctaaggaagtgtatgctagcaatcagaagcctgttaatttcctcataggctagtgatttagctagcattctgctgccaaaactatggaataatgattttttttaattttaatttccttgtacatatggatatagctaattgattgtgatccctttacaataccataaagatgacagtttccatgtcactccaac

SEQ ID NO: 10509 - DNA, 544 bp, Glycine max
gggagccccgctggcttttctatcctaaatcctaccattttcccttttcataattctcactcgccgcattattattttccttcagggtcattgttgttgttattgttgttgaatctgccgcaccagacaccgattcattcgaccaaaacataagcatgtcgggatctgacatggcaagcagggagcaattcacggttgggatgcacaaaccccaaccccaaccccaacaacaacaacctcagcttcatcaaaacaacatgcgtatggactatgctgctgctgacggcaccgctgttttcgcccctccgaccgttaccgttaacattaacggcggagattcctctccggcggtgcctccgggcctgggcctggcccagccccagccccagccccagcccatgatggttaactcccccgaaccaattaagagaaagaggggaaggcccaggaaatatgggcctgactgtggcatgaccttgggggctttgaagaccaccatttcttcctgcggcggcgtgccggttgggcagtccggtggggcatt

SEQ ID NO: 10510 - DNA, 500 bp, Glycine max
gcgaggtaattttttttttttttgcaatcagagcctcacaggagagtaaaaggatgcgtgagtttcatttatgttgactgatagtagaatttgaaatttgaatttgaattgtagacgtacgatgagagtcgaaaaaggcaagatgatgattgtattgcggcgtgtagagagaggatttgttcaattccaactttgatactcactcatagtttcagtaccatagtaggatcaggctagggttttataataagctgctgaaaccaatgttcaaattgcaggtgttggtgctgttgttgaatctgccgctccagacaccgattcattcgaccaaaacataagcatgtccggttctgacattgcatggagggagcaattcacggttttgatgcacaaaccccacaacaactactacaacaacaacaacctcagcttcatcttaacatgcgtattgactatgctgctgactgcactgctgttttcgtccctctgatcgttatcgt

SEQ ID NO: 10511 - DNA, 486 bp, Glycine max
ggaggttggcaatggaagtcctttagactacactactacagtaccaccaacgatcaatgcaatattcatcaaaatgggtacaagagatgttcatgatgatcttcatactgatgatgatgatcaagaagactcagagttagaggatcaagaatcagcaaaggcagagaaatggaaaaaccattactcatcaaatcacaggattctccttgttggagacggtgacttttcattctctctttgtttggccagagcctttggttctgctcacaacctcgttgccacttctcttgattcctatgatagcattggaaagaagtacagtaatggattgagcaacgtgatggaacttcaagaaagaggttgccttgtttttcatggtgttgatgccaaggaaatgagtcagcatttttttctcaagacccagaggtttgatcgcattgtctataacttccctcatgttggctttatatacccagaaaatagcca

SEQ ID NO: 10512 - DNA, 654 bp, Glycine max
  unsure (1)..(654): unsure at all n locations
ctcgagccgattcggctcgagattgatcccaggggctctgtgatttgatcagcagatagagattgaacatttgcagcgaaaagggaaagaaagagaaaatcatgtcaacagcagaagctcctccttctttccaagaagcagcgcgatgcgttgtctgcaattgcagtttcaacactttcagaagaaggcaccactgtcgatcctgtgggagaacattgtgcaatgaacattcatcagatcaaatggctttaccacaatttggcatttactcaaatgtccgagtatgtgctgattgtttcaacaactcacggtctgggaaggatgaaccacagacttcttcagatggagtaaacagtgtgacagatacaatttctaaattagatatcaacacaaatgttgattcaaaatccataccaactgcagagaataagcttgtgttgggcattaaagagtgtaaatgtggaatgccactttgcatttgggaagctccaaccccttcctctgatgcaactcccccagcagaaacccaatccaagtattgcaactccaataaatcctaaatctaagaagacagatactgttccgaaaaatagaagctccagttcaactagcanatntagttctatgttaaacgttgtcatgtaactaatggta

SEQ ID NO: 10513 - DNA, 331 bp, Glycine max
ctcgagccgattcggctcgagccatttggagaaatgaattgattcttgtaataatctgtgatctgatgagcagatagaaagagaagagaagttgatgtcaacagcagaagctcctcctccgttccaagaagcagcgcgatgcgttgtgtgcaattgcagtttcaacaccttcagaagaaggcatcactgtcgatcctgtgggagaacattgtgcaatgaacattcatcagatcaaatggctttaccacaatttggcatttactcaaatgtccgagtatgtgctgattgtttcaacaactcacggtctgggagggatgaaccacagacttct

SEQ ID NO: 10514 - DNA, 475 bp, Glycine max
  unsure (1)..(475): unsure at all n locations
cacccttccgaccggttgcaaaaaaccaacagaggggggacattaggatgaaaagaggactcgcaagcttaatcaagacgccaatagagagagggtggggtaatgggttgcgctgtttcaactcttcttcttcggtgttgaagggcgtcaccacccccactctgcttcagcccagagtgcttctctacgacgccgtttctcacctctgccaccgaggagtaaaatgggtaatcagagcagacaaggacagaaagatcaaattttgttgcgttcagtctgatactgctgagctctatctgagagcttgtggtcttgaacgagaggatgtcttgcaccgcattctgtttgttgaaggcctgaatgtttactctcagggatccactgctgcattgcgagtactgtcgcacttgccactaccttactctgcttttagtgcgctctgcgtgattccatctncactcagagatggtgtcta

SEQ ID NO: 10515 - DNA, 537 bp, Glycine max
ggcacgtaagctatgcgaaaagcacttgcttaaatgaaactccgccgccgtgagcatgagcggtcaccgcctccaccgtgccctcagcaaactgaaactcatcgaagaagaaaatgaccaacgctcacaagatgcgcgtggcattcaccgtcgtcacattcaccgccgcagccgccgtcatctccgtcttcttcgccgcgcgaaggcgcaagcagtaaaagtccttgccgtgctatttacactccgaacagaaaccaaagtgcgcgttcaagcgcgtcttagcggacaactcctactctccgttcaatcatctcagcaacgacgagaatgctttgagttcgcatccatatgaggcagagattacggcattgttgaaaaatcctatgcctaaaattgagcttggaactgagatcgcagacttggaaatgaaggattcctatgtttgggttcataccgagttaaatgaactaattgatgttttgagcgaagagaggttctttgctgtggacacggaacaacatagcttacgatcttttt

SEQ ID NO: 10516 - DNA, 695 bp, Glycine max
ttcatttaaagctgatacgcctaaccaaagattagctcacacgctagtgttgccgtggggcgcatagtatagtatggagtatggaccctcccttcatttaaccatttaccaacttgaatgaaaatctaatcccaatctcaactctctccaaaaccaagtcttagttagagacttaagactctctctctatcactatatctaactttggcggtggcattcaccactcactgactcgggcatggcaaacgacgctgctctgagaacctctctgctctggcttgcagcagttatattggtggttggaatatacacccactctttcaagaagatgatggccacctatgtcttgggtgttcttgggattgctgctctgcttcttcctgattgggattacttcaaccgagatttctctcgttggccttaccctgtcactgctgaggaaagggccaattcttctattcatgcccaaggatctggttttttaaggtttgcgaattctcctctgagggtgattgcttatagcgtggtttatggatatgctatgtacaaatggtgggagtatgtatcaacctaatgaatgattaacgagttttaattgtttagcagcagcagcagcagcaactgttggttcctctgaatcccaatttttagctgtaagcttaatttttttgttgatttaatttgtttaagtttgg

SEQ ID NO: 10517 - DNA, 625 bp, Glycine max
ggtccctgtccatgttgagcgcgtttgttcacgcgccttcaatttgttcttccaacaccctcagtcattgtgtgagtccgaagctcaacctctctcgctcttcaatggccgtatcctctattcgaatcgccgtcgtcggtgatgtgcatgattgctggaaccttgaacaagattcgaaagcacttgagctcttgcagccagatttggtgctgtttacaggtgattttggtgaagaaaatcttgaagtcattaagagtgttgtgaatcttgaatttgctaaagcagttatattgggaaaccacgatgcctggtttactaaacagttttctggaaggtgagggttacatgtttggcctggaatcatcctgcgcttgtgtgtggtttcatatactgttgtgggaaaggctcacattgttagattctttcacgagacttaataagaattgctttgaaaaatgatacaatgctgggacagtaaacttacaatgtatgtgtacaatacatctttgatgttccaccacccccataaaaacatgcacaatgcgcgcacacacacacacaaagacaatcccatctgtttaatctttttgtgagtacaagttttatagtatgtcaaatgtataat

SEQ ID NO: 10518 - DNA, 447 bp, Glycine max
ccttaaacgtctctctctcttcgtcccttgctctgtagcttggaatctgcagttgtagatcggagactgggcaagaaggtcgcattagcttcttcatcgcgcaatggcccatccctctgctgtcgtctccgtcagaaggccaatcacccacgtcgtttttgacatggacggtctcttgctcgacactgagaggttctatactcaagtccaggaaatcatactcgctaggtacaacaaaacctttgattggtccctaaaggcaaagatgatgggaaaaaaagcaatagaatctgctaggatctttgttgaagagactggaattagtgattctcttagtgccgagcaattcctggtagaaagagaggatatgctggagaagctgtttcctactagtgagcctatgccaggtgctagcccgtgagtcaatcatctacatgcaaaaggagt

SEQ ID NO: 10519 - DNA, 404 bp, Glycine max
gactgccaaatgggtaggcaaggtaatgatcctagtcctaccactgtgaactcctccattgctcttcttcaagaaaggtttagacagttggagaaggtgaaagaaagaagagaggggaaacaacttaaactcttgtcatttgagaccacctcctcatcatcacaaaactctcaacaacaaccaaggttggtggctccacataggccaactctccatgactctctttctcttggcctcaacttcacaaacaagcaaggtgatcatcacaacaccatgaacatgaaaccacctccatcctccaatttatggccacagggagcatcaacatcaagaaattttgatacctcagacgttgatacttcccttcatctgtaaatatatttactactgtttgtcttaatttg

SEQ ID NO: 10520 - DNA, 692 bp, Glycine max
gacacacattcatccattctataatttcccaatgtctgatatcaaccccaaccagccactaccaatggatgaagtggtgacctataaggagtgttggcacaaccatgctgcagcacgtggtcgtgtcatctatgatggttgtcttgagtatcttgttgatcaggacaatctcatatgtgcttgttgtggttgccaccgcaactttcatcggaagcacaccattttcaccggcatacctgaaactcaaacactagatcgagtgcaggggatgaggcctaagagaaagaagaggactactttctcgtcagagcaaaggaacaagctgatctgttttgctgagagtgtggggtggaaacctcgaaaggataagaagaacgaaatccaaagcttttgctccgagatgggaatgacccgtaggatgttccttatttggcttagcaacaatcgtcaccgggcaatcaagaaagcttagaagttgtttgtttcgctgtcatggttgaatcagtcttggcacttggtgttaataagatcactctgttcaaactcaaagtgtgttgtttaggaagttatggtttctttttcagtttttgtttttttgttttcaccgtcttttagctttattttgttttcttaatgtaactgtagtgccttggctttaactgatcattcaatccatgtaccttaatttctcc

SEQ ID NO: 10521 - DNA, 974 bp, Glycine max
tctcccacgcgtgacccacaaactccacaagtgtcacaagtcataactcgttagagagagtttgtgtgtgtttttgtgtgtcaccttggtgcatacaacacaagatggaggaccaaaatggtagtggtaagttgagccaagggcttcgcaaggtgaagccttaccttgctatattgtcccttcagtttggctactcagggatgtatatcatcactatggtttctttcaagcatggcatgagtcattggatactctcagtgtaccgtcatgtagttgctgctattataatagtcccttttgcacttgtccttgaaagaaaaataagaccaaagatgactcttcccatcttcctgaggatagtggcacttggtttccttgagccagtgctagatcagaacttgtacaacatggggatgaagatgacctcaacaacgtttgcatctgccactgttaatgtcctcccggccattacttttgtaatggcactcattttcaggctagagaaggtgaacttgagaaaatttcacagtgtagccaaagtcattggaacccttataacagtttcaggagctatggttatgactctgtacaaaggccctgccttccaaatcataaagggtggaggagccatcagcaaccatagcaactctagcagtactagtaccaccgaaccctctgaccagcactggatagttggaactgtttatctcatatcaagttgtgctagttgggctggcttcttcattttgcaatcattcactttgaagaagtacccggcagagctctcactgacagcttggatttgtgtgatgggtattattgagggttcaatcgcatcccttatatttgaacgagacttcagtgtatgggccataggctgggactcaagacttcttgcttgtgtttactctggggtgatttgttctggaatggcatactatgtacaaggggttgtaaccagggaacgtggacca

SEQ ID NO: 10522 - DNA, 701 bp, Glycine max
atacagttcctcactatggcagaggaatctaagcctaaatgggaaggtaaatccgtgactgagctaccaggcacggatgcagaacaagtatggactgcgttagaggatttctgcaacctacacaagtggtggcccatagaaacatgttaccaactagagggtgtaccaggtcaacctggtctaatccgctactgtgcttccaccgttgaagaagctgttgttggtgctcagaagacaacaacaaccatcaagtggaccaaagagaagctactcgcgatcgatcccgtccaacgttgtttgtcctatgaaattgtggaaaacaacatgggatttaagtcctatgtggcaacactcaaagtgctgccaatgaatggagatgggtgcaagatagattgggggtttgtctgtgatcctgttgaagggtggagtttccaagacttgaagttataccttgagtcttctcttcagtccatggccaagaagattcagcttgcatgtagtagcactagcacacactaggtagagtgaaaattgagatttgggatttcatatgagaataaatcttgcttatcttatttctatttcctgattgtgttatagatgttttagtttttcatcccattgagtccaatcagtgctgacctaaaaaaaaaaaaaaaaaaaaaaaaaacagctggccgctctagaggatcctagctaac

SEQ ID NO: 10523 - DNA, 526 bp, Glycine max
acgcgtcagggggagatggaccttgaacaatgttcccatctatccccgttagagatgtaaacacaagacccaaagcttaagcttttggaatatagttagttaggtttttattattatgcttattttgaaagctggaatattatgttcaaaattacatttcttttattattttggtgtcttgatcttattgatgtattttgcagacattgatatacttttattgccctatagagctggaacaagatcaactaattgaaggttcagggacattgttacaaagcaaagaaaatgctggatttatgaatattcaccttgaatatacgtgagtcagaagaatttctttcaccaaaatatgccattgcagttgaggtggtcgatcgtatgtgaaagagtctgttatgagatgatgatcttttcatgcatttcggcattgtcttttgcatttacacttgcacaacattatccaactgtagcttgtatcttttctgatttggtttctcctagagaactgaggtaccagtttgtt

SEQ ID NO: 10524 - DNA, 350 bp, Glycine max
gagatggcaaagagtcacaaagcctgaaacatttgtcccgagaaacactaactagtttgctttacgcatgccttagtttcgtcttgtggattttccttgaagcatagattgaataatacaaaatatgatttttaaattgttgcaatgggatgatggtgttatgtggatgtcctctgcatgctaggcaattggctagctacttcccaagcagaaattggaagcggtctgtgttaaagcttgagttcgacattattgtatgctaagttctagcaaggactacctctgccctttgttcgattcatatttggctgtaaaattgaccgagttttggtcatttttgttaatagtcg

SEQ ID NO: 10525 - DNA, 972 bp, Glycine max
  unsure (1)..(972): unsure at all n locations
gaagggagtttcagttaacgtacctagttgttggtctttatatttagttattgacatcaacaaagtcatggaggaagttaatgtggttcaaaccaagaatggaactgtttcagtagcttctgcgtttgctggccataaggaagctatacagcaaagggaccacaaatttttaagaattgctgttgaagaagcgtataaaggggtagactgtgaagatgggggtccctttggtgctattatagtttgtaatgatgaaatagttgctagatgtcacaacatggttctgaggaacacagaccctactgctcatgcagaagtcactgttataagaaaggcttgtgaaaagttaaaccagatagaactttcagactgtgaaatatatgcttcttgtgaaccttgccctatgtgctttggagcaattcacctctcacgagttaagaggttggtttatggagcaaaggcagaggcagcaattgctattgggttcgatgacttcatttcagatgcattgcgaggtactggattctatcagaaagcacaattggagattaaaagggctgatggcaaagcggcaaacattgctgaagaagttttgagagaaccaagaaaattccgatgtataattgatctcatgttcctaagcgtagtattacactgagaatctgagtacataataactcatgcttctggttctaatctaataataattgatgggggaaggatacagggatttcttttgaaaaaaaaanacnaaaaaaaaaaannnnnnnnnnnnnnnnnnaaaaaaaaaaaccggggggcccgcccatttccttggagttttccgcctgggccttaaaaggggggggaaccgctacccataacgtgaaacccctgcggggttaaagagcccccattcctcatggcattaaggaagacccctggtaaacgggggtttaaccacaacaaatccacctcccttttttttttttc

SEQ ID NO: 10526 - DNA, 862 bp, Glycine max
tctcgagccgaatcggctcgagagacgacagaaggggggaccgcattcactttctcctacctcgtccttctaacccaacctcaacctgtttctccgagaatcacatccaacgcttctgtcatggaggaagttaacgttgtggaaactaaggatggaactgtctcagtagctgctgcgtttgctggtcatcaggaagccgtgcaggatagagaccacaaatttttaagaaaagctgttgaagaagcatataaaggggtagattgcaaagatggaggcccttttggtgctgttatagttcataatgatgaaatagttgctagttgtcacaacatggttctgtgtaacacagacccaactgctcatgctgaggtgacagcaataagagaggcttgtaagaagcttaagcagatagaacttgcagactgtgaaatatatgcttcttgtgaaccttgccccatgtgctttggagcaatccacctctcacgagttaagaggttggtttatggagcaaaggcagaggcagcaattgctattgggttcgatgacttcatttcagatgcattgcgaggtactggattctatcagaaggcacaattggagattaaaagggctgatggcaaagaagctaacattgctgaagaagtttttgagagaacaaaggaaaaattccgaatgtattaattgaatctctatgtttcctaagccattaggtatttacacctcaggaaatttgacttcatataaataagctcgatgctatggtgtatcctaaatcctaatgaataaattgtactgggagcatcaaaatgaaagttactttgtaatataagatggcattctgttattaaaaaaaaaaaaaaaa

SEQ ID NO: 10527 - DNA, 439 bp, Glycine max
  unsure (1)..(439): unsure at all n locations
cagagagcaacactggatattaagagagctgatggtaatgaggccatcattgctgaagaggcatatataggggtcgattgcggagatggaggcccttttggtgctgctatagttcataatgatgaaatagttgctagttgccacaacatggttctgtgtaacacagacccaactgctcatgctgaggtgacagcaataagagaggcttgtaagaagcttaagcagatagaacttgcagattgtgaaatatatgcttcttgtgaaccttgccccatgtgctttggtgcaatccacctttctcgaataaagaggttggtttatggagcgaaggctgaggcagcaattgctattgngtttgatgatttcattgcagatgcactgcgaggtactggattctatcagaaagcaacactggaaattaagagagctgatggtaatg

SEQ ID NO: 10528 - DNA, 355 bp, Glycine max
gaaggcccggggacgataatcccaacagcgtcttctgttcatttcattcttcttggttcgcattacaagctttagcgccaaaattcaactttggttcctatctgaaattccacgcattcctcgttctgcattccaatttcttttaaaatttacattttcaaattcttttccagcttaaagtgtaaagaatttaaaactatcactcagttctcgctcgcgattctctcactctccgttcgacgctcgctatcctcgctacgactctctctctctctctctctctctctctcgcaggcgcggtggttcagagagtctctcatctctgcaatttagctgaaatgagatgcaatgcatg

SEQ ID NO: 10529 - DNA, 454 bp, Glycine max
cttgttatcatggaatcgaaagtctgcgtttagggagaagccggcttatatcttccgtaaacatcgccttcttcgattctgaacaacgcaaatacaaaatactaccactctcccactcttcagatccgtgcttgtggctgaatcgccatggccatggcgattagggtttttctcatccttctactctctctctcatctactcatctcagttactcgctttacgaagatcaagttggcctcatggattggcatcaacagtacattgggaaagtaaaacacgctttgttccatactcaaaagtctgggcgaaagcgtgttttagtgtccaccgaagagaatgttgtagcttcactcgaccttcgtcatggagagattttttggaggcatgtttttgggaccaacgatattgttgatggacttgacattgccctgggaaaatatgtcataactcttt

SEQ ID NO: 10530 - DNA, 263 bp, Glycine max
gcaaaaaaacaacagaaggggaaggagctgttgccgttgttggacattctggcgaacatggtgaaggcggtacggcggctccgggagcttctcacgacgaagttcccgccggggagttttccagtgaaggtggcgatcccggtggtccccacggtaagggtggtggtcacttttacaaatttcgtggaactgcaacctgtgaaaaattctctaaaccctttatcaatctcaacccattggcccaatgcaaataagaatattcc

SEQ ID NO: 10531 - DNA, 761 bp, Glycine max
gagtagcaaagatgacaaaatttaattgaagaagcagttcagttggttttgacccaaagcacataaaccaaggtgttgttgtgaatgtcggtgagctccatgagtcgtgcatctccaatgaatttcttggccgcgcaacaaccgtcatcaaagttgagtgcataactcgaaggatcgtattggaacttgagtctctgcttgcccccattcttgagagccttcttcaacgcagcacgcaccctccaaaacaagctcctgcaacgcttcttgccataagcattcacccattccaaccgctccaacaagcccatcttcacaaaagagaagcttcaaacaaagacaacaagaacaaaaaggtggaagtggtagtaaaaatgagaggctagcatagcatggtctttttctttttttgagaacaagagcaatattaataatggttgaggcggaaattgttgagaaaggtaaaaggggttatattggtgatggagaagaagaaacactgaaatggaaagggcgaatctttttggtctttcaaagaaggtgtgcacggttatctataggagttacgttgggatgctaaaattccatcttctatagattgcagaatagagtgttggtatggtatggtggggttgcaatgcaatgggcagagagcctcaaagtctaacaagctggctcctttctccatcacgattcagaatgttgttgtgacagtgtaacgaattttagtttaatctaatctattcaattcaatgcccccc

SEQ ID NO: 10532 - DNA, 912 bp, Glycine max
  unsure (1)..(912): unsure at all n locations
attcacctttggttcgaccaacacagattttccaactatgctattctgtgggacccagtgagatcatatttttagtggatgatgtcccaataaggagctatcctaggaagagtgatgccacgttcccctcaagagaaatgtatgtgtacggatcaatatgggatgcatcttcatgggctacagagggaggaaaatacaaagctgattataattaccaacccttctttggtagatacaaaaacttcaaaatacaaggttgtaccactgaagcttcaacctcatgccagccaccatctccctcaccaccaggctatggcagcctaagccctcagcaactttctgcaatgcaatgggtccaaaacaactacttggtctatgactattgccatgatcctggaagagaccatacacttactccagaatgctaaggttttaagctatatttggattgaaattgggaaagtatgtatttttataaaattctatacacaattgcaaatacagaatgaaaaaggaataatttgttgctttgcaaataaaattacttttgagctttcccaattgaaatccaagcatgcacttaattagtttggttcaagagttggtgtgtttcaaagttatttgttatttttcacatattaccaaaacagtttattaagggggtggattttgtgatggtttgctaatgctaagtgtaattgcaacaacagtgagcgtccaagttcccctcaaaaaagattgaaatgttttcgttgtttatgtaattgtgttggtttgtttgtaccccccaaaagattgggatgcttttgttgtttgtgtaattgtgattgcactattactttagtccttttcctgttgaaataaatcaatctatttggatttnnnnnnnnnnnnnnnnnnnnnnnnnnnnnn

SEQ ID NO: 10533 - DNA, 357 bp, Glycine max
gaaggtagagtgtacatatataaatatatattctggctgaaggtcattgtcaaatctcaatcagcttatgatcctacgaggatggcaagtgatggtagatgaagagtggacagatgatttgttttttctttgctgttaaatcatcacagttaatacgtttccttgtcgttttctattgtttttacattaacatgcagctacattaccgacgtgcgacggttgctggacactagcccaagtagtcattgaagtgtcatgttaattttcattttgtagcaagtgcatacttgctttcttgaaggggtacgagtgtaactgcgacccttggattgagaaggaatccaagtttcgcaatta

SEQ ID NO: 10534 - DNA, 372 bp, Glycine max
gatgagtctcataaaaccattcacaagacaataacactttttgtccgttcaagcttgcgctttttagcttttatccattgaatagcaatagacccttttgttgcccttttgtttctgaggccttcaaacattcttggcttctttgcaaagttggaattttcactcttcaacttattgttttgatcccaaatcagaaaaaaataatattgggttttattttgatccataagctgaaaggctgaggcaagtatcattggagatacccttttcatctcatgatctgaggttgataaacaagatccttttgttcagagttcagagtgatcatggcatgttccatgaacagtgttttctgtgttcctgaattaaatg

SEQ ID NO: 10535 - DNA, 463 bp, Glycine max
gctaataatagatgttgaatatgtgtgtatttggtagaagtagtgttttgattgtgttggtacttgtgggtgttttgtggtggccaaacgatgctgggacaccaacgaaatggaaagcgaatataagcgttaaaaatagtttgggtggaaatatgggattaaacgtttattgtccccatattgatccaaagcagcactttctgggaactggggcttactatgaatgggtttattctggtggcattccatcgccaggagagacaccatttctttgttactttacatggcaaggtgcctctcactccactgatttgtgcgtcccagataaagataccggttgccaatttgccgattgggaaatcaaactaaatggattgtgtaggtactttggtgccggacctggggcctatgtttgctataaatggaataattaaataaacaaacttcagttcatgttttcccc

SEQ ID NO: 10536 - DNA, 404 bp, Glycine max
gacagacacacacttttctaagattttctcagcttccttctcatttgttaaatttttccaccattttctggcttcaaaaatcgttcggaaatgaggactgtgaacattttcgccctcccacttctggctttgttcatcatggcaatctctcgtctggcccaagctcaggacttgcctctttctccggcacctcctcctaccagtgatggaaccgcaattgatcaaggaattgcttacattcttatgctggtggctctcggaatcacatacatgattcattaactttttcttgttcttcttcttattatcatcatcatggcgattagagaatatttcaggatttttttgtactgtaattattattgatgaaatttattattatttattctgatacattttcttcg

SEQ ID NO: 10537 - DNA, 397 bp, Glycine max
gaaacacacactttccaaaaattttcccagcttccttctcatttgttaaatttttccaccattttctggcttcaaaaatcgttcggaaatgaggactgtgaacattttcgccctcccacttctggctttgttcatcatggcaatctctcgtctggcccaagctcaggacttgcctctttctccggcacctcctcctaccagtgatggtcagttaaatcaaatattaacctttcaatttgtatcaagtaatgaaattccttctttttatcaccttctgttttataactttttaatcttgttttgttttgggtgtcccaagaaccgcaatttattcagggaattcgctaaatcctaatgctgttggctctcggaatcacatacatgattcattaacttt

SEQ ID NO: 10538 - DNA, 360 bp, Glycine max
cgacccacgcgtacgcccacgcgtccgccaacgccttcgttacggcccaagaaaacccctcacccgcgtgagacccgtgcgcgtcgactctcctatgctaccgcagttaccgcttccaccatggccaccatcactgcgatatccactttctccagtgcttcgtcctccgccatcatcgctgcgtcagcttccctggactctaccgtcttcggggtgaccgatctcaacaaccctagcgcgtccatctcaacggtctcttggtcaacaagactattgaagagatcctcaccctaccactcatcctatgcctcttttatttcacaaaccctattttcactcttcacggcgcaaggaagggtg

SEQ ID NO: 10539 - DNA, 2065 bp, Glycine max
tgtctttcacgcgtccgcccacgcgtccgcccacgcgttcgcccacgcgtccgattgtgaactatatgtcaagaaatggtgctctcaggcagcagctttacaaggagattgaggttgctagcgttgattcctttcaaggaagggagaaagactacatcattctgtcttgtgttagaagtaatgaacatcagggcattggattcctgaatgatcctaggaggctcaacgttgctttgacacgagcaagatatggcattgttattttgggaaaccctaaagttttgagcaagcagcctctatggaatagtttattgactcactacaaggagcatgagtgcttagttgaagggcctttaaataacttgaagcaaagtatggttcagttccagaaacccaagaagatttacaatgaacgaaggcttttttatgggggtggacctggaattgcatctaatgataattttggtaacgttggatctggtgctggcacaagttcagatcggaggagcagtcgaggaaggggatcttatatacctcctggtccaccaaatggaactcataagcctggagtgcatcctgctggatatcctgtgccaagggttcctttgcctccttttcatggtggtccccaatctcaaccatatgccattccatctcgcggggcagttcatggacccgttggggcagttcctcatgttccatctccagggagtcgaggttttggggctgggagaggtaattctggtgctccaatcggcaatcatctaccacatcaacaaggcacccaacagcctattgggaatattggatctacatttaacttccctgctctagagaatcccaacagccagccatctgttggtggtccattatcccaacctgggtttgccaacaatatgcatgttcaaggggctggccaatcatttcgtgatcaattttctatgcctggaatgtcccaggacttcttgggcgatgacttcaaaagccagggatctcatgttccgtataatgtcactgatttctctacgcaggcttctcaaagtggatatgctgttgattatgctacacaaggagcacaaggtggattcccagggaattttcttaaccagaattctcaagctggatattctcgctttggttctggaaacgactttatgtcacaggactacatgggccatggatcacaaggccttttcactcaggtggggttcagtgatcccttgcaagatgatgcaacacagagccatttcagtgtggcaaatgccaaccctcttcagtcccagatgaattctctttactcccaaccttttgctcactacaacacacagccgcttaacatgcaggctacccaacagcagcctcaggctcagaactcccaaaatcagaaaatccactataacgtttgaggaactttaggagcttaatgtggctttgatgggttatagtctttgcaatcagcaactgggtttgtgcctgtcttttgtgctgaaatacgtttgcatgtgacatccgaaggattgccttgggatagctatatcgaggaattggtatatatgatttcagttgatggaagtttggggcattacgaagatacaagcaggcgcatcccgggctgaaaattgataagataaccccctttaccttactgaagttttgtattgtttgggattaaggtgaaattgttcgagaaagcattacatggaatggttttgtcgaaagggttttaatcttgaagcagaaggggcggtttacatgtcggtgaaatactgaatatagtaatccatactgcaccaatcatcgccaaggaagttattattgtacagaaggcagggatgcggtgaaccctttcagctcttcctgacatgtaatttaaactcgatattatagacccaagttatatatgcaactattgccactcagaattttctgtggcatataaaggtgtgataattgttttccatgtaaattagttatcttataagggcaacatctgagtgctttgagtagtaattacccaaagatttttaatctcctggttaaaagctaactggagttggaagttccc

SEQ ID NO: 10540 - DNA, 491 bp, Glycine max
ggctgcaaatgttgaaaagattgtaactactttcttaaaaagtggtgtggtaccaagtcagattggtgtgataacaccttatgaggggcaaagagcttatattgtgaactatatgtcaagaaatggtgctctcaggcagcagctttacaaggagattgaggttgctagcgttgattcctttcaaggaagggagaaagactacatcattctgtcttgtgttagaagtaatgaacatcagggcattggatttctgaatgatcctaggaggctcaatgttgctttgacacgagcaagatatggcattgttattttgggaaaccctaaagttttgagcaaacagcctctatggaatagtttattgactcactacaaggtagttcttgtgttttgagattttactgtcggtggtattttttttggtttaaccagaggtatctgaggcttcttatttggcacccgactaatcctctcccattttggggtaagtggta

SEQ ID NO: 10541 - DNA, 326 bp, Glycine max
gcggcggagaaggagaaagagaggaaatttaaagaaggtggtaggagtgaggaatcggttgatgagcaagagcagcgtgtatccaagcaggtctttgaaattaatgattcaaagaaaattgatgagttgcaaggccctgaacctgataatcagcttgagaggcgaacaaggaagaagagggacgactatagtgatggtgacaagcatcaagataatgctggagatggttatgataggcatttgtcttctagggatgacattgccaaggacgaaaaaagaaatgaataattaaatcaaaaaagcggccgctctagaggatccaagct

SEQ ID NO: 10542 - DNA, 565 bp, Glycine max
gtgtctaaggtccagcaggtgttaacgtcatcaaatcaaacacaagggaacacggaagaaactcgtgtagtaatggttgataaggttattcatgtatcagaagtgacttccgagaaacttgatgctctccctatcctcagtcaagaaccaagagataatatgcagagtcctacattcggagcagatcaatgtattcttcatggagaaacaattgatcgatcaaattctaaaaccaggcaggaagatattttaccttgtgcttccagtgtattgggaagcacagaagaaatatcaaaaggaaacaatgatcaagtttttgagcactgttagtgttaggtagtggcttacaatcagtttttttcccctctatatactttggttcttatcgagtctagtcttttcaatgtatactgccttctcttgtttccttttctgcataagttttgcttatacattcatgcaggtgttgtttgtggacaggcattgcagatgatgggtatgatattggtacttgtaattggtgtggttaccccaagtatatattaggagtgtatgaggtgcggcc

SEQ ID NO: 10543 - DNA, 750 bp, Glycine max
acgagtgaaaccatcagtaagtggttcttcagcattagcaaaattaaagactggtggttctggagggcccttaaaacaacaaggggagaagaaagaaactcctcaagaaagacttaaaagaatcatgaacaagcaactaaacaaacaaattaagaaagatactgctgctgaacttgccaagaaaagggaacaggagcggcagaggcaggaaaagcttgcggaaactagtagattgagtcggtatagacaccacagccgcagccgcagcaggagtttcagccgttcccctccaagaagatacagacgcagtagaagtccaagtagtagaggttccagaagatattattctagttctcgttccccttctcgcccccgttcccgctcacgttctcggtctccttattctcgatctcccaggataagaaatcgatcaaggcactgatggaatgctgtatacgtgtagaaaggctgacgaagttttgtgccatttgtttataatatggaatggatattaacatctggctttcatttctaccaaatgtttcgagggaaaccggtcttggttgagttgtgttgaagttgcgctatgcaatctttctgaaaccaaggttcagatttattgaattcaaatcaataacgtaggttcattgaagccaaaagaatatgattattgaactataatataatatagcatgtaagtttgataaaccctttttaacctagaatagaaatttttttacctactgtggt

SEQ ID NO: 10544 - DNA, 785 bp, Glycine max
  unsure (1)..(785): unsure at all n locations
taccggtcaggtattcccggctctacgtcntcnaactgcattctactaattagtttcacgagtgattctaacactacttgtgacttttgtacctctgtgtgtcattgtttccctgtgcagttaagaaagatactgctgcagaacttgccaagaaaagggaacaggagcggcagaggcaggaaaagcttgcagaaactagtagattgagtcggtatagatgccgcagccgcagcatgagtttcagcggttcccctccaagaagataccggcgcagtagaagtccaagtagaagcagaagttccagaagatattattctagttctcattcacggtccccttctcgcacacgttctccgtctccttactctcgatctcccaggataagaaatcgatcaaagcactgatggaatgctatatacgagtagaaggctgacgaagtttgtgtggcatttatttataatatgaaatggatattaatatatggctttcatttctgccaaatagttcgagggaaatcggtcttggttgagttgtgttgaagttgcgatatgcaatctacctgaacatgtcattttagtatttgccaacgtatatttaacattaattaatgaattatgagtaatttgatgtcaaacaaaaaaaaaaaaaaaaaaaaaaaaaaaaaaangncggcgcccaaaaaaaaaaaaaaaaaaaaaacaggcgcgcgccaacaaaagaaccgggccggcggtccaaaaaaatccaaatttactgccccgggtatgaaaccacaaaactttaga

SEQ ID NO: 10545 - DNA, 268 bp, Glycine max
cgagggatttgtaatttgtgtagtttacataatatgcaaatgtggcgttgagatggactttcaagattggtgattagtggaatgagtaccagtcagtaaaattattgttatatcagcaaatggagtcgtgctgagtttttcctttggctaactaatattgagattatatgaataattgcagaagataccggcgcagtagaagtccaagtagaagcagaagttccagaagatattattctagttctcattcacggtccccttctcgcac

SEQ ID NO: 10546 - DNA, 576 bp, Glycine max
atttgattgatgttattatttccagaaaaaaaggaggaaaaaaaagaaaaggaaaaaactccgaagtgagaaaaaggagggttttgttccgtttcgtcctctttccgtttcgggtgcaaatcaacgacacaagggagatagagagagagaacctgcgcgcggagagatattttaaacgcggcggaaccctaacgagtcgaacggcagcgggggcggcgaaggcagatcggagcgcgagcgaggaggatgagcggcaaaggcggtggcggccagaaggcagggattcctccggccagtcggaagatggttcagagcttgaaggagatagtgagcaacatccccgaacacgagatctacgccactctcaaagactgtaacatggaccctaacgaagccgttagtcgcctactctcccaagatacttttcacgaggtgaagagcaaacgtgagaagaaaaaagagggtaaggacacaacggattccaggtctcgtgtggtaagcaatacatctagccgtggcggtggtgctagggttagcgctgaccgatatgttgggcgtggaggcgctactcaattt

SEQ ID NO: 10547 - DNA, 866 bp, Glycine max
cccactcgtccgcccacgcgtccgaccggaggattggggaggtgtcgtcacgcgggggggcagagagatctctcagtacttcgagtgcttgaagtcgcttcactttcggcgtaggagtgtaagggattcggatcttcaggttctagctcgttcgcgcggacacatacgtcaagcactcaagctggataagtgctctggattctccaccgatggcctctactatatcggtcgttattgcaggaacttaagagtcttgtttttagaggaaagctcacttgttgagaatgatggtgactggctccatgagcttgctttgaataatacagttcttgagacactgaatttttacttgactgatattgccaacgtcagaatccaggaccttgaacttatagccagaaattgccccaacttaaactctgtgaaaattactgattgtgaagtattagatctggtgaacttctttcgatatgcatctgctctagaagaattttctggaggttcctacaacgaggaatcggagaagtactctgctatgtcattgccagcaaaattaagtcgtttgggtttgacatatattacaaagaatgaaatgcccatagtgttcccttatgcggccttactgaaaaaattagatcttctttatgcaatgctggatacagaggaccattgtacgttaatccaaaggtgccccaacttggaagtccttgagtcaaggaatgtgattggagacagaggattagaagtgcttgctcgctgttgtaggaggcttaaaaggattaggattgaacgaggtgatgatgatcaaggaatggaggatgaagaaggtgttgtttcccagagaggactaattgctttgtcacatg

SEQ ID NO: 10548 - DNA, 201 bp, Glycine max
tagggatcgtgcaaatgatagatttgtgcggaagggtgagacaactcggggaaagaaggggagggtggcaagtgtaaaggataaaaatgatttcccagttccttgtttgaacatcgaattttgatagttaccaaatgggaaatatgagaaattaaagcactttctgctccaacgaaacattaataaacaacataaattttt

SEQ ID NO: 10549 - DNA, 435 bp, Glycine max
cccatgcatccagttggaagagaccacaagaaggggtcaaggaagggatttacaaggaaaatgtggaaattccaagctataagaccaccattatgatgcttggcgatggaagtgatgtctctttcataactggtaacagaagcgtcggtgatggctggaccactttcagatctgcaactctagctgtttctggtgatggttttctggcacgtgatatagccattgagaacagtgcagggccagagaagcatcaagcagtggcattgagagtaaatgcagacttagcagccttttacaggtgtgcaatttatggctaccaagacactctatatgttcactcctttagacaattctatagagagtgtgacatttatggcaccatagattacatatttgggaatgcagccgcgattctacaagaatgcaacatcatat

SEQ ID NO: 10550 - DNA, 793 bp, Glycine max
cccacgcgtccgctcccttcctccactatgtctctctatgggcaggattcttcactttctggcgtccattcttcagctcttggccgtgttggtgctcctattgttactacggtaatacaaacaatgcaaatacccctgccccaggcggaagacatcattggtattcaagggactaatattgaatacattcgccgcactagtggagccatattgactgtgcaggagagccgggttcctgatgaaatcgttgtagaaataaaaggcacctcatctgaggttcaaacagctcaacaattgattcaggatgttataagcagtcacaaagaacctgtcactagcagttatggcaggctagatgcagttccaaggtcttcatactctcatttgggcactacatcacgcctccctccatcttcgttgtcctcacaaccatacacaggttatggagcttctggtttaggagactacagtactttcaggctttaaattggttctccctgtattcaagggtactccatttagactagtttctttctaattgggtctgcttggagaggattaacgcttgagtatatcatgaggcctcagagaagcttgctttcatgtatttgatatcatcttgtatcgtgggtaaaattttagaggtggcctgtagctgagaatttttatagaaaatgtaatgaaatattaattagtcattttgatgatgtttgctttttaagtgcgcctctgaagcaggttgcaataccaaacttgtattaattgttagatactttaaaaggttaaaatttca

SEQ ID NO: 10551 - DNA, 1312 bp, Glycine max
accggtcaggcattcccgtctcgacaaacgcgtcagtacagccgtcagtacagcagcgaaagggcaacagaaggggaagtatccctccgatttgaagattccggtgacggcgagccatggccaccggcggcgacggtgacacttccaaacaagagctcttccagctcatcaaacgcttcggagcttacgtcactttcatgatctccaatctcttccctctctctctccacaacctcgatttacgctctatcggggcagttgctggtcttgctgttgcaattgttttcacatggaggctcttgagatctccttctgggtctcaacggaggcaacagaaacggcaaggtccttcatctagtaatcctggagtcggtacaaattcaaattcaaatgcgtcggtggttccttcggatgcttgttcaccctcagatgattcaagggcgcaaaatgttgttgatgagttctttcagccagtcaagccaaccttggggcagatagttaggcagaagttgagtgaaggaagaaaggtaacttgtcgccttcttggagtgatccttgaggaaagtagtccagaggagctgcagaaacaagctactgtgaggtcctctgtgctagaagtactattggaagtaacaaaattttgtgatttatatctcatggaacgagttctggatgatgaaagcgagaaaagagttcttgtagcattggaagaagcaggggtattcacttcaggtggtctggtcaaggacaaggttactgtctgcagcacagagaatgggcggtcatcgtttgttcggcaattggaacctgattggcatattgattcaaatcctgaaattgtcactcagttggctaggtttatcaagtatcaacttcatgtatctccttacaaaactgaaagaactgctgcaaatgtgttcagtgctccatctctggaacagttctttggatccatatgaaactaaaaccactacaaatcagatgttattcataaatgtctcctagtttgtttctatgttcatctcgatttccacattcaccataagtttttttccagctttactagatgtatgagaacaaggttagatttttcttgaagttttaaggttctctcactctaggtaggtgaaagaccttatgtgtatgttgatgctttgaagaagttttactattttcttttttcttctttgttttgaaatttgtgcattacattgtatcccatccagacattttagactggcaaagtgacaattttattagatatttgatcaagtttccctacgttataccatcatgaataatattagtgacc

SEQ ID NO: 10552 - DNA, 521 bp, Glycine max
ccaaaacatcgtaagttaaattgcatttttagagcaaatctgtaagctctgacggcagcttatagaggtcgttgacggcaaagagagacacaaacgtaatctgtgagtttggaacattgattcgttgtttcctctgcaaaatcaaatcctcattgtgattgttgatgaacaattgaagtatccctccgatttgaagattccggtgacggcgagccatggccaccggcggcgacggtgacacttccaaacaagagctcttccagctcatcaaacgcttcggagcttacgtcactttcaagatctccaatctcttccctctctctctccacggcctcgatatacgctctatcggggcagttgctggtcttgctgttgcaattgttttcacatggaggctcttgagatctccttctgggtctcaacggaggcaacagaaacggcaaggtccttcatctagtaatcctggagtcggtacaaatcattcaaatgtgtcagatgttccttcggatgcttgttcaccc

SEQ ID NO: 10553 - DNA, 461 bp, Glycine max
ccggttaggcattcccgtctcgacacacgcgtcagtccggtggtaaataacgatgcgaggggacacacactcgggttcccactcaatagtatataatctctgtttcaactttctatcttcctatgatggctagctccaccgtcttgtttacactagtcgccgcattgttcgtaacctccgtcgtggctcagtccccggcgtcctccccagccctgtctccaaagcgcacccccgtgctggccacgccgcagaagtctccttcgccggcgatttctccttccgccgtgtcaccgtcatcctctcctcctgctccgacggtgaacgctccgtctccttcgcctacctccgtcgactctccgccatctcctccgttgtctccctccgattcgcccggcggtgttcccctccgtcactccctcagcagtctcctctccgccgtctgaagcagcagctccctctca

SEQ ID NO: 10554 - DNA, 631 bp, Glycine max
  unsure (1)..(631): unsure at all n locations
aattcccggctcgacccacgcgtacgcccacgcgtccggggtgaaatgaagaggtagtgagagacaagaaaagaaaagaatgagtgaagaaggtcctccaaagctatataccgacaagccccgaaaagcgcgattgaagcagtttcgggggcaacagaaatcaaacgcgttctcctcgccggcggcgatggggacacacgccgctactccgccgccacctccgccaccgccaaaggaaccctttattcggcgctacaaattcgtttggcctatgcttttggctgtgaatcttggtgtcgcagcttatttgtttacgaggacaaagaagaagggtactggtgaggaggagcaagatgtaactcgtgtctcaactaaggatgctacccctcatgttgttgagatgcctgtgccgccaccatctattacaaatcccatgatcaatcgagagccaattccagaaaaccaacaacgtgaactcttgaagtggatattggaagagaagaggaaggtcaaagcaaaagacgcagaggagaagcgaaaaattgatgaagagaaagctctgcttaaaaagcttattcggtcaaaatccatcccaagtgtctaatgatgttatctntatctgcaggggaaa

SEQ ID NO: 10555 - DNA, 543 bp, Glycine max
  unsure (1)..(543): unsure at all n locations
acgcgtccgcccacgcgttcgattttttcaaactccctcccatcaatggttgaagttaaagaaggtgtaaattaaaaagagaaaaaaagtgactgattgcgtatatgcatgggaaacagtgtctagcagagtagagttaagaattgaaatttgaaaggattgaatggtgaaatgaagaggtagtgagagacgagaaaagaaaagaatgagtgaagaaggtcctccaaagctatataccgacaagccccgaaaagcgcgactgaagcagtttcgggggcaacagaaatcgaacgcgttctcctcgccggcggcgatggatacacacgcggctgctccgccaccgccgccaaaggaaccctttattcggcgctacaagttcgtttggcctgtgcttttggctgtgaatctcggtgtcggagcttatttgtttatggggacaaagaagaaagatactggtgaggaggaacaagatgctactcctgtctcaactaaggatgctacccctcatggtgntgagactcctgtgtcatcaccatctattac

SEQ ID NO: 10556 - DNA, 627 bp, Glycine max
accggttaggcattcccggctcgacacacgcgtccgggaatgaatacgagagtgaagcagctaagaggggaagagcgatggaaggtgggtacggaaaccgtggttcctctttctcccaatcacgtcgtggtcgaggtcgcggtcgcggtcaaagatttccttcgaatcaatccaaagtttcaagttttgccgaaaggggcactccttcttctagtagtgccaacagagcttctgcctctgttatcagtaacacgcaagaagacgacgcacaaccatcttccaattttgttggaacatgtccttacatgtgcccagaaagagagaggatccagcgtgaaaaactgcgagatttggcaatttttgagaggctacatggaaatcctggaaaatcatccccagctcttgctgtcaagaagttttgcagaactatatccaccaaatatgttcaagcatcagatatgcggcctattactgttttggaagacactttaaattaccttttgagtttgctggaatctaaagagccattggtttggagtagttcatgactttgtcttcgatagaacgaggtccatacgccaagatattaccatgcaaaatattgtaaacaagaaagcaatttacatg

SEQ ID NO: 10557 - DNA, 644 bp, Glycine max
cccacgcgtccgcccacgcgttcgcccacgcgttctcaattccgtgcagatgaagtgtctccgcctctggtctcttctcttctcgcaagcggagccccaatttctccttcacgaaccctaattcactcttcccattcgaaatctcgatcaccttttcgattcaacctttctctcctcgctaatctcttcgttcgcctcgcacatcaaggtgagggattgaaattgaatcctcaagatgccagctacagcaggaagggttcgcatgcctgcgaacaatagggttcacagcagtgcagcgcttcaaacccatggtatatggcaaagtgccatcggctatgatccttatgcacccaataaggaagacaagaaggattcttctcaaaatctgccaaatgcagagcctgatgctgagaatgcatatgctagcttccaggggcttctacagcttgctaagataacaaatgctgaggtggatgtatcccgtggggcctgcaaaaagtgtggccgtgttgggcacctcaagtttcagtgcaagaactatgtgaaaattaaggatgaaaatgagaacgatcctgaagcaatgcagcctgtggggttggttggattggataaaaagttgaaggctgacaaggtggataagagaa

SEQ ID NO: 10558 - DNA, 440 bp, Glycine max
aattcccgtctcgacccacgcgtacgcccacgcgtcagtagagcagagaaaggggggcacacgaagtgacccaatttggtttcagtttctcgaattctgggaacgtgtctccgccctctggtctcttccccttctccgcaagcaaaaccccaatttcttcttcacgaaccctaattcactcttcccattccaaatctcaatcacctttctgattcaatctttctctcctcgccaatctcttcgttcacctcgcaaatcaaggtgagggattcgaattgaaacctcaagatgccagccacagcaggaagggttgtatgcctgcgaacaatagggttcacagcagtgcagcgcttcaaacccatggcatatgggacagtgccattggctacgaaccttatgcacccaataacgaagataagagggattcttctcaaaatctg

SEQ ID NO: 10559 - DNA, 403 bp, Glycine max
  unsure (1)..(403): unsure at all n locations
acggtgccaaaaaaacaacaaaaggggggggaagggaacaggtttaaatcctgggaagacgactggttccaaggagaggcctcattaatcacaaagtttccaagactgtttgtagtctcccaacaacagaaccagacaatccagcagttgggagattttaaggacaatgaatgggagtggaacttgtcatggacgaggccattgtttgacaatgagataataatggcttcaaatttcctaagggacattgagaggaacacaatacagtgaaacagaagggatgagtgggtgtggaaggcatatcaaagcggacaatacacagtacaatcagcttataaattaatgacaaagggaagcagtganggggaaagggatcgagcatttganngagtgtggaatctaa

SEQ ID NO: 10560 - DNA, 539 bp, Glycine max
gaagcggaaggggtttggttttgttcattatctgcttcttctgatgcgaaagtgaagactgaagagaagataagacaatgctagcgctactccagaactgctccatgcccctcgcacgtgcggtgcggtctccacctcgcacgcacgtgcgaccttgtttcacggccgtggcctacgcatccatttcctcacgtgctaactcccagtctcaggttctcctcggcttgtccgagaaggagctgcaacaactcgcccttgacctcaatcaggaaacctataggggcaaacaacttcatcattttttataccagaggaagctcagagaaattcaggatttcactcaattgcctcagggatttaggaatactcttgaggaaactggatggaaggtgggccggtctcctattttccaaactgtaactgcagctgatggaactgttaagttggtggttaaatttggaggacaatagattggttgaaactgttggcattccggttatggttgataaaggcctgactcgcctcacagcatgtgtttc

SEQ ID NO: 10561 - DNA, 359 bp, Glycine max
atttcttaatggagaagtgagcggtgagaggaaacagaagagagaagagcaatcggtgagtgaatggaatggattcaggtcctccggcgaacgatttgtgttcagtgtgccatggcaactttcatattccatgccaagccaattgttctcactggttttgcggaaattgcataatgcttgtgtggcagcacggatcagtgggttgttcatgcaagtgcccactgtgtcgtcgagccatcagtctcttagtccccacagaagagtctctgaggcaacagcaggaccccgaagtttcccagattctgtcaaagattcatgcctataaccgtttcttcggtggccaaccaccatctctatca

SEQ ID NO: 10562 - DNA, 459 bp, Glycine max
gaaagccgtgttgaatagaataagaataagaaaatgtaaagatttccgtacggacagaaggggggtgagaggaaacagaagagagaagagcaatcggtgagtgaatggaatggattcaggtcctccggcgaacgatttgtgttcagtgtgccatggcaactttcatattccatgccaagccaattgttctcactggttttgcggtctcttttgtctctctgactttgatttcaatattgaatgaatgaatgaatgaatgaagttacataattggtgtttcaggaaattgcataatgcttgtgtggcagcacggatcagtgggttgttcatgcaagtgcccactgtgtcgtcgagccatcagtctcttagtccccacagaagagtctctgaggcaacagcaggaccccgaagtttcccagattctgtcaaagattcatgcctataaccgtttcttcggtg

SEQ ID NO: 10563 - DNA, 454 bp, Glycine max
aattcccggctcgacccacgcgtacggggaaagcagaaagcatggaagtggtgcggcgggtggttccgaaggtgttggaaaagggcgtcgtaatgagtcggagggagatgagctcaggttcgggttggttggcgggaaagttggcgaaaatagtgaaagccggagaggctgttctgcactcgcgagccgaagaagttgaggccattgaaatcaagtcagagagagtgcagaagatcatcgacgacatggtccgcgttatgagaaaagcacctggagttggcctcgctgccccacagattggaatccccttaaggattattgttttggaagacaaaatccaatatatggcttattattcaaaccaagagctcaaggcacaagatagaacaccttttgatcttttggtcatcctcaatcccaagctaaagaacaccaccaccaggactgccctatt

SEQ ID NO: 10564 - DNA, 581 bp, Glycine max
ttccggggtcgaaacacgcgtacgtagcgataagactacagaagggggagttcccttcctagaatagcaaagtatagtagcaatagcagcagcagcagcttgtcgcgtgcgtgcctctccggcgaggccgtaacaatccacaaacaacaagcttttcaatttctccgtcgtttggcttccaatggcatcaaataaccactcaccacctctcgagatattagttcgaggaccagaagatttctcgctctggaccggacctcccttcgcgaacggtcaaccaagcatcaagctcgagaaagtgaaatgcatcaacgcgaagttcagcgacgacggatccaagctcatggtgacaaaatcgaactcgctgattagcgtctacgattgcagaatcgccgaagagattagggcttttaaagtccccaatgtcgtcgccgcagctttgtcgcccaatggaacttacttgcagcccttccagaagccttcggcgccgcaggagaagaacgtcacgctgtggagcatcgaagccggtgctgctgttcaccagcagtcacagaagaacatgaccaaagccaattggcctg

SEQ ID NO: 10565 - DNA, 351 bp, Glycine max
acccacgcgcgcgtgctataaaacgacataatgagtatttttttttaacagaagccctcaccaaagttccgccgctttctcatggtgcggtgggctatatatgtagaccaaatcttgccggacactgcactgtggagtggggtccagaatattatatcctccaacaacaaatttcacttctatgggactgtacaagttaacttgtcattactcattcattacattagatggctcctcctttatgctattactgtttcttcttcttgtcatcattgtttgactaagtatcttcaggattgcttatatgaaaacaatttatagcatttgtaagtacttccaaaaaaaagaaat

SEQ ID NO: 10566 - DNA, 708 bp, Glycine max
ctgatgcttcacatggagatttggagggacttaggaaagcatatcttgagacacttcttactcaacaaaagcaacagtatgagctcccacttctgagcaaatctgggcttactaatggcttctatgggagtcagccatatggtcttggcatgccatattctggaaagcagattgcaaattccacccctcctttctctgggatctggaaatccactctttgagaatgaacgtttatcacccttaaattctatgatgagaagttcagtgggaggttctggtggctcatggcatgctgatattggcaataatatagagggaagatttgcttcatccttactagatgagttcaagaccaagaaaaccaggccttttgaacttccagatatcattgatcatgtggttcaattcagtactgatcagtatggtagccgctttattcagcagaaattagaaacagcatcagtagaagagaagaccaagatatttcctgagatcattcctcatgctcgtgccttgatgactgatgtttttggcaattatgttatacaaaaattttttgagcatggtaccgaaagtcaaagaaaggaattagccaaccaacttacaggtcatgttttacctcttagtctgcaaatgtatggttgcagagtgattcaaaaggccttggaggtggttgatgtggatcagcagggtcaaatggtgtctgag

SEQ ID NO: 10567 - DNA, 870 bp, Glycine max
gtcctctgaaaacaacagtaactggagttgagatgttcaagaagattttggatcaaggacaggctggtgataacgtgggtcttcttctccgtggtctgaagcgggaagacattcaacgtggtcaggttagttgaggagatctagcttttgctttttgttagacatcatagctgcatgcaagagaactgtatattatctgtatttgtttcgataaaatttatagaatttcgaattcaaattactaaatttgagaaagcactttcccaatgctgctttctattgaaaaggtgattgccaaacctggttctgtaaaaacatccaagaaatttgaggcagagatatatgtactcacaaaagatgagggagggcgacacactgctttcttctctaactacaaacctcagttttacttgaggactgctgatgtcactggaaaagtagagttgcccgaaaatgttaaaatggttatgcctggagacaatgttactgccgtgtttgaattgatttcagcagttccacttgaagcaggacaaagatttgccttgagagaaggtggaagaacagttggtgccggtgtggtgtcaaaagtactgagctagtgcatttgccatgattcaagttttagtctacccatttgcaaagggggttggaaaccctgagacctgacttttatcttgagaaatacaaacatgtgccaagcaatataatattctatcgggttgtgttggatgaaattgagtaaattttagaggagttaatcatcactgttcatttttgtagtgcataatttatcaacatgctcaggatcgccgccgactgtttcgcccgactgtttctgctttatgaaaataatttgtgtatcatctgtgc

SEQ ID NO: 10568 - DNA, 611 bp, Glycine max
gacccacgcatcagcggacgcgtgggcggacgcgtggggacacgcaaaccacgcactctctctctctctctctcctcttgaagccctcaaaggctcaaacacaaacactaacactaacactagcattcactcaagagatcaataatgggatctggggccggcaatttcctcaaggtgcttctcaaaaacttcgatgtgcttgctgggcctgtcattagtcttgtttatcctctatatgcttcaattagggcaattgagagcaagtctcctattgatgatcagcagtggctcacttactgggttctctactccttgatcaccctctttgaacttacttttgctaaagtccttgagtggattccaatatggccctatgcaaagctgattgcaacctgctggttggtccttccttactttagcggtgccgcttatgtttatgagcattatgtgagacctttctatgtcaatcctcagaccattaacatctggtacgttccaaggaaaaaggatgccttgggtaagcgagatgatattctgactgctgcagagaagtacatccaagagaatggatccgaagcatttgagaatatcatcaatagggctgacaaatc

SEQ ID NO: 10569 - DNA, 636 bp, Glycine max
tcgccgaaattatactgggtaccccaaatcatgcgagaattccttttagcgtcgtctcgctaggtctgtcttcgaaatcaaagacggaggctctgaaataataaaaaccacgcacgcatcgaaagaaagagagagaagaagaagaagaagaaaagaggggtcttcgaagaaaccatgagtatcctctctctctaaactctctcagattcgatcctctcttctcttctttcaattccgcttccctcgcactaaatgacagggtttcctggccctcgccgcgatcacgcttcttcttcctcctcctcgcacaattccaacagcagtggtagcaacgtatttaatttgcttgcaaggagggagatctcaccccgaacaagatatgtggcaaaatggcattggggagaacccggtgaagcttcaaaatcaaagtctattccttattctcgtcctaaaaaagaagttgtgagagatgcaagacgtggtctcctctcatgggttgaggctgagtcattgcggcatttgtctgctaagtattgtcctttgttgcctcctccaaggtctactattgcagcagcatttagcccagatgggaaagttcttgcctccacacacggtgaccacacagtaaagataatt

SEQ ID NO: 10570 - DNA, 1150 bp, Glycine max
acgcgtccaggaggtagaataattattaaaatcgtttttctttatttctcttattacgccaacgccatgctcattactcgtaaccctgttttgttgaattccacttttgtccccactctcatttcagattcagagcatcgttgcgcatctccacgctctctttgcttctcttctcgcacggacatggatactgctgctggtcaaagtctttacccattacaccgttgcaaaactcttcacctggtaagacatgcccaaggatttcacaatgtagaaggtgagaagaactttgaagcatacaagtcttatgatctttttgatgcaaacttgacccctctcggctggaaacaggttgataatctgagacaacatgttaaggccagtggtctttccaaaagaattgaactagttattgcttcccccttgttaaggactatgcaaacagcagttggagtctttggtgggcaaccatatactgatgggattaatgtacctcccctgatgaatgacaatgtgggagatagtggtcgccctgcaatttccagtctaaatgccccaccatttatagcagtagagctttgccgagaacatctgggggtgcatccttgtgataagagaagaaacatcactgaccaccgacatatgtttccagctattgatttttcattgatagaaaatgatgaggacattttgtggaaacctgacattagagagaagaatgaagaagttgctgccaggggactgaaatttttggaatggttgtggacacgtaaagaaaaggagatagctgtcgttacccacagcggttttctgtttcattctctaagtgcttttggaaatgattgtcatccaaacgtgaagaatgaaatctgcacacactttgctaactgtgagctacgttcaatggttatcattgacagaggtatgattggttcacatgagtcctctaccaactatcctggcaaagttccagatggccttgaccttcctagtgacgttgctgaccagaagcatccagagaatgggcaggcaaactgatagtggaattttcttcatttttatgatttcctaattacatttatgataccaactacgattacttttaagcattaattaaatggactcaatttcatgtgcgaaaaaaaaaaaa

SEQ ID NO: 10571 - DNA, 608 bp, Glycine max
accacgtcgctccgcaccacgtcgtctcgtacgtgcttgacgagacgaacgcgaaaaggggcccatctacaaacgcggagcagtgactggtcttttggtgagcctgcgccaaattcgaaaccgacctatctgctgaaaggaagacgactatggcgagctagaaatggactggttattgtctcctaccaactatatggtcgagctagttcctgctaagcacagcacctccaatggtggcatttgtgagataatgaccccaacagctcgtgcagacatccatatgaatcttcccgcacttcaaaagttggactctatgcttatcgaaacactagatttgatgatgaatacggagttttggtatgcagacggaggaagccaggcgcacgggaggaggcacacaaactcacagcatagcaaaagatggtggcttccatcaccccacgtaccaaaaactggtctttctgatactgaaaggaaaaggttgcttcatcagggtagcggggtacggcaagtattcacggctgccaaagctatcaatgaaagtgtgttgcttgaaatgcccgtgccatctattattaaagatgcacttgcaaaggtgataattttgt

SEQ ID NO: 10572 - DNA, 1085 bp, Glycine max
attattttatattatttcttgcctatagttagtttgaaaattaggtactacatcatatgcatgatcagcatttgttactgctcctctgaatttgtctgagtctgagctgttgattctcccaacacaactaaaaaaaagaagaaaaacttagagtggtagttgtaggaaagcaagaacagtgaagtgttctcctaattcagtgagtgaggttctgaattcttcaacttgagatgatggcatcatttgcagggactactcagaagtgcaaagcatgtgagaagactgtgtatttggtggatcagctcactgctgacaacaagatctatcacaaatcatgtttcagatgctaccactgcaagggtacccttaagttgagtaattattgttcctttgagggtgttttatactgtaagcctcattttgatcaactctttaagaagactggcagcttggacaaaagttttgaaggtattccaagaactgcaagacttgaaagatctgccgatcaggtccaaaccaatacaaaggtttcaaatttgtttgctggaactcaggaaaaatgtgttgcttgcaagaaaacagtttacccaattgaaaaggtagctgttgatggaacatcttaccataaggcttgtttcaggtgcactcatggggggtgtgtaattagcccctcaaattacgttgcccatgaacatcgtctttattgtaggcaccatcacactcagttgttcaagcagaaaggtaacttcagccaacttgacaagcaagaaaacgatgaaggggtgacggagaacagaataactgagtaatggcaagcattcaactttcaagttacattggcaatacaagttcagttggtgactcattttcaggcatcaaattcccttgtctcaatccacatttttttttctgtttactatgtatgtgaaaagttttgtgagacaaattttgggttgataattgagaagaattagtagatagtttggcttaatcatacggcgcggctgaccagtctgcattttgctttgaagcttaatgaagtttgtatttttcattattgtgataaaatctggttttctctgtgt

SEQ ID NO: 10573 - DNA, 697 bp, Glycine max
cggccttaagattatcctatctaagaatcatcatgaccttgaaatattttatcacatttctcctaattgctgcaatggcaattaatattccacaaaccctagctcagcttggaattctcagtggtctccttggttcggttagtaatattcaaggaactgtgttttgcacttccaaggacaatatgggagtcaaaggtgcctcagtccctgtttttccaaatgctcaagtgcaactggtttgtggaggaaaggagctttctaatgctaaaactaatgatgatggaacattttccatgatgatggatccattgctattggatcttgcttcacttctcagtggttgcaacttagtggttgccactcctctctcgaactgcaatgccaagcttccttctactgggggtctcatttcaaccctaaactttgctgggatcactagtgttggcactcaaaccatggctaacatcattccatcagggtttcatttcttgccatccatttaagtattacaagatggaaaagatatatttatagcatgcatgacaaaattattatgaaataaagtcatgcaatgtcttgtcttattattgtactactttaaattgccacgcctgctatatctaaattaattggcgtttggataaattaatagatgtcatccgtgtgactataataaaagtgtttatgtttttaccaa

SEQ ID NO: 10574 - DNA, 2078 bp, Glycine max
tctttccagctgcgatccaaacagaacaggctcctcgttgactgagataacaactccgactcttgagttgagtgtgtctggtcggaacagtatgcagttcagtatcacatcacaattccttcatatcttctctcttaccatcttcattatcattacctcttcactttcacaatccagccagttttgtgatgcgggaactgaaattccatcatccaagctgttgatcaagggtggcacggttgtgaatgctcagcaccaccagattgctgatgtttacgtggaagatggcatcattgttgcagttaatcctaacatcagggtaggagatgacgtcactgtcattgatgccaccggcaaatatgtcatgccaggtggcattgatcctcacacccatctagatatggatgttggttttactgcaacggttgatgacttcttcagtggtcaggcggcagcattggctggtgggacaacaatgcacattgacttcgttataccacttaatgggagtttgacagctggttttgaagactatgaaaagaaggcaaagaagtcttgcatggattatggttttcatatggttattaccaaatgggatgaaactgtgtcaagagaaatggagctcatggtcaaggagaaaggcatcaactcttttaagtttttcatggcatacaaaggagctcttatgatcaatgatgagcttcttctggaaggatttaaaaagtgcaagtctcttggtgccttagctatggtccatgcagaaaatggagatgctgtgtacgaaggtcaggaaaaaatgatagaacttggaataactggtcctgagggacatgctctttcacggcctgcagtgttggaaggagaggcaactgcccgtgctattcgtttagctgattttgtgaacactcctttatatgtggttcatgtaatgagcattgatgcaatggaagaaattgctaaggcccggaaatcaggacaaagggtaattggagagcccgttgcctctgggttagcccttgatgaatcttggctttggcatcctgactttgagactgctgcaaagtatgtcatgagtccccctattaggaaacgaggacatgataaggcccttcaagctgccctttcaacaggagttttgcagctggtaggaactgatcattgtgcctttaattccacccagaaagctcttggaattgatgacttccggaaaattcctaatggtgtcaatggtattgaagaaaggatgcatttggtatgggatatcatggtggaatctggccaaatatctgtcactgactatgtccggttgacaagcactgaatgtgctagaatcttcaatatatatccaaggaaaggagctattcttccaggatctgatgcagatattatcatcctcaatccaaattcaacctttgagataactgcaaagtcccaccactccaaactggacacaaatgtctatgagggaaggagtggaaagggaaaaatcgaagtgactattgcaggaggaagagttgtttgggaaaataatgaactgaaggttgctcctggtactggcagatatataaaaatgccaccctttagttatctgtttaacggaattgacaaaaaggatgccttttatctaaattccctccaagccccagtaaagcgagccaaatctaacacttaaaagtttctgatatcctttggtcaaagttcaacattttaaggagcgggggagacaaagatgtgtgttaatccagttttttgcttaaataaaatagtatatatatatatatacacacacatatgtatattacaatagataataggtatgcttcgtgttaccttttccactcatgtaatgttcattagttacagtctaaatctgttagagaagtcacagtagctttaataagatactgtacactacagtatgtagcacattcagatgatgggagctgctgttcaggtttctattgaacttgtcatctacatacatattttgagtcatagatccatgctttaatagcatgtcattggtttgaaaatcaaggagtgcctatcgtagttataaccatatatagcatcttctc

SEQ ID NO: 10575 - DNA, 1280 bp, Glycine max
ggagcagagtatcggcatagcgtagccatggccatgggattgacctcacaactcctcctttctttgttcatcagtacccttcttcttcttcttccctcttccctttcacaatctaaccagttttgtgacgctggaacttcatccaagctgttgatcaagggcggcaccgttgtgaatgctcaccaccaacaggttgccgatgtctatgtcgaagatggtatcattgttgccatcaatcccactattacggttggagatgaggtgacggtcatagatgccactggcaagtttgtcatgccagggggcattgaccctcacacccacctagagtttgagtttatggatacggaaactgtagatgacttcttcagtggtcaggctgcagcattagctggtgggacaacaatgcacattgactttgttataccacataaaggaagtttaacggctggttttgaagcctatgaaaagaaggcaaagaagtcttgcatggattatggtttccatatggctattaccaaatgggatgaaactgtgtcaagagaaatggagctcatggtcaaggagaaaggtcatgatttatttccttgataatttggctgattatgtggcaataaccctttggttttgagtttatgtggaatttatttcagctattgcatctatgttttgtaattgcaggcatcaactcttttaagtttttcatggcatacaaaggagctcttatgatcaatgatgagcttcttctggaaggatttaaaaagtgcaagtctcttggtgccttagctatggtccatgcagaaaatggagatgctgtgtacgaagggcagcggaaaatgatagaacttggaataactggtcctgaggggcatgctctttcaaggcctgcagtgttggaaggagaggcaactgctcgtgccattcgcttagcagattttgtgaatactcctttatatgtggttcatgtaatgagcattgacgcaatggaagaaattgcgaaagcccggaaagcaggacaaagggtaattggagagcctattgcctctgggttagcccttgatgaatcttggctttggcatcctgactttgagattgcagcaaagtatgtcatgagcccccctattaggaaacgaggacatgataaggcccttcaagctgccctttcaaccggcgttttgcaggtcactcctggcactgggagatacatccaaatgccaccttttagttatctgtttgatggactggacaaaaaggacgccatttatctaaattcccttcag

SEQ ID NO: 10576 - DNA, 740 bp, Glycine max
  unsure (1)..(740): unsure at all n locations
attttccaaacttctcattctcaccatattaaagaaagaaaagaaaaaaaagtttaacttttgttaaccgaagtgttcggaagcacaatccattattggatcgccattgcaactttctgttttttattcttttcagcagctatccaaacaaaacaggttcctcgttgactgagtgtgtcaggtcggaacagtgagtagagaataagctatgcagttcaatatcacatcacaattccttcatatcttctctcttaccttcttccttatcattacctcttcactttcacaatccaaccagttttgtgatgctgggactgaaattccatcatccaagttgttgatcaagggaggcacggttgtgaatggtcaccaccaacaggttgccgatgtctatgtcgaagatggtatcattgttgccatcaatcccactattacggttggagatgaggtgacggtcatagatgccactggcaagtttgtcatgccaggttaccccttaatcttttcaatctaacactcaccactacttaatatctacacttaattaaagaaaatgaatcaggtcctgctagaattaatgtcatagatgaaggatctatgtatgtacataagatcatgggaagatacatatctgtctttctagtcttcttgcatctacttcaaagtcttgtataaaacaatattnttggtccttagtcaggcacttgatgcactattggatggttctgatacactacacc

SEQ ID NO: 10577 - DNA, 454 bp, Glycine max
gaggacgtacaatagcatcatagtctcaattttgatgtgcatgagaggagagaatctcataagatgaaagcgatacgatttagcttcagaggcttcatttggtgtcgagaggtgcgagtcttggcagaagaggcatcctcatttaacatttcgatggcgttgcgcgaaggattgagaagagaaaaaaagaaagaaggaaaggataggtttgatgggtcaaagcgcatcacgtacaacacagatgagaggagagtttagcggtggtggatgccctgttcattcaaaacggcaagggcgctttgccatcataaaggagcacaaatccagattgtatattgtcagaagatgtatactgatgctaatttgttggcacaaatacaaaattagtgagtaattagagaggagctgacaattaattagctttgttcttctaaggttgcctaaaaaaaaaaaa

SEQ ID NO: 10578 - DNA, 1652 bp, Glycine max
  unsure (1)..(1652): unsure at all n locations
cctaaacctccttaagaccaggaccaggaccagcccttcctttccgaacacgaatcccattcattcactaactcatcaatcaaattcaatcatccatcaacacatataaaaatcatttttccctttctccaatttctaatctattactattatttttcccggaaaattttcctattttccatgaatgttctggctctagggcgcttcctcacttcccccttatataagtcttcccctctcactccctccccaatccaattcacacgcatttttcttcatcccccaaagtttcaatctttgtattcaattcaccctttctctctctccatggccacttgtgttgatgccccaacccctctttctcggaagcctaacgggtcccaatccgatgatcattccttcaattacatgaaattctgccgacccactttctctgatcgcgttccctgcatacccatttgcaagaatcgtgacactgccttcacacgcgtggaggagtttgacacatgtgtggaggataatgatgatattgaggttgaggttgtggagggtgttgatctttggttgaagattcaagaggaggcaaggttagatgttgatcaagaaccaattttatccagctactatttcagttccattttgtctcacaaatctttggagagtgccttggccaaccacctctccacaaatttgagcagcttgagccttccaagcagcaccctttttgaccttttcatgggtgttttggttgatgatggagatgatgacatcgtaggtgctgtgaaggatgatttgatagctgttaaggagagggaccctgcttgcataagttatgtgcattgcttgctgaatttcaagggttttttggcatgtcaggctcataggattgctcacaaattgtggcttcaagggaggaaggtcttggcgctgttgattcagaatagggtgtctgaggtttttgctgtggatattcaccctggtgccaaaattggacgtgggattttgctggatcatgcaacaggacttgttgtgggggagactgcagttattggcgaataatgtgtcaattttgcataatgtgacattgggagggactggtaaggctagtggggagagacaccctaagattggtgatggggtgttgataggtgcagggacttgtattttggggaacattaagattggtgatggagctaagattggtgcttgttctgttgtgttgaaggaagtgccaccaaggactactgctgttgggaaccctgctaggttggttggagggaaggataaccctattaaattggataagatgcctagttttaccatggaccatacttcatggtctgattatgttatatagaagctaattaattgtctaacatgttttagagtttgtgtttaggtgggaattgttttggttgagggggcttggttgttgtgcaagagagaatctaagttctcctgctgacaacagggcgtcctttgaatcatcgtgttagatttttaaagaatagttagatgtagtactttgttgttgtaaggggccatgatgacaaccctttgtgtaaaatttatgaatatggatatttcagcttgttatggttnnnnnnnnnnnnnnnnnnnnnnnnnnnnnnnnnnnnnnnnnnnnnnnnnnn

SEQ ID NO: 10579 - DNA, 400 bp, Glycine max
ggaagtaaactgtgcattctaatctgcagagtgcatcagcattggatctggaaacgcgtggaagaagaagaaatggctcgcgcaggagggataacaaacgcagtgaacgtgggaatcgcagtgcaagccgattgggagaaccgcgaattcatctctcacatttctctcaacgttcgtcgcctcttcgacttcctcgtccaattcgaggctacgacgaagagcaagttggcgtctttaaatgagaagctggatgtgttggagcggagattggagctgcttgaagttcaagtgggcaatgcttcggccaacccttctctttttgccacatgatttttgtggtgtaagcactctccacctataatgtaaaatctaaatggaattccttatatgtaagtcgttt

SEQ ID NO: 10580 - DNA, 484 bp, Glycine max
cggacgcgtgggttctaatctgcagagtgcatcagcattggatctggaaacgcgtggaagaagaagaaatggctcgcgcaggagggataacaaacgcagtgaacgtgggaatcgcagtgcaagccgattgggagaaccgcgaattcatctctcacatttctctcaacgttcgtcgcctcttcgacttcctcgtccaattcggtacacacgcatttccttttcccactctgcagaacgacccatcccggtgtcgttttatctatccatgaagcaacaccaccactttgtccttcacatgattgggggccccgacgaagagcaagttggcgtctttaaatgagaagctggatgtgttggagcggagattggagctgcttgaagttcaagtgggcaatgcttcggccaacccttctctttttgccacatgattttgtgttgtaagcactctccacctataatgtaaaatctaaatggaattctttat

SEQ ID NO: 10581 - DNA, 659 bp, Glycine max
  unsure (1)..(659): unsure at all n locations
gttttcacacgcatgacacacttcacttctctcctcactttcgggtcagtcttctgaagatcttttggggggttgtgaatttgtgtcttcttggctcccaacccacacgcaacgcaaccatagaatggaatgaatgaaggcaaagcttatacttataaaagagagatagaaattggttgtgaaaaacagaagcactttgtttctaagtaaaaggaatcttcagctgccatgtttcatcgctggagcaattctcatcaacaggatcagggaagcagcgagctttatgctgaatccaagattaaagagctgaagggtgttatcggacccttatctggacgcagtttgacgtattgcactgatgcatgttttaagagatatttggaagctcgaaactggaacgtagacaagtccaagaagatgttggaggagacactcaggtggagatcaacctataagccagaggaaattcgctggcatgaggttgcaatggaaggagagactgggaaattgtatagagcaagttttcatgatagacaaggaaggactgttcttattttgagacctggaatgcagaacactacttcaatggagaatcagttgcggcatcttgtgtatcttttggaaaatgccatgcttaatcttcaccgggncaagaacaa

SEQ ID NO: 10582 - DNA, 291 bp, Glycine max
ttttgggtcagccttctgaagatcttttgggcgttcgtgcatttgtgtagaatggtgtgaagccttatgcttaataaaaagagtcggagagataggaattggttgtgaacaaacagaagcactttgtttccaagtaaaaggaatcttcagctgccatgtgtcatcgctggagcaattctcatcaacaagatcagggaagcagcgagctttgtactggatccaagattaaggagctgaagggtgctattggacccttagctggacgcatttgatgtattgcactgattcatg

SEQ ID NO: 10583 - DNA, 501 bp, Glycine max
acttaaatgagactgtgtaaggcaccaccccacaccacaacttcagcgcatccacgtcatcatcctcaacctcaacctctccgagcgagaaccagacacaagaaagaaaacgtgttgcgtcagtgttacccctttctccttctctttatctttcctgaatttggcgcgtttcgattcttcttcttccgaatcagagagagtctggatttcttgttgaagatgcgacgctcttctgcatccaaaaagacgggtcaatccaattccacccccatcgccgccgatctcttccgctccgcttcaagtaaggcaagctcgaaggaatcagagcgaattgatagtctattctattcgtatgccaatgggtctaccgggttgattgacccagtaagtgtgcttcatccaagactgtttgttttctttcctccattcaatatgcatatatgaaattgcattatcctgttgttgttttcttaattcaagtttcaaaccttggacatggat

SEQ ID NO: 10584 - DNA, 576 bp, Glycine max
ctttactgcataatcatgatttaatttatttgacttgatgttaaaactcttgttttgatttgtcatatatgttttttttgttgaatttcattttgccttcaattggaggtttggtgaactctggattaccatgactattgtcaagttaaatgcaatcttttaaaaatgatgctggtagactcagtctaaagaagaacaagaacgacagcttcttgaaatgatatagaagtttcaggtgcctacatcatattgataggcttgtttgcccttcaacgttatggcacatacaaggttaatttctttacttggtgaacatttgaacccagcaattcgtacaagcataaatttttcaccttcaagttaaggcaagctccaagggatccaaaacgaattgatagtctattctattcatatgccaatgggtctaccgggttgattgaactttggagatcgactatctctgaaagcgattgtctctcatataaaatgttaaaaaagctgtattggaaaactctatatagccacgcgccacaaggttggctgcaaataaaatatgcaattttttttatttaaaaa

SEQ ID NO: 10585 - DNA, 604 bp, Glycine max
ctccgagccagcgagcgagaaccagactcaagaagaaaacgtgttgtgttagtgttacccctttctctctttctctctttcttgaatttggcgcgtgcgtttcgattcttcttccgaatcagagggattctggatttcttgttgaagatgcgacgctcttctgcatccaaaaagtcgggtcaatccaattccactcccaacgccgccgatctcttccgctctgcttcaagtaaggcaagctcgaaggaatcagaacgaattgatagtctattctattcatatgccaatgggtctaccgggttgattgacccagaaggaatcgaaacactttgtgctgatatggaggtggatcatacagatgtgagggttttgatgcttgcgtggaaaatgaaagctgaggagcaaggatattttaccttggatgagtggaggagaggcttaaaagcattaagggccgatacagtaagtaaattgacgaggcacttccagacctagaaaaagaggtcaggaggccatcgaacttcacagatttctattcttatgctttccaatattgtttaacaggggagatacagaaaagcattgatatagagagctttgtgag

SEQ ID NO: 10586 - DNA, 567 bp, Glycine max
gcagagcgagagggattggagttgggaagaatagaatacgccttggatcttattcagctcaactcagatatggttatcccaccccctgtaaggcctcccaggattacacaatttctcaaaccttatgttctgaagatgaattttaccaataagtatgtgagtgcccaggtgattcacagcccaactgctactgtagcctcttctgcaagctcgcaggagaaagcgttgagatcaagcttggaaactagtcgcgatgtggctgcagctgcaaagattgggaagatactagcagaacgccttttgcttaagaacattcctgctgtttctgttcacttgaagagagagcagaagtatcatggtaaggttaaagcggttattgattctctcagggaagctggtgttaagctgctttgagcatgattgtttaattgtaccttagagagaacatccttgttggatcttattttttaggttttcatcattacagcaagttactgattgatcatatttctcaaagaccttagttaattacgttactagaaataagatgagtgttgatggttgctt

SEQ ID NO: 10587 - DNA, 484 bp, Glycine max
gttcggtagagagagagagagagaggaaagggaaagtgaaacgacatgatggtgggacagttgacggcgacgaagccgagccggagcgatgaggttttggatgctgaggagcaactgagaatcgctaatgagatcagagcccaattcgatgccttggaacccaagcgacccatcaagcccaacagaagcgaacccgacgccgttttgcaataccccgtcgcagccgcttctgtgaacaatatacctgagcttcacaagtttcaatcccttcaatctccctctcatgctataatttcatcggcggggtttgtggatgcacaggatgagtttgtggagacgcagtactataaagaattggcatccattgacaaacagcatcacacgacagggagtgggttcataaaggcggcgagagaaggacgggaaggtgaatatgagattcagttgcccaataatcatgttaatgccgctgaaacccaaccca

SEQ ID NO: 10588 - DNA, 1252 bp, Glycine max
gttcacgttctccgcgtccgctcctcacattttttcttcttctttcttctttcttttgggcgccgttcctgtctctcctcacatttttcttctctcttctctctcctcggcgccccaccgcgcgacccctcctttccccctcccccttcgcctccgccgcgacacccaccttccccttccggacctccgtgcgacccccccccctccgccgtgttttagttgcaaagttttagagttggattggaagattgtgaacttagaaagatggtgaagttgactatgattgctcgtgttactgatggtcttcctctagctgaaggtctggatgatggtcgtgatcttaaagatgcggaattttacaaactgcaagtcaaggctttgtttaagaatctctcaagaggacattatgaagcatcaaggatgtcagttgaaactggcccttatgtttttcattatattatagaaggacgggtctgttacttgacaatgtgtgatcgtgcataccctaagaaactagcctttcaatatcttgaagagctcaggaacgagtttgagcgtgttaatgggtctcaaattgaaactgctgctagaccttatgccttcattaagtttgatacatttatgcagaagacaaagaaactttaccaggatacacatactcagcgcaatattgcaaaattgaatgatgaactctatgaagttcaccagataatgactcggaatgtgcaggaagttcttggtgttggtgaacagttggccaggtcagccaaatgtccagtcgcttatcatcagaatctcgcatatatgctgataaggctagagatttggaccggcaggcgctgattcggaagtgggcccctgttgctattgtttttggagttgtcttcgtacttttctggatcaaaaataaactatggtgatcgagctcagtatgaaatttaaaacctggattctgtggcttcttgcttttctcacatgattatccagatttgcacagattggtgggaaccctttatgcatgagatgatgtcaactttttcttgacaacttcggtttagaaaaaacaaaaaagactatcctttgttacatctggatcagtctttctggaacagaaacctttgacctttatagtaaggagccaggatatgagaaaactttatccccgtggggatgcatataggcatttcttctttaaacttatcaattaccctcaccattattgcgttaatgaattaaataaattacctcttcg

SEQ ID NO: 10589 - DNA, 432 bp, Glycine max
ctgatgatgttttggcccatgctgaagagctccacattgtgaaaagatgcaaatttctaacacgccattctcctccttttcaatcctctgttcatccgtcgatcggctcggctggaccatccttgccgccgtttgccgcggcatctccggccactctctctcatcgccattcagtgtattttggtttagttgcaaagttttagagttggattggaagattgtgaactaagaaagatggtgaagttgactatgattgcccgtgttactgatggtcttccgctagctgaaggactggatgatggtcgtgatcttaaagatgcagaattttacaaacaacaagtcaaggctttgtttaagaatctctcaagaggacattatgaagcatcaaggatgtcagttgaaactggcccttatgtttttcattatattata

SEQ ID NO: 10590 - DNA, 228 bp, Glycine max
gccccccctttttttttttttttaaatcgaagaggtaatatatttaattcattaacgcaataatcctgaaaataattgagaagtatgaagaagaaatgcctacatgcatccccacggggataaagttttctcatatcctggctctcttactataaaggtcaaaaggttcctgttccagaaagactatcctttgttacatctggatcagtcttcctgttccagaaagac

SEQ ID NO: 10591 - DNA, 626 bp, Glycine max
ttcttacgcgtccgccgtgctccagatactccatatgatgagagtgcgtattcaaacattccaatgacctcatatgagcttcctgatggccagacagttgaaattggagctgacagatttaagataccagatgttcttttcaatccatccctggttcagtcaattcctggcatggagagctttgcagaaattgctccttcagttcgtggcctgccccaaatggtgattgaaagcattaataagtgtgatgtagacattcgaagagagttgtttaatagtatactgcttgctggtggtacagcttcaatgcaacaactaaaggaacgccttgagaaagacttgttagaggaatcccctcaagctgccagagtaaaagtattggccagtgggaatgctactgaaagaaggtttagtgtttggattgggggtagtatattggcatcacttggctccttccagcaaatgtggttctccaaatccgagtatgaagagcatggagcttcatatatccaaaggaagtgtccatgagctgctgttggtacttgtacaagtttattttactgccatttatcaggaagtactatgaacgctgatgtagtgattgtctactaatggatttttatttc

SEQ ID NO: 10592 - DNA, 1091 bp, Glycine max
cagaaaggggaaccaaacaacaaatattcatggctttctttattctctccttcctcttccttcttcttgtttcatctgccactgcttgtgatcgctgcttgtatcaatccaaggcttcctatttctccaaagcttctgctctttcatctggggcatgtgggtatggctctttggcactagacataagtggtggacaccttgcagctggtgtggattctctcttcaaaaatggagcaggttgtggtgcctgctttcagataagatgcaagaacccaactctatgtagcaaagaaggtaccaaagtggtattgactgatcttaatcacaacaatcaaactgattttgtgctaagcagcagagcctttgcgggcatggctcaaaagggtatgggccaacaaatactgaagcttggcattgctgaaattgaatacaagagagtaccttgtgattacaaaaatcagaatttggccgttcgtgttgaagaatcaagcaagaagcctgattacttggcaattaaatttttgtatcaagggggacaaacagagatagtagccgttgatgtggctcaggttgggtcttcaaactggagcttcatgagcagaaaccacggggcagtatgggacacaagcagggtaccccaaggtgcattgcaatttaggttagtggtaacggcagggtatgatggcaagtggatttgggcaaagaaggtcctacctgctgattggaaaaatggacttatatatgattctggccttcagataacagacattgcacaagagggttgctccccctgcgacgatggaacctggtcatgattcattgctttgctgctcaagaataactcacatatacacatacatagtagccatcaattttattaatacgatactataggctcacaataagcaacttataataatactaaggaatcatggactagcttaataaatttgaaaagcattcttatttctgaaccactctccacttcggtactttatattctttctccttgtaagttgtaagttgtaaccaaccaaaataatagactcttcctttttggaatatatgaattacatttttacttttttttt

SEQ ID NO: 10593 - DNA, 634 bp, Glycine max
tgaaattgaattagctggggcatgtgggtatggctctttggcactagacataagtggtggacaccttgcagctggtgtggattctctcttcaaaaatggagcaggttgtggtgcctgctttcaggtgggtgtgtgtacaattatcaggaccacgtccaaccaatttttatttcattaattattattgtcatgagagtagtctaatgaacattttttttaatgtaattaatggatgatatgctgcagataagatgcaagaacccaactctatgtagcaaagaaggtaccaaagtggtattgactgatcttaatcacaacaatcaaactgattttgtgctaagcagcagagcctttgcgggcatggctcaaaagggtatgggccaacaaatactgaagcttggcattgctgaaattgaatacaagaggtaggcctaaatcaaatcaactttagttttagataagttttattttatcccgttctttcttgctttgcgagtggttttggttttggttttggttttggtccgtccccacttcccacctaacggccagcgccaccggcccacccaccacctatagggaacaatcaatgtggaccaacgtttaactatggaatccctaggacaatcatgtg

SEQ ID NO: 10594 - DNA, 500 bp, Glycine max
cagagatagtagccgttgatgtggctcaggttgggtcttcaaactggagcttcatgagcagaaaccacggggcagtatgggacacaagcagggtaccccaaggcgcattgcaatttaggttagtggtaacggcagggtatgatggcaagtggatttgggcaaagaaggtcctacctgctgattggaaaaatggacttatatatgattctggccttcagattactgacattgcacaagaggcttgttccccctgcgatgatgggacatgattctttgctgaaaaataactcacatatacgcatagatagtaggcatcaattttattaatactatactataggctcacaatgcaacttataataatactaaggaatcatggactagcttaataaatttgaaaagcattcttatttgtaaaccactctccacttcgttactttatattctttctcattgtaagttgtaaccaaccaaaataatatattcttcctttttggagt

SEQ ID NO: 10595 - DNA, 682 bp, Glycine max
agccatcagaagaggagagaaaggcattgtgaaatcaacagagaaacatttcactaatagagagacataagcataatattgagaaataatggagggttgtacttattgtgtgaagttgctatgccttgttgggtttgtggtgcttgtgagtactattgcaggggtggagagtgctggtgaatgtgggaaatctaccaccccagataatgaggcttataagcttgcaccatgtgcctcagcagcacaagatgagaatgctagtgtttctcagagttgctgtgctcaggtgaagaaaattgggcagaacccaagctgcctctgtgcagttctgctctccaacacagccaaaatggctggtgtcaaccctcaagttgctgtcaccatccccaagcgttgcaacctggctaatcgccctgttggttacaagtgtggaccttacactctgccttgaaagagttgaggttgttgctgaaaacaaagatgacagggcgtaagtgcactatggatgttagctactacaaactgtgactacatgtttgttgtattgtcttgtaacttcctagtgaataagaactagcagctcactagtgtaccctataataaaacatgtactttcggtgttatatgtgcctactcaaacttttaactgttttaacattatattttaatcaccgttaccacg

SEQ ID NO: 10596 - DNA, 705 bp, Glycine max
  unsure (1)..(705): unsure at all n locations
ggcattgtgaaattaatagagagacataaaaaataaacatatattgagaatggagggttgtgtgaagaagttgctatgccttgttgggtttgtggtgcttgtgagtactattggtggggtggagagtgctggtgaatgtgggaaatctacaacccctgataatgaggcttataagcttgcaccatgtgcctcagcagcacaagatgagaatgctagtgtttctcagagttgctgtgctcaggtgaagaaaattgggcagaaccctagttgcctctgtgcagttcttctctctaacacagccaaaatggctggcgtcaaccctcaagttgctgtcaccatccccaagcgttgtaacctggctaatcgccctgttggttacaagtgtggaccttacactctgccttgaaagagttaaggttgttgctgaaaacaaagatgacagggcgtaagtgcactatggctgttggctactacaaactgtgactacatgtttgttgtatcgtcttgtaactttctagtgaataagagctagctgctcactagtgtaccctataataaaacatgtactttcggtgtnnaaaaaaaaaaataaaaaaaaacaaaaaaaaaaaaaataaaaaaaataaaaaataaaaaaaaaaaaataaagaataaatttttacaaaaaaatatgggggggccgttttaaaggttcaaagtttactt

SEQ ID NO: 10597 - DNA, 490 bp, Glycine max
gtgaattttttgggtcaaagtcagataaaatctttgttttaaagtatggatcggcaccaatttgtttggtgatgagcttcatgttcagctccatggccataggatatctgattgatgccaattttctgatgaatgcatatggggagttcttgtccgggggttacacacaaactatattagaaagagggttcaccttagctcttgttggtaatagggtgctttgtgttgctgttcctttgatgttatggatgctgggtccagtgctagtacttttagcttccttggtgttggtttttgtgttgcatgagtttgattttgtctgcaaattcccagacaacaattagcacggtaccactgtaaaatagcctagctagctagaacaatatgtatatattcagagagagagagaagtcgaattgaaaaatcttgttgaagtttgagatgtatgatcaactttatcttctaataactgaccaatatgtgagcgagc

SEQ ID NO: 10598 - DNA, 527 bp, Glycine max
gacagtgtggaacaagaggttggaagtagcactgtgcggaaaatcgaggaatcaaaattagggttcaaaatctcattgaggagaaagaagaagaaggatgtggcacgaggcgagaaggtcggagaagaaggtccacgacatgatggacgcggctcggaagagagcgcaacgacgcgccgtttacctcgccaagagacgcggcgatcctcagcaatccattcagctcgtcggctttcctagccgaacctatcgcgacgacgctctctaccaagcctcacaggatcagcagggcctgataccttggaatgggaaacaggatgtattgatagaccgatttgatgggcgtgctctccttgatttcgttcgcgattctagtcacaggcgcgctccggagaagtctgaagaagaagaagagttagaagagtttgttaattttgagcgttatcgggatttaataaagcatcgccgtagaggatgtcgtcactgatgaggaggctttggagcatgtaaatcaagagatggaggcc

SEQ ID NO: 10599 - DNA, 544 bp, Glycine max
cggctcgagctcgagcgattcggctcgagtagtcattcctgtttcatatacttcattacattgctcactcactaatcacttgctgcattttctttcctcactcttcacccttgagaatttgtcattccgacatggaacttagttttaagcaccatcttggccttgcttgtgtcgtacttcttttacctgctctgtgtagctcacaggactctttcactgactccagcccaacatatcatggtagccctgattgctatgggaatccaagtatgagcctttttctaactaactatggaatgtgctagtacatataaattgtttgtaccaaacacatttgattgctgactaggcatttaggatatacacccatgtttgcatgtctcaataatgatcttgatattttttaaccaaaaataaatttagaaaatttactctgttgatgcatggtacttcctgggcatgctttttagaagcaaaaaatgtgcactatatggtagtgtgacattataccaccttttgcgactatgccccattatctcaacat

SEQ ID NO: 10600 - DNA, 524 bp, Glycine max
gctcacaaagcattctactatcattattagtcattcccgttgcctttacttcattacattggtcactactaatcacttgctgcattttctttcctactcttcacccttgagaatttgtcattcggacatggaacttagttttaagcaccaacttggccttgcttgtgttgtacttcttttacctgcattgtgtagctcacaggactcttttactgactccagagcaacatattatggtagccctgattgctatgggaatccaaggggagcttgtggctttggcgaatatggaaggactgtgaatgatggaagtgtggcacgagtgtctaggctatggaggaatggaagtggctgcggtgcatgctatcatgcaaggtgcaaaataccacagtactgtgatgaacatggagcatatgtggtggtaacagactatggtgaatgagacagaacagacttcataatgagtccacgcgcctactcgagattgggacgcatcgcggatgcatctgcagagttgttcaaat

SEQ ID NO: 10601 - DNA, 400 bp, Glycine max
gtcagagaagaagaggagcttaatggattagggacccaggcaacaaactggatgcagagtgtaggttacaagggtggtggccgtggcagcagtttggaaggaaacagtggcacgggtagtggatcaagacatcggcatcataattattctggcagtggaatctattacagtacaagaaagtgaatggtacttgagtgaatactgaaggcagatatttggtgccttctgcttcccctcagcaaggcagatatttgtttgccacactaccacactttgctggtcaaaaaattcatggcaaaggcaaggctaatagcttatcttgttggtaaggggtggtttcgaacatagagtgttggagatgctggcaggggttataaaatggtgtacacaacactttggg

SEQ ID NO: 10602 - DNA, 557 bp, Glycine max
ctacaacagatgttgcgcaaagggcattgaaagccggactgcagacaatcccaaataaagatttttggtctacctgtccgaccttcctttgttaagcctgtccggccaaaggatgaactaaggagagaattagggatggatgaggatcttcctgctgtattattgatggggggaggtgaaggtatggggcccattgaggctactgctcgggcacttggagattcattatacgacgagaatattggggctcccgtaggtcagatccttgtgatctgtggtcgtaataagaaacttgctaataaactgagttctattaattggaaggttcctgtgcaggtcaaaggatttgttaccaaaatggaggaatgcatgggagcttgtgattgcataattacgaaggcgggcccagggacaatagcagaggcccagatccgaggcctccctattattctgaatgattacattactgggcaggaagctggcaatgtcccctatgtagttgaaaatggatgtgggaagttctcaaaatcccccaaggatatagcaaaaattgttgc

SEQ ID NO: 10603 - DNA, 1044 bp, Glycine max
tcgtcttcataatcagctgacacaaagaagaaagagaagagaataatacgaagagccagggttttgcctcagaaagggttcacccatttgcaaagtgcctcgagagttgagatcacatcggaacaaaacttggagaattattacaatttacaaggtgacaaaagtgcatggcatagatttttttttatctgtataaatcaaggtaccagagaatttataacaactcagacacttttctcaattgagacctcttggtaaatggtatgtcatagataaagctacatgcgtgctcaacaaagttcttattctcaatctcccttaattatgttggaacctttcgctacttgcttcacctttcttcataggaagaccaaattcttcctcaacaaaccaagaatcaaggagatgatgggtgcatgctgcaagagaagacaatccaacataaaattattctcttcaagttctgacctgtcaacctcttctttccttcacatgaagctctccactcagtttcatcaagttttcaagcttattgacactaatggggatgggaagatctcaatcaatgagctcagtgaattgctctcaagccttggatacaacaagtgcactgctgtcaaggaagctgaaggcatggtgaaagtgttggacttcaatagagatgggtttgtggacttggatgagttcatgattgtcatgaatggcatggaagaagaaaaagaagagaaatttggaagtggcatggagcatgatggtggttacctcatggatgcttttcttatctttgacactgacaagaatggcctgatttcagccaaggaactgcagagagttctgatcaatctagggtgtgataattgtagtcttagagagtgcaagcgtatgataaaaggggttgataagaatggagatgggtttgtggattttgaagaatttcgattcatgatgtaaagtggatttgctaattagagcttgaaatgggtttttgctgtatttcaatattattaatttcttttgttttttctttcttttttctgtacacaa

SEQ ID NO: 10604 - DNA, 866 bp, Glycine max
ggaaactagaaagtaccgttatctaacttttatctctctctctctcaacgtgctcgtgcaattaagcaatctgaatccaaggttgtaattgtaactagctaatatgtcttcttcataccattttcaatctcagtcctatgctccatctgcgccagaacaacctccatattccaattaccatcacacttcttcatcagcatcatcgagttttccaccagggacaccccatgacgtcattaggagctttcagatggtggatagggaccgaagtggcttcattgatgaacgtgaattgcagcaagctctctcttctggattccaccacttcaacctcaggaccattcgttttctcatgttcctcttcaagagtccaaacctacccctcacaattggaccaaaggaatttgcagcactctggagttgccttggtcattggcgaggcatatttgagaggtacgataaagacaggagtgggaaaattgatccattagaactcagagatgctctgtatggtattggctatgctgtaccaggctcggttctacaactactgctttcaaagtatggtgatggaagtggtaggagggttgaacttggttttgacagttttgtcgagtgtgggatgattattaaggtaaaactcaatgagcttttgaagctatggacgtgcctctcatttctctatttcttcttcagtgatataggccaattcacctgttccattgtttgctttgcttgatatatgtggttccagacatagatgtctatactctatcctgttgcatatgcattatcttcactatgtgatatgatatgtgtggtgagaaataaacatttgggtgggtgtcatatgttcatgtttgaat

SEQ ID NO: 10605 - DNA, 640 bp, Glycine max
atttgagaggtacgataaagacaggagtgggaaaattgatccattagaactcagagatgctctatatggtattggctatgctgtaccgggctcggttctacaacttctgctttccaaatacggtgatggaagtggtaggagggttgaacttggttttgacagttttgtcgagtgtgggatgattattaagggtctgactgataaatttaaggagaaggatacacggtatacgggttcggctacactttcatacgatgcctttatgactatggtccttcctttccttgtatcttatgattgataagtgatgttcgtcggcaagatttccaagttctttggtcctacattcaattgattgttttatgactttgattgtgaataaatttttagggtgcaacgatttgttatattcatttgtgttccagtaatgctcacatacatctcattcatttacatttttttttaaccaacaagttacctattatagctaaggggtttgtggcaagagaagtgattaagcgttagtaggtgagtggtgaaagtgtgtatatagaagaatgtatgtatttaaacttttttctcttgtaaacattatgtaaaagatgtgcaagttccaagaatttgtttcaataaaaaaaaa

SEQ ID NO: 10606 - DNA, 416 bp, Glycine max
ctctgaacgtgttcgtgcattccaagccaaggttgcaacttactagctagctatgtcttcttcatacggtggataccattctcaatcctatgctccatctgcgccagaacaacctccatattccaattataatcacacttcttcttctacatcaaattcatcgtcatccagttttccagcagggacgccccaggacgtgattcggagctttcagatggtggatagggaccgaagcggcttcatcgatgagcgtgagttgcaccaagctctctcttctggattccaccacttcaactttaggaccattcgtcttctcttgttcctcttcaagaatccacaccaacccctcacaattggaccaaaggaatttgcagcactctggagttgccttggtcattggcgaggaatatttgaga

SEQ ID NO: 10607 - DNA, 569 bp, Glycine max
catgaaaaatacatgttcttgttaccaagcgttgcttcttctttatatacttgtgtttgttacggtgttgattacttgttacactttcagggtctgactgataaattcaaggagaaggatacacggtatacgggttcagctacactttcatacgacgcctttatgactatggtccttcctttccttgtatcttatgattgataagcgatgctcgtcgtcaagatttccaagttctttggtgccacattcaattgattattttttgactttgattgcgaagaaatttttaaggtgcaacgatttgttatattcatttatgttccagtaatgctagactcactttcatacagagtacttcacattcatctcattcatttacattttttttaccaacaagttacctatatatagctaaggggtttgtggcaagaaaagtgattaaacataagtaggtgagtgttgaaagtgtgtatatagaagaatgtatgtatttaaacatttttttctttacatatagttgtaaacatttgtaaaaatatttattgatatgaatacactcaattatattt

SEQ ID NO: 10608 - DNA, 731 bp, Glycine max
gacactaacactacaagttcccatcttcaccacgaagcattcttagcattctacagagagaaaagtgacactctacaatggttccaaagcttagtggtgacgtggatgatggtggaactgggcttgaaactaagcctatctgaacaataccctcctcttccttcttctattaaggttgaagttcttagataagaagaagaagagagcataagatagccttttgaagctgaaagcaaattttgtgaagtagcatatatactttcaatttgtttagttcttctgggtggagttccttcatttggtgtttgtagtcatggaggtttcttggttctataccttttgcagctttttatggatccaaccatcccaaatgtgccaatggttcaaaagaaatgatatgataacagaagctcatctcctttgttaccagattgacctgattgagtgttagacttatttgtagaggcagatctcctttggaaagtgtaaccctcaatattggaaaatgaagcttcatctatttcagatatatttatgattgaagattcagctgtactgggcaaatcttctttggcaaaagttacttaattttcctttggttggatacttggattccaagtagtaaaaatatatcaacattattttttgccttcttaaaatattaccattcagagataatttctctaggaactccaccctttcttggggggcaaatctcctttggcatcttt

SEQ ID NO: 10609 - DNA, 1749 bp, Glycine max
ccttcgcgtcccgccagcgtctctacgacaatctcctttctctctatctctagctcagatgagtgctctctctaactccagtagtagccacggcaattccttcctcaagatgcccgccatcaagtttaccaagctcttcatcaatggagattttgttgattccatatcaggaaggacatttgagactatagaccccagaaaagaagaggtaattgcaagagttagtgagggagataaagaagacattgatattgctgttaaagcagcacgtcaggcatttgactcgggtccatggcctcgcttgccaggctctgaaagggcaaaaattatgatgaaatgggcagacctagttgatgaaaatatagaagaactagcagcattagataccattgatgctggaaagctatactatattaataaggtagcggaaattccttcagctacaaatgcgttacggtactatgcaggtgctgctgataaaattcacggtgacgtattaaaaatgaacggggatttccatgcttatacacttttggaaccaattggtgttgtgggacacataattccatggaatgcccccagcctctcatttttcatcaaggttagcccttccttagctgcaggctgtactatggtcctcaaacctgctgaacaaacacccctctctgctttgttttatgctcatctagctaagttggctggaatcccagatggtgtgcttaatatagtacctggatttggcccaactgctggcgcagcaataagctcacacatggacatagatgcggtcagttttactggttcaattgaagtagggcgtgaagtgttgcaggctgcagcttggagcaatttaaaaccggtttcacttgaattaggaggcaagtctcctctcattattttcaatgatgcggatatagacaaagcttccgagcttgctctctttggcatcatgtctaacaagggagaaatttgtgtggcaggttctcgtgtgtttgtccaggaagagatctatgatgaatttgagaagaagttggtggagaaggcaaaatcttgggtcgttggggatccttttgatcccaaatcgctgcaagggcctcaggctgacaggaaccaattggagaaaatactttcatatattgagcacggaaagagagaaggagccacccttttgacaggaggtaatacagtgggcaacaaaggttactacatagaacctacaattttctccaatgtaaaggaggacatgctaatagcacgggatgaaatatttggccctgtactagcgctgatgaagtttaagaccatggaggaagcaattaaaagtgctaacaataccaagtatggcctagcagcaggaattgtaaccaagaatttggatactgcaaacactatgtcaaggtccattcgtgcaggcattgtttggatcaactgctattttaccgtagggagtgatgttccttttggagggtataagatgagcggatttggaagagatttgggattacaggcccttcacaagtacttacaagttaaatctgttgtaacacctattcataattctccttggctttgaatagttgaatgtctcctacgtgagcacaaatgtgagtcttttcatttggaataaattacactttaattccttataatgtgtgaattgtctcttgtattattatgattactttgttttattaccacgttgttaacttaaatataatttttagagtgaaacaacaaattatagctatt

SEQ ID NO: 10610 - DNA, 1087 bp, Glycine max
  unsure (1)..(1087): unsure at all n locations
cccacgcatgtgtccaaaacagaccaaaaatagaaagaaagagaaataccaaaaccttggcgcatcatattctttattccctcacttggatcgttaattccgcgaacgagcttctgcccttcaaattaaccatggagaatattggtgaggagtacggctactggccggagaacgacatgcttttccaaaacgaagaccttggcagctgggcgataatggatgaggcagcgttatcagggtcagggtactatgattcaagctccccggacggtactggtgcttcttcatcggtggcatctaagaacattgtctccgagaggaatagaaggaagaagctcaacgataggctttttgctctaagagcagtggtccccaacattaccaagatggataaggcttctatcattaaggatgctattgagtacatccagcacttgcatgaccaagagaagagaatccaagctgagattttggatcttgaatctaggaataagttcaaaaatccaacctatgaatttgaccaggacctccctattctgctcaggtctaagaagaagaaaacagaacacctatttgattctctcagttcaagaaattccccatcaattgaaataattgagctgagggtaacatacatgagagagaagacgtttgtggtgaacttgacatgtagtaaaaggacagacacaatggtaaaactgtgtgaggtgttcgaatctttaaagctcaaagtcattgcggccaatatcacatctttttcaggcacgcttttgaagaagacagccttcatcgaggcagatgaaaaagaggaagactttttgaagataaaaattcagacagcgatttcagctctcaatgatcctcaaagcccaatgagcatctgatgaagttcagatcgaagctgagattgttctgttggttgagtttctttttcccactcactgttaattatctgcagtgaatgagtcttaaactcgaaagttggcaagttttctttttcttttccattntctgtatgttgatgttgatagcctctaacgttgtaagctntacgttattaatgaaatcgcattttcatgttcttcat

SEQ ID NO: 10611 - DNA, 655 bp, Glycine max
tgaaaacagaccaataataataataataataaaagaccaactccttggcttggcgcatctttattccctctcttctataaatcgttcgatcgttaattcctcgcacgagcttgtgtccgtcgtcaaaccatggagaatattggtgaggatcagtacggctacttgccggagaccgacctgtttttcccaaacgaagaccttggcagctgggcaataatggatggggaagcggtctcttggtactatgattcaagctccccggacggcaccggtgcttcttcatcggtggcatctaagaacattgtctccgagaggaatagaaggaagaagctcaacgataggcttttggcacttagagcagtggtccccaacattaccaagatggataaggcttctatcattaaggatgctattgagtacatccagcacttgcatgaccaagagcagagaatccaagctgagattttggatcttgaatctgggaataaactcaaaaacccaacctatgaatttgaccagacctccctattctgctcaggtccaagacgaagagaacagatcagctaaacggttctgtcagttcaagagattctccaatcgatataattgacgtataactcttaactcatcactctcttgtatattttatattagt

SEQ ID NO: 10612 - DNA, 526 bp, Glycine max
attctcaaacatgaatatcagcacaagatactatgattcattatggtgggggagagcagagcctatctatgtcactagttgcccacgagactcaagctcaaaggaggcttcaatctcaaatgtacttttcattaacattactgcaaattcggaaaatggcatcttcctgtctggttcaaagagaggattgttaagaaatttgagattcattgatatggacattacttacagaaggttcaccaattatgctggtgggttattggactataggccaggatgccaagagttggtaaaacacaggactgcagggattatgatggagcacattgaagggcttgaggttaaaaatgttgaaatgagatggtcaaacgatcaactagagcagtggaataatcctctagagttcacgccatctactgtgaataacatctctttccttaattttagttctggtttgtatacaaatagcatatcatattattaactttgaatctgcaaagggagaatgtcaaatcattggctgcat

SEQ ID NO: 10613 - DNA, 554 bp, Glycine max
atttcacatcatctcgaacgaacgggggacctctcttctttcggattcgccaagctgttgtttgtgattgtttcagttcattattaaactctcgctctatagatacacttccaaacctctttcgagatctgaaaaacactcccatggaccgtcgtaaagagaaaaatgctccatggttatcggtgccgcaatttggggactgggatcagaagggccaagtgccggactactcacttgatttctcaaagatccgggaaactaggaagcagaacaagacaaatatttccagggcaagccttggcaatgaagaagaattcatggattcaacaacctccagcagcgtcaacactgcccacagcagtgagcaccctcaaccccactaccatcaaacccactctccaactgcaaggaagagcttcctcagctacttcaattgttgtgtgaaagcctaatattcaagggcaagtgcaatctttctcttgttttctgaagattctggataggaacagcttgcttgtctgttcgtttggtgattaatacttattagctattga

SEQ ID NO: 10614 - DNA, 688 bp, Glycine max
  unsure (1)..(688): unsure at all n locations
gctatgacgtngcatgcacgcgtacctaagcttggaatttgggttggcaatattatccaaattcgtgagagctaattcaatcaaaatgcctcccaaatacaagctagtgctgttgatagcattggttttggttgcaacctcccttgctggtcgcacaaaggaacatcctaagcatcctccatcccttcaagaacaacaacacaccccacaccttgatagctacccgccaaagcatagaccgaaaccacctcatcctgtacatggtgccggggaggaaccaacctccattccacgaaagaagggaccaagaaggcctccgaactgatgagtgagtcaaaggtttcagattgtgcatgcgtcaaatggtttaactttgactcgatctctaccaccacaacatcacgatatgttgttacaatcataatcgcaatttgaaaccttgggctagctaaaactattttaatataaagtattaatggtcactgctacatgagcgtctatgattaaataaaaagtagggagtttgaacccatgtaataccatgttgtgaggttctccctctttgtgtgtgctttaaattttcacatatagtttgatttgtgtccggtgtggtctctgtttcttgtatttatttgtacaagctagatgctaaaatggatgagttaaagctcgcacttgttaaaaaaaa

SEQ ID NO: 10615 - DNA, 605 bp, Glycine max
aacacttggtgattggacccggagtctcaaagtcaagttctcagagtgttgccagccaccggacaacggcaagagtggacttctaagagctgaatacttgcaaggagatagaagtccgagtactctccctaaagttctaattgacggtccttacggagcaccagcccaagactacaagcaatatgaggtggttttgctagtggggctaggaattggagccaccccaatgattagcatactgaaggacatagtaaataacatgaaggccatggaagaggaagaggggagcaacatagaagagggaggagcaagtagtgggtttggtaatagatccccaagagggtcgtccccacacaagaaaactcgctcgagcaacttcaacactagcgacggcctacttctagtgggtgacaagggagcaaggttcctttgactggttcaaactggtgatgaatcacgtggctgaagaggatcataggggagtcgttgagctccacagctattgcactacgtgtctatgaagagggtgacgcgcgcgcaactcttattgctatgttgcaatctttaaaccatgccaaaaatggcgtggatattgtccctggcac

SEQ ID NO: 10616 - DNA, 1302 bp, Glycine max
agcccctaatctatgtatctatctatcttcaatactactacccttctgtctctctgtacacagacaccaacaacaaatagcacacacaatgaaagaagaaacatggaaactccacgcatccatcatgccatcaaaaccaaagagtccacaccacccaacccaaccctctttctctctcatcaatggcccagctggaccaaaatttatgtagaagaacgaaaaacagaactgaaacaaagaaggaaagaacgaatgggaaaacaaagaagaaagagaagttggatgtgttcaaatgtcctccaaccaaacccaccttacatttccctttctctctctctcatcaaaactatgttccccgaattgcccttctgcaagcccccaaaaaatcccatcttcatcactggtctttcaaaagaacaatatttttcaccgagttatgtgggctttttggatttctttgtctcggtcagagtcttctcacagagaaaacaggaaagcgagaaccttcttaccccttcacctcttctctctttcttgggcctctcttttcctatttctttctttctctcacgtttcgttccatcttccctcacccctcaccccaccccacccaccttcttctttctctctttctccccttttccctttagtcttcgtttgttcttcccttttgggttctcttgtttctctttgatctcatgaagaagatgaaaggggttgtctccttggaccctccttatgaggtatatcaggatcagagggccaggctgaggcaccagagtctcttgcaggactatgaagacctgcacaaggaaacagaagccatgagaaggaaattgcaggctacgaggcagaaaaagttgatgctggaagatgaagttagatttttgaggcaacgttacaattacttgctaaaacaccctattctaaagcctcatccaaagcaagttgtaaagccacaaaagctcaaattgcaagcacccatcatctcgaagggaaagaattacagcaggaaggagcctactctgcgaccccaccccacatctcatttgaactcaaatggaaggatttccaatgtggctgaagccccattgaaaaaaactggccacttgtttgatctaaaccttaatgctaggagttctagtaaaagagatgcttcctttaacggttctgctccaccagtgtttgagttgaatcacgaacaaaggagtcacagcagcaaggaagccacaaagaagagtgtaactccatttttcgacttgaaccacatttccagagaagaggaggaattgcacgggaaca

SEQ ID NO: 10617 - DNA, 422 bp, Glycine max
ctctgacccattctctctctctctctctctctctctgtctctacacagacaccagacaacatatggcacacacaatgaaagaagaaacatggaaactccacgcatccatcatgccatcaaaaccaaagagtccacaccacccaacccaaccctctttctctctcatcaatggcccagctggaccaaaatttatgtagaagatagatatacaaataaagaaagaatgggaaaacaagatgatagagaagttagatgtgttcaaatgtcctccaaccaaacccaccttacatctgtctttctctgtctctctctctcatcaaaaccatgttccccgaattgccctgttgcaagcccccaaaaaatcccatcttcatcactggtctttcaaaagaacaatatttttcaccgagttatgtgagctt

SEQ ID NO: 10618 - DNA, 782 bp, Glycine max
gtccaaccggatgcgagacgacgaccgctggggactctcttgaccatgtaacttaattgccttaaggaacgttcgagaccacagaggtttctctagtcttcttctgtggagagcttgttttctcttgttcattcatctcacttccaattaaggaacaagctttccaccaatttgaatcaccaatggctcgctctttctccaacctcaaggttctctctgctcttgtcgccgacggattctccaacactctcaccaggcgtgggtacgcagtagcgacacaaagcgcaacaagaggaggagcagcctccatcagcggcaagtcaggggaagacaaggtactaggaggaggtgctgaaaaggtttcgtgggtcccagaccctgtcactggttactacaaaccggagaacatcaaagagattgatgttgctgagctgagagccacggttttgggcaaaaaattcaaccactaggctctacttaatttcaataattaacctttttggtctcacgtgaatatgttatatgatatatgaagttcacagaaccttcggggattattcagcatggggtttttttcttgtatttctctcttgagaatttggactagcatatgaccaaattaatgtttactagtgtgattggatctcccgttgaaaactcaaagctatgcttctgttgaattcactttcgccgaataataggagtattttgaatctttctatgcaaaatatccaaatgtacacgctctattaagtatgaaccctccttttccgttttcattt

SEQ ID NO: 10619 - DNA, 707 bp, Glycine max
gactcacaaataaacataattacttgccttgaggaacgttccagaccacatacagaggtttctctagtgatcttcgttcttctgtggagatcttgttttttcatctcacttttcttctaattaaggaacaagctttccgcagttgaaaaccctagctagctagcttccaccaatttgaatcaccaatggctcgctctttctctaacgtcaaggttctctctgctcttgtggccgacggattctccaacactctcaccaggcgtgggtacgcagcagcgacacaaagcgcaacaagaggaggagctgcctccatcagcagcaagatagctcccaagtcaggggaagacaaggtaggaggaggtgctgaaaaggtttcgtgggtcccagaccctgtcactggttactacaaaccggagaacatcaaagagattgatgttgctgagctgagagccacggttttgggcaaaaaattcaaccactagctcgctagctagttaatttcaataacctttttggtcacttgaatatgttatatcatatatgactctctcgaagttcacagaaccttcggggattattcagcatgggccatctagcatatggccaaattaatgtctactagtgtgattggatctcatgttgaatactcaaactatgctttagttgaattctcttttgctgaataatacgagtagtttgaaactttc

SEQ ID NO: 10620 - DNA, 576 bp, Glycine max
gctattctggccgttcgaattcgcttcttctttctgttatttttttccccttctcctcatctcctcaccatatataaagcaaaaccttggtgtacgctttctattcctttcattgtttcttttctcttcgttctgaaatttcgtttctctctccaacgctacaatgtcggaagctaagacccaaattgaatccataaggaagtgggtcgtcgagcacaagctccgtactgttgggtgtctgtggctcagtggtatttcgggttcaatcgcttacaattggtctcgacccaatatgaaaactagtgttaagatcattcacgcaaggttgcatgcacaggctcttacgctgggagcattagccggagctgcactagtagaatattatgatcgtaagacaggagcaaaggcttcgtaaggaattttgacaataagtagaacgcaaccaaagtaccttgaattctttataccgagggatcctagtacactacctgatatgattatagctaaatttgcaattggacttgtactgtactctattcattcttaaaataaaatactaagaaatgttaacatgcc

SEQ ID NO: 10621 - DNA, 817 bp, Glycine max
  unsure (1)..(817): unsure at all n locations
gcaaaatcagcaacaaccgaacctatcatttttctcattattgttgttggagttggagttggagttggaccacaagaatagttttgagaatcattgttctagtgtcgatagatggatggggaattgcatccactcatgttgtagtttcttttctcttcgttctgaaatttcgtttctctctccaacgctacaatgtcggaagctaagacccaaattgaatccataaggaagtgggtcgtcgagcacaagctccgaactgttggtaaaatttctcaatcccccacttaattcgttctttggggtttcctcattcatgggtattggattttgttaatttcgatctttttgcggtttttgcgatttttatttggatcagggtgtctgtggctcagtggtatttcgggttcaatcgcttacaattggtctcgacccaatatgaaaactagtgttaagatcattcacgctagggttggcttcttataatttcttatcttttcgaatactgtttttgacctaatttaattatctggatttgcatgcaatttctgcaatccctgttgctttgatgttttgtttatgatttgctactacgggttgtttcatcgaggcctttcattgtgatgtgatcccaatttcacctctccacgaagttaatattggcaatcacctacgaaattgaaatgcagatccatttatttcgacctctagatggcaattgtgaaaagttaattattggttggcatttacaancataaattattggagttntgatgaacaatactgtaaatgtttgtggtataatgggctttggtttttg

SEQ ID NO: 10622 - DNA, 1058 bp, Glycine max
gtggctttgaatttggaaagagagggtgagagtgaagacttttttgatccacatgattcaatgagtttaaaaagttgcacagatggtgaggataatactggcacagaccaagcattgaaattcagtgctgctggtggggaattttttgatgcttgggaagagctctcttctgacggtgggactcaaaattcacatcgtgatattgaagctgagttgcgtgaaataaggttgagtctattgatggagatagagaagcggaagcaagttgaagaatcccttaacagcatgcaaagccactgggagagacttaggcaacggttatctcttattggaattgttttgccttcagatcttactgctgagggtgggcagctgagttctgatcctatggaagatgtatgtcagcaactttacattgctaggttcatatcaaacactattgggagaggaattgccagggcagaagcggagattgagatggaagctcaattacagtcaaagaactttgagattgctcgactattggaacgtcttcactgttatgagaccatgaatagggagatgtctcagaggaaccaggaagctgtagagatggcacggcgtgagagacaaagaacgagtacgaggcagagatggatttggggatcgattactactgccattgcagttggtactgcagcaatagcatggtcctatctccctgtgggtagaggatcaacattttctgttcatgatcaggttcctgaacatgatgatgcagccaactaatatacaattaatactaacttcattgccgagttatggtagaggaggagaataaaagttatatgtgccattatgtggctaacatgttacatatctcttacttgatcattacaattttccggcatcttgagtatgtgcataatttctctaacgtgccattcactggaactctagctgagtacattagtggaagggttcacccctgagccaatgaaataataatacaccatgatttcctatggattctgggtgcaaagtaattgcttcacctgatacatttcgcagatcacatg

SEQ ID NO: 10623 - DNA, 934 bp, Glycine max
ctaaaaatttccttgaaaatggggcaatctaaaaaacaaggacatccactgtctctgttttcccgtgttgacgcggttagtgaatgttcgagaaggtgggtttaagcgcacatcagaaacagacatctctcaaaaccagtgggcgtttcattgaatcttcttcatcactgccaaaaacgacaaaccaaaattttaaaacataaatctccaaccccattttctcacacacactctctttttctcttccaattacaacacaatcatcagtctgagattcgccaccgaaaaacctctcaccatggtttctcgccatttggtttcgctcttcctctgtttcctctgtttcgagatctctgtttcatcaattcgattgcccggtttggaccaagacgccaaggccacgcatggatcggtgcttaggttgaacagaggaggctcttcagtgaagtttgatcccacacgggtcactcagctctcgtggagtcccagggcttttctctacaagggctttttatccgatgaagaatgtgatcatttgataactctggccaaggacaagctggagaagtctatggtggcagataacgagtctggtaaaagcataatgagtgaagtcagaacgagttctgggatgtttctcaacatggcacaggatgaaatagttgctggtattgaagccagaattgctgcatggacattccttcctatagagaatggtgagtcgatgcaaatattgcactatgagaatggtcagaagtacgaaccacattttgattacttccatgacaaagctaatcaagttatgggtggccatcggattgccactgtattgatgtatttgtctgatgttgagaagggcggggaaacaatttttcccaatgccaaggcaaagttgttgcagccaaaagatgagagctggtctgaatgtgctcac

SEQ ID NO: 10624 - DNA, 376 bp, Glycine max
attcttcatcgttgccaaaagcgacaaaccaaaattatatacaaaaaaaatacttaaactccatttttgtcttccacacacactctccttttctcttccaatttcaacactatcattatcatgagattcgccaccgaaaaacctctcaccatggtttctcgccatttggtttcgctcttcctctgtttcctctgtttcgagatctctgtttcatcaattcgattgcccggtttggaccaagacgccaaggccacgtaatgacgataataccgcacaccctttgccccccttttcctctctctctctctctgttggcgaaggcatgcaaaatttgaccttttgtttgtttttgcatttgtttgtgttggttttttca

SEQ ID NO: 10625 - DNA, 1330 bp, Glycine max
agacttagataaaataataacatccactcataatatgcttaatgtttagatattgatgtgtgctaagcatagttgaacaaaaacaattaaaatataacattgtcggtggattcatggatttttgatgtaaagccaagctaagctaaggttgacacttttttacaccaacttttctctctctctgtctacacagcctaagcttaagcttatccctccccacttgttccctctgccgaatgttatagccaaaagggtgcgagagagagagagagagaaaacagaaacaacaaccaaccatcaagggaagttagtgagagagagagagagagagagagagcggaagatgaatggtggtgaatcttatggtgctattgagacacagtacataagaaggcatcacaaacatgaaccaagggaaaaccagtgcacctctgcacttgttaaacacataagagctcctgttcaccttgtgtggtcgctggtgagaagatttgatcaacctcagaaatataaaccatttgttagcaggtgtatcatgcaaggggatcttggcatcggaagtgttcgagaagtgaatgttaaatctggccttcctgccacaacaagtactgagaggttggaacaactggatgatgaggaacacattctcggcatcaggattgttggaggtgaccataggctgaggaactattcttccataatcaccgtccatccagaggtcatcgatgggagacccggtacaatggtgatcgaatcatttgtggtggatgtgcctgatgggaacaccagggatgaaacttgttactttgtggaggctttgatcaggtgtaacctaagctctttagctgatgtctcagagaggatggccgtgcaaggtcgaaccaatcctatcaaccattaagcatgtctaggggagaatgaagttgggttcatacaaattatatgatccattgctctctgatcctagctcaagtgtggacattggttggagtattccttctatgttcccagaagttttggaacttttttcctctgtatcatggatacattccccctaccacccctcttgcactttttagctgtgtaatcactcttttgaacagctaagtttctcttcttcaatatttgtaagatgagattcagggcctcatgaaaacacagggatgtaggggtggaagtttttacctgctatattctttctggattttgtggatggtgtgttacctatagttatttgtaaatatttttgttgaaccaaagacagtttcttcagtttttcatgtttcatgtttcatgtttagtagcaactttttgccagatttatgtgctg

SEQ ID NO: 10626 - DNA, 580 bp, Glycine max
ataacatccactcataatatgcttaatgtttagatattgatgtgtgctaagcatagttgagcaaaaacaattaaaatataacattgtcggtggattcatggatttttgatgtaaagccaagctaagctaaggttgacacttttttacaccaacttttctctctctctgtgtacagcctaagcttaagcttatccctccccacttgttgcctctgccgtatgttatagccaaaagggtgtgtgagagagagaaacataaacacaaccaaccatcaagggaagttagagagagagttgagttgtgttgagagagatagagagatagaggagaagatgaacggtggtgaatcttacggtgctattgagacacaatacataaggaggcatcacaaacatgaaccaagggaaaaccagtgcacctctgcacttgttaaacacataagagctcctgttcaccttgtgtggtcactggtgagaagatttgatcaacctcagaaatataaaccatttgttagcaggtgtatcatgcaaggggatcttggcatcggaagtgttcgagaagtgaatgttaaatctggcct

SEQ ID NO: 10627 - DNA, 555 bp, Glycine max
gaagacgacagaaggggaagtgaaatggggaattgacttagcatctgagcatgaaagatacctaacagaggtaaagtttcagaagcccgtcattgtatataactatccaaaagatatcaaagcattctacatgcggcttaatgatgacttaaagacagtggctgctatggatgtgcttgtacccaaggttggagagctaattggtggaagccaaagggaagaacgttatgatgtcatccagacaagaataaaggagatgggtttgcctgttgagccatatgagtggtaccttgatctgaggcggtatggaacagtgaaacatgccggatttggccttggctttgaaaggatgattctctttgccactggcctggaaaatattagagatgtgattcccttcccacgatatcctggcagagcagatctatgattacaagtggtttttacgaatctattgcaccaagtagttaagttgacaatggaaatgtagtatttaaatatagcattttttttttgtgtgtgatggcaacaccaatagtagccttattggggatt

SEQ ID NO: 10628 - DNA, 1068 bp, Glycine max
ttaaggacagaaattaacaaccatatctattcttacaagttacatccattgagaaacatgaaggtctcccccttagcattttcaatcctttttttgtccttcaccatagaactcttcattggcattgcttcagcagcacaagaaccagtgcttgacacctcaggccagaagctgagaacaggtgtcaagtactacattctaccagtcttcagaggcagaggtggaggcctaacagtttcaagcagtggcaacaacacatgccccctctttgtggtgcaagagaagcttgaagtctcaaagggcaccccagttaccttcacaccctacaatgccgaaagtggtgtcattctaacctcaaccgatctcaacatcaagtcctatgtgaaaagcaccacttgtgataaacctccagtgtggaagctcctcaaggtgctaactggggtgtggtttttgagcactggtggtgttgaaggcaatccaggggttaacactgttgtcaattggttcaagattgaaaaggctgagaaagactatgtgctttctttctgtccctcgtttgcacagactttgtgcagggaacttgggttgtatgttggtgatgatgggaacaagcatttgtctttgagtgataaggttccatccttcagggttatcttcaagagggcttaataagttccaaccaaattaacgatagaatgaataaaagtgctagtcaaattaatctgactagaagtttgtttcttttgggaagggcatgattacattaatatataataattgtgctgcacagcatatgcacttttttgaagtctaagcacttcctttcatttggttcacattttgtgaaagaaagagtttatttgatcagtgatcaataattaataaccttagtcatcttgttgctttatctgtttcgtgctcaatttcttgcagtgttactatattgtgtggttaacgaaattagtgcagcatttgaaaccagcgaccctgtaagactttaaattcatggcaaaagaaacaacatattccttggtgtaagatttgtagcctgtatgttatcaatctatt

SEQ ID NO: 10629 - DNA, 410 bp, Glycine max
tctcgagccgaatcggctcgagagacgacagaagggggtaccgatcaattaacaaccatatctatctattgagaaacatgaagaaggtttcacccttggcattttccattctctttttggccttcaccatagaaccctttattggcattgctgcagcagcaccagaagcagtgcttgacacctcaggccagaagctgagaacaggtgtcaagtactacattctgccagtgttcagaggcaaaggtggaggcctaacagtttcaagcagtggcaacaacacatgccccctctttgtggtgcaagagaagcttgaagtctcaaagggcaccccagttaccttcacaccctacaatgccaaaagtggtgtcatactaacctcaaccgatctcaacatcaagtcttatgggaaa

SEQ ID NO: 10630 - DNA, 767 bp, Glycine max
ggagaagagaggtgctggagctgatgcagactctgggaatggcaaatcatctgacaataagaatcaagaagttaccaatggccagaatcctacacctgctgcaaacacacaaaatggagtgctgtctgagaccagccgagatgacaagaatcttctgctaaataatgaagaatcaccaagcttgaggtcactgatgcagctggaggagacaatgatggtgaatatgaggagggaatagtgtacaatgaatcgggtgaggatcagtattatgaaggtgatgatcagagagatgcggactatgagtatgaacaaggtgaagagggagagggatactatgagtatgaacaaggtgaagagggtgaaaatcaagaggaagattacatggaagaagaagatggggatgattttgctaagaagattggtgtcgttcattcataattattatggagaaactgagaaacacgggaacgtgtcctccttatgatcaactctcatataggtctcttctctgactgagcagcatttctgcttaaaatttgcttgtagaactcagaactgctctatgattatcaatttgttttcttgtattaattagtccttttatttttactgtattttcatcaaatttaatggatatttttgtgatcagtggggcattttgctgtgctctccgcatatataaatgtcatgcagagtgcaggcctttttacccttggaaagttaataatagttgcattcacttgtgagtttaaaaaaaaaaaaagaaa

SEQ ID NO: 10631 - DNA, 637 bp, Glycine max
gtccaacaactgcaactactactactcatcattgtctcaaaaaccttctctctcaacaaaacctacaacaacaacaaaaaaagagaaattttttagaacaatggaggcatcaaagatgaagtttttcttggttttggtgattgccatgttggcgatggtagcaactggggtttcagctgctgaggcacctgccccaggtccttcatccgatgccaccaccttctttgtacccactgctcttgcttctctctttgttcttgcatttggccttctcttctaattaattcttcaacaacctttggttatttgttacattacatatatggaattcactttgttcagaggtggttgtgttttgtgtttcgttcttctctttttttccaactcagcttgagtagtggttggtcactactctcttgtgagtagaagggtttatttttttgaggatgcattgaattggagatttggagtgagggaggaagagaagtagatgatacaatataggctctttttgttgggttttctggattattatcattattcatattcttatgtaacaaattcattattattcctcattgtactttctttatatggggtgtgacaatgtaatcttatggtggattggtttggtttc

SEQ ID NO: 10632 - DNA, 501 bp, Glycine max
cccacgcgtccgcccacgcgtccggtcattatctatgccttcacagggggtgaagaggttgctgctgcagtttcagatctttgtccactccttgccctttctcttgtcctcaatggcattcaacccgtcttatctggggtggctgttggatgtggatggcaagctttcgtagcttatgtaaacgtgggttgttattatggagttggcataccattgggcgcggttctcggcttttattttcaatttggtgccaagggaatatggctgggaatgctaggtggcaccgttatgcacacaattattctactgtgggtcacatttagaacggattggactaaggaggtagaggaagcagccaagaggctgaccaaatgggaggacaagaaggaaccactactaaattgaagaacaacttgtttatgtaggagagcaagagcagacataatattctctcttattattattttgtcattgaaaccaattttaaaagctcggtgccga

SEQ ID NO: 10633 - DNA, 1055 bp, Glycine max
ctcgagcctctcaattctcaaacttgttacagataaaaaccctttcttgaaacctttctccaaaatttctcacaacccacttctactctactcattccacacccaacttacaaaaacccattcttttgctcactcattttcttaacgtagattaatcattatgtgtggcggtgccatcatcgctgacttcataccccgccgtggaggccgccgcctcacggcctccgagctctggccaaactccttcgccaaagacgatgactttgacttggattactcccacatcgctacccaacaaccctccactctcaaaaggtcccaacctcccaaagttagcgagcaggttgagaataagccggtgaagaggcagaggaagaatctctacagagggattcggcagcgtccgtggggcaaatgggccgcggagattcgcgatcctagaaaaggggttcgtgtctggttgggcacctttaacaccgcagaagaagccgcgagagcctacgatcgtgaagctcgaaaaatccgaggcaaaaaggctaaggtgaatttccccaacgaggacgacgaatattccattcaagctcgtaatccaattccaccccttcctttcgctccacaacaccctcccctgtaccagcaacagtaccgttgcgatctcaacaatgcccctaaaaatctcaactttgagttcggttacgacctgaaccacgcggaggcgttcccatcccgcgtggacgccgtcaacgctgactcggtggttgtctccgttgatgaaaattcggggtcagcgtcgggttcagagggtgcttattcgacaacggagttcatggggtccggtcagaacgggaacgggtatctgggtggcacggctatggagaagaaggagaaagagacagaggttattgaagctgaagaagaaaagaacaaagtgctggagctttctgaggagctgatggcgtacgaaaattacatgaagttttatcagattccgtactatgatggacaatccacgacgaataatgttcaggaaagcttggttggggatctctggagtt

SEQ ID NO: 10634 - DNA, 443 bp, Glycine max
gacgtcctatcgctctcagacttgtgttacaaacaaaaacccttcttcaaaaccttttctctaaaatttctcacaacccatttctactctctactcattccacacccaactcacaacaaacccattctttcttttgctcactcattttcttaatcatgtgtggcggtgccatcatagccgacttcattccccgccgtggaggccgccgcctcacggcctccgagctctggcctaactccttcggcaaagacggtgactttgacttcgattactcccacatcgccgatcaacaacgttccactctcaaaatgtccccacctcccaaagctagcgagcaagtggagaataagccggtgaagaggcagaggaagaatctctacagagggattcggcaacgtccgtggggaaaatgggccgcggagattcgcgatccaagaaaaggg

SEQ ID NO: 10635 - DNA, 924 bp, Glycine max
ggccaaaccaaagagccgaacccggcctttagggaaaaaaagaagaaaaaaaaaatcccttctctttttgtttccctctcttctctcttccatggaaaaaatggcggcagcttctagaaaaccaagaagcgcagtaattggatccctttcttcaacccctaggttctgcaactctcactctacatcatcatcttcttcttcctcagctttcgcttcttccacctccagcttcacctctcgctcctcctccttctttcaccgctcttgctctccaacacgtgtcaacctctacggttccaccgctccctccgtccggttctccctcgaccgttcggtctctccgaaccgctccatctcggtggcgccgcgaaccggcgcttcaaggcaaagcagtagcccgcaccaccagcagaagcggacctgcatgtgctcgcctacgacgcaccctggctccttccgttgcagcctccacaagaagagccacgctccggcgccgtactcgccgcaccgtctcaacgcgcgcagatccgcgatgacgaactcgctcgtgagaattcgcggcgtcgaaggagatctcgtgaagcgagctctcgccgcgttgattcgaccttcctcgcaccagcagagaaggccaggagacttttacccgaggcctagcaggctctccgttatgtccatggcagagagaggtcatttgaattgaactacttcccctacctctaccgtttccggccaccgcggacggcgacgaaaacggcggcgacggatccaaccgaactggtttgagatctaatggatgcgcggacggtttccaaatccaagcgaaaactgattatgtgcttcgtctctgtgtttgcgtgtgtctgtgtgtatataatacagaacttatatattcagttgcagccattgatgaaccattcttgg

SEQ ID NO: 10636 - DNA, 795 bp, Glycine max
  unsure (1)..(795): unsure at all n locations
gacccccgcgtgcgcccactcgtccgaccaaagccttttttttttaaaaaaaaaattcctttaaaaaatgaagaatactatcttcttcgctctctttcttgtttgtgccttcacctcatacctaccttcagccaccgctgatactatcttcgacataaatggtgattttgtccgaaacggtggcacatactacatcttgccagttataagaggagacggaggtggaatagaattcgccgcaacaggaaacgaaacatgccctctcactgtagtgcaatctccccttgaggtctctaagggtctaccactaatcatttcatcaccattcgaaatccttagcatccaagaaggccttattttgaacattgggttcacttttgtgcccccctgtgccctaattccttctgagtggactactgttaagggtttaccagaaggactcgctgttaaacttactgggtatgaaaataaagtgcctgcttggtttaaaattgagagagtttcccttgaattcaatgactataagcttgtgttctgtgcaactgaagatagcacgtgtgtggatattggggtttatattgatggtgaaggaaacaagcgtttggtggtgactgagaataatgatcccgtattggttcactttaagaaaagtgaagttgaatcatcagctactgcttgaggtggccttaaaaaatcatgtgggttctcgtagtgtaagactgaataaatgctttggttgtaatgattaattcaagacttgataaaataagaatagtgcctttacgaattttcnaa

SEQ ID NO: 10637 - DNA, 1565 bp, Glycine max
aaatactttagaaaccacactgatactctcacacacattgtggctttggcagcgcgactcgtcttcgttccttagactcggctcgatctgcgagaggggcttcctagccctccctctctctcctgctgcaattcagacgatttgtcttcacatggaagcattgcttgcttgagggacgcctttgtctcaaaggagttggaattttcgggttttttgtgggattggagatttagagagtgcccttgcactccctgttttatttcatcaccatgattgccactgaaactatagtgccgagtacaaaattgaagatcaagttttcaaccaaaagaatggaggttgagtctgggccaaaatatgaatttggacagaaagtgtctcacactgacgaaaacaggagctttaatttgaatggaaaatcctctgcactgaattccaacaagaggggaccacccacaagtattgagggccaaaaggagaaaaggcagaggattgatcggaaagggtcgatgcagtgtgctacaatacttaagagtttaatgtctcactcatatagttgggtgtttcttaagccagtggaccctgtagcattgagtattccagattattttacaatcatatctcatccaatggatttgggcacaattaaatctaagctggagagaaacatttattctggcactgaggagtttgcagatgatgtcagactgaccttctcaaatgcaatgaaatataatcctcccggtaatgatgttcatatgatggcgaaggaactcagcaaaatatttgacagaaaatggaaagactttggtaggaaatggaagtttgaagatgagcatgataaaagcgaaactgaaacaattaaggaaactgggagaaaaagtcttgatgcaatgcttccccggcatagagattccttgcccaaaaaaacacaattattcgaacacaaaggaatgcacaagattagatcattggcaacaaaagatgccagagtggagacacctaaattatcacagattccttgcaagttgattgagaaagacttgcacaaaggcagcaaaggtaatcatgatgtggaacagcctgctggctctctaaagtcatatttttcagtacgttttgtcacatccaagtgtagaatttgtggcaatatcatatgccattgtgaaaatcctagcaattcaacacaggtgtcatcagacatatcatccgaaggatctgaaggaagggacctaattgcacgtggtgccgattcattgagacaggattgccggactaaatgtacatcacctatggagaagaaatctgatcttgattctgatggagctgtaagttctttggacagtgaacatgtttgtcctagttctcagcatgtaactcctactactgatgcctcttctggggaagtatggagcacacctgttttgcctgtccagctttctcctaaaaaggctcttcgtgctgctatgcttaaaagccgctttgcagataccattttgaaagcacagcaaaagacccttcttgatcatggtgataaaggtaatcctcaaaaaatgcagcaggaa

SEQ ID NO: 10638 - DNA, 629 bp, Glycine max
ctattaatttatgttagaatgaataaatatttcaaaaatcccttgaagcactggctggttgtctaaactcgtttcttattttgagacatttagattaacctatttacatcgaaacaaagacacatcacgtctataaagagttttctacgttggcgcgaaggaatgctttaattttgtaaaacaaaattgcaagcgtgggtagttatctaattcccagacaagagggtaattaaggcagatatagtcaaaagacttgattccaaacaatatgtgcatttacaataattgtctgtttccctgtctaaaaggatataaacagttagcgctggcagaactgcatgaaggtgtattcagttaaaaatttccccttcttcaaagcctccgttcaaaacctcctcatcttcatctgcggtaaagtcttccttgataaataaaccaagccgctccaatgggttctcaaactgaggtttatccaatgtctccaatgcaactttgtagccatttctacagcccacggccttataacatagcgtgcatccactccaactttcaagttctttaatgttccccctcttttggttctatatcaacggttcttttcatcttttctatagctgctcgagcatata

SEQ ID NO: 10639 - DNA, 484 bp, Glycine max
acacaattattcgaacacaaaggaatgcacaagattagatcattggcaacaaaagatgccagagtggagacacctaaattatcacagattccttgcaagttgattgagaaagacttgcacaaaggtatgaatgcattaagagtactgtgcaggtttctggctcttaaaggagctgataactgtgtattatataggcagcaaaggtaatcatgatgtggaacagcctgctggctctctaaaggcatgttcttcagtatgctttgtcacatccaagtgtagaatttgtggggataccacatgccattgtgtaattcctagcaattcaatacaggtgtcatcaggatctgaaggaggggatgtaattacacgtggtgctgattctttgagacagaattgcccgactaaatgtacttcacctattgagaagaaatctgatcctgattctgatggggctgtaagttctttggacagtgaacatgtttgt

SEQ ID NO: 10640 - DNA, 940 bp, Glycine max
agtacggctcgagttgacaaaatgctcaagctgaatgagttgcaaaggtcaactaaggatgaagttgctggagttagaagtactattactaatatccatgaagacttgggttatttgcaacaaacagtggaaacattggattataggttagctgaattgagttctaagcaggattatgcaaattatggattgtcatatctcatcgactatgtacacggaaaaagccagaaaaagcccgaattgttgcaggagcaactgaaactttcagggaagtcccctaatttgatcacatataaaggaactccaaatctaatgggtcttaaagacattgcagaaacattgtctggtttagacatgtctgcttcagatagtgtcatgccagatggcggggataaacgagagcaacagcgaaggccattgttgaggaagggcattgcaaaaacattgtccagtttagacaaatttgcttcagatggtatcatgctagatggtgtggataaactagagcaactgtgaaggccattgtggaggactagttcaaccaaccgttcatgacaaggtcttaaatcatgattaccaaccttttaagcgttcgttcctcgtttttttagcagtaactttcagttcacttgttcataaatcaaaatatacttgtgacagctattgtgattttcacactaaattttatcctacatagtatattaatagattggatacattatatattcaagcttgtgaattgtgattctaaattgtaaataaaattttgctgtcaaggtgtatgttggtttggtgctaccaagcttatgcccgatgcttttggtttgctagattcatgccttctgttgtatttgttttaccaaaattgtgatcgcctcccactgtaattttttttatcgacaaatattagttgttagattgttaattttgttaataggat

SEQ ID NO: 10641 - DNA, 982 bp, Glycine max
tccaatcggctggtggatagcaagtgatccaactccgcccccaccatatgttggaggttccttgaatgcattagacaaagcctttttgtgggcacagaaatatggattgaaaatcatccttgatcttcatgctgcacccggttctcaaaatggttttgagcacagctcttcaagagatggttcacaagaatggggaaaaacagatgaaaccattcaacaaacagttcatgttatagacttcctaactgcaaggtacgcaaaatgccaaagcctttatgctgttgagctaataaatgagcctctctcacctggtgtgacactagaggccttgaacaagtactataaggctggttatgaagcagtgcgcaagcactcttccacagcttatgtggtgttatcaaataggataggaccctcaaatcctagggaactcttccctcttgcaaatggccttatgcgatctgtgattgatgttcactactacaacctctttcaagatgtatttaatgacatgactgtccaacagaacattgatttcatctacaacaatcgctcatcacagttgagttttgttacaacctccaatggccctcttacttttgttggcgaatgggttgctgaatggcaagtcaacggagctacaaaagaagattatcaaaggttcgccaaggctcaattagacgtttatgggcgagcaacatttgggtgggcttattgggctttcaaaaacgtcaacaatcactggagtttggagtggatggtcaagaatggttatatcaaactgtagaaaatttcttattgaggccaacacttcctcttcactatcacccccctcccaaattatccctccataaaaattatgattatacttgagttaagttttagacccttcttacatttcaccccacaaaggaaggggggaggttgtagcttttattagaagaaattagaaacataaagtgtaatggaagtcttgcatcat

SEQ ID NO: 10642 - DNA, 1463 bp, Glycine max
gagatccgcatctctgacttggacaacaccaaaaatatctgctactctttgctctgctctgcttagggttccaacttccaacccaacacttatcgttctcatgcaacaagggaaaatgaggcctattttctgtggaaattttgaatatgatgcccggcagtcagagctggagcggctttttagacgatatgggaaggttgatagggtggatatgaagtctggatttgcttttatctatatggaagacgagagagatgctgaggctgcaattcgtgctcttgatcgagtagaatttggtcggaagggacgcagactccgtgtggaatggacaaagcatgaacgtggtgttagaaggcctgctagttcaagaagatcttcagctattgggaggccatcaaagaccttgtttgtaattaattttgatacataccataccagaacaagggacttggagaggcactttgaaccatatggaaagattgtcagtgtgaggatcagaaggaattttgcttttgttcaatatgaatcagaggatgatgctagcagagcactggaagctacaaatatgagcaagttactggatcgagttatttctgtcgagtttgctgttaaagatgatgatgataggagaaatggatatagccctgagagaggccgtgatcgtcaccgtgatagaagccgtgatggaaggcgatctcctagtccttatcgtagagaaaggggtagtcctgattatggccgtgggcccagtccatatcagagagagaggggcagccctgactatggccgtgaccgtgaccgtagccggagcagaagcccccctaggagggagagagctagccctgcttatgggcgtagaagccttagtccacatagaagagaaagggagggttctgaacctgttcgtgactccagccgcagtccttatcacaaagagcgagggagaactgaccatggtatttctccttctcagagtccagaaggaagagggaagaaaagcccccaaaatggtcatggttctagccgtagtcctcatgatactgggaagactagccctgaaaatggacttggctccggaagtcctgatgaaaaagggaatcccagcccttacaatggttatggagggagcccaaataatatgcctgatcccagggacagtcccaactatggtggtcctgaaagtcccatgcatgaaagataccgcagccagtcaccccctgcagaagaatgattgcagtctttgatgaagaagccggaagggccaactgattgtagtactgtttcatggctggactaaatttcatttcagcaatttgttttagtgtagtagtgataaagctctgaaacttgtgttgttgtgacaacttagtccttttttgtttagttagtttcatatttatttgtcagcttagtattgttgaatccttgtttacagttaaaagatggtactatatctttttgac

SEQ ID NO: 10643 - DNA, 439 bp, Glycine max
cgttcgcgtgggcggacgcgtgggtccgcatctttgtcttggtcaacaccaaaaatatctgttgctctctactctgcttagggttccaacttccaacccaacacttatcgttctcatgcaacaagggaaaatgaggcctattttctgtggaaattttgaatatgatgcccggcagtcagagctggagcggctttttagacgatatgggaaggttgatagggtggatatgaagtctggattatcttggcatatccatttactcccaagccaatgggtgggcttttcagaaatccatttcctgcctgtgatgcacatcttcttcttttaatgaagaattgttcaatttgatctgcaatggcacacctgttccacgtattcatccgtcacatttgcctttcaatttttgtgcctttgcccagcccacttttggacatgtttt

SEQ ID NO: 10644 - DNA, 416 bp, Glycine max
ggagataaactagtacacgctgtgatagcacttgtacaagcaagcgaaactaaaacgacgcgaaggggaaaaagggagatcggagagacagagagatcagtagtatcagagatggggagagggcaagttctgagcgcgtaccgcgcgcttctgaaagcgacacggaaaacattttccggcgacaccatgatgctgaaggaatctgcggtggaagtaaggaagaagttcgaggaaaacaagaacgtgagctccgaggcggagatccagaagcttctcctagaggctgaagaggcctcccatttcatcaccaacatgctcgtccaggcacagctcaatcccgattctggcacctacgcggtgaatccgtgtaaggagcatgctggagcaacgcttgaacttccctccgagaaattatt

SEQ ID NO: 10645 - DNA, 495 bp, Glycine max
ctcaggtggttgaacgttctttaggtggtcgtaatgaaatggatcatggagctagcagttcagtttctgtagatgcaccccagaggaattttgctgagactgttagcatcagtaatcacaatattgatgaagttaattcttggcatgatcgcggttcacgcatgactgccagcattggtagtgcaaagtttttgagtgatggtgatgaattggtcaaagaactgcagtgcactgctgattcaagtatagtttattcacaacctcagccagaagatccatcatcatccagtattatccaggataacaatatagatgctgatgcacgacgatatgccagccttcaaactctttcagttgcaagatttgatcctgacggagaatcattaggtaaagaaatttctgctcgggggaaagaaaagcacaaaagcaaggaaaagaaacggaaacaggaaagtaataaaggacaccatgatgatgcagaatatttggagcgaa

SEQ ID NO: 10646 - DNA, 358 bp, Glycine max
gatggccaataataccaagaaactagagatttccgagtgtggtggtcctcactgttggacctttctgagcactgctgcttatggaaaacagaataaagttccacaggaaaacatcccatctgctacagcagcaaaggtaaaggcaggaatgctagatggagttgagtctgcccttggattatcaaaagggtcacttccaaaaccgttgtataccaggcttcaactatggggtgcagctcttccaactaatacacctggagttccttgcatttttgacccctttggaagggcagggatatgtggtgattggctgctaggttctaatatagaggcagctgtcttaagtggaattgctcta

SEQ ID NO: 10647 - DNA, 1060 bp, Glycine max
cttatcttcagcagtcgcagcgcgtggttgaaaagtactctgcacttgcacactacggggtcgtcgatgagaaggagcttgatcagttcatgacccattatgttctgttgctctgtgcctttaaagaacaactgcagcagcatgtccgtgttcatgccatggaggcagtgatggcttgttgggatctggagcagtctctgcaaagcttgacaggtgtatctcctggtgaaggaacgggtgcaacaatgtcagacgatgaagatgaccaggcagagagcaatgccaacttatacgaaggaagccttgatggcggtgaaactcttggatttggtcctcttgttcccacagaaactgaaagatctttgatggagcgtgtgaggcaggagctgaagcatgagttaaaacagggttacaaggacaagattgtggacataagagaagaaattttacgaaagagaagagcgggaaagctaccaggcgacaccacatcccttttgaaagcttggtggcaatcacattctaaatggccttaccccactgaggaggacaaggctaggttggtgcaggaaacagggctgcaattaaagcagataaataactggttcataaatcaaagaaaaaggaattggcatactaatccgtcgtcttctagtggctccaaaagcaaacgcaagagtagtggtgcaggtgaaacaagtaaccagagcttcatgtgaatgaacacctgatttgaactgaaaaaaaaaatagatatatctctattcttcattttatgcaacaatggtgagattcatatatgaccggagcttacagggaaaaacatgaaacggaaatggtggaatatggatgatgaaggagtaatttgtgataccaacatttacttggggggattaattaattacttggttcaattacagaaaaaatcctagtattgttgtatatgaggctgctgagctgataccggatattgttgcaggcactgtctattcggttcaatggctatctgcatgctgatacgtacatataaacatttctacttctttttacaaaaaacacaaac

SEQ ID NO: 10648 - DNA, 481 bp, Glycine max
accccactgaggaagacaaggctaggttggtgcaggaaacaggcttgcaattaaagcagataaataattggttcataaatcagaggaaaaggaactggcatactaataacccctcatcctctagtaactccaaaagcaagcgcaagagtagtgcaggagaaaccagtaaccagagcttcatgtgaacggtcgcatattttgagcaaaaattattggtattgttcttccttttaatgcatactcgtgggattcatagatcttacggtccagcgtgaacgtgatggattctggatgtaaagggaaattcatgataaaatcactgtattggttgaattacagaaaattaaccctggtattgttgtatatgaggctgctgcatgccgcttgatatctgatactgaatattgatgcaggcacagtctattcgatttaatgggtagcatgctgatacgtacatataaatttttctacttattttttt

SEQ ID NO: 10649 - DNA, 691 bp, Glycine max
ataatttgttcatgtttgttcctccacattaacaattttcaaaaaaatcactatatattatgatgagaaatttatacattcaaaattgtcaggtcatctctatgttaaaagtgatgtatatggatttggcgttgttctgctagaaatgctaacaggtagggcagctctagacacaaatcagcccgcgggtatgcagaatttggtggagtgcactatgtcatctctacatgccaaaaagagactgaaagaggtaatggatccaaacatggaggaacaatattcattaagggcagcatttcaaatagcgcaacttattttgaaatgtttagaatctatgccaaagaaacgaccgtctatggaggaggttttggaaaccttagaaaaagttgaagccataaaatacaaacccaaagtgaagaaaagaagtgcggttcgttagataagcatcccccaaataaccagggttggtcaccacttattcattacaacaacgtttatcccaaaccactaactcattctcctccatagtagttcaccatgcatctaccatttatttttcaagcagttacatggttagtaaatttcgtaaggactagataagttttttgtccagtacaattttaaattttggattttatttatttatttttatctattttaaatcctttatttaatttatcgttcatgatta

SEQ ID NO: 10650 - DNA, 1553 bp, Glycine max
cgtccgcccccgctcgaggcgctcacaagcttttcacatggaaatcggctcccccgcattccttaccctcgaagactattcttccttcttcttccctgacatggatcccattcccaattccaatgtcaacaagcgtcgtgcaaacaacgaccagttcgacttaaatgactccgcattcagccacctcctcaattccatcatggatcctaaccatttccaacaccaatccaaaccaatccaattcgactcctccccgaccaagagagctcgccgtgacctcctcgttctcgaagacagccacctcaaccccgcctcggccccgcaacagcagcgccgtctctgggtcaaggaccgctccaaggactggtggcagcggtgcaacagcccggacttccccgaagaggaattccggcgccacttccgcatgagcaaggccaccttcgacatgatctgccagcacctggactccgccgtcaccaagaagaacaccatgctccgagaagccatcccggtccggcagcgcgtggcggtgtgcatttggcgcctcgccaccggcgaccccctccgcgaagtttcgaagcgcttcggcttgggaatctccacgtgtcacaagctggttctggaggtctgctccgccatcaaaagcgttctgatgcccaagttcctccactggccaaacgaagccgaaatgaaacccatcaccgaaaaattcgagtctctctccggaatccccaacgtgggaggctcaatgtacaccactcacattcccatcattgcaccaaaatccaacgtcaacgcttacttcaacaagcgccacacagaaagaaaccagaagacatgttactctataaccgtccagggcgtggttgatcccaaaggtatttttagcgatgtttgtataggttggcctgggtctctctcagacgatcaagtgttggagaaaagcgcgttgtatcagagagccactatgggaaatttgaaggacgtgtgggtggtgggaaactcgggacaccctctgatggagggtgttttggttccttacactcatcagaatcttacttggacgcagcacgcgtttaatcagaaggttggggagattcagagcattgctaaggacgctttcgccaggctcaaagggaggtggtcttgcttgcagaagaggactgaagtcaagcttgaggacttgcccgtgcttcttggggcctgctgtgttttgcataatatttgtgagatgagggatgaggaaatgaagcctcagtggaactttgacatctttgatgatcagatgctgccccagaataataaccttcgctctaatgctgccgagcaagccagagatcagatagcgcactacttgttgcaccatggccgtgcagggactaattttttctagacttcttgggatatcacactttctcattaattcttttggctatgccttattattatagtcacttgcattataataacattctcatcatctacttcttatatgtatcaatttgtatcgatatcttttgccccaccaaaaaaaaattgaatatttcattttg

SEQ ID NO: 10651 - DNA, 515 bp, Glycine max
ataaaaccagaacccctctccttctcttgagcgttcacacaaccttttcacacctttcttcatttcacatggaaatcagctccctcgaagactattcttccttcttcttccctgatatggatcccaagcgtcgtggaaacgacaccgctttcaacgacctcctcaattccctcatccacttagacaacaaacaaaccctcatggatcctactcaattccaattcgactcctcccccccaaccaagagacctcgtcgtgccattgaagacatccacaatgtcacggtccaacaacaacaacaacaacaacgccgcctgtgggtcaaggatcgctccaaggactggtgggagcgctgcaaccagccggacttccctgaagaggaattccggcgctacttccgcatgagcaaggccaccttcgacatgatctgccagcatctggactccgtcgtcaccaagaaaaacacgatgctccgccaggcgatcccggtgcggcagcgcgtggcggtgtgcatt

SEQ ID NO: 10652 - DNA, 1228 bp, Glycine max
cgtacgcgtgggcggacgcgtgggtcgtatacatagaaagagtttaattacataataataataacaggggtttctattcgctaaaactcagcgtcacattcacccgcacaacaaagtacaacacagtgcaggggctcaattatggagaaagcaattcaaagacagagagttctgcttgaacatcttcaacccatttcttcaagttcaaatttttcctctcaaacccatcaatctacggatctctcagcttcattatgttttgctgggaattcttcgcatggtcaaacaggtggatcagatgatgacgtggtgattgtagctgcatatcgtactgccatctgcaaagcaaagcgtgggggctttaaggatacccttccagatgaccttcttgccacagttctgaaggctgtaatagagaaaacaaatgtggacccagcagaagttggagacattgtcgtgggcactgtactggcacctggatcagatagaggaattgagtgcagaatggctgccttttatgcaggtttcccagagacagtgcctcttcgaactgtcaataggcaatgttcatctggacttcaggcggtttctgacgtagctgcctatataaaagccgggttctatgacattggtattggggctggactggagtctatgacagtagatcgtgtgaataggcttcccaacattaacccaaaggtagagacctttgcagaagcccgggattgtcttcttccaatgggaatcacttctgagaatgtagcacaacgttatggtgtgacaaggctagagcaagatcaggctgctgttgagtctcacaagcgagctgcagctgcaacagcagctggcaagttcaaagaagaaatcattccagtttctacaaagtttgtggaccctaaaactggagtggagaagaaaattattgtttctgtcgatgatggtatccggccaaacacaaatttagcagatttggcaaagctgaagcctgcattccagaaagatggaaccacgacagcagggaatgctagccaaattagtgatggtgcagcagctgtgctcctcatgaagagaagagtggctgtgcaaaaggggcttcctattcttggaatcttcacgagttttgctgctgttggagtagatcctgcagtcatgggtgttggccctgctgttgctatcccagctgcagtgaaatctgctggtcttgaacttggcaacattgacttatttg

SEQ ID NO: 10653 - DNA, 582 bp, Glycine max
  unsure (1)..(582): unsure at all n locations
agacactttaaatttgcctgactattaaactatacagccaacataaaacgggtcaatataccgacatggatctagttttattgtcataagagggtacgtccttgctatatagaatatgttcttcaatgtctggaatggcaattttttcctctcaggttctttgcgatgtactacagtataggtttgattatcagctgttatgcttgtactactatttttaaaaaaattcttccttgttttcactttgctgtctactttaagggatttgaaaaaaaaaatggtgaaaacagcaaattctcgcttctccatatcctttacaaactcttagaaacaagaaacaaattgaaaataaagtggacactggacaatggactttataattaatagcaaacacatatcagttaaaatgatctcaaaaagctagcactgattgcatgtataaatgattcaataataacttttgctttttcaagagatttttttttttaaactgtttgcatcttaatgagtagttgttaccgccacaatttccatgtataagtgtatcttctcacctgttgaatggtngatgagagaattaaa

SEQ ID NO: 10654 - DNA, 1134 bp, Glycine max
acccgtccggaattcccggtcggaccaacccgtccgccaagccgtccgccaacccgtccgacggtttggtttaagcgacagccgcggaagtaaaatcttaaatttctgaacattgaacaactcttcacacaacaaaacttttttctggcattgtagcatcatgactggcagagaaatcctccatatgatgaaggtgaaagcagggtttggaacaccagacacagggaatggaaaaggcaaaatatcaaaacacattacacatggctttcacttgatgaagggcaaatcagcgcatcctatggaagattatttagtttcagaatttaagcaagaaaaggacagagaattaggcttgtttgcaatatttgatggccacttaggccatgatgtagcaagctatttgcagaaccaccttttccaaaacatcttgcaacagcatgacttttggactgagacagaaagcgcagtgaaaaaagcttacgttgaaacagatgagaaaatattggaacaagaacttgtgttggggcgaggagggtcaacagctgtgactgcaatacttattgatggtcagaagcttgtagtagcaaatgttggtgactcaagagctattatctgtgagaatggaaaggcaagacaactatcagtggatcatgaaccaagcaaggaaaaaaaatcgattgagaggcgtgggggttttgtatcaaacattccaggagatgtccctcgagtagatggacagctggcagtagcaagggcttttggtgacaggagcctgaagatgcatcttagttcagaacctgatgtgattgtacaggaagtagatcaacatacagagtttcttattctggctagtgatggaatatggaaggttatgttcttttgaaaaaaattctttgtttataaataagtttttatgggaaatcgatcataatcggatttcattggaaatcatggaatgtgctgaattagtgtcttaaaaacccttgttagcattttccctgaaaaagggtctttgttttaaaatatttttttcttaaagtattatttggcctaataacttcttcttttacagagaagagaagagaagctcaatgttaacttaatcgaacactaccttaataaatctaggagaca

SEQ ID NO: 10655 - DNA, 583 bp, Glycine max
acgcccacgcgtacggtaaggaccaccttgcaaggcttattactcctgggagaccaacaactgggggtagcaagggcttttggtgtccggagcctcaacatgcatcttagttcagaacctgatgtgcttgtccaggaagtagatccacatacagtgtttcttattctggctcgcgatggaatatggcaggttatgtcaaacgaagaagcagtggaatctattcgacaaataaaggatgctcaagctgcagcaaagcaattgattgaagaggcagtttgcaagaaaagtaaggatgacatatcttgcatagttgtgaggttccaatgacatgtttttggttaagcacaggaatcctttccgaaacccaagaatgaaggccctgctggacatttagctagcactgattgcatgtataaatgattcaataataacttttgctttttcaagagatttttttttttaaactgtttgcatcttaatgagtagttgttaccgccacaatttccatgtataagtgtatcttctcacctgttgaatggtagatgagagaattaaattgaataatcctggctttaatgggttt

SEQ ID NO: 10656 - DNA, 534 bp, Glycine max
agagcagagccgtgacgtgcactgcaccctaagctaggaattcggttcgagttcgagcttaatcttctcgagcggctcgagtgcaagcagcatgacttttggactgagacagaaagcgcagtgaaaaaagcttacgttgaaacagatgagaaaatattggaacaagaacttgtgttggggcgaggagggtcaacagctgtgactgcaatacttattgatggtcagaagcttgtagtagcaaatgttggtgactcaagagctattatctgtgagaatggaaaggcaagacaactatcagtggatcatgaaccaagcaaggaaaaaaaatcgattgagaggcgtgggggttttgtatcaaacattccaggtagatagctttttgatgttgtcataacacagttttttataaacaacatattttcatctgtgcaaacaacatatttaagcactttttcaataaactctccttaaatggtcacttatttcttagttttcctgtgaagtttacatgtcattttgataagtttaaatatg

SEQ ID NO: 10657 - DNA, 713 bp, Glycine max
tcaacttttcacacaacaaaacttttttctggcattgtagcatcatgactggcagagaaatcctccatatgatgaaggtgaaagcagggtttggaacaccagacacagggaatggaaaaggcaaaatatcaaaacacattacacatggctttcacttgatgaagggcaaatcagcgcatcctatggaagattatttagtttcagaatttaagcaagaaaaggacagagaattaggcttgtttgcaatatttgatggccacttaggccatgatgtagcaagctatttgcagaaccaccttttccaaaacatcttgcaacaggtaaggttactttcatatttcatatataatttcgtgtttggtcccattttcatgaaaattgtaatggacaaaattgagatacacttctttagatgctgccatgttggccttgtcttcgatcagaattgaagtttcagcataataatccgcaaaatgcatatctttattacgcatacgcatattactgaggtgaaacttcaattttgataagagaacaacacttacagaatctaaggatctgtatctaagtgttgtcaaatagttatttggtagacctccccactgtttgataagtaacgcttttcacaccatctaataatgatacacttcttctaaaccggcttcaagagattcttctttgactcatttttatgtttggtgcaagcagcatga

SEQ ID NO: 10658 - DNA, 913 bp, Glycine max
cggctcgagcggctcgagtataatacaaaagtttcatgactctctctctctctctgttgaatacaccctccacaaccaccttattcaatctttaaatagcttattgattaatgtcttatagtcttctatgaataagatcttcagattttgttacagtttttcaaattattctgtggcaaggagagaagaaaagatcatagaaagtggtgattcttcgaatattgaagagagaaatatggggttgagattgaaggagacattctacttgtcccatggagcaccaactcttgccgtagatgattcaatccctgcgtggaacttcttcaattcgtggaaggagcagtttccgacgagaccctcttccattcttattatctccgcccactgggacacccatgttcccaccgtcaacgtcgttcaccagaatgataccatctacgacttctatggcttccccaaatccatgtacaagctgaagtatccagcaccaggggctccacacttagcaaagagggtgaaggagctactcttaggatcagggtttagccatgtggatgaagataagaaacgtgggcttgaccatggtgcatgggtgccactcttgttgatgtacccagaggcagacatcccagtgtgtcaactctctatttcatcaaacaaaggtggtacctatcactacaacatgggaaaggctttggctcctcttaaggatgagggtgttcttatcgttgggtctgggagtgccacccacaacctcagagcaattgcacctcgtggtacccctcctgctccatgggcttccgcatttatgtcctggctaaaaacctctcttcttgatggaagatacgaggaagtaaatgaatacgaagagaaggccccatatgcaaaaatggctcatccctggccagatcac

SEQ ID NO: 10659 - DNA, 496 bp, Glycine max
gctcattattctccactcacattcattcattcactcaccccaaaacccaaaaacctttccttttactttttctcaaactgaaacataaaaaatggagggtcttattccttttgtttacaaggctatcatgcaatccaagggcgacaaagagggtcatcctataggatcatggctttgtgagtctccttactcatacatgagacttcctggtgactcgggtaggtttcaaattcaagcaccagctgctgcttcaccctcttccaccaaccctaattcttcttctgctacacaaatcattgtttcctctggtgttcagtccccacatcagtgtttaacacatcgtcgaattgcagcatgaaaatgaacaagtttgtgcctgaagaaaaagccgaaggtgcttaattcaagagttcaagtttgtgctttcaagtgttgggaatcttggttctttgtttcaacttaatttggagttgtaagcgtgtggaaaacaacaacc

SEQ ID NO: 10660 - DNA, 362 bp, Glycine max
gatgcagcaactctgctttactttccaagtccacaaccctcaattcaaaactgctacctcaaggtagtggtggtattataagtggaagaaatagtgccctagtacatggaggtggtacattttctacttcctcaacaaacttttgtttaggtcctgaggcagcacctcaactctctttacctgctctcctgttcctgtatcctctgagaagccacaacctccagctgcaagattgaatactgatgatctttgccgcagaactgtctctcttctagaagaatatttcagtgttcggcttttggaagaggcattacagtgtgtggaggaattaaaatctccttcttaccaccctgaggttgtta

SEQ ID NO: 10661 - DNA, 266 bp, Glycine max
attcaaaactgctacctcaaggtagtggtggtattataagtggaagaaatagtgccctagtacatggtggtggtacaaacttcggtttaggaccggtggcagcacctcaactctcttcacctgctagaacagccactcctgttcctggatccgctgagaagccacaacatccagctgcatgattgaatactgataatcttcgctgcagaactgtctctcttctagaagaatatttcagtgttcagcttttggaagaggcattacag

SEQ ID NO: 10662 - DNA, 414 bp, Glycine max
gattcataagaaggggaagaaatatatggctgaaactgcagtgtcccttctattcgaccatttggtgaagttactgagtgaggaaacaacaatcttaaaaaatgtgcacaaggaggttgagggcatcaaggatcagctaagcctaataaactcttacataagggatgcagaaaagaagcagcagaaagatgctgtcaaagaatggttgaattcattgaggaatgtggcgtttcgcatggaggatgtggttgatcactatttgctcaaagtggcagagcgtggtcaaagagatggggcttttggtgtagttactgaagtcaaggagaagttcaaaactgtaacacatcgtcatgatattgcatctgagattaaacatgtaagagaaactctagatagtctctgcagtctcagaaa

SEQ ID NO: 10663 - DNA, 592 bp, Glycine max
cccacgcgtccgtccacgcgtccgcccacgcgttcgccgaaagagagaaaagaactagctagctggagtctgagaactctagcatgtactagtactactcctacattcctccatcttcctttgtactattttttttttcaccataaaagaacaagagcacaaagatggtgagagctccttgttgtgaaaagatgggtttgaagaagggtccttgggctaccgaggaagatcaaattctcacatcttacattgaaaaacatggtcatggcaattggcgtgccctcccaaagcaagcaggcttgttaaggtgtgggaaaagctgtagactccgctggattaactatttgaggcctgatattaaaagagggaatttcacaattgaagaagaagaaactatcattaagctgcatgagatgttggggaacaggtggtcagcaattgcagccaaattgccaggaagaactgacaatgactcacaaaatgtttggcacaccaatttgaagaagaggctgctgaaatcagaccagtccaagccaagttccaaaagagccactaagccaaatgattaaacgttctgattccaattccagca

SEQ ID NO: 10664 - DNA, 620 bp, Glycine max
gcctggtggtgggaaggctggagagtccagttatggggaggaagctgcttcagaccaacagtatggtgaggtgagtcatgatagagctgggtggcctatgagggaaaaagatagaggttcggaaagggactggtctggttcttctgagagaaggtacagagatgatagagatcaaggatatgagagagatgcacctagagaaaaagacatgggtcatgatcatgaatggtctgaaagaaggcatcgtgatgatagagaaacgggccgagaacgatctcgtgatcgtgaccgtgaacgatctcgagaccgtgatcgtgaccgcgaaagggattaccgtgagcgtgacaggcacagagaagatagggacaggtatgcagatcatcacaggtacagagaccgggaagcagaacacgatgatgagtgggagaggggacgatcatcaaagcctcacagtaagtcacagttatcgcaagaggaggaacaccattctaggccaagagatgctgattatgggaagaggcggcggcttacttctgaataactttgtatgctgcccgttatttctctgaatgctttccactttggaaggaaaaaacagtaactgaaaatcacgatttgtc

SEQ ID NO: 10665 - DNA, 1567 bp, Glycine max
cttacgcgtccgtgatatcactcaaaaaaaacaaaaacagaaacaaaagatggttcatcagaggcaaaacaacatccatgttcttgttcttccataccctgcccaaggccacatcaacccccttgtccaattcgcaaaaagattagcttcaaagggtgtcaaagccacagttgccaccacccactacactgccaactccatcaatgcacccaacatcacggtcgaagccatctccgatggtttcgaccaagccggcttcgcccagaccaacaacaacgtgcaactcttccttgcctccttcagaacaaacggctccaggaccttgtctgagctcatcaaaaaacaccaacaaactccctcccccgtcacctgcattgtctatgactcatttttcccctgggttctcgacgtggcgaagcagcatggcatttacggagccgcctttttcaccaactctgctgcggtctgcaacatattctgtcgcctacaccatggtttcattcagctccctgttaagatggaacaccttccccttcgtgttccggggcttcctcccttggattcccgcgctctccccagtttcgtcaggttccccgaaagctaccctgcttacatggccatgaaattgagccaattctccaacttgaacaatgcggattggatgttcgtcaacacctttgaagcattggaaagcgaggtgttgaaaggcttaacggagctctttccggcaaagatgataggaccaatggtcccttctggttacttggatgggaggattaaaggggacaaagggtatggagcaagtctatggaagccgctaactgaagagtgcagcaattggttggaatcaaagcctcctcagtctgtagtgtacatctcctttggaagcatggtgtcattgacagcagaacaggtggaagaggtggcttggggattgaaagaaagtggggtgagtttcttgtgggttttaagagaatctgagcatggcaaattgcctctgtgggtacagagagtcggtaaaagataagggtctaattgtgacatggtgtaaccaacttgaattgctggctcaccaagccactggctgctttgtgactcattgtggctggaattccaccctcgaaagtcttagcctcggcgttccggtggtgtgtttgccacagtgggctgaccagttgcctgatgctaaatttttggatgaaatctgggaggttggtgtgtggcctaaggaggatgagaaaggaattgtgaggaagcaagaatttgtccagagtttgaaggatgtgatggagggtcaaagaagccaagagattagaaggaatgccaataaatggaagaagttggctagggaagcagttggtgaaggaggcagctctgataagcacattaatcaatttgtggatcatttgatgaatgcagataaaaatggaagtttgaatgtatactgagtgcctatgctcatcataagttgttatttgttagtggaagcatgtattctgggtgcatttgtgttcattttttcaacatgaaaccctatgtgaatgtatgacatcctttttcagtatct

SEQ ID NO: 10666 - DNA, 571 bp, Glycine max
gacaccagaaagtgccagaattctaatcctttttgcctaacctttatgtgtgtgtgtggcatcattttccaaccccacaattcaaaatccattaaagaaagacttacttatagaaccctctctcactctcacccttaaggattcttctctctaagaagttctgagatatcaatcagaaaaaagaagaagcaaagaaagatgataatggttgtggttatgacaggtatattaggagagtacacagcagtgctaacaagggtcacagagcgccttcttcctcgccatggcataagttttcgtggtctaaggaggaaccttcgttttgcttccacaacctcttcttcagattcagcttcttcttttctggtttacttttaatcatatttgtcagattaatttatttctttcatgttttaggataggatatttgtttattgcacaatatattggttatgtgaggagctagcttcagaagaataagctatgttaattagattctgttgcattttgtgtaattatgttaaagattttgtaataaagaattagcccttgtaaaaaaaaaaaaaaagga

SEQ ID NO: 10667 - DNA, 398 bp, Glycine max
ctgctcgagcggctcgagctccgagccgaatcggctcgaggcgacatcaagcagaaaaaagaagcaaagaaagatgataatggtggtggttatgacagagatattaggagagtacacagcagtgctcacaagggtcacagaacgcctccttccgcgccacggcataagttttggtggtctaaggaggaaccttcgttttgcttcttccacaacctattcttcagattcaacttcttttctggtttacttttaaatttttaatcatatttgtcagaatagaaactgtgtttagttctttcgtgttttaggttaggatatttgtattttgtattaattcgtgagaattgaaaacagtgtcaaaagatttataataataaaaacggctcgagcggctcgag

SEQ ID NO: 10668 - DNA, 788 bp, Glycine max
  unsure (1)..(788): unsure at all n locations
ntccggaaaaagaaaagcattttacgttcgaagtcgagtcgaagagttttgggagccaaatgggtcttctgagcatcataaggaaaatcaagcggaaagagaaggaaatgcgaattctaatggtcggattggacaattctgggaaaaccacaatcgttctaaagataaacggagaggacacaagcgtcatcagtcccacgctcggcttcaacatcaaaaccataacttaccaaaagtataccctaaatatatgggatgttgggggccagaaaacaataagatcttactggagaaactactttgagcaaacagatggtttggtttgggtggttgacagttcagatctgagaaggttggatgattgcaaattcgagctcgataaccttctcaaggaagagaggctatctggagcatctttactgatattagcaaataaacaggacataaaaggtgcccttacacctgaagaaatagctaaggtgctgaacttggaagccatggataaatctcggcattggcagatagttggctgtagcgcatacactggtgagggtctgcttgagggatttgattggttggtccaggacatagcctccagaatctacatgcttgactgatgcttgtttgtgccatcttccatgaaatgtgtgccaacttacaagagaattctcaaacagtcaaacccaatatctgtctttggaagacattatggattccctgtctcactgatatgttccagatttttttttttttaaatttttggtgggtgggggtgatggggggtgcct

SEQ ID NO: 10669 - DNA, 666 bp, Glycine max
gtttttatgcagtcagaagcactcagtgctctaaaagctgctgagggaatgatgagagaaagtgatccttacatcgtccttcatctttgtctagaatatgctgaccagaggaagttaagcattgctcttgatcatgcaaagaaactgattaagcttgaggatggatctagtgttagtggatatattctattagcacggattttatcagctcaacaaaagtttgtagatgcagaacttgttatagatgctgctctagatcaaagtggcaaatgggatcaaggagaattgttgagaactaaagctaaactacggattgcacaaggaaaattaaagaatgcagtggagacatatacttttcttcttgctggtcttcaggttcaaaataaaagtttaggcacagcaagtaaggttgtgaagaataagggaaaccgtgacagaagactggaaatggaaatatggcttgatttagccaatgtgtacacggccttatcacagtggcaggatgctgaagtttgtctcgcaaaatctgaagctattaatccctattctgcttctagatggcacacaaaaggtttgctttctgaggccagaggttttcatcaagaagctttgaaatcatttaggaaagcattagatattgagccaaaccatgtaccaagtttgata

SEQ ID NO: 10670 - DNA, 627 bp, Glycine max
caagtggtacaagatgcaccaccctatccagggatagaacatgttgaaggagatatgctccccagtgctccaaagggtgatgccattttactaaagcttgtatgtcacaattggttagacgaagactgtgtaaagtttttaaggaattgccacaaagctttgccacaacatgggaaggtgattgttatagactatataattccagaagttccggattcaagcaaaatttctatgcaaacttgtgttgctgatagtctcatgtttttagtaacaagtggaaaggaaagaactgagaaagaatttgagagcttgtgcaggaattctggattttctggatttcatgttgcatgtagagactcaccgtcggttctatcagtggtggaattttataaataaaatttatgctattacttgtgaagggtgatgacgagcatcataaataaaatcagttcttgaaggatgatgacgagcatcataattaaaatcacttatcatatttatgctatatatcacttagaatttggatatgttagcaattttcataatgttgaaggaagaagtattgtaccaaatcataaaaggaaataatgtctaatgattctaatctatgaagaatctattttattg

SEQ ID NO: 10671 - DNA, 658 bp, Glycine max
  unsure (1)..(658): unsure at all n locations
tgtgatttcagcttgtatgtcacaattggttagacgaagactgtgtaaagtttttaaggaattgccacaaagctttgccacaacatgggaaggtgattgttatagactatataattccagaagttccggattcaagcaaaatttctatgcaaacttgtgttgctgatagtctcatgtttttagtgacaagtggaaaggaaagaactgagaaagaatttgagagcttgtgcaggaattctggattttctagatttcatgttgcatgtagagattcaccgtcggttctttcagtgatagaattttataaataaaattaggatcaatcccataataaataaggtctaaaataaaatttgataaagttatatgttggccttttttacctacatatgtggtcatattatttttgttgatgatagacttaaaatttaagctttaattactttattcttcgttgagaataaaatttatgttatagcttacaattgngacgtgttagcaattttcatattgttgaaagaacgataactaccgaatcataaaaagaaataatgtctaatctatgaagaatctatnntatagatgatgattgtgtcttncttagagtttccactttgatcatctatntttctaatgattccactcttcttttataatt

SEQ ID NO: 10672 - DNA, 532 bp, Glycine max
ctggctttcaacaatgtcatgactctgtttatgaaactgggtgaaccccagaaagtgcctcagctagtggagcttatgaaaaagaggaccattcccatgtccccattcacatatcatatctggatgaacagctgcgcctcttcaaacgatcttggtggggcggagagagtctatgaggagatgaaaactgaaaatgaaggccaaattggttggcacacttacagcaaccttgcttctatttatgttaagtttaaggactttgagaaagctgagatgatgcttaagatgctggaaaaacaagtgaagccgaaacagcgtgatgcttaccattgcttgcttggcctttatgcagggaccggtaatcttggggaggttcatagagtgtggaattccctcaagtctgtctcccctgtcaccaacttcagctatcttgttatgcttagtaccctccgaaagcttaatgatatagaggggttaacaaaatgctttaaggagtgggaagctagttgtgttagctatgatgtgaggttgg

SEQ ID NO: 10673 - DNA, 612 bp, Glycine max
  unsure (1)..(612): unsure at all n locations
cttaaatgagcttgagaagcagaaagaagacatgttgaaattgaattccccagcatcccttctccaaaggatccaagagtcggacgcgtgggctgacgaggaatctgaaaacttgcaccagcatctccttgacagagagatagaccttgctgcttttttgcaaaagtacaagaagctacgtactacttaccacaggaaaactcttgtacatcttgctgctaaaacatcaacagtataagcacaacacgaaatattaagaaattaaaactggttttggcaagtatgtatttgatttttagttcactattgtcaatagttatcattggtcaaagatatttgccaccaattatatagaagttgcagtcgttgggatagaaccatctactatcaatgagattgttcatattgtagagcctgagattgttcattgtgttgacattgtcaagtggtttcaggccacttgggatgaggtatggacttgcatttatttttctggtttgtgataggctatgagatcatcatcgccgatataggatttactgttgttttgtaaaatgtaaaaaaaatgcaatgactttttttttatataaacgactttcttttctttagcnc

SEQ ID NO: 10674 - DNA, 372 bp, Glycine max
aatgcaggtggtgaatgtttgagcaactgggcattgtcccaaccggcctcactgcagtgtagtaagcttttagtttgtttttgttattattatatgcttaataatttgcaatgatgggactcaatgattaattaattaacaaacgaattttgttggagtctttttatttaacatttttttgttgccttgttttcttcattaacacggggatgtggaagagactacagcttcatattaagtttgattcagaatagaagacaaaaagggtctgcacatagctaggggcattggggaacacgaatgacatgatcgatatcacagcgctcaatgctcatacagcactacttttctttatcaccattcttgttcacg

SEQ ID NO: 10675 - DNA, 678 bp, Glycine max
cttataatgaaggggcagagagtggttgtaagaaaaggaaatgaagaagaaggaaataatggtgatggttccgtatccggcacagggacacgttagtcccatgcaaaagctaggctgggaatttgtgaggcaggggttcgaggctgtgattgtgatccccaaatttattcacaggcagatagcagagcttcagaaaaatgatgagaatgagatgataaagtgggtggctctgccagatcatgaagaagaagaaggaagcaacccaccagaagatttcttcgccatagaatcggccatggagaacagcagcatcacaactcacttggaagcactgctccatagcctggccgcagagggaggtcacgtggcctgcttggtggttgacttattggcatcttgggccatacaagtatccgataggcttgccatcccttgtgctggcttttggcccgccatgttcgccacatacctcttcatttctgccatacctcactttctccaaactcgcctcatttcaaactctggacttccacaacacgagggaaaatttagccttgaacctgagctgccggtgatttcaactgaggatctgccatggcttgtgggaacagacgctgcaaggaaagcaagatttaaattttggaaaagaactttggagagatcaagtgctctgaaatg

SEQ ID NO: 10676 - DNA, 885 bp, Glycine max
tgaaagcatgctgggtggtagtgctatgccagatcctgctttattgacccagctaatgcaaaatccagctatctcacaaatgatgcaaagtatgctttccaacccacaaacattgaatcagattcttggtgctaatactgagcagcgtggcatgcctgatttaaattctcttagagaagtaatgcaaaatccagaattccttcgtttgttttcttcacctgagacattgcagcaactcttgtctttccagcaaactcttatgtctcagcttggccagcaacaatcaacacgggaatctggtcaaactggcggaggcactggaccaatgaacaacttgggattggagatgttatcgagcatgtttggtggacttggagctggtagcctagcggttccaaatagatcaaatgagccgccagagcagctgtatgcctcccaactttcacagcttcaagagatgggattctttgacacacaagagaacattagagctcttatcgccacttcaggtaatgttcatgcagcagttgaacgactattggggaactctggtcagtagcagacaatgttggcaaattccttttggcaagttctcctctgtcgatttccaaggttagccactttgaaatcagtggtgtttaagtgccttgttggatattaaataaaatcagaaatctgtccaaattatagtggccagagctgaaatggtgtaggttatatatattggactgtgattgttccttctaatggtccaattttcttatgtacatacttatattgaaactagttttagacgcagcaggcgatcttaaatatttcaaatgaattgatttttgtgcttttttgtttctattattaatgcttaataactgcacaattactgaa

SEQ ID NO: 10677 - DNA, 476 bp, Glycine max
tgttatcgagcatgtttggtggacttggagctggtagcctagctgttccaaatagatcaaatgagccaccggagcagctgtatgcctcccaactttcacagcttcaagagatgggattctttgattcacaagagaacattagagcccttattgccacttcaggtaatgttcatgccgcagttgaacggctattggggaactctggtcagtagcggacaatgttggcaagttctcttctgtcgatttccacggttggtcactatgaaatcagtggtgttcaagtgccttgttgaatattaaataaaatcagaaatctgtccaaattatagtggtcagagctgaaatggtgtaggttatatacattggactgtgattgtttcttctaatggtccacttttcttcatgtacatacttaaattgaaactagttttagacgcagcagatcttaaatatttcaaataattgatttttgtgct

SEQ ID NO: 10678 - DNA, 1150 bp, Glycine max
gtctctttagccaccatcgtttcacgtgtccctctcttcccttgttctgttctgtttgctctgtttgtttcctaggaaaagaaaaagcctcaattgggttcctttatatttatttttctttactcttataaaggtttttgttcttaggcggtgtttagtgtttctttgtggggttggtaaaactttcaccttgtttgaagggttgaggcagagattgttaaagggtgttgtggtagtagaaaaatggaaggaaggaaaaaaatgggttcttcttctttcacttctgagctctttggatccaaccagttccagaaatctgctgcttctggaatttttgaatctatgtttcctccaccgtctaaggtgttagggagagagtctctgcgttctgaagtgtgtgagaaaactgccaatgagaggtggagctccaaaattgattacatcagcaagggaagtgatggtgaaactcagagcacgacacataaggatatgagttctatctatcaggaacaaagacttcaaccatgtcaacttagctcatcaatccattatggtggccaggacatatgttcttgtcccaagagtacacaagattcaggatacaactctttgctgtacaagaaagatggggttgaagatgatttaggaagtaacctgtggcaagggggtccctattattaagatcacacttgccaaaggacatgctccttaaggtaaacaggaggatagtttagcattttagtgcatcttttgttgcatggacaacaagttatgaacagtgagaacgttgtggatggctagttgctttctccagccaaacaacacaatcacaatatgaacctatagttagtcatacgcatatcttttcatttacctgtaaagagtatagtattcaaaaacagtggtaatgtaagagttgtatggtatggtataggaactatatgcatcatcagctactctattattatgtggctgaggctttcaagtttttacttttacttgtatgggagaaactctcttttactggtttcccctctactttgtatttcagatgtgatgtgattagtgagaactgatcatttatgaatatgtagtgctagtttactttatgagtgaaaaaaaaaaaaaaatcgagactagttctcctggt

SEQ ID NO: 10679 - DNA, 504 bp, Glycine max
ggagcctaatgttgtcaataaaattgcttttgtggttcctgtttttgtcatggtgccactttgccatcccatgctgcgaggccaaccaacaaggggaatatctctataagtttattcgatcaaggagggctcaaaaacgctcttatggagaagcttcttctatggccacaaatcttggtggtgatggacatttttcgaaggtttatgttgttaaggaacaatccgggttgatggaaggtgacaaagtgaaggctttgccgggacaaccagctcaaggggtggattttgatcaatatgctggctatgttacggtcgatgccaaggcagggagagcactgttctactactttgtggagtcacctcacaatgcttccaacaagccccttgttctatggctaaatggagggcctggttgctcttcctttgggtatggagccatgcaagaactgggaccttttagagtcaacagtgatggaaaaacactttacagaaatcaatatgcat

SEQ ID NO: 10680 - DNA, 702 bp, Glycine max
  unsure (1)..(702): unsure at all n locations
gttttggggttaggttatcaaaaacaaacaaaaatcttagccgcagaggcagaggaggagatggagacgatgatgatgagttgcgtatcgattccgagttcaattccaaaatcaagaccttctattagcttgggtttgggaactcccaagttgttcaattcagtttcagtaagggtagccgtgaacgtgaatggtcggggaagaaacaaaggtttgagttgcaacgccatgttcggtctgggcgtgcctgaactggtcgttattgccggcgtggccgccctcgtttttgggcccaagaaattgcctgaagtcggccgcagcatcggcaaaactgtcaagagcttccaacaggctgcaaaggagtttgagtcggagcttaagaaggaaccggattccaccgaaggggactcatctgagaaatctattgtagtcagtgagaagcagcagcagcaggacaatgaggtgtctacttctaaggagactgtatgagatattatatgaaatgtagatgtcaaattttccccatgaaaaaaaaaattctgttagttaagaattttttggcggtctgagattccattatttaaatcatgaccaagctttcaaataaaaaaattaaaaaattggatgctnnnnnnnnnnnnnnnnnnnnnnnnnnnnnnnnnnnnnnnnnnnnnnnnnnnnnnnnnnnnnnnnnnnnnnnnn

SEQ ID NO: 10681 - DNA, 525 bp, Glycine max
ggggggggctcaagccttaaaggtgtaaggttataaaataaaaaaatcttagccacagacgcagaggaggagatggagacgatgatgatgatgagctgcgtttcgatttcgagttcagtgacaagaggcgctattagcgtgggttcctcttcatctttgtgtttcggcacacccaagttgttcaattcagcaagggtagcggtgaatggtcggcgaagaaacaaaggtttgagttgcaacgccatgttcggtctgggggtgcccgaactggtcgttattgccggcgtggccgccctggtttttgggcccaagaaattgcctgaagtcggccgtagcatcggcaagactgtaaagagcttccaacaggctgcaaaggagtttgagtcggagcttaagaaggaacctgattccacccaaggggactcatccgagaaacctattggtacagtcactgagcagcagcaggaggacaatgaggtgtctacttctaaggagactgtatgatattttcgccatgaaataaac

SEQ ID NO: 10682 - DNA, 790 bp, Glycine max
gcaggagcgagtgattgcagaacacccagcgcgaatgagaatggaggaagcccttgcggaactggagcgagtccaaacccagctcctgcaacgcatatcgaaactggagcgttcgcatcttccatcaccctcttcccaaaacgacaccgtcgaagacactgccacggacaccgtggctcgcctctcctccattctgcgcagcaacggcgttcccgatttctccttcaagagagtcccttccgattactacgactggcccctcgaagcccgtcgcgacgccctctccgccgcctcaatccaccatctctgcaaaagcatcgttctcgttaacacgcaagcccccgccaacgtcgtcgattgcagcgaccgcaagaattccaaatactatgtcgttgtcgttcagtacaccgctcgcttcaacgctgaggctgtcaagaattttctgtattcgctcaacaatggaagtatcgcgaagaagaaattcaacatgaggctagctcctgaggagacatcaatggagttgactggatatgggcacaatgcagtgacttgtattggcatgaaaacagacatcccggtaagaatggacatgttgatcggtatcagattcttatgatatatagtcaacgaaatgttgcatcttagtaacaaacccaaaacaagtccctattcacgctgttaaggctagtattgcccattttttttgtcatgcatatcattgatacaaacaaggatcagttgctaaaatagcataaaagctgaaatggaaatttttttcttggtttgcccc

SEQ ID NO: 10683 - DNA, 432 bp, Glycine max
gagtcttctccttatggaattaatgacacatctattctactataatgcctttgctaatagtgatttgtggaagcacttatctcctatggacgtgttcatcattggatatggcgtgttaaacttcatgtggctaaaatttttactgatctggcgctttttccgcttctggtcactgataaacggaattgagactccagagaatatgccaaaatgtattaataattgtcacaacttggaaggcttttggaaaaactggcatgcttccttcaacaagtggcttgtgaggtatatatacattcctcttgggggatctaagaaaaagctactaaatgtgtgggttgttttcacatttgttgcaatctggcatgatttagagtggaagcttctttcatgggcatggttgacgtgtttattcttcatccctgagttggt

SEQ ID NO: 10684 - DNA, 393 bp, Glycine max
gaaaacagattcaattaaactaaacatatcccaagtgttcttacttattatataagtcttgaattcagttcatattttgctgatcactctactttatacatctgtataagcctttagtcatgtttgaaccaagggacatgtggaccaagctgaaggaaaagggtgagacaattttctctaatgctggctggattcaccgtgaacctagccagggaattcaaggaaaggagaagagttcacctgggttggctgtggttgctggccaacaacacgcgcaagttcacacacctaggatgatgtattccgaggcttcagtttccatgcttgtcgaatgcttcagtgcttgaaagaacaaaaaaggataagtgcctactcttgtacttgttattttaa

SEQ ID NO: 10685 - DNA, 387 bp, Glycine max
tgaggggacaatagaaggctgtgaatatgaagatgtcatactctgccttgctacttttgggcctttcgcttaccttcttcaccccttcgacgcttgcttggttgtggccatggtattctcctttgcgacctccttcttgtcctgatggtggttgtaggataccacggctactccctacttataagcccccaccattgtatagatctacttccaaggggaaaccactccctacttataagcccccaccattggatagatctacttccaaggggaaacctttagatcgatcaatgtccctatagtactctttgcagcagcagcagcagaatgtgtctacctcatcttcaggtagtgtgcttactagaataatttaactttctcaaatgc

SEQ ID NO: 10686 - DNA, 1091 bp, Glycine max
  unsure (1)..(1091): unsure at all n locations
gcagcatcgttctatttggagcttcagatttcatccattagtgaagaactgctgaaaggcaaggtcagtngagttactggagtttgcaagagacttgatgatgaaagtgcagggaaaggcttggagattgaacaaatgatagaaagaatcggtttactggaaaaggaaattagaggactgaaggggcagctatctgcatacactccaacaattacttctttgaaagaggattttgcatctctagagcacacttactttcttttgaccaataaaacttttgccgtaggtaacatagaacagaaggatgtagtgactgagatttgtctccaagaagcaaatagctatcgaagtttaaaaggaaatgaaagcaccttaacaccagatggggttacagatttgctgagcatgcagacaaggattagagcagttgaaaagttaatgatggaagaacttgaaagacatgtggaggacgaacgtttgaccacaaatgtcaaagcagaagctgttacagaaatgactgagcattcaaatttggaagttggcacgtatccagaaattgacgacagaaaagtggtgatgaaaattaagaaagacaacagcaaacgtggcaataatgcatggagaacaaaatctcagaaaaggttgataatgatagacattcctcttgatgactacaaggatgatccagactccaacaagtatggcaagagagatcacactaggattgataatcatatgcttgagttatgtgaaactgatcagcatgatgttactgaagaaaataaacagaattctgtttcactagaggatgtaattacatgccatgagtcagaaagatgccaaaattactcttcagaattggagacagagaaggaattaggggttgacaagctagagttatggaagactcgaaaagagacaacaagtgaagatagcaagaggaaaattctggagaggcttgcctctgattctcagaggcttgccattcttaaaataacatgaaaactaattttggtaatatagttatttttttaatacatcgctgaaattagtattcctgagatttctgaaaaaagtagaacaaaaatatg

SEQ ID NO: 10687 - DNA, 567 bp, Glycine max
ggcggacaaagaaaatcaaaattatgaatcggtaaaaaaaattaaaaggggcgtgggtgtgtgtgtgcgtgtgtgagagagagagagaaagagagagtgaaacagcgcaaagaagatacaaaattgagacgaggctgaacaaaaataagagtgtttagtttcccttctgatggtcgtgagtggttcctccccactaacttcgaagaggagaagggtcaccaacttttgttccaccgacatggacgctgaaactgctaaggccaagcttgctgctgtgaaagaaagatttggacgagagatccatgtttttgaaacatcagttctttcttcatcttcaaaggctgcgttatccaatgaaggagaggagacggatgacttctatgagtttactgctgaagattattacagacttttggctactaaaaaagaagataaattcttgaagactcgaaaactacgagaagcagaagaggcagctcgtaggtcaagaataaccaaagctgtaatcagaattcgcttccctgataatcacactttggaggctacattccacccattcgaaacaat

SEQ ID NO: 10688 - DNA, 486 bp, Glycine max
atgctcgagtttttttcttttcagagattctttcttttctctctctttctctcaggctcagctctaaaaacttgtcttcaatattctgtttttcttatcagtctttggttttctagatcagatggaggaaagcaagaaaaacccttctcaacttaacagattccaggatgatggaatgcacgatcttgacatagttgaatggaaaaagaaaagaaaattacagagtgatcagttggatttgattagacctaaacataaatgctgggttggaagtttctcctctgaacatgcttcagtgtttgataaaaatccagttttagagagcatgcacaaccacacagttgaaagctccaaacatgaatctgccaaagacagcaatagttttatggaagactgtgatactgccatgtctgtaaatgaagaagccaaacacgagacagattgtggaagttcatacttatatgtaaatagggtaagctatatcga

SEQ ID NO: 10689 - DNA, 1141 bp, Glycine max
ggctcgagcggtctcgagcaaaggtttatgaggcaaggcaccagtaattaataacaagctagctattagttcgattttgtagtaagtgaggtgccaatatggtgaagatagctcttggtactttggatgactcttttagcgctgcctctcttaaggcttatttcgcagagttccacgcaactctgattttcgtgttcgctggtgttggatcagccatcgcttacaacgagcttacaaaagatgcagccttggatccaacggggctggtggcagtagctgtggcacatgcatttgcactgtttgtaggtgtctccgtcgcagccaacatctcaggtggccatttgaacccagctgtcacttttggattggccattggaggcaacatcactctcatcactggtttcttatactggattgcccaattgttgggttctatagtcgcatgcctcctcctcaatttcatcaccgccaagagcattccaagccacgcaccggcaactggtgtgaacgattttcaagctgtagtgtttgagattgttatcacatttgggttggtttacactgtgtatgcaactgcagtagacccaaagaaggggtcattgggtatcattgcacccattgctattgggttcgttgtgggtgccaacatcttagcagcaggcccattcagcggcggttcaatgaacccagctcgctcattcggcccagctgtggtcagtggagacttggctgctaactggatctactgggttggcccattgattggaggaggtttggctggcttgatttatggagacgtcttcattggttcctatgcccctgtcccagcctctgaaacctacccttgagcttcaacttcacttgtgtgttccttcaagtttcatctctgttcaccgtttcatgtcatgagcctcttggcttcttgcattttaaactctactttatctattatccaccgcttgcaataattatgtaaattataattcgaacttgatacatgaattgttggaaggtccccttgtttttcggttttcgtcctaccaatgacagcgagctagctagtggtttttacggatcagatctgcagttcatttttcaactgtaatcaatctcggccaatatttaatagactaacataatt

SEQ ID NO: 10690 - DNA, 503 bp, Glycine max
tatcattgcacccattgctattgggttcgttgtgggtgccaacatcttagcagcaggcccattcagtggcggttcaatgaacccagctcgctcattcggcccagctgtggtcagtggagacttcgctgctaactggatctattgggttggcccattgattggaggaggtttggctggcttgatttatggagacgtcttcattggttcatatgcggctgtcccagcctctgaaacctacccttgagcttcaacttgaaaaatatgacttcttgttctattcacttgtgtgtcctgtcccttcaagtttcatctttgttccccgtttgatgtctcgagcttcatggctttttgcatttttaactgtacctttatctattattcaccgcttgtaataattatgtaaattataattcgaacttgatgcatggattgttggaaggtccccttgtttttcggttttcgtcctaccaataatgacatcgagatagtggtttttacggatc

SEQ ID NO: 10691 - DNA, 401 bp, Glycine max
tttatgaggcagcactaatttatatagcaagctagctaggttgaaaatagtttggttttgtagtaagtgaggtgaggtgccaaaatggtgaagataactcttggtactttcgatgactcttttggtgttgcctctcttaaggcttatttggcagagttccatgcaactctgattttcgtgttcgctggtgttggttcagccatcgcttacaacgagcttacaaaagatgcagccttggatccaacggggctggtggcagtagctgtggcccatgcatttgcactgtttgtaggtgtctccgtcgcagccaacatctcgggtggccatttgaacccagctgttacttttggattggccattggaggcaacatcaccctcattactggtttcttatactggat

SEQ ID NO: 10692 - DNA, 474 bp, Glycine max
cagtattcggcaagaacgaagaaatagaaaaaaaaaatgttgcagcttctgtacgcggtgatatttgcggaaatgttcgtgatcgcgagcttcctcttcaaaactccggcgaggaagctggtcatcgtcacattggatcgggtcaagcgcggtcgcggccccgtcgtcgtcaagaccgtcgccgccacgctgctggtggttctcgcttcctcgctctacagcatcgccaagatccggcgtcggaacctcgacgctcccgtcgttaaccccaccgaccaagtactcgtgtccaagcacatgctcgaggcttctcttatggggtttgtgctgttcctgtctttgatgatagatagattgcaccattacatccgagaacttaggttactaaggaaggccatggaggctgctaagaaacagagtcggagtttcgaggatggtaaaagtgtcagtgcagcagagcacaaggcgttgttg

SEQ ID NO: 10693 - DNA, 966 bp, Glycine max
aaataaacaaaataccaccatctatatatttctctctcccttgagaaattagggtatgtatctagcaaaccccaacaagaggattttttttttctcttccttcaacgcaaaaacacacacctcttagtaatcatcatgtcctctcctctcttcttcccctcattattagaccctcgctttcatcatccccaccgcatcttttacctcccaccaaccgcaccaaagccatcatcctcctctgcctctaacatcaccaccacaagaagaagaagaagaagaagaagaagaagaaagagaagcaaggagaaagagaagggttagaaggcgaagaagcatggcttcactcaagaagaagaaaccctattacccgcttccgttaattcctatctattactacttcttattcaaagggtgatatgatcttcttcttccaagagtctcatgcatgctactttcttctctcttctcggggaattgaagcgttgtggtccgattgtttgctagatcaagcaaattaacctgtatactggtttatatatcttcaccttgcacctttctctctctctctctatctctctctctctatatatatatatgggtttaatctcttactttctttatcttttcactttttttcagttttggtttgatttaattacgtgattaaaatttacatatatggatttgaatatatagtacgtggttttcgagcttggtgttttagatataataacatgatgatgaaaaacaaaactagtctctttttttcttttgttgttgtgttgttgagaagtgagcactgtcactttgtgccttcttttacttgtatatgtgagttggagattgagctttgttattgcttcaatttatgtttctgaatacagttggaagtatagatctggatttccatatatatgtatgttaataaatgttgttcttcatgagaataacacagttggattgttc

SEQ ID NO: 10694 - DNA, 386 bp, Glycine max
ctctcccttcaacgcaaaaacacacacaacccttagtaatcatcatgtcctctcctctcttcttgccctcatcattagaccctcgctttcatcatcaccaccgcatcttttacctcccaccaaccgcaccaaagccatcatcctcctccgcctctaacatcaccaccacaacaacaagaacaagaagaaagagaagcaaggagagagagaagggttagaagggtgaagaagcatgtcttcactcaagaagaagaaaccctattacccgcttccgttaattcctatctagtactactactttacttctgattcaaaagggtgatcttcttcttcttccaagcttatcaattatcatgcatatgctactttcttctctcttctcgggg

SEQ ID NO: 10695 - DNA, 577 bp, Glycine max
aaaattccacttgtcatggctggccgtagacctggtgatgctgaaattgtttatgcatcaacaaagaaagcggaaagagagcttaaatggaaggcaaaatatggcattgatgagatgtgccgcgatcaatggaattgggctagcaaaaacccttatggctatggagatcaggaggattccaccgtttaactatatatatatatagtgttctctttgggttcttttccgaactcccccacaccgtagtccgtaggtcttgtgaatttagttttctcaaaagcttttctttagtccgtaggtcaaggtgacaagtacttgtattattatgattcatagttacatggtaaataagtagtggtttactgcactgtaatttaatttaaaggttctataggttccttcttacaggttattgattattagattcggatgctctcatgtgcccgatgagcaggcttcccacatgagcagcatcctgttttgtaaatctaaatcacatgtttgtttaaagtgtgactaacaggtatccttacctcattattgagattaatttattttgaatgttacctttagtaat

SEQ ID NO: 10696 - DNA, 494 bp, Glycine max
agacgacagaaggggtttatgcatcaacaaagaaagcggaaagagagcttaaatggaaggcaaaatatggcattgatgagatgtgccgtgatcaatggaattgggctagcaaaaacccttatggctatggagatcagggctccaccgattaaccacttagttttctctttgggttcttttctgaactcacccacaccgtagtccgtaggtcttgtgaatttagttttcccaaaagcttttctttctttagtgatcttaaggtgacaaagtacttgtattattactattcatagttacatagtaaataagtagtggtttactatactgtaatttaaaggttctctaggttccttcttacaggttattgattattagattcggattctctcatgttccacatgagcagcatcctgttttgtaaatctgaatcacatgtttgcttaaagtgtgactaacaggtatccttacctcattattgagattaatttattttg

SEQ ID NO: 10697 - DNA, 1363 bp, Glycine max
cccacgcgtccgattttggagcagaagaggccgtaacttgtttgttgggaacttgacctatccaagagacgaatatcaaccaaacccatttttttcatttttaggaatataaggaatccccttcttccccgttgcgcttatggttttgtgagcaaccctaatccaccccaacccaaccctattgaattgaattgggggaagaagaacatagaaagaagaagaaaaatctgcacaattgttgtaattgaacgatgtctgctgcggtgtgcggaagcaagagatctttgttcgaagagcttcccccttccccgccagtatccaagaggctccgctgttcctcctcccctattcgcctctctctcccttctctcatcgaccaccttcgccctctcttccctcatatggatgaccaggtcctcgagagagcgctccaagaatgtggcaatgacctagatgctgccatcaagagcctccacggcctctgtttgggatctgctgatgataattctcaaattgctccacaacctgacctccctaacctcgtcgtcgacacaggtgcgttggaagagaatggggatgcttctgcttctggggatcagcccgctgctgccaattttcctgccggtggagcagaatggattgacttatttgttagagagatgacgtgtgctactagtgttgatgatgccaggtcccgtgctgctagattgctcgaggttctagagaaatcaatcactgcacacgcaagttccggggcaacaacggctcttcaaagggaaaatttgatgctgaaggagcaaattgaagcgttgactaaggagaaaaattgttttaaaagtgctttcagaatccaacttgaacgtctttctgattatgagaataaaaatcaagagttgcagcagttgaagcagttggtgtctcaatatcaggagcagatcagaactcttgaggtgaataactatgctttgcgaatgcatttgaatcaggcacaacaatacagcccctttcctgggtgtttccctcctgatgccttctagggcgatcagtatgtaggatatcataattgaggcagtaaaatagctgcatctggttaatatcccaaagagaaaaaatgcgtattgttaaattgttgcagtttgtgaagctcctgtaggtcaaggaatagtaactgtttccagttcaggggcgattcggatagagtttgatattatagatgaaattattcgtcagtttattcaattgtttattccccattttagcattgagatttgagtgtactgtaattactaaggatgttcaagatcactttgatgtaccatcacagcagactactacaaattatattttatttcccagtcttgac

SEQ ID NO: 10698 - DNA, 492 bp, Glycine max
cgtggccgtaacttgtttgttgggaacttgacctatccaagagacgaatatcaaccaaacccattcattaggaataaggaatccaatccccttcttcctcgttccgctcctcctttgcatacatggtttgtgagcaaccctaatccaccccaacccaacccaaccctattgaattgaattgggggaagaagaacattagaagaagaagaagaaaaatcggcacaattgttgtaattgaacgatgtctgctgcggtgtgcggaagcaagagatctttgttcgaagagcttcccccttctccgccagtatccaagaggctccgctgttcctcctcccctattcgcctctctctcccttccctcatcgaccaccttcgctctctcttccctcatatggatgaccaggtcctcgagagagcgctccaagaatgtggcaatgacctagatgctgccatcaagagcctccacggcctctgtttgggatctgctgatga

SEQ ID NO: 10699 - DNA, 1068 bp, Glycine max
gcacatttgcagagctacattcagacacattatgcggctcctaggatggtgatagctgcatctggagctgtcaagcatgaagacattgttgaacaagtgaaaaagttgtttaccaagttgtcaacggatcccactaccacatctcaatcagttgctaaagagccagctatttttactggttctgaggttagaatgcttgatgatgatattcccctagcacaatatgctgtggcttttgaaggggcatcttggaaggatcccgattcaattcctctcatggtcatgcaagctattttgggttcttggaataagacagcaggaggtggaaaacacatgggttcggagttagcacagcgaattggcattaatgaagttgctgagagcattatggctttcaacaccaattacaaggacacgggtctttttggtgtttatgctgttgccaagcctgatagcttggatgatttgtcctatgcaataatgtatgagacaaccaagttggcttatcgcgtttcagaagatgatgttacacgtgctcgtaatcagttgaaatcttcactgctactacacatagatggaacaagcccagtggctgaagatattggtcgtcagctactcacatatggtcgaagaatcccatttgctgaattgtttgctagaattgatgctgttgatgccagtacaattaaacgtgttgcgaaccgatttatctatgacaaggatgttgttattgctgccatgggtcctattcagcgtttgcctgattacaactggttccgacgtagaacctactggaaccgttattagttcattatagtttttttttttttgcctcatttcaacttcatgggaggtctggcataatgttttattctaatttacaacatttatgcctctgtttttcatttatttgttatgggcctctattttgtaacaattttgcagtaataagtatgctgttgtcagtgatgtaattggcatccttcgcaattattcctccttgtcgaaaatggtgttttgattaaaaattgccttggtttgttttgaacttcaaaaaaaaaaaaaaaa

SEQ ID NO: 10700 - DNA, 431 bp, Glycine max
atcccatttgttgaattgtttgctagaattgatgctgttgatgccagtacaattaaacgtgttgcgaaccgatttatctatgacaaggatgttgttattgctgccacgggtcctattcagcgtttgcctgattacaactggttccgacgcagaacctactggaaccgctattagttcattatagtttttttgcctcatttaaacttcattggaggtctggcaaatgttttattcaaatttacaagatttatgcctctggatggctgctttggcagccatttttcatttatttgtcatggacctctattttgtaacatttttgcagtaataagtatgctgttgtcagtgatgtaattggcatccttcgcaattactcattcctgttgaaaatggtgtttacttaagaattgcccttgtttctcttgaacctc

SEQ ID NO: 10701 - DNA, 541 bp, Glycine max
ggactcggtttgtttgatatgatggtgaaaaagtatggactcaaggccagactacaacattatacttgtctggttgacctactgggcaggtctggttgtttggaggaggcagaggcaatgatacggtccatgcctgtaaaagcagatgcaattatatggaaaactttattatctgcatgtaaaatccacaagaatgctgaaattgcaagaagggttgctgatgaagttcttaggattgatcctcaagactcagcttcatatgttctacttgccaacatctattcttcagctaacagatggcaaaatgtttctgaggtgaggagagccatgaaagacaagatggtgaagaaagaaccaggcataagttgggtagaagtaaagaatcaggttcatcagtttcatatgggtgatgaatgccacccaaaacacgtggagattaatcagtatctggaagaattaacttcagaaatcaagaggcagggctatgtacctgatactagctccgttttgcacgacatggacaacgaggaaaaagaacaga

SEQ ID NO: 10702 - DNA, 728 bp, Glycine max
  unsure (1)..(728): unsure at all n locations
cgcagacgtaccgttgtttgagggacgagacagaaagggccaggctgtattgagtaagagacaccaccacacaaaggcngcggttaggtaagggaataacaggagcgtcaccctctcacatggcggcagcaaccacaatttgctacggtccctcctcttatattcttcttggctcaaatttacttagacagggacacttgaaaaacacttcatttgctcatcgtttttctccttcaagatcattcctttgtaacggatttgttcccaggaaacctgttttgggaagaaactcgttctgggtatcaaaaaccatggatgaatccgcgagaacttctgctttcagagatggaaaaggcgatgaaaccatccaagtgtttgaacaagaagctttcatcgatgggtcaaccccgtttcagtccaagtttctgtccccggaggtggaatacaacctcaatcgaatgagcaagtggatagtaactgccctctttggcggtttcattctttggaggcatgacgcagaagccttatggtttacagcagggtctgctctgaatgctatgctttctgttttgctcaaacgcatactgaatcaggaacggccttcaaccctgaaatctgaccctgggatgccatcatcacatgcacaatccatattctttactgtcttctttgttattttgtcaggcgtagaatggcttgggctaaatggattcaccattgccatcagt

SEQ ID NO: 10703 - DNA, 716 bp, Glycine max
agggaagagtgcattcagtgcgtaatgtagataattagacaaatttctaatgtgagaatctttctgagaatgagatgttgctaaatatttcggatgttgacgataaggatgaggtaataatagtttgagacaggacagaacattggaacaggcagagcatggatggagctatcaacactatattgtcaagaaactgagagtgagaggagaaatatgttgtcgttctgctcatgcactgcctcttccctggctctgtctccattgctccttccctgcatctattctttgatgcattgagtatgatctgttttcaaatgtgttcataggttcaacttattaaggtacgaacatactctgggcattgaaaactggtttgactcttgaacatattccgcaccactaatctttcttgtaatccaggctcacgcacgatcactataaggtcccacattcttagtggcctaatcgttggaaaatgctactttggcactacttgatgaattgtatggctgggatttttttccccttgcttgtagaatcctctcaatttatgtaaccatcgtgtactcatttacatgtcatcaaattttgaatgagatgtgatatacatagaacaatttgtatgacctcattttctgtgtttatttctctccatcaatatcattttctaaatctcaaaattctctcttttttcttagttgtagaagttattgttt

SEQ ID NO: 10704 - DNA, 1640 bp, Glycine max
cacttagtggtttcccttagaaaatttcctttgtatacgtgatacggttgtagcaagcacttgcatcgcatatattctttccctttgacaactgcaatctaaggtagaaataacaaacacaacatgggttctttgggcacaatcaacaagccacatgctgtgtgcataccgtacccagcacaaggccacataaacccaatgctaaaactagcaaaactccttcacttcaaaggctttcacataacctttgtaaacactgagtataaccacaaacgccttctcaaagcaagaggccctgattcccttaatggcctctcttcatttcgctttgagaccattcctgatggtctacctgagactgatctggatgccacacaggatattccttccctgtgtgaggccactagaagaacttgctctcctcacttcaaaaaccttcttgctaaaatcaatgattcagatgctcctccagtgagttgcatagtttctgatggtgtcatgaccttcactcttgatgctgctgaagaattgggtgtccccgaggtgctgttttggaccactagtgcatgtggatttatgtgttacgtgcaataccaacaactcattgaaaaggacctaacacctctcaaagactctagttatatcacaaatggttatttggagactaccatcgattggataccaggcattaaggaaattcgattgaaggatattcccagtttcgttaggaccacaaatccagatgagttcatgcttgatttcatacagtgggagtgtgggaggactcgaagagcttctgcaataattttgaacacctttgatgccttagagcacgacgttttggaagcgttctcgtccattttgcctccggtttattccataggtcctttgaatttacacgtgaagcatgttgatgacaaagagttgaatgctattgggtctaatctttggaaggaggagtccaagtgcgtggagtggctcgacactaaacaacccagtagtgttgtttacgtgaattttgggagcatcgcggttatgacaagtgagcaattgattgagtttgcatggggacttgctaatagcaacaaaaactttttgtgggtcataagggcagatcttgtggcgggtgaaaatgctgttttacctccagagtttgtgaaacaaaccgaaaatagaggcctattgtctagttggtgctcccaggagcaagtgttggctcacccttcagttgggggatttttgacacacagtggttggaattcaacgttggaaagtgtgtgtggaggtgttccaatgatatgttggcctttctttgcagagcaacaaaccaattgtcggttttgttgtaaggagtgggggattgggttggagattgaagatgttgagagggacaaaatagagagccttgtgagggagttgatggatggtgaaaagggtaaagagatgaaaaagaaagctttggagtggaaaagattggcaaaagtggcagcttctagtccaagtgggtactcgttggttcaatttgagaaaatgattcgtgaagttcttatagcattttgaacgggtttttccaaggatttcttaagaaaaaaaatgtttctttttaggttttttttcccattgaaacatatctatgtgat

SEQ ID NO: 10705 - DNA, 518 bp, Glycine max
atcaattccttccacacccttgagaaagaaaaaggaaatgggttctctggaagcaatcaagaagccccatgccgtgtgcgttccattccctgcacaaggccatataaacccaatgctgaaactagcaaaactccttcacttcaaaggctttcacataacctttgtcaacactgagtacaaccacaaacgccttctcaaagcgagaggccctgattcccttaatggtctctcttcatttcgttttgagaccctcgccgacgggcttccccagcctgacattgaaggcacacagcacgtgccttcgctctgtgactacaccaaaagaacttgcttgccgcacttcaggaacctcctttccaagctcaatgattccccggatgtcccttctgtgagttgtgttgtttctgatggcatcatgagcttcactttggatgctgcccaagaacttggcgtaccaaacgtcttgttttggaccaccagtgcttgtggattcatgtgctacgtacaataccagcaac

SEQ ID NO: 10706 - DNA, 485 bp, Glycine max
caaaccaattgtcgattctgttgtaaggaatgggggattggattggagattgaagatgttaagagggataaaatagagagccttgtgagggagttgatggatggtgaaaagggtaagcagatgaagaagaaaggtttgcaatggaaggaattggcaaaaagtgctgcttctggcccaaatggatcttcgtttcttaatttggagaatttggttcttctgtgcagaaatgctaaaaattagtatatctgagcaatgagtgagagaggatacaactttggcagtttaagaaataattggcagaaagcccgccaactcatctgctcatgctgctcaagtgatttgttctgcaacatcttttacgccttggtctagtagaatcccaattggtgaaggattttatcaatttctttagttatatgcttctcactatgacatttgcacattatttggttgattaatcttcacaaaaactctactttctcgtg

SEQ ID NO: 10707 - DNA, 519 bp, Glycine max
gtgttggctcacccttcagttgggggatttttgacacacagtggttggaattcaacgttggaaagtatgtgtggaggtgttccaatgatttgttggcctttctttgcagagcaacagaccaattgtcggttttgttgcaaggattgggggattgggttggagattgaagatgttgagagggaaaaaatagagacccttgtgagggagttgatggatggggaaaagggtaaagagatgaagaaaaaagctttgcaatggaaggaattggcagaaagtgctgcttttcgctctgttggatcttcatttgctaatttggacaacatggttcgtgatgttcttttgggcaaaagtcttaaatattaggggtagaagagctcaaatcttttaacttactcctttgttgtgtgaagactttttttaaaataattattccttagtgggaaatgaagtgtaccaggtacaaacgtatcatttgtttatttttcttttccaattaatgtcaatcttattgaagtatgg

SEQ ID NO: 10708 - DNA, 1250 bp, Glycine max
ggtgaatgcaacacttggatggaataccgaactactacagcaagcatttccagcgttttctagaaacaacttcattcttctctttctctctatctattcattcacgtttgggagatagaaaaggtaagggaaaatccaaagaaagaaaggaaacggaataattcgatacccctctcgtctcgtaactaaccatggcagcgttccgatggaagagcttcgaggagaatgaggatcgcccagccaagcctcgtcattttggcgtcaccgagattcaaagcccccactgcactctcttctcccacaaccttcttcaggatatttttgaatctatgggagactatgtagatgggttaaagttttctggaggttctcacagcatgatgccaaaggctactatcaagcaaatcattgacatggcccatcagcatgacgtgtatgttagcacgggtgattgggctgagcacatgattagcaaaagtccatcaggtttcaaggaatatgtagaggaatgcaagcagttggggtttgacacaattgagctcaatgtgggatcgcttgagattcctgaagaaacctttttgagatttgtccgcttggtcaaaagtggtggtctcaaagctaagcctcattttcaagtgaagtttaatgagtctgatattcccaaaggtggtgacagggcttatggggcttatattccccctgtacctagatcatttgaattggtagaagatgtgaatctcttgatcagaagggctgagagatgtctggaagcaggtgcagacatgataatgattgatgctgatgatgtcagcaaacatgctgataacatgcgtgcagacatcattgccaaaatcatagggcgccttggtattgagaagactatgtttgaagcatcaaatcagagaatatcggagtggttcatcaaacaatatggtccaaaggtgaacctctttattgatcattcgaacgtggtggatgtggagtgcctcagggggcgcaacttgggtagaaatcttgcttctttccttggtgcttcagatttcctgttctgaagtgagggaattttcgtatagcaccaagtggggttgatttgtttgtgcataatgcaaagacttgaggtttgccatgtgtgttacagttagtgtgttacatatttcctttagtgattgaagattggaaaattttaaatggagagactgaaataaatgaaacatatttcatgaaaaaaaaaaaaaaaagggcggccgccg

SEQ ID NO: 10709 - DNA, 700 bp, Glycine max
gaatctggctcgagccataccccctgcttctagtgctcttccttgtcatccaacttggtgtggtgtatgctattcatcatcatcatctaagatgctgagaaaactcatgaggctgctactgctgctgatgttctttctgtgtttctcatatgttctctctgtctctgctattcctgcaacaagaacccaaaatttgaaaggcgaagaagaagaattttcagccctgccttctttaactaggttggatcatgtggttggaaatggtgaggtggtgctcgttgacatgaatgaaggattcatggagaggagggtcgatttggaaacccaagactatgaagggactggtgcaaataaagatcatgatccaaaatccccaggaggggcttaattaaccttaatcccttaatcccaaaaacgacaaagtgttttaagttagttgcacccgaaaatgtaatagaggatctatatgtatctatttttatatatttggtcttctcttgtaaaatcaaagatacggtttgctttcctttactttatttatatatttctgtttgcttgttcaaattgtctggtggtgttgttcaaaagtcataacattatagtctcatatatatgtaacaactggtatatttttctctcttccttcactgtcattttgttcaataatattaatttattattttttttcaaaaaaaaaaaa

SEQ ID NO: 10710 - DNA, 1004 bp, Glycine max
cactttcttcttgcactaaaaacacacacgcggttagatctgcttcttcactccagaaagaaaaatggaagctctgctctcccaattcaccttcctctcagaccaggccctacaagacaagaacttcgatccttcgacaatcgaagatctaatgaagctgttcgagatcgagtcctacaaggcatgggcagcagctgagcttgagcaagagaaagaggtggaagaagcagaggctggcatggaagaagctgaggagtaccttgactcagtgatggagagtgccatggatgagtttagacgctttgaagaggagctagagaggatgtcaaagaatgaaatggaaggcttggttcaaactgctgagagagccagaaaaatgggaaatttgatggaaaaaggtgcctctattgcttccaagaagtatattgaggctgctcttaattcagccactgcttccatgaaatcagcttggaaaggactctctgctggaaaggttcatccttcttaatatatgatatgtattcagttcaggttaaacctgctgccaataaaatatacttctcctttactctttattgttattttcacttcttagttacatttctgcttggaaggtaggaaattaattagatcccaattgtactaccaaaattgagatgctggagaatattcagccaaaagtggaaagaaaaaacagattcactgttattgatacatggaaatcctcgatgttttgggtggatccatacaaggcttatgattcaaccagcctaattaatgttgaacattattcagtaatgtatttatgaattcacatgtttgttgacagtaggtattgcttctttgatcctgattcctggactaatagagctgaggagacaaaaatttccaatttcctcacttcttttgggcgtttcctgcagattaaattgtgtttcccccccatgaatcttcaagatttcaattgtgttctaaagcatgaaaaagaatcgatatttgttttc

SEQ ID NO: 10711 - DNA, 845 bp, Glycine max
  unsure (1)..(845): unsure at all n locations
ttcagctaactaagtagcatttatgagtaagaattgtagcctgtgtgtggctataaataccatccctccccatgccataaatcgcatcacaaactatatactaatctccatctaatagtgttaatttgtctttctctatctctatcggtcatgggtgcttttgcttttgatgaggaaaactcctccaccgtggctccggcaacactctacaaagctctgacaaaagatgctgacactatcatcccaaagattattggggccatccaaactattgaaatcgttgaaggaaatggaggacccggaaccgtcaagaagataacagctagtgaaggtgaccaaaccagtttcgtgctgcaaaaagtggatgcaattgacgaggctaacttggtatacgactacagcatagtgggagggacggggttgcatgaaagtttggagaaggttacattccaaacaaaggtggttcctggcactgatggtaatggctctatcgccaaggccactctcacattccacaccaaagacgatgcaccactctcagatgcagtgcgtgatgaaacaaaggccaggggtgctggaattttcaaggccatgagggctcgtttggcaaatcctgctcatgatatccctcaaccacttgctgatgcaatatattatataagcctagatcctgtggtgagttatngatctggnggcttggttgttaaatatttcttgtgcacaaagttcgtttatatgacaattttaaggtactatattatccggaaattgtgaatcgtataaaaattcgtnttgtggtgtccgtgcatgattganaatttancctantggaggaaaaaaaaana

SEQ ID NO: 10712 - DNA, 840 bp, Glycine max
  unsure (1)..(840): unsure at all n locations
cggctcgagctcgagccgattcggctcgagaatagtgttaatttgtctttctctatctctatcgactatgagtngttttgcttttgatgaggaaaactcctccaccgtggctccggcaacactctacaaagctctgacaaaagatgctgacactatcatcccaaagattattggggccatccaaactattgaaatcgttgaaggaaatggaggaccccgaaccggtcaagaagataccagctagtgaaggtgacccaaaccagtctcgtgctgcaaaaagtggatgcaattgacgaggctaacttggtatacgactacagcatagtgggaagggacggggttgcatgaaagtttggagaaggttacattccaaacaaaggtggttcctggcactgatggtaatggctctatcgccaaggccactctcacattccacaccaaagacgatgcaccactctcagatgcagtgcgtgatgaaacaaaggccaggggtgctggaattttcaaggccattgagggctacgttttggcaaatcctgctcaatgattatccttcaaaccacttgcatgcatgcaataataattatataagcttatgatctggttgttggagttaatttgtatcatgtggctttgtttggtttaattaatttcctttgtgagcaagtgtcggttttatttatgtaacatttttaaagtgttactattataattcggtgaatttggttgagtatacgtatgaaaatgtgcgtgtgttggtgttgacgtgtttggtcatttgtattctgcagtaaatatattactataatggagaggaatcttaattagaaatattgcatt

SEQ ID NO: 10713 - DNA, 353 bp, Glycine max
  unsure (1)..(353): unsure at all n locations
tatgagtaagaattgtaggttgtgtggctataaataccatccctccctatgccataaaccgcatcacaaactaattagagtgtgttatattattcatataccactctccttatcttgtagtattagttaatttgcattcttttgtttctctatcgatcatgggtgtttttgcttacgatgaagaaaactcctccaccgtggctccggttactctctacaaagctctgacgaaagatgccgacaccatcatcccaaagattattggtgccatccanagtattgacattgttgaaggaaatggaggacccggaaccgtcaagaagataaccgctaatgaaggtcaactcgtcctg

SEQ ID NO: 10714 - DNA, 829 bp, Glycine max
ggatgagaaaagtagaaggggagtgcgcgttagggctagaggttctggttctggactgttaacgttgtcttcttctcttctagaacttattatataatccatgttttggaaggaatctgtttgtttcatactcgtgtcgtgtttcctcgaaaatcacttgaacttgattcttcatctcttgcctcctaataaatcctctaacagctttgcttgatttcaaactccgacaaagaacaaccttgtcgacacagcaaagcaaagtaacatattaagagaagaagatgtgtttggtgtttgtgtgcggggaagatgagagggtggtgtcaaggcagccagcaccgggggcctgtccttactgcagagggatgatccaagctatggacgtagagagtcagtggaatttctgtttcctacctttgtattctaagaccaagcgcaggtattactgcaccatgtgcaccagaaaactcgtccttcagtaatactgcatgatgctgatgctcatcttactttttttcccgggttttatttactacttaatttccatgtatatgttttcgggatttgatgtactacttgtccatgtatatgtacggttttcataggatcattaggatcagcaccattaagatcaacttagaagtggatttttggttgtttacataaggtctagccttgtataccaaaaaggcaaaaacaaaatagtggaattcgtattacaatgttgaagaattcgtattatcattgtgtggataacatgctaaattagtcttcgacattgtattttgttggatattttagtaaatcttccttgagtcgttatatatac

SEQ ID NO: 10715 - DNA, 439 bp, Glycine max
atcggattagaggaagagagagagagaggatggagaaaacagaggaaaaggtggcggtgggcgtgccagtgcaattgtattacggtggagaaaatgaatatcaaaggggaatgatccctcctaacaccgtgtttggagatccaaagggcatccccatccagcagaccatttacagggacactcctgctcctttcaactgcccttactgcggtgacaccgctctcactaccgtcagtatgtggcgtcaagggattatgatctagtcatggcgtatttaaaagagattggatattggcttgatttggaatgaaaggaaaaatgtacccacaaatatccataggtaaaatctattaacaagggtctagtttatgcttgagttcaattccttcctatgaataaaaaaaagaagtaaggggactgttttgtatcacatattaat

SEQ ID NO: 10716 - DNA, 527 bp, Glycine max
gaaaaaaggatttagagagagagaatggagaaaaaggaggaaaaggtggtggtgggcgtgccagtgccagtgtattacggtggagaaaatgaataccaaaggggaatcatccctcctaacgccgtgtttggagatccaaagggcatccccatccagcaaaccatttacagggacactcctgctcctttcaactgcccttactgcgctcataccgctctcactaccgtcagatcaaagcccagtctggcagcatttgttggatgcttgatgccaatgatgcttggagtttgctttctttgcccttcaatggattgcctttggcataaatatcactactgtcctaaatgtcaagaaaaggttgctgattttgagaaatcagatccctgtgttgtgatggatccaccacactggactccagagagctttgcattgtctggataggatgataattctgttacttgccatttgttttgattttctatatggtaaaaattagttggcattgcttggacaaattactgtttttt

SEQ ID NO: 10717 - DNA, 532 bp, Glycine max
gattgaaattaacttgtgaaagaagatgggaagcgaagaagtgaagctgttgagcttttgggtgagtccatttggtaaaagggttgagtgggctttgaaactgaagggtgtagagtatgagtatattgaagaagatatcttcaacaagagcagtctccttctggagttgaacccggttcacaagaaggttccggttcttgttcatgcccagaaacccatcatagctgagtcattcatcatccttgaatacattgatgaaacatggaagcagtatccattgttacctcaccatccttatcaaagagcacttgctcgattttgggcaacctgtgttgaacaaaagcttgggaaggctggatgggtagcaatgtctaccagcggcgatcaacaagaagaggctatgaaagaagccaaagaaatgatggacaaaatagaagaagagattaaggcacacgaattttattggacgagaacattatttggtaccttgatattgcaattggatggattgcttactttgttccttttttgg

SEQ ID NO: 10718 - DNA, 487 bp, Glycine max
ggaggataatcaataaacttaaacttatgttatggcattctaactctgaacgatgaaatgaaatggagttccaagataagcgtttatctctgagatcgagcttgacgttcagcgagacgctgtgcgcagtgttcattccgttcataggaatagtcgaagctttggttttcacattcactagttgcttcgatttccaatctcccaggaataagaagaaacattcttctaccttcgacgacattctcaccctcgccgaggattctccatttagtattaatgaaatcgaggccttgcgtgagttgttcaagaagttgagtagttctatcattgatgatggcctcatccacaaggaagaactcacattggcactgttgaagaccaccaccggggagaatcttttccttgacagggtgtttgatgtctttgatgaaaaaagaaacggcgttatagaatttgaggagtttgtgcatgctctcagtatctttca

SEQ ID NO: 10719 - DNA, 699 bp, Glycine max
ggaaaagctaaaagttacgatgaaccatcaccgggtatcaagctgtcggatcctgattccttgatcacagtgcaggattatgacgatgagggttatgatgacagtgattacatggatactgatgaagacatatctttcagactaagagcttatgtgatgcagttggacgcagagacacttcagagacttgctactgtacgatcgaaggaggctatatcattgattgaaaagcaaactcaggccctgtttggaaggccagatattcgtgtctccgaggatggttcaattgaaacatccaatgatgaattgctttcactcactttctcgggcttgactatgctagttttggaggcacttgcttttggatcattcctatgggacaaagaaaattatgttgaatccaagtacccttttcttgatatagactagatgattgtacaccgagactatttccttttactgcacctttcagaatgtaaatgtaatgcatggaacttggtaacgtagtaatctgttaggcggcgttttagtcgtcgaagaattgcttgctatcctaatctggagtattttcaaactattatagaaccttagacaaatcatgtgcgtggaggtatataggaaaataaaaatgtacatatttagcatgttcataataatccatgcaagccttgactttgtaaatgatatagaatctgcacc

SEQ ID NO: 10720 - DNA, 733 bp, Glycine max
cggacgcgtgggcggacacatgggctcttatttccatcttagattccaatcctttctggcttcaaattctagggtatttaccctttgttggtccgcgaagtttcttgttccctcatcttcctctttcttcgattcacacacaatgggtctctgggattccttcctcaattggctccgcagcttgttttttaaacaggagatggaactttcacttgttggccttcagaatgctggcaagacttctcttgtcaatgcaattgctactgggggctacagtgaggacatgattccaactgttggtttcaacatgagaaaagtgactaagggaaatgtcacaataaagctttgggaccttgggggacagaggaggttccgatcaatgtgggagcgatactgtcggggtgtctctgctatcgtatatgttgtagatgccgctgatagagacagtgttccaatatctcgaaaggacttgagtcaattaaagacagagaggtctgctgctatatgatttcatgcaaggattctgttaacatagatgtagtcattgactggctaatcaaacactcaaaaactgcaaagtgatccttggtttggccagtatttcatttttagtcaaagatacaaggcgttgaggaaattccttcttggtagaagaatacattttcattaatttagttgtggttcaagtttgtttgtatagtaatcaaaccaggtcagatcactatattgcatg

SEQ ID NO: 10721 - DNA, 425 bp, Glycine max
gagagacatatatattatgtcgtattgccatcctagattccaatccttccttccttcacattctattctatttaccctttgttggtccgcgaagtttcttgtttcctccaacatataatacctcatctttctctttcaatttctctcttcgcttttttttgattcacacacaatgggtctctgggattccttcctcaattggctccgcagcttgttttttaaacaggagatggaactttcacttgttggccttcagaatgctggcaagacttctcttgtcaatgcaattgctactgggggctacagtgaggacatgattccaactgttggtttcaacatgagaaaagtgactaagggaaatgtcacaataaagctttgggaccttgcgggacagaggaggttccgatcaatgtgggagcgatact

SEQ ID NO: 10722 - DNA, 390 bp, Glycine max
gccacaacaaacagcaacagctacctcctccattcttcatttccattaccaaaaagaaaacaccaaactctctataaccataaccatgtcaatggcaacaacatcccctcacaccggcctcttccaaaaccgcaccaaaccttcttttcctttctcttcttcctccttcaagttcaaacccacatccatcaaatgcgccacccaactccacacccaagctccgcccctcacccactcccaagatcgcgtcttcaacttcgccgccggccccgccaccctcccggaaaacgtcctcctccgcgcccaatccgagctctacaactggcacggatctggcatgagcgttatggagatgagccaccgcagcaaagagcttctctccataatcca

SEQ ID NO: 10723 - DNA, 1080 bp, Glycine max
aaggaccttattgggaatgcacagggtttcacgcctgtgatgtttgattacaagatccatgatgaaaacaattcactctacaatacccctccttgttatgggatttacatgtgtgggttggtgtttgaggacttgttggagcaaggtgggttgggggaggttgagaggaagaatcagaagaaagctgagattctctacagtgcaattgatggcagcaaagggttctataaatgccctgttgagaagtctgtgagatctttgatgaatgtgcctttcactttggagaaatcagagctggagggtgagtttatcaaggaggctgctaaagagaagatggtgcagctcaagggacatagatcagtgggaggtatgagggcttctatttacaatgccatgcccttggctggggttgagaagttggtggctttcatgaaggattttcaggcaaggcatgcctaaaggagtaacctcaatctgaaacaaatacttgcattgcataaacctaatgcctaaaggattttatgctaataaagtgtttgtctggtattcagaaagggtcacaatctcttgtcagttttttgctttctttagttaggtatctttgctgtctctttttgtttactttcttgttccatgtttgatattcaaatttgggtcggcaggtagtgttttcattgcgctttacctttgtcgatcgcaagtgaagtagtttagttttgatttcttgatataccctctactattactactacaagtctataagtttgtatgaattgagtctcatgtgatattttactggatgtaacatgtagtatattctcaatctcaataaattgaatgaggatgaaacatattgagctgctgtggacctgatttaacactaccaaggttgagggaaggaaaagttattctatgtgtgtatgtatgtatctgtggtgttctttgggcattgaatttgatgttgcattgtaacaagatggttcatttgtttggtgactatgttatcaaaattacgcaatgtattgttgattgttcggttgaatcattgaatggattattttggttaaaaaaaaaaaaaaa

SEQ ID NO: 10724 - DNA, 514 bp, Glycine max
cagcaacagctacctcctccattcttcatttccattaccaaaaagaagacaccagactctctataaccataaccatgttaatggcaacaacatcccctcacaccggcctcttccaaaaccgtaccaaaccttcttttcctttcactttggagaaatcagagctggagggtgagtttatcaaggaggctgctaaggagaagatggtgcagctcaagggacataggtcagtgggaggtcatgagggcttctatttacaatgccatgcctttggctggggttgagaagttggtggctttcatgaaggattttcaggccaggcatgcttaagagcctaatggagtaacctcaatctgaatcaaatacttgcattgtataaacctattgctattgcatccaagttgggggcgtgttcgtctagtcacagtattaggcagagcagacactgcttaggtgcattagctttttatgttgaaagtatttgtctggtatgcagaaagggtcacaatctctttca

SEQ ID NO: 10725 - DNA, 606 bp, Glycine max
  unsure (1)..(606): unsure at all n locations
gtgagtttcaccagaatgcaagtttcaagaggccacaattaaccaagacagaaatgacaaaggcttgtaacatgactaaggatctaaagaggattcttagtgagaatttccatgatgatgatgaaggagcagagcctcagactgtattatataagaacctgtggcttgaggctgaagctgcactttgttccgtctattacaaggctcgctataatcaaataaagattgaaatggataaacattcttaccaggaaaaagtgatggagaagcaatctaaatctgaggtcattccgactttgagccagagtcagagttctgcaactaaagtgcattatccaaaccctgattcttctgcggaccttaaatttcctgtcttggatgttaccaatctagaggaactatctcgcttgaatatttccactgatatgaacaagtctaatgcaataacacctgaaggaagaggtggtcaaaacctggatagcttcatcgataattatcttgttccctgctcagtcaataagactgaaagaaatgatgagtcttctgttatgatggccagataccaagttctcaaagcccggattgatcagtcatncactgttacta

SEQ ID NO: 10726 - DNA, 786 bp, Glycine max
gggtcttgagcctaataatggattgacatgggagatgacaaaaagaaggggtgacaaagaagttcacatggtgacagaagagaaaccaggctggtgtagtgatccacatttgcctccttgtgctgcatttgtggaaattatggcacctgtcttttctcgtgaggcttggcgttgtgtgtggcacatgattcagaatgatctagtgcatggatggggattggactttgctctcagaagatgtgtagagccagcacatgaaaaaattggtgtaattgattcacaatggattgttcatcaagtaattccttctcttgggaaccagggagagtctgacaaaggaaaaatgccatgggattcggtccgagccagatgcaaaagtgaatgggcccagtttcaacttcgcgtaaccaatgctgacaagtcttatcttgaaggacttaaacgtaatgggaagggttgatgtgtggatccatcttcctattgtacatgttttatgtacactctcggtggtagaagtatttgttttgtattctttcctcccctcaggtgccatgcgtattttctgagccttatttttgaggaattaatctatagcgatgtaagtccatcacttttatgttattgaataactttctatcagccgttagattggaacttcttgtctcattgattgtacatataaaattttatttatattaatttaaaatcatgtcatccatgatatggattaagattgacgttgtatgttataaaatgtgaaaataaaaataaatcgaccattttttt

SEQ ID NO: 10727 - DNA, 270 bp, Glycine max
cggctcgagggcacctgtcttttctcgtgaagcttggcgttgtgtgtggcacatgattcagaatgatctagtgcatggatggggattggactttgctctcagaagatgtgtagagccagcacatgaaaaaattggtgtaattgattcacaatggattgttcatcaagtaattccttctcttgggaaccaggttagacctcactagcttacaatatagttagggccacttattttctttgatgatatcattttaaattgagtgtgttttta

SEQ ID NO: 10728 - DNA, 580 bp, Glycine max
gcctcctgatgagaatggggaccacaggcttttggagtcctgtcagcaagatgacattgccactgaaaatgaagaggccggggaaacctttgtttacgagaaaactgaattagactgttcccctgaatctctccaaagcaaatattcaactgaaggagaatgtggcagtttgataggctctcctgagaatctggtttgtgaggaggacttgtattgtgagtttccacccaaaggaaacatcgcgaagagtaagagtggtcaatcaagtaattccagtgctaaaaaggggtcccaaagaaccagaggcctgctccaacctgtgatccatgcaacagtggctgctgataaaaagggtattagcaatctgagccgcatagattcgagatcagagcggatagaagcctgccggtgaaagaagaatcactgtgatggagtgtagtttgattctgattgtgcattgtagttgtaagtttgtttcaaggacaagtttgtgaagtggttcagatttttatcattttcctcagtttgtttaacatgtctgatttctagaatgacactatgatgaacactactgaaataa

SEQ ID NO: 10729 - DNA, 515 bp, Glycine max
gaatcaattcagattcaacttaagggtgaagatttaaccaaacaatgggagaagtggagcttgattgctacacatcaaagcttgccttgtgccagggtagaatgggctttaaggataaaaggtgttgaatatgagtacttaaaagaagacttagcaaataagagttctttgcttcttcaatctaaccctgtccacaagaaagttccagtgctcctacataataacaagcctatagctgaatcacttgtcatcctggagtacatagatgagacatggaagaagaaccctttgctaccacttgatccatatgagagagcacaggctcgcttctgggctaggtttattgatgagaagtgtgtgttagctgtatggggagctaccgtggcgcaaggagaagagaaagagaaagctgtgggtgctgcactagagtctctggcacttcttgagaggaaattcaagggaagaagtattttggtggagagaagattggttatcttgatattgcagctggctgc

SEQ ID NO: 10730 - DNA, 1345 bp, Glycine max
gcttccggtttttctgagaactccttctcagtttcctgatagggtgaggcagctagaggagaagagtttcggaacttttgtcaacagcttccatgacttggaacctgcttatgctgagcaagtgaaaaacaagtgggggaagaaggcgtggattataggaccagtgtccctttgcaacagaactgcagaagataccaaaccgagagaaggggaagctacccactattgggatgaggaaaaatggcttgaattggttgaattctaagaaaccaaattcagttctttatgtcagctttggaagcctggctcggttaccctctgaacagttaaaggaaattgcttgtggtcttgaagcttctgaacaatcgttcatttgggtggtgaggaatatccataacaacccatcagaaaacaaagaaaatgggaacggaaactttcttccggaagggtttgagcagaggatgaaggaaaaggataaagggttggttcttagaggttgggctcctcagttgttgattttggagcatgttgcaatcaaagggtttatgacccattgtggatggaactccactttggaaagtgtgtgtgcgggagtgcctatgattacgtggcctctctcggccgagcaattttcgaacgagaagttgataactgatgttttgaagattggtgttcaagtgggaagcagagagtggttgtcgtggaattcagaatggaaagatttggtgggaagagagaaggtggaatccgcagtgaggaagttgatggtggagagtgaagaggcagaggaaatgacaacaagagtcaaagacattgcagagaaagctaaaagagccgtggaagaaggtggaacatcttacgctgatgctgaggcgttgattgaggagcttaaagctcgcagattggcaagacaagattagatttttacataatacaagaaagaattcagtttctaaagtacgcataacaacacaagaaaagaagcttgttactttcctgcaccacttgaaagttctaaattgcagtcagcaaccacaattttggtcgcaatattgttgttgcggaaccgtctaccgtaacagcccacaattgcaatgcgaatttcaatcccatgaaatactcaacgtagccgaaacagaatatcagtattgctctacacttctattccactcttttttttttgtttgtttgttaaaagacaagtttagatttcaatattctattatagcttctaagtgtcaatgataaaaaagggtgtgaccgtatgagatgttaggagatactaaatttaaatgaatcaaaaattatactatcttataaataaaagatacatcaatattaggat

SEQ ID NO: 10731 - DNA, 362 bp, Glycine max
gtgcttgaactgcaagtcctacaacacacgggaaacaagaggctgagcaagtggcaatggttatttataggaccacttttgctctcacttcattgctgtgtaggtgtagtggcaatccaagtgcatcctttattgaggaaaatgcatgtgggaattgtcattcaattgcaggcaggccgaaccacatccacgagaaaaacgggttatcacgttgatgtggtgtcgagggtagcgttgagtcagcaattgtcctgttggggatttcgtgctggggaaacccttttagtgttccagtgttcactcctgtaatgtttggttgggattaatgccaactttcaaattagctgttactttatatattt

SEQ ID NO: 10732 - DNA, 517 bp, Glycine max
ctctcaatgagatttggggttgaaaggcaaggcagaaatgagtcctctttcatgggaaaccaaacaaacttcattggtgggtttggacagtacccaattggggatattggaaggtttgatgcagagcaatttacaccaaggctttcaggtaatggtgtttccctcactcttggtcttgactcattaccaggaactcatcaaacatttctcccaaaccaaaacattcaacttggaagaagcttggacattggtgaaccaaatgagtttggtgccataagcacttcctctcctcactctacagctgcttatgagagtatcagcatgcaaaacccaaagaggtttgctgcacaattgttgccagactttgtgacctagataagacattgaaaggtgagcaatgtggtagcacactgctaccactcgctgtttccgagtccctcacaatttcttcttaggcccctgctattatgtcggggagtggcgaacaattgtagtgtaaagaaagaaggaattttac

SEQ ID NO: 10733 - DNA, 356 bp, Glycine max
cagtgataacccctttgggtctttcatggctctttcattctttgcttaattcctatggaggagtttcaaagatcaaggtcttatgcaaatgggcaaatgatgcagatagagagctactatggagctcctaggccttatgatcttcagtctcagaacttatagtgcttcttatgcacaaactcaaataggtcctcctagggacttgaagttgaagaaaggaaaaagcatttctgcagggtcttctttctccaagtcttggagctttgctgatcctgagcttcagaggaagaagagggttgctagctataaaatgtattctgtggaaagaaagatcaaagggtccttcaggaagagct

SEQ ID NO: 10734 - DNA, 529 bp, Glycine max
tggcagacacgaataacacacaaatcattaatcaaccaccaccttaacacaacaacacgatgatgtccatcttcagccacttcgagatcgcgcaggcccagaactggagcttttctttgctcccagtaaaaagcacgaattcgaagcccaacacagaagccacttcctcctccgctgagtccaaaaccgccagaaaagtttccaatctatcacaacccggtggatccaagcaaaacccgccccgtttgaggcccagatttgcgccggagttggacgggttacactgctttgaatccattgtaccctgctagatggatttcttcagtctccaatctcaattcagatggcataaaaatcatacgcgattcaattcaatttatttttactgaatagtttaattagtagttgagaaagctatgtactgtacgcgaaagatgaaatgaagaattacaaaaattgaaattacaatctcccagctgagaatagggtctttgaattacctcaatttggatttttatagattggtttt

SEQ ID NO: 10735 - DNA, 442 bp, Glycine max
ggtgcctcattattatattataacaacaactaaggtggctaggcctaggctctagctatattgtacttgtcaaatctagatacaaaggttgcatattcttgattgctagctcaagctccaattccaatatattgatcttatcccctaagaaatttagaatgagacagagaatggacaggcttgtcattcttcctttctctgctggttgcatctctgaggccagtgttgctgttggtgttccacatccacgaagatcaaaaccagacaccaatgcatcacctcctacaataaaacggtctacaagcgtcgaggattcagagattttgtctggtgaaagcatgaagaactcgttgaggctgctagacgttgttccaaagtctaacctatcctacggcttcaatagactggtcaagggtttcaagaattcttctcaattgtttgt

SEQ ID NO: 10736 - DNA, 900 bp, Glycine max
tgagagagaaaatagagatcaagcgcagacatgggaacttaacaaaggaagaaacgcgaattgatgatggaggtcaccaaagacgaagctgcaaccccaggagcaggaggtgctcaacctcgcaatccaaatccaaatccaaatccaactccaaatccaaaccctaaccctaaccctcctcacaccaccagaggatctaaaggaaaatcgtgtaagggatgcacctactactcatcgcttcataaagccaagtccaaaaaccccacatgcgttggtttctccagaacactccagcaagtacccccctttgttgtcggagaatctgagttggaagcttcacaaagagggccgcagccttgccaatttcaagtatgcatgtattggatactctgtctacttagacaacaaagattcttctgctggctctcaggataaaacagcaaaattgcccttttgcgttggtcttgaggtggtcttagaggagaaagcttcaaattcacatgctggccatgttcctgctactcataaaactgacgatgaacatgctgctcctcaacctcgaagatacatacctccaaatcatgcgacagagttcttgaataggtttcaaagaaatgcaggcctggtggcatctggtgttgccaaaaacttgaacagagtgggtaactatgtgaaagatctcctaaatgacattctaaactaatcctacaatacaccttgcatgtgtggtacatccatgctcccttaagttgattttacatttcaatcctcaccccccaatgtgcaaggtgcattatagaactactccgacattctatctaggagaacgaaggtgacatttgtaattcgtgtccgaaataaattcaattttacgccaaggccaaaaaaaaaaagaaagaa

SEQ ID NO: 10737 - DNA, 437 bp, Glycine max
tctatctaggagaccgaaggtgacatttgtaattcgtgtccgaaataaattcaattttacaccttggccattttcctttcgtttctgaacttcgttaaaatatttttttgtccaagttgagttaatgtgtatatatagttttggatttcttatggccgaagtatgattattttttttgttctgtaacatcttcgtgcgcttccaatgtggaccccaaaaatttatgtactggtttggcagtagcccgttgttttatttaatagattggtaaatggccaaaaggaccgataagttgtccactaaatcacccttatgctgcgtgtctttgctgtcatatagccatagcatgctgggctcgattttacttttatttttgagaatctaatatttaacctctaagtaggtgtttagatatcaatgaaactactttgtcatcc

SEQ ID NO: 10738 - DNA, 821 bp, Glycine max
ctgaaactaatcatcaacatgatccccatttgggtgttcacattaccatttggaatatgtgcttcccaaacctctactttctgcatcaagcaaggtgccatcatgaacagaaaaataggcaatggatttgtggttcccccagcttcaattttcactcttgcagccatagggatgatagtttcagtgatcatctatgacaagctccttgtgccagtgctaagaaaactaacaggaaatgacagaggaatcagcatcctccaaaggattggtattggaatggtcttctcagtcatcacaatgatagtggcagctttggtggaaaaaaagaggcttgaggcagttgaaatgaatggcccattaaagggttctttgtccatgagtgccctttggttggccccacaatttatgatcattggatttggtgatgggtttgctcttgtgggcttgcaagagtatttctatgaccaagtgcctgactcaatgagaagccttggaatagcactttaccttagtgtcattggggctgcaagttttcttagtagtttattaataacaattgtggatcatgtcactggtaagattgggaagagttggattggtaaggatttgaatagtagccgcttggacaaattttactggcttcttgcagccatcaccacattgaacttgttcatgtttgtgatctttgctcgcaagtataactacaagaatgtgcaaaaggtggcagcggctgagggctacgagggcaaaagtgaggatggtcggtcagagacttggggtttgagttggtggaattcagttctatgcagcttaattggcaa

SEQ ID NO: 10739 - DNA, 788 bp, Glycine max
ggaattccgtatctgtccggaggtaagcaagcggagatctgatggcgctagagtgggttgtgctagggtacgtcgcggccgcagaggccataatggttattctcctcaccatcccgggcctggaagctctccgaaagggtctgatcgcggtgacccggaaccttctgaagccgttcctctcggtggtgcctttctgcctgttccttttcatggacatatattggaagtacgaaaccaggcctagctgtgagggagattcctgcaccccttccgagcaccttcgccaccagaaatctatcatgaagagccaacgcaacgccctcctcatcgccgccgcactcctcttctactggctcctctactccgtcaccaacctcgtcgtcaggatcgaccacttgaaccagcgtctcgaacgcttgaagaatcgcgattgagatttcacccttgcagataagtcggttaatcaatccctcggatataaacttggtgttttctttcttgtgctaggaaggatctatttctatctcctttttttgtcttttcttttctttctttctaaatcgatgtttgagtgatgacgattattgagtctttttttagtattattactcttgctataactatgctacttgaatttccgccacctagggttccttttggggattttcttattgttgcgctcagggatccaattccgtgcacctcgtcgctcccttgtatcataggaaaacacgatttcgattattgttgagtgttatctgaaatgcctacttccttttcttttacgc

SEQ ID NO: 10740 - DNA, 703 bp, Glycine max
ggaaaaccatatggttaccataacatgatcttcagttggatagacactttaaatgaaaactatccaccccccttggatgctaatgtggttgcttgcgttatgacaatttggagtcaacttcaacctgatatgcagcaaatatgtggaatgaagccttgaacaaacgacttggaactaaaggacttgacctttcagaagttttagtagaagttgaaaagcgtggatcatcttttgatgaactactgacaattcccgaacaggatgattggatctacagtgatggaaagtcgacttcttgcattgcttttatacttgagatgtacaaggaggcagggctgtttgatccggttgctagttctgttcaagtgacagagtttacgataaaagatgcttacatcctaaatttttttgagaacaattccactcgcttgccaaaatggtgcaatgatggagacacggtgaagcttccttattgtcaaattaaaggcaagtatcgaatggatttacctggatacaacaccatgcaaccatatcctcatatgaatgaaagatgtccatctcttcctccaaagtactccagaccccagaattgctagcagtcttcaatttttttcctccaatcggagggctgattgcgcgtgaccagattttttggtcttctagatttggattgcttaggagattccaaatgaattattggttg

SEQ ID NO: 10741 - DNA, 420 bp, Glycine max
caaagatggacaaagcgtcactcctgggcgacgccatatcttacatcacggagctgaagtccaagcttcagaccctcgaatcagataaagatggaatgcagaagcagctggaaggtgtgaagaaggagctcgagaaaacaaccgagaacgtttcttctaatcacgcgggtaatagtagtagttgtaacaacaacaacaagttgtcgaatcagaagttaattgacgtgttggagatggacgtgaagatacttgggtgggacgcgatgataaggatccattgcagcaagaagaaccaccccggggcgaggttgttgacggcattgatggagttggacttggacgtgcaccacgccaacgtaaatttggtcaacgatatgaccatgctacaagcaacggtgaagatgggaagtaggttttaca

SEQ ID NO: 10742 - DNA, 619 bp, Glycine max
ctgctcagtacaatccccgtcctaatagcagctcttctcatattagtcctgggaagtcttgtggatttgggatccactgcaaatgcatcaatctcaaccattagtgttattgtctatttctgtttctttgtcatgggatttggaccaattcctaatatactttgtgcagagatcttccccactcgagttcgtggtctctgcattgctatttgtgcccttaccttttggatctgtgatatcattgtcacctacacactcccagttatgctcaattctgtaggcctcgctggtgtttttggtatttatgctgtcgcgtgcttcatagcatgggtgtttgtctttttgaaagttccagaaaccaagggcatgccactggaagtgatcattgagttcttctctgtcggagcaaaacaggttgacgatgccaagcacaactgacccaaggacatgataaattcaaaagttttgacggtaccttctaattgttttctatctacggctgtttgaaattttcccctcttttaaaattttcttttctatttattctctcttttccgtgggttgagattcagaaacaagaaactttgtttctataaagaaaaactttcattttctggtt

SEQ ID NO: 10743 - DNA, 719 bp, Glycine max
ttaaggttaggcaaggaaaaaggaagaggaagatgcagcaattaaacagttgagaaagaacctggtcgttaaggcaaaaccagtaccaagcttctattatgaggggccaccccccaagactgaactcaagaagctgccactgactcgccccaagtcaccaaaactgtcccggagaaggagctgtggtgatgctgccggcatatccccagaaatttctactcgaggacgtcacagtgttggcaataacccaaaacatggtagccttgtccctcccaaaaacaaggacctggtcactggacgtaacagcaatggctctagcaaaaccaaagaacgaccaaaactggataaggaaacaaaaacagctcctcctaaaatcactgagcagacaaatgcggacatatcggtccaatcatgagcttcccaggattttactgacctccagctgagaggaaaatagccttcattgtcttaacagatggatactttgcagaaaaaatggcctaattttcttttcatccggactgacatttttatgtgatttgcttgttttttttttttttttaaacttggaagtgtatatgttttgtaagttatatcggcagcattgttttatatataaaaaatagttaatgtaagatgtatgtaccgatgtacgaaatttgatatcctcagattgctccagacatggttagggaaatttatatgaaatatattccttt

SEQ ID NO: 10744 - DNA, 388 bp, Glycine max
gtacaacttcaacttctgaaatgtaccccacttgagggcctcgatccgaaacatttctactccaaattgcttagtttccaaatggcagaaatccgagcacaaggatgaaactcgcaacagttacttgaccaagagaggaattgggcttgtcgctgtgtcaccctctgcgcgtgtcgtcgtcggcgcccgcgccgatgccttacccaaacgacaagatctactgattcacggcctctgtggccagatctgtggtcttcacggccagatctgcgacccttagatatcagatctgcgacccaacaaccttcgcattctcgcttcactcacctcatgtggtgaaggtggattcgtgaatttgaggtaacggattgtcggttgtcaaagtagc

SEQ ID NO: 10745 - DNA, 482 bp, Glycine max
gagagaatcgctaccatcatcaccacgagagccaactccatttgacagtgattcttcaagtcgatcctcaccatatgaagattttcatgaatagaaatgttgtcatctaaaggatttcttacttttccgctgagcatgacgcaggttacatctagttcttaaatactctgaaggtagggcctcggttgacagctatagacatcttgaacagaggggcgcttggaatggaaagagaacttggggctatgcatgcatggttgatgttgattgctattcattgtgtattttctgtcgcaacccaagtcatgagtgaaaaagagccttgcttgctttcatctcacacctaacatctatgcaacatcgctcgcacatctaacatttctattccttgacaacttcagtcaccggtgaagagccatgcgttcatctcttaacgtgttttcgggttgtatattcctgtagcttctggtcaatgttcaatt

SEQ ID NO: 10746 - DNA, 1127 bp, Glycine max
gaaccaaaacacgttgtttcaattattctattcgcacactccctgaggagtgaagagaatctctctcctttttataaacccataaatttagggcgcgctttttcccggcctcccctcgccaccgcatctccatccatctccgccacgtcgcctcctctctctctcgcttttcgtagttatacttcttctctcgttcctagaaatgagcttctcaacatgcgcagagctgtcgcgttgtttcgccgcagcatcggcgaaacctaattccggtcagtcaaacggcacttccacaacaagcctcagttttctcactccaatcggtcggtacggcgccggttcatcagtatcgaggtcgaataagaccaacagaatagtcgcggaagctactcaaggtcttacttacagggacgccggcgtggacatcgacgccggctccgaactcgtgcgcaggatagcgaagatggcgccagggattggaggcttcggtggtttattccctctcggtgactcgtacctcgttgctggtaccgatggcgtgggaacgaaggtgatgcttgccttcgaaactggaatccacgatactattgggattgacctggttgcgatgagtgtgaatgacattgttacttcgggggcgaagcctttgtttttccttgattactttgccactggccaccttgacgtggacgttgctgaaaaggttataaaaggcattgttgatggttgcaagcaatctgattgtgttctgttaggaggagagactgcagagatgcctggtctctataaagaaggtgagtacgatcttagtggctgtgcagttggcattgtgaagaaagattctgtaatcaatgggtcagacattgttgctggtgatattattattggtcttccatctagtggagttcactctaatggtttctcacttgtaagaagagtgcttgctcaaagtggtctttcactgaaagatcaacttcctggtagtgatgttacaattgcagaggctttgatggccccaactgttatctatgttcaacaggtgcttgacttaattagcaaggggcgcgtgaaaggaattgcccacatcacccggtggtggtttcacagataacataccccgagttttttcc

SEQ ID NO: 10747 - DNA, 353 bp, Glycine max
cccacgcgtccggagaatctctcctttctataaacccataattgagggcgcgctttttcccggcctcccttcgccaccgtatctccatccatctccgccaccgtcgccacctctctctctctctcacagttcgtatttatacatcttctctggtcttagcaatgagcttctcaacatgcgccgagatatcgcgttgtttcgccgcagcaacggcagcagcttcagcgaaacctaattccgggaagtcaaacggcaccgccacaacaagcctcagttttctcactccaatcggtcgttacggcgccgtttcatcagtgtcgaggtcgaataagaccaacagaatagtcgtggaa

SEQ ID NO: 10748 - DNA, 1511 bp, Glycine max
ggtgaaatgaaatgtcaaagtggaggcgccacacggacacggttgtcctcctgatagttatattaataagttgagcgtcttcggagactgacttaattcaaaaatccaaacaacaatggacctccgtgaatcgataagcaaccaaaccgacgtggccctgagcatctcaaagctcctgttgtcgaaagaagctcgggacaagaacctcgtgtattcgccgctgtcgttgcacgttgttctgagcatcatcgccgctggctccaagggccccacactcgatcagcttctctccttcctccgatccaaatccaccgatcatctcaactccttcgcctctcagctcttcgccgtcgtgctctccgacgcctctcccgccggcgggcctcgcctctccttcgccgacggcgtgtgggttgagcaatccctctcgcttctcccttccttcaaacaacttgtcagtgctgattacaaggccactttggcttcagttgatttccagaccaaggctgttgaagtggccaatgaagttaattcatgggctgaaaaggagacaaatggacttgttaaagaccttcttcctcctggatcagttgacagttcaaccagactcatctttgcaaatgcactgtacttcaaaggagcatggaatgaaaagtttgattcttcgataacaaaagactatgattttcaccttcttgatggccgttcaatcagggttcccttcatgacgagcaggaagaatcagtttattagggcttttgatggtttcaaagtccttggtcttccctacaagcaaggtgaagataagcgccaattcaccatgtactttttccttccagaaacaaaagatgggctgttagctttggctgagaagttggcttctgaatctgggttcttggaacgcaagcttcctaataacaaattggaagtaggagacttcaggatcccaagattcaaaatttcttttgggtttgaagcctctaatgtgctgaaggagctgggagtggttttgcctttctccgttggaggtttgacagaaatggtggactctgctgtgggtcaaaacttgtttgtttccgatatatttcataagtcttttatagaagtaaatgaagaaggcactgaagctgcagcggccaccgctgcaactatacgattgaggagtgcgatgcttccaactaaaatagacttcgtagctgaccatcctttcttgttcctgatcagagaagatttaactggaacagtactctttattgggcaggtgctcgatcctcgtgcgggatgattttagtggccatacactggacaacattggtagcaaaacttatgcccttattctgttatcttgatttacttatggtgggatgatccaaaattcgttaatgtttgacggttgacttgggaaaaaaaagaagttcatatggatccccttttatatttgttgttaccagcaattattagttattacctacgagtgttacatgagggcatatgtaattacgtgattagac

SEQ ID NO: 10749 - DNA, 444 bp, Glycine max
cttttatagaagtaaatgaagaaggcactgaagctgcagcggccaccgctgcaactatacaatttgggtgtgcgatgtttccaactgaaatagactttgtagctgaccaccctttcttgttcctgatcagagaagatttaactggaacagtactctttatcggacaggtgttgaatcctcaggctgaataatattaacattggtagcaaaacttatgctcctattctgttgtcttgatttacctatggttggatgatccaaaatttctggcagtttcacatgtggcttaagaaggtaaaaaggtacatatggatcaccgttttaagttttgaacacttacgagtatggcgttgtctaactaatttcgtcttccaagggtgatatgcgaatagccaaatatcatagtgcgatgctggtactaaaaataatgtgtgatttgtaatc

SEQ ID NO: 10750 - DNA, 708 bp, Glycine max
catagatgtggcttgccccagagatgataagaagaggattagcgcagagcagcactgcgtggcacgagacatggtcaacatgatagcttgtgagggggttgagagggtggagaggcatgaactttttggaaagtggaggtcaagactttccatggctggatttaaacagtgtcaattgagttcttcagtgatggttgctacccaaaatctcctaaaggagttcagtcaaaattataggcttgaacatagagatggtgctctttatcttggctggatgaacagacatatggccacctcttctgcttggagatgaaactgactggttcgagcgtttgcctcctttttgacttttaattgagcaagtagtctctccataggacttgagatttacctctgttctataatgcattttgtagaatctcaaagctcgttgtaaatgctaatacataaatgaaagaaaaagaaacgtctggtatgacttcagcgttattttcctgccctcttccacgggctttagttttatttaactcgtgatatgagtaggatactcagcttgtttcctcgtttagttccttgtagtgactgaaatgagaaaccttacaccacactacagatgtacattacgctcaaggttttggtctactactctactatatattaccctgtagttgtttcctgagtcataatagatacataattctacgcaaa

SEQ ID NO: 10751 - DNA, 385 bp, Glycine max
gagggtggagaggcatgaacttttgggaaagtggaggtcaagactttccatggctggatttaaacagtgtcaattgagttcttcagtgatggttgctatacaaaatctcctaaaggagttcagtcaaaattataggcttgaacatagagatggtgctctttatcttggttggatgagcagacatatggccacctcttctgcttggaggtgaaactcactgattcgagagtttgcctcctttttgacctttaattgagcataattcaccatatatccgtagtagtctctccataggacttgagatttacctctgttctaaaatgctttctgtagaatctcaaagctcgttgtaaatgctaatactgaaacgaaagataagaaacgt

SEQ ID NO: 10752 - DNA, 401 bp, Glycine max
tgggaggttctcgtgaaaacttcttctttgctggaataggcaaagtgcggtttcgtaagcctgtgatagctggggacaccttagttatgagaatgacacttactaagccgcataagcgatttggaatagcaaagatggaagggaaggcatatgttggaggtgaagttgtgtgtgagggtgaatttttgatggcaatggggagtgaataagtagacacattccttccaactggaatagagttgattttctagcatcttttaatttaatgcttctgccttttaatgcagaacatcgtgaacatttaatttaatgtatgcattttcaatgaaatttatctaagcattctgtgctatttctatatggcttcgctttggctattcagtgccaaaattatctttgat

SEQ ID NO: 10753 - DNA, 976 bp, Glycine max
gaagacgacagaaggggagacatatctctaattaacactaataacagcaaactaaaggtgaagtttgccagaaacaagatgggaaggaaccattttcagcagcaacactgtgctgatgggagcatgtggatggagagtcagggtcagcaacagagctatgccttccaagaagagtcttggagccctgataacaactatggccacaaccacaagcaattcccaggcatgcacatgaacatgaacaacaacaacaacaacaaaaggcttggtgcttttgctgctgtggactctgacttctcaatgcaaaaacatcatcatgggcatggcaacggcgtaggagccatgcacatgaacatgaacaggcatggtggcaagttaggaggcatgtttcaagaaggcatgcacagtgaccaccatggtggcagaaagttcccttttggtggtcatcatcatggtaataataacgcctctcaacatcattttccaaaccatggtgggcaccatgagtatttttcggaggaatccgaggagtacgaggagtcttatgcagaggagcatgttggtggagtcacggctaaggtggatgaaatgagatatgagcgtcataactggggtggtggggatactcgctatgccaatccctatggcatgaacatgaatcacaaaccccacaaatttcagtggacagcaaagggggtctaaatctataatgaacccacctacacctattaatttcctctgcacttgcttcttcctatcaaatatctatcaataaaccagtaataaaattatgtgtgctttgttgttttgttttcttcttggaataattaagaccactccaattgtatttggacctttctgatggtgcttgatgctactacttgtaatatcttctttaacttatttaagttataatataaagttgtctttgattatgatgaataaagaattgaagatattaattaagcgtttgctt

SEQ ID NO: 10754 - DNA, 722 bp, Glycine max
caacactaataacaaaaaatatcttgaagtttcgaagaaacaagatggggaggaaccattttcagcagcagcaacactgtgctgatgagagcatgtggatggagagtcagggtcagcagcagagctatgccctccacgaagattcttggagctctgataacaactatggccacaaccacaagcaattcccaggcatgcacatgaacatgaacaaccacaacaacaggcttggtgcttttgctgctgtggactctgacctctccatgcaaaaacatcatcatggcaacgtaggaggagccatgcacatgaacaacaggcatggtggcaagttaggaggaggcatgtttcaagaccatggctttggacatggttgttatgcacagggtggcagaaagttcccttttggtggtcatcatcatggtaataataacgcctctcatcatgagtatttttcggaggaatccaagaagtacgaggagtcttatgcagaggagcatgttggcagagtcacggctaacgtggatgaaatgagatatgagcgtcataactggggtggtggggatactcgctatgccaatccctatggaaggaacaacatgaatcataaaccccacaaatttcagtggacagcatagggggtctaattaactctaataaacccaccacctacaccctattaattacttctgcatgcacttgcttcttcctatcaaatagtatca

SEQ ID NO: 10755 - DNA, 518 bp, Glycine max
gacaaagcgattactctatttcccctgggaggcaagctgagcaccccagatcaccaagaggtcctcccggggagaaggatggtgatcaaaagcgtaggtcttattctcctgcttatggcaatggtatcgaacagaatcaaagcaatggatatgctgagaaatctatgtacaagtctgaggctgatcgtggccagtggaagtcgtcgagatcaccccctggatctagatcaagatctgctgaattgtcaccaaggcgtggaagatgaggttgcaggtcgctggcaatgtgctgttaggcttctgtacatttcctgtaacttatcgtgacatttgcaaaatcctgtattttgcttgaagtttgcgaatatgatggatgaatgtataataattgatttgatgtgcgggttttatatttggatattttgaacttctagaacttaccgtgaatgatgaattgttgagtttgttttatgacaatatgttttcaatttgaaaaaaaaaaaaaaagggcggccgaa

SEQ ID NO: 10756 - DNA, 403 bp, Glycine max
gttcaatttattttgtcctaattaatctactcctctcttggaagagtttttcccctcaaaaggttaaagccttttcatggagattgatgatcgacaaattgccctctaaactgtggtctctcaaaagacaagttttttccgacctcggggatacactttgctccttttgtcacaatcaacaagaatatgccaatcatttgttctttaaatgtttagtaacttctcaggcacggtatctgatatatgttgggcctggattccatagggttatttctttttctagagaggctcactttcatcaacagtattatgctcttcttataaaaggaagaaatacaaagaatgcttggtatattgtgtgacatagtgacaataagagttttgtacctcaaaaagcctttat

SEQ ID NO: 10757 - DNA, 1276 bp, Glycine max
cgaagttgagagtcatgcaaatggcaaagtgactggttctcaaggggctagttcccgctgttctgaagagaggagggaaggagtgaagaggagttctaatggagacgttgcacctggttcccgacaccggagaagtttctcattggacagctccataggaaatttccatattggagatgaatcgcctaagcttcctccttcgcagaaccgatttggtcaacactcgcctagcagttcaatagatggtaagacatctgaaacaagcatggagtttggaaatggtgaattcagctcagaggagctaaagaaaataaaggagaacgataaacttgctgaaattgccatggctgatcctaagcgtgcaaaaggattttggctaatcgtctatcagctgctcgctcaaaagagaggaagatgcggtacatttctgaattagagctcaaagttcaaacacttcagactgagacaaccacattgtctactcagtttaccaaattacagatgaataattcagagcttaaaagtgagaataatgagtacaaattaaggattcaagccttggaacagcagtcccaactgaaagatgctctgaatgagaccttggatgctgaagtgcggcgtttaagatgcacggtcgcagaacttggtggagagtctcttctctcaagtcgcatggctcaacagcttgctattagccaacaagtgtttcagttaaaggaacagcagcaccctaaccagcttagacatgttcaagtgcacaatacccattcccaggagcagacacagactcagtctcagcgccacaatggcaaagctactgcttactgattacattgattgtacataagtattctactaccatgtatactcaatgtttgtgatatgaatcagaataggatattgcatggccaagctcaaggaaaaaaaagactcgattccaagtgatgacctgttaacaaaagaaaagttcaaaagatacaagaggcaaaaggagttcatgtgaaggcaattcttatctaataaggttgtagttcgacttgtgcaagcccaaggatatgattatatgaagactcaaaataaagtgtagaattgttgattttattgcctaagttttttagttattatttgtaaatctaatggtgatttgagatagatttcattaggatttatgattgattttattaagatttgtttaattgtttttaaattttgtttcttctattaaaatgaggattctatcaaaaaaaaaaacggggcgtggttgtcctgatcatac

SEQ ID NO: 10758 - DNA, 282 bp, Glycine max
ccgtctttatgtccctttatttttttgagggttaaaaactgctgtgaaatatttttctaggattttggctaatcgtctatcagctgctcgctcaaaagagaggaagatgcggtacatttctgaattagagctcaaagtacaaacacttcagacagagacaaccacattgtctactcagtttaccaaattacaggtgtgtacggtctgagttgagccaatattcccttttcttcagttttccaatgatattttatggtgtcgaataatgtttgctcctagcat

SEQ ID NO: 10759 - DNA, 407 bp, Glycine max
  unsure (1)..(407): unsure at all n locations
cttcactcttcagttaccttcgaaaaggcatgggtccaaaaccagggtcagacatgaagatgaacgcgattaggtcagggatagtggtgctgggagcgcttgcattcgggtacttgagcatacaaatcggcttcaagccttatctcgagaaagctcagaaccagaacgcgctctacgaatctgacccttcttctcaggaagaatcatcttcagctttcccagaacgcacttcgtgaccacacacactctgttcggcttaggagaaatggaaggattttttgttgccccagttgtgtgttggtaattaactagttntgtattgttcaactntatttatctatttgtatttgctcacataataatatcatgcatctaccttgaagcctggnttgttggtgatgatatca

SEQ ID NO: 10760 - DNA, 810 bp, Glycine max
gcgggcattagtagctgcgccgaacgctcaaaatgtcactttcccatatcattcacaagccatcttacttgacttgtctctgtctgtccatatataacattctattcgtacttcattttcattctcactccctcaaacagtcaaactttcatctttctcattcacttaacccaagtgtaaaaatggcagcattgaatatgtccactgtgagacttccaagagcttccttgtctggaacgacaccagctaggagatcttgtgctctcatcaagaatccatcatctttgaggtctgtgaagaacgtgtctaaagtatttggattgaaatcatcttcctttagagtgtcagcaatggcggtatataaagtgaagctgattggaccggacggtgaagagaatgaatttgaagcccctgatgacacttacattctggattcggctgaaaatgctggagtggagctaccttactcatgcagagctggtgcctgctctacttgtgctggccaagttgtttcaggctctgtggatcaggcagatcaatcctttcttgatgaccatcaaattgaaaagggttaccttctgacatgtgtctcatacccgaaatcagattgtgtgattcacacccacaaggaggaagatctcgtctaggtggggttgtgtgtcttttgttagtttctctaagcttgaatattgtcacggtagctagacatattgtgaaactttgttggtgttggttcaacttttttgaaccgttctaaataagagaaatggaaggaaattatgatgccccaattgtgtgatggtaattaac

SEQ ID NO: 10761 - DNA, 542 bp, Glycine max
caaggatcacgtgctatatgcattctctcagcaactgggacaatttcaaatgttactcttcgtcaaccgtcttcttgtgggggtactttaacgtatgagggactgtttgagattctttccttgtctggttcctttatgccaactgagaatggagttacaagaagtagatctggtgggatgagtgtctctttggctggtccagatggtcgagtaatggggggcggacttgctggtttgttggtagctgctggtccagtgcaggttgtggtggccagttttcttcctggtcaccagttggagcataaaaccaaaaagcaaagggtggagcatgtatcaactattagcccttcacctgttaatcttatcactagtgaggaaataaaagtaagttttggtggagtaaagcctattatgacccctgctgcttttcaagaagagaatattgcttcttttaacaatgttcaagactctaggaactcatctgctgatgacaaagatcctttgcactgaaaaggagtctaacctaaaccaatcaaaatctt

SEQ ID NO: 10762 - DNA, 512 bp, Glycine max
ccctcttgtccgcccctgtatatataaacactcttcctctcctccaaattaaaacacttatcatggatgttaagaaaggtgggtctgtagtacaagcacaagtgaagttgcagaagcataacgaaaaggagatgggcatgagaaaaggtccatgggcggttgaggaggacaccattctggtcaattacatcgccacacacggtgaaggccactggaattccgtggcacgatgtgcaggtctaaggaggagtgggaagagttgcagattaaggtggctaaactacttgcgcccagacgtgcggcgtggaaatatcacactccaagaacaaatattaattctcgaccttcactctcgctggggcaacaggtggtcaaagattgctcaacagctaccaggaagaacagacaacgaaataaagaactattggaggaccagagtgataaaacaagcgaagcagctaaagtgcgatgtgaatagcaaacagttcagagacacgttgcgttacgtttgg

SEQ ID NO: 10763 - DNA, 656 bp, Glycine max
gaagtgaaaccatcaatcccctgtatatataaccactcttcctctcctccaaattaaaacacttatcatggatgttaagaaaggtgggtctgtagtacaagcacaagtgaagttgcagaagcataacgaaaaggagatgggcatgagaaaaggtccatgggcggttgaggaggacaccattctggtcaattacatcgccacacacggtgaaggccactggaattccgtggcacgatgtgcaggcatgcatgcatcttaattataatttaatttctgcatgtgccaagtaataatggtatatattccggttaattatgagatttatcaattacaggtctaaggaggagtgggaagagttgcagattaaggtggctaaactacttgcgcccagacgtgcggcgtggaaatatcacactccaagaacaaatattaattctcgaccttcactctcgctggggcaacaggtatggtataaaaatattccactctctctctctctctatatatatatatattaatttgttctataagggtggatgtacacatatataacatagtatgaatgaatgaatgtttttcgataggtggccaaagattgctcaacagctaccaggaagaacagacaacgaaataaagaactattggaggaccagagt

SEQ ID NO: 10764 - DNA, 1900 bp, Glycine max
agaacctagacaactactaataaaaaaaagaaagcagaggaaaatcaacacggctacaaaaggagctgcaacgcctatcagttgaagattagaaatccatgctaaccccttcctttaaaatcttctaccctttatccattttctactaccccatctctctccctttcccatctacttctaaaccttcatcaaacataactctcttcctagagaaacataaatatttttatagcataggacttatttgattcttgttaattcacaccacaaggataattgacatgggatcaagcttctctagttgttatgagggtgaatctgtgtctccttctccaaagccaaccaaagtggtggctacgaagggtggttcttcttccaacagggtctctataacggacttgagttttcctggctcaacgctttcggaggatctctccgtttctctagtggggtctaacctgcatgtgttttcactcgctgagctcaagatcataacgcagggtttctcttcgagtaactttctcggagaaggaggtttcggacccgtgcataagggcttcattgatgacaagcttaggcctggtctcgaggctcaaccggttgccgtcaagcttttggacttggacggttctcagggccataaagagtggttgactgaagttgtgtttctgggtcaactaaggcatccacatctcgtgaagctgattggatattgctgtgaagaagaacacaggcttctggtatatgagtatttaccacgaggcagcttagagaatcaactatttagaagatatacggcatcgttaccatggtcaacaagaatgaaaattgcagctggagctgcaaagggtctagcctttctacatgaagcaaagaaaccagtcatctatagagattttaaagcttcaaacatcttgttagactcggattataatgcaaaactttccgattttggcttggccaaagatggtcctgaaggagatgacacacacgtttcaactagagtcatgggcacacaaggctatgcggccccagaatacatcatgacaggacacttgacagcaatgagtgatgtgtacagttttggagtcgtgctcttggagcttctaacaggacgaaggtcagtggacaaagggcgcccacaaagagaacagaacctcgtggaatgggccaggtctgctttgaatgattcccggaaacttagcagaataatggatccaaggcttgagggtcagtattctgaggttggggcaagaaaagcagctgcattggcttaccaatgccttagccacaggccaaggagtagacccttgatgagcactgtggttaatgttctcgagccacttcaggactttgatgatgttccaattggaccctttgtttacactgttccagctgaacaacaacaatacaatgaagtcgcaaaagagagtgaaacacctaaggagaggaagagggaaaatggtcatcatcataaccgacgtcatcatcatcatcgccacaatggtcataggcatcatccacttaaatctcctaagacaccaatgccatcagatcagtcacagaatgatgaacaccgaaatggtagaaaaagtgggtctaattcacctgatacattcaatgcatcagaagctcaacgaagcatgggttagtagacacatatagatcttactgtacataggtgaattattagagttacatagtgtgccacgtactagtactaagtgcaacgagccttcaaggcaataagaaacaggaaaaagatgaaaaggaaaaggaaaagaaaaagagagtgccatatgtaatggtccttgcatggaaaacatgattgagttctattttttttttctaatttgtttatttgttccagaggaagttaattattttgaattgtgtatac

SEQ ID NO: 10765 - DNA, 544 bp, Glycine max
agttgctggagatagtattggaaaatggccctgacacctttggtattcccatggaagtgaagaaagagctcttgctgaatttacacgaagcttctacagatccagctgaggcctgggaaggggtacagccggatcagcttttattgcagttggcatcagcctgggaaattgatctacaacagcatgacaaatagcttgtagagaacaaattatgctgctattgaatcttgaattggatggtattgagtgcaatttgaaatataatgctgttcatgtttttggcctccacacaacaactacattgccacaaatttatgctcctttttctcctgtatcttggtgaacttaggctaatcctataccggtcagagcaatgttcgaccgttgatatcattgtttttttttaccaaatgtctacagatattgtcattactaagaggtagtgtctggttgtcactaagtgcctgcttacagacaatgtgtaaattgagacgaatgaacaaatcttccatgtaattattaatgtatttgttcttgatatgtt

SEQ ID NO: 10766 - DNA, 635 bp, Glycine max
gaagtcacactcatagcaaattaatcaaacatggctagggttagtgctttgtttcactctttgctcttgatttcttcccttgtattggcttctcaaatccatgtttcctctgggaaactagtccctggactatcatggaattactatttgttgacatgtcccaagcttgagaggattataaggaagcatcttgaggatgtcttcgagaaggacagtggagtagctcctggcatacttcgactcttcttccatgactgctttcctaatggatgcgatgcgtctatattgttgaatggagacggtgacgagaagcaacaccgtgctaactttggtttaaggcaagaggccattgacgccattgaaaaccttcgggttctcatttacaagcagtgtctaccagttgtctcatgctcagacatccttgttatcgcagcacgtgaagctgttcgccaattaggaggccctgattttgacgtgccactgggaagaaaagacggtctaggaccaaacgccaccgcgccggacaacctaccggcaccattcttccgaaccgacgatcttctcagaggattcggaaatagaggtttcgatgccaccgatgtggtcgctctctccggcgcacacacctacggtcg

SEQ ID NO: 10767 - DNA, 2494 bp, Glycine max
gcaaacccactttgtgtgtccaaatggaatctcaggggtaactacaaacgagtcttgccaccttaatcacaggtcaatttgctgtccacactgctgcaactcttgcaaactcttttaggttaatcatttagtcactgtattgtgaggaagcttgtttgtcattgtttctaatttgaagtactgggtttgctacattaagtggggttttgagtggtgaatttgacattgaatgtctggtgaaacaggatccttttagcccgtaacagaacagtgaaagttgcagtttggatttgtactttcaactaataaatgtcgaggggatctgatggatcacaaaaaaagcgtttagttgctgcgatctgtgttgtggcaatttttcttggttttctgtatgtgtatggcggatccatctttggttctcagaatagtggttcatctgctcttgaatatggcagatcattgaaaagacttggctcgtcatatttgggtgcagaggatgacactgatggcaagcaagatgaatcttcatcaagtttcagacagggagatggggaggataatattgttcctaagagtttccctgtttgtgatgatcgtcattcagagttgattccctgcttagatagacaccttatctatcaaatgaggatgaagctggacctgtctgtgatggagcactatgaaagacattgtcctcctgcggaaaggcggtacaattgcttgattcctcctccatcaggatacaaggttcctattaagtggccacaaagcagagatgaggtgtggaaagcaaatatcccacatactcaccttgcacacgagaagtctgaccagaattggatgactgtaaaagctgaaaaaatagtgtttcctggaggcgggactcattttcattatggagctgacaagtacatagcatcaattgcaaatatgcttaacttttcaaacaataatctaaacaatgaaggaaggttgcggacagtgcttgatgttggttgtggtgttgcaagttttggagcatatcttctatcatctgatatcattgcaatgtccttggcaccaaatgatgtgcatcagaatcaaattcaatttgctctagaaagaggaattcccgcatatcttggtgtcctgggaactaagagactcccttacccaagcagatcttttgagctcgctcattgttctcgttgtcgaattgattggcttcaaagagatggaattctacttcttgaactagaccggttgctcaggccaggaggttattttgcatactcatctcctgaagcatatgctcaggatgaagaggatctaaggatatggaaagaaatgagtgaccttgtggggcgtatgtgttggaaagtagctgcaaagaggaaccaaactgttgtctggcaaaaacctccaacaaatgactgctatatggaaagagaacctggtactcgccctcctctttgccagtctgacgatgactcagatgcagtatggggagtaaatatgaaagcatgcataacaccttacagtgatcatgacaacagagccaagggtagtggattagctccatggcctgcaagattgactagtcctcctcctagattagctgactttggctattcaagtgacatgtttgaaaaggacatggaactatggcaaaggagagttgagaagtactgggatctcttgagttcaaaaatcacatcaaacacattgaggaatattatggatatgaaagcaaacatgggttcatttgcagctgctcttagagacaaggatgtttgggtgatgaatgttgtacctcaagatggaccaaacacacttaagctcatatatgacagaggcctcattggaactactcatgactggtgtgaagcattttcgacatacccccggacatacgatttacttcatgcatggactgtcctctctgacatagaacagaaaggttgcagtccagaggatctattaattgagatggatcgcatgcttcgacctactggtttcgtgatcatccgagataaacagccagtgattgattttataaagaagtacctaagtgctttgcactgggaagcaattgattccagttctgactctgtccaagatggtgacgaagttgtttttatcatccagaagaaaatgtggctgactagtgaaagctttagggacacagaataggataaccattgcattttcattttcttataaattattatctgctgcttcaagggatcgaagcacgtcctaaggtgtgaagcagtaaagtaaaacaacttcattttgtagcattacatgttttcttttcatctaatttccttcttttgattctcatttttgggatgatgattattcatgtgattaagacatacataggcatcacgcttttataggctattcaaaattttgcctgcatttggggatgatgtaagctaccaaataatcaagacatagaaatcacttatataagttatgtaatatatataaatgccttttctgctct

SEQ ID NO: 10768 - DNA, 475 bp, Glycine max
gcaactcttgcaaactcttttaggttggaacaccccaccaccaccttaaaacattaactcaccccttctttacgaggaacactgctgctccactgtcacaaacgcacgcacataacacaattcagacagtcaatgagatctcatcttctctgacttttcgtcttatttatttccatgtgtcttctatagtccttttttttagacaaatttgggattttgatttcattttcttgcacccaattggattttgatctgaacccagtaagctttttttgatgtcattctacttttactaagttcgtttggcttgtgtgtggtgtggcggttgtgatggatctgaacactgaagcgttttgcaacatgggtgtgtttgatgtggttgctgcccattgaatgcaacttagagtctattttttgattcgttgttgttaatgagtgctactcgttttaatgctaatgatgtttattttgcatt

SEQ ID NO: 10769 - DNA, 498 bp, Glycine max
gtcacaaacgcacgcacataacacaattcagacagtcaatgagatctcatcttctctgacttttcgtcttatttatttccatgtgtcttctatagtccttttttttagacaaatttgggattttgatttcattttcttgcacccaattggattttgatctgaacccagttaatcatttagtcactgtattgtgaggaagcttgtttgtcattgtttctaatttgaagtactgggtttgctacattaagtggggttttgagtggtgaatttgacgttgaatgtctggtgaaacaggatccttttagcccgtaacagaacagtgaaagttgcagtttggatttgtactttcaactaataaatgtcgaggggatctgatggatcacaaaaaaagcgtttagttgcttccatctgcgttgtggcaacttttcttggtttcctgtatgtgtatggcgggtctatctttggttctcaaaatagtggttcatctactcttgaata

SEQ ID NO: 10770 - DNA, 1465 bp, Glycine max
gttggccaaagaggtgaagactacgtggcgcctaagccccgtcggtgttttcagttgcaaagtagagaaaagaagacacagaaacaaaacaatggcgactctgaatctgttctctcagccatggcaacctacaatttcacctttttgttgttctaatactaacaacaacaacaacgttgtttatgcttatcataatcataataattctaaattacatttcttttccaattctcgtcaattctctgttctttctcaattgtccaccaactcctcaaaatcagttagtggaagttcagggctgcagaacagttcctttgtttctggcattgagtacaggaagcgtcctctatattctgtatttcccacaaagcctgctcaagtttcctctgtggaagacctctatgaatttatttgctcgggacctttacttgacaaaataggcatcacacaagagcaggtggccgagtccatcgataattggttgttatatggccggtacctatgcagactgtttcagcttaatgaattgttccttacagagcctcaaaaggctaggatttatcattactatgtacctgtcctcctctggtgtgaacagcagattgctgagcatcagtccaagttcaaagatggagaagatatacctcctttagtgattggttttagtgctcctcaaggttgtggaaagacaacccttgtctttgctcttgactatctttttgaagtgattggcaggaagtctgcaactgtatctatagatgatttctatttgacggctgaaggtcagaataaactaagagaagctaatccaggaaatgcccttcttgagttgcgtggaaatgcaggaagtcacgatcttgctttttctgttgaaactctaacagccttaaccaaattgacaagagaaggtatgaaattgaagttgccaagatatgataaatctgcattcaatgggagaggtgatcgtgccgatccttcaacatggtcagaagttgaagggcccctgacggttgtgttgtttgaaggttggatgcttggtttcaagccccttccagttgacgcagtaaaggttgttgatccccagctagaaactgtaaataaaaaccttgaagcttactatgatgcatgggacaaatacataaagtcttggatagtcatcaagattaaggacccaaactgtgtcttccaatggcgcttacaggctgagattgccatgagggaggcaggcaaccctggaatgacagatgatgaggtgagagattttgtttcacgctacctaccggcatactatgcataccttcctacactttactcggagggaccaaatggatcagatcctcaacatctcctaaccattgaaatagatgaagggagaaaccccatccttgctacctaggttaattgtatgatagagcactgctgttttttcagttctttgagataatttgaatggctattcagcatt

SEQ ID NO: 10771 - DNA, 335 bp, Glycine max
agacccgtgagtgttttcagttgcagagtacagagagagagacacataagtaagacaatggcgactctgaatctgttctctcaaccatggcaacctacaatttcaccttctttctgctgttctaatactaacaacaacaacaacgttgtctatgcctatcataatcataatagcaacttccgacaattctagattagcatttattttccaattctcgccaattctctgttctttctcagttgtccaccaactcctcaaagtcagggagtggaagttcatggctgcaaaacagttcctttgtgctggcattgagtacaggaagcgtcctctatatt

SEQ ID NO: 10772 - DNA, 612 bp, Glycine max
gagacacacacacattccacttagttaaacatggagaaatcaggctctaacagtcctaaatctgctttgaagtttgtgaagaccacatctcagtctgcagctcaatggagcagtactaattcaagaggaatgacaaaagatgtactcaaagacaagttctatgacaagactaaagcttcacgaaggtctccacccaaagaaagttacatggcttcaagaaggtctccacccaaagaaagtaacatggctccaccaaggtctccaccaaaagaaaatactaagccacaagaattcaaactccacacccaagaaagagctgtcaagcgtgcaatgttcaattatgctgtgacaacaaaattctatatcatggagctgcaaaagaaacaagaggagaagctgcaaaagttgattgaagaggaagaggttcgtttgctgaggaaggaaatggttccaagagctcaattgatgccttattttgataagccattcctcccacaaaggtcaagcacgggggttccaactgactaggatatatgtgtgtgtgtgtgtgtggctagaaattataaataaaatggaaagaatggatcaagaagaacttattagctatgtaga

SEQ ID NO: 10773 - DNA, 755 bp, Glycine max
  unsure (1)..(755): unsure at all n locations
tccaccctaagtaaagtaacatggcttcaccaaggtgtccacccagagaaaatactaagccacaagaatttaaactccacacccaagaaagagctctcaggcctgctatgtgtggaagtgagcttgaactagaaaaccttgtaattcaacccggggaagctctagttgtgaacttcccttttgttttgcaccacatgccagatgagagtgtgagcacagagaaccacagggacaggctattgagactggtcaaaagcttgtcacccaaggttgtgacccttgttgagcaagaatccaacaccaacacttctccctttttccaaaggtttgttgagaccttgagttactacactgctatgtttgagtccatagatgtggccctccccagagatgataagcaaaggatcaatgcagaacaacactgcgtggctcgcgacatcgtcaacatggtagcttgtgagggggatgagaggctggaaaggcatgaactcttagggaagtggaggtcaagattttcaatggctggttttgcaccatgccctttgagttcctcagtcacagctgcagttaggaatatgttgaatgaattcaatgaaaattataggcttcaacatagagatggcgctctttatctaggatggaagagtagagctatgtgtacctcttctgcttggagatgttactgactcattgtcattgtcattggtatatgtatttttttttatccacaaatattatntgttagtaatatatta

SEQ ID NO: 10774 - DNA, 848 bp, Glycine max
cacacacattccacttagttaaacatggagaaatcaggctctaacagtcctaaatctgctttgaagtttgtgaagaccacatctcagtctgcagctcaatggagcagtactaattcaagaggaatggcttcacgaaggtctccacccaaagaaagttacatggcttcaagaaggtctccacccaaagaaagtaacatggctccaccaaggtctccaccaaaagaaaatactaagccacaagaattcaaactccacacccaagaaagagctgtcaagcgtgcaatgttcaattatgctgtgacaacaaaattctatatcatggagctgcaaaagaaacaagaggagaagctgcaaaagttgattgaagaggaagaggttcgtttgctgaagaaggaaatggttccaagagctcaattgatgccttattttgataagccattcctcccacaaaggtcaagcaggggtgttccaagagaatcatgcctccacatgatgagcagcaagtgctggagctgcagcattgccaatgaaatgtacaacttgcaccactatggtcatcaagctctcaagcccattaagtagaaagctttgtgggaaggagcatgtaaaatgtacactatccatgtattcttttcatccttgtattccatgcatgttgtacactatctatagggaaacttagagttttgtaccataccatgcgactacctagctccttgattaggcggcgatcgaggagatgttttgatgatgttttctttgtcacaaaaataaagatcaaccatgtatttttggtgtgccttgtaccatttggaaaccaacagaatagaattatcactttgcatgtg

SEQ ID NO: 10775 - DNA, 458 bp, Glycine max
gaacaacacttcgtggctcgcgacattgttaacatggtagcttgtgagggggatgagagggtggaaaggcatgaactcttggggaagaggaggtcaagattttcaatggctggttgtgcaccatgcccttggagttccttagtcacggttgccggtcgacatatgttgaatgaattcaatgaaaattataggctcggatttagtgatcgcgctctctatctaggatggaagaatagagctatgtgtacctcttctgcttggagatgttactgactcattgtcatagcctcataggtatatgtatattttcctccttgttaatttcttccctttgttggacacttagtcattattcagtcgtatcttcagtttctcaatagaactagctagttagagacttagctttcttccaacgtgtatcctttaccttttgtgggttcagctgagtcttttaacat

SEQ ID NO: 10776 - DNA, 1945 bp, Glycine max
attttatatcctggtgataccacagaaggtggaaaacttctacggttgaagcagcagttctttctctgcagtgcatcactccaagacataatatcccgatttaaggagaggagacaagggccctggaactggtcagagtttccaacaaaggttgctgtacagttgaatgatacacacccaacacttgcaataccagagttgatgcgattactaatggatgatgaagggcttggatgggatgaagcatgggatgtgacatcaaagactattgcgtacactaatcatactgtcctccctgaagcactggagaaatggtctcaacctgtaatgtggaaactacttccacgccatatggaaatcatacaagaaatagacaagagattcactgcaatgataaatacaacccgattggaccttgagagtgagctttccgccatgcgcatcttggatgataatccccagaagccggtagttcggatggcaaatttgtgtgtggtttcttctcatgcggtgaatggtgttgctcagttacacagtgatatattaaagtcagaattatttgcaaattatgtttcaatatggccaacaaagttccaaaataaaaccaatgggataacacctcgaagatggctccaattttgcaaccctgagctaggcgggataatcaccaagtggttgaaaactgataagtgggtaaccaatcttgacttgttaacaggtctccgacagtttgctgacaatgaagatctgcaagcagaatggctgtctgcaaagatggctagtaagcagcgcttggcacggtatgttttgcaggtgacaggggagagcattgacccagatactctgtttgacattcaagtcaaacgtatccacgaatacaagaggcagctacttaacattcttggtgtgatttatagatacaagaagctaaaggagatgagccttgaagaacgtaaaaacactactccacgcacggtgatgattggaggaaaggcatttgcaacatacacaaatgctataaggatagtcaggttggtgaatgatgtcggtgctgttgtcaacagtgatcctgaggtcaacggctacttgaaggttgtgtttgtcccaaattacaatgtgtctgtggcagaggtgctgattccaggaagtgagctttctcagcatattagcactgcaggcatggaagcaagtggcacaagcaacatgaaatttgctttaaatgggtgccttataataggtaccttagatggagccaatgtggaaatcagggaggagattggtgaggataattttttcctttttggtgccacagcagaagatgtccctcgactgaggaaggaaagagagaatggactgttcaaacccgatcctcgatttgaagaggcaaagaagtttattaggagtggggtgtttggaagctatgactataatccattgcttgagtccttggaaggaaattctggttatggccgtggtgattactttctagttggtcatgactttccaagctacatggatactcaggcaaaagttgatgaagcataccgtgataggaaaagatggctaaaaatgtccatcctaagcactgcagggagtggaaaattcagcagtgaccggacaattgctcaatatgccaaggaaatttggaacatagaagagtgccgcgtgccataatttctgctggatgtgtgtctcttgcactcaagttactgtatatagcaccaacagaatgataagtaaaaagaagtgaataataaaaattaaaaataatttctgaaaagagaaagtgaaggagattttagctttctataatatttagcttgtcatataagatttcagctgtattcttatattaattgctttctcaaccatctgcttctgacagatagagctttctatatgcaaataaatctatagtttcatattctgttttttaattaatgat

SEQ ID NO: 10777 - DNA, 361 bp, Glycine max
gacgacagagagagaaaaatggaagaagacctggacggcgtcgctccgtgctcctccctcgccgtcgaggctatgattcgtgtcggagcggccggtgcaatctggggcttgtgtgctggtccttacgacgctcgtcaacagggtcttagaggctctgctaaagcttcttttgtggcaaagtcggttggcaggtttgggactcgatgcgggtttgtagctggcgttttcagtattacgcgatgcggggttcagaggtaccgagggcggaatgattgggtcaatggtttgattgggggtgctgtagcaggtgcagctgctgctgctgctgctgggacacgaagcttgtcacaggtgataggga

SEQ ID NO: 10778 - DNA, 721 bp, Glycine max
gacaccgacgaggtgaaccgggttcagcgcgacattaggttgggtcacgccaagaccgtggagaacacgctgagcatgttgaaggacgaagggtcccttcagggaattacggtttcgcgctgggtgcggtaccggctcgctctctattcctcttgccaaagagggcgctgttgtgttcgccagtgatatctccgccgctatggttgccgaggctgagaaacaggcaaaagaacagcttgcaaccagtgaagatggatctgtgcccgtgatgcctaagtttgtagtgaaggatttagagagcttggatggcaagtatgatacggtggtctgcctcgatgtcttgattcattacccacaacataaagccgatgggatgattgcacaccttgcatcattggccaacaaccgattgattctgagttttgccccaaagacgttttattatgatctgctaaagagggttggagagttgttccctggtccttcaaaggcaacaagagcatatcttcactctgaggcagatgtagagagagcattgcaaaaggttggctggaccataaggaagagaggcttaaccactacccaattttactttgctaggcttattgaggctgtccctatgtagtggggattgaaaggtgagtttcgcataattagaggaaattcttagtgtaaattgtaaggccttctattaaatgattttgtatgctataattctccc

SEQ ID NO: 10779 - DNA, 507 bp, Glycine max
ggaaaaacgaagcatctcatgtgtcaacaccaccatcctagttaacgcagcaacattattgctcaaacagcatacataaaaagcctatgcgcaaagtccaaacttgctcctaacatatacttgccggaattctatcatgaagtttctatttggaagagtgaagtcttcgttgtcataaagtgcaaccccatgtcctcattctacatattcgattatatttcctttcttccttgcctcgtttcattctttgcacaagggagaaaaggggtcaagaattttgtacaaaccttgggagttgtgagatcttatctgttatagatgatgtttttgtaccacgagaaggtttcagctgaaggagaaatatgatagtggaatatcacacggaaagaggaaaatccagaaatagtaggatagtacttcctatgcaataagtaaatggatggactacctggctctgtgggcaccagcgctagcttcagtctgagattgggtcagaccatgttctct

SEQ ID NO: 10780 - DNA, 1446 bp, Glycine max
gaataaagcagaaacagttgagcattttcatatgcaaaccacatcctcgttcattgtttaatgttagcacttccctgtcctcttgtgtttttatataatttgttgtagctcccttaaatgtaattggccaacactacataacagagcaaagaagaaaagcttccttcaatgtagttgtgattcttcaataccatatattctctctttctctttttctttcttgatttgtgttgtgaaacagttaaaagtggtcttgatgtctgaggcattggaagaggttgttccttcaatgaaaggagggtgtgaagaagaagggttgaacctgaaggctactgagctgaggcttgggttgccagggtgtgagtcaccagagagggagggtgtgtttaagagtgtggtggtgtctggggccaagaggggtttctctgatgccattgatggaaactggaatggtggaggatctgaaaaagatgccgctgccttgttttctccaacttcaaggggtgctgttagtgttagtgttagtgctgccaagtctctcactctcactgcaacagactgcaccaaccaaccaactgctttgggtgcttctgttctcaaggaaactgttccacactctccaaaaccattacatgagaataagccccagatttctgctccagctgcaaaggcgcaagttgtgggatggccaccaatccgttcattcaggaagaactcaatggcttctcagcctcagaagaatgatgctgctgctgatgcagaagccaagtctggatgcctttatgttaaagtcagcatggaaggcgccccatatttgaggaaagtggatctgaatagttttaccacttacaaggacctctctttggcacttgaaaagatgtttagttgttttacactcagtcaatgtggctcatatggggtttctagtcgggaaaatttaagtgaaagtagattgatggatctccttcatggttcagaatatgttcttacctatgaagacaaggatggagattggatgctagttggtgatgttccgtgggagatgttcactgagtcttgcaagaggctgaggataatgaagagttctgaagcaattgggctagcacctagagccatggaaaagtgcaaaagtcgctactagctagtgcaatgctgtatgcttttgtcttctaatcctgaaagatggaagaccacatttaagcatataatacctgagtatttcttacgtataattctatatacgagattggggtgtcctaaactttttagtgggcaatatatattgatgacagcatattaggtttgttgtagtagccgtctatatcattgatgtagatgtttaaggttttaggttgttctcccacacttcagttacagtcatcaaggcttaccgtagtatgtaaattttgcatttctgtgagcgagcattttgtttgtcatggcaag

SEQ ID NO: 10781 - DNA, 508 bp, Glycine max
gtggttttggtaaagagaagagccattagtttctatcttcctcttcttcatccagttgaaaagaatcaaagcagaatccatcggaagaactcaatggcttctcagcctctaaagaatgatactaatgcagaagccaagtctggatgcctttatgttaaagtcagcatggaaggcgccccatacttgaggaaagtggatctgaatagttttaccacttacaaggacctctctttggcacttgaaaagatgtttagttgttttacactcaaatatgttcttacctatgaagacaaggatggagattggatgctagttggtgatgttccgtgggagatgttcactgagtcttgcaagaggctgaggataatgaagagttctgaagcaattgggctagcacctagagccatggaaaagtgcaaaagtcgctactagctagtgcaatgctgtatgcttttgtcttctaatcctgaaagatggaagaccacatttaagcatataatacctgagt

SEQ ID NO: 10782 - DNA, 547 bp, Glycine max
  unsure (1)..(547): unsure at all n locations
caagcaaaattgtgtacaagtcatggaaaatggaggtaacttatgtgatgggaaagaagttgatcagttttatcaaccctctggtggtattgaggttgtcgttgctaatgaggatggtctttcgtgcggatcagatctgaaagagattgacaaagtaaaaattatacaagaaagtgatttgtttaggggggatgcttcagatggtgctctctgggatgtgttttcggagacaggatgtccctaagttgcaggaatatctgaagaagcacttcagagagtttaggcatgtccattgctgtcctttaaagcaggttattcaccccatccatgaccagaccttctatctgactatggagcataagaggaagcttaaggaggagtatggaattgagccctggacttttattcagaagttaggagatgctgtttttattccagttggttgtcctcaccaagtcagaaatctgaaggtatggttctgtcatactataatagtatctntccttagtaccttaatcaagcctagatactccattgcacttcttat

SEQ ID NO: 10783 - DNA, 423 bp, Glycine max
ctttaaagcaggttattcaccccatccatgaccagaccttctatctgactatggagcataagaagaagcttaaggaggagtatggaattgagccctggacttttgctcagaagttaggagatgctgttttcattccagctggttgtcctcaccaagtcagaaatctgaagtcatgtattaaggttgctttggattttgtctctcctgaaaatgttggggagtgctttcgtttgacggaggagtttcgcacacttccaataaaccacaggtctactgaggacaaattggagctgagtggtggaaattgtatggagggaaaacaccacacttgcaaaccattgccattaaagttttaagtttgacctgtagctcatcgggatttggagtacttttgagcatattcactcaaagaagagaagtaag

SEQ ID NO: 10784 - DNA, 369 bp, Glycine max
catctgtgcgcagagcaaaaccaaaaacatggcgtggcgctgcggatctctctctcggtcggtgctctcggccgcgagaaccattccaactcgttcctccatttctccactctcgccttcccttcgctctcatcttctccactctcgccgccccctcaatacactccctaggactgtgggaattctcgtgtgcacgcattcgctgatgcctctgcacagcgctgacgcctccgctcgtctcacttctcacatttccgtcgaatcgcgcgcttgctgcgaattgtctcagggtacttgaatagactttacaatcagcatcagttgtgattacgtttggcatgatgtgaaaatggtggctaatgctttgta

SEQ ID NO: 10785 - DNA, 1311 bp, Glycine max
gggagcaataaattttttcttcagggcaggttcagatttggaccagatgcaggatcattggccctgacaatttttcttattgctgctcctgttgcagttttctgtgtctatgttgccagaaaactaatagatgatttttctgatcacttggggataaccataatggccattgctgttatattcacaatttatgtgttagttcttctcttgttaacatctggccgagaccctggcataattccacgcaatgcacatcctccagaaccagaaggttttgaaggtagtctagatgttggggctggtcaaactcctcaattgcggttgcctcgaattaaggaagttgaggtcaatggaattactgttaaggtcaagtactgtgatacttgcatgctctacaggcctcctcgatgctcgcactgctcaatctgtaataactgtgtggaacggtttgaccaccactgtccctgggttgggcagtgcattgggctgcgtaattatcggttcttcttcatgtttgtcttctcaactacgctactatgtatatatgtttttgcattttgctgggtctatattgtaagaattatggcatcagaggagacaacaatttggaaggcaatgataaaaactccagcctccatagtgttgataatttacaccttcatatcaatgtggtttgtaggtggtctcactgccttccatttgtatttgataagtaccaatcagactacatatgaaaacttcagataccgatatgatcggcgagccaacccatataatgaaggagtgttgaataatttcaaagagatattctgcatcagcattcccctttcaaagaacaattttagggcaatggtgccaagagaaccagcattacctactcgatcagtgggtggaggctttatgaaccaaaatataggaaaagctggggaggacatagagatgggcaggaaaacagtgtgggacatgggtgctgggatggatgataccggagctccaataaacaatgaacgtgtgactataaaggatggtgaattgtctccagaaattaggacaacagtagatgactcggaccgtgctggaatgcatcctaggcgatctagctggggaagaaagagtggaagctgggaaatgtcccctgaagttctggctttggcagccagggtgggggaaccaaaccgtgtcggtggaggtggcagcagtagtagtttggcacacgagaaccgtcatgtatagccattatgcttcaaacagctgtgaccaaaggacttgaaatttgatttcacggttataatgaaaaaaatatattacact

SEQ ID NO: 10786 - DNA, 253 bp, Glycine max
ctcgagccgctcgagccgattcggctcgagccgtgtcggtggaggcagcagtagtttgaaccacgagagccgtcatgtgtaagccattatgcttcagcgtagtgtgaccaaaggacttgaaatttgatttcacggttataatgaaaaaaatatattacactgttcatgtggtgattctacagcaaaattatgtgcaatatggggttgtaggcatttgcaaggtgtttgcaagtgtttttttaggcattctgct

SEQ ID NO: 10787 - DNA, 874 bp, Glycine max
ccgactacctttgttcttcacctttctccctctctatatataccctcaaaacaaaccctccattatcaaatccccgatgttgttcttcaattctctccaacgttaacaaccttcattccatcctcgtatcggttattattaattttaattccacgtaatgggcaactacgtttcatgcaccttggcgcctcctttgatgaagaattccaaggccacgagggttatcatccccaccggtgaagtcaagcaattcaaagagatcgtgaaggctgcggaactcatgctcgaacaccccaactattttttggtcaattctcgttctttgcatataggaagaagattctctgctctcggtgctgatgaagagttggagttcggcaacgtgtatatcttcttcccgatgaggagagtgaactctcttgtcaccgcccctgacatggcagtactcttcttggccgccaactctgccgccaaaagattgtccggcagtaaggcgcgtgttctgccggacaactgtggcggcaaagcatggcaacaacgggaagaagaagaagagagttcaaaagatgaaagtttaagtgtgattccaaggttgagtttggaaggagtggagtcagggtttcagtataggttaaattattgtaggtcaaggaagcctgttttggagactataaatgaggaacctgttaggctaaggtgatcatgtaatgaaactcattcgtttatgcatcagattttattttatttttagcttcaagagagatttaattagttgaatcatccaccccttcaaaaaataaataagttgagagggtgtctcattagccccaaatttgtacaaatttcataaacaaacaagtttgtgtgtgttccc

SEQ ID NO: 10788 - DNA, 627 bp, Glycine max
gacccacaaaacaaaccatccatcatcaaatctcccattattcttcaaattctctccaacgttataaaccaccttcaatcaacgttatatatatatcggttattattaattttattttcacgtaatgggcaactacgtttcatgcactttggcgcctcctttgatgaagaactccaaggccacgagggtcatcattcccaccggtgaagtgaagcaattcagagagatcgtgaaggctgcggagctcatgctcgaacaccccagctatttcctcgttaattctcgttctttgcatataggaagaagattctctgctctcggtgctgatgaagagttggagtctggcaacgtgtatattttcttcccaatgaggagagtgaactccgttgtcacccccaccgacatggcggtactctttttggccgccaactccgccgccaagagattgtctggtggaaaggcacgtgttctcccggacaactgcgacggcggagcatggcaacatacagaagagagttcaaaacctggaagtttaagtgagattccaaggtcgagtctggaaggagtcgagtcagggtttcagtgtaggttaaattattgtaggtcaaggaagcctgtcttggagac

SEQ ID NO: 10789 - DNA, 678 bp, Glycine max
  unsure (1)..(678): unsure at all n locations
tgcacgcgtacgtaagctcgaattaatcatactttacattgtgcactctaattcccttgttttgtttacccacatttgtgagactatattatattggagcatatatcatgggtctgaagtttacacatggagtggtgatattaattgttataagtgcttcaatgttttcagtgagcatggccaacaaggattggtcctttggtttcaactacactgattggtggtctagatttgggaatcatcctcaaaacaaaacacagcaacaacccaggcaaattctcgtgggtggctcagagcattggcactacggtttcaactacaccgattgggccttcaagactgccccattttacctcaatgatactctagttttcaaatatgatgctccaaatgccaccagtttcccacacagtgtgtacatgttcaaaagttttgggagcttcttgaagtgtgacattaaaaaggctaagatgctagcaaatcccacacaaggttcgggagagggcttcaagtttgtgttgaagaagtggcagtcctcactactttgcctgtggtgagcgaaacggcttccattgcaacaacggcaccatgaagttcgctgtgatgccaatgcttcgtcncttctggcggtggccatgataaaaaaaatgcacaacgcaattagttattaggtttttt

SEQ ID NO: 10790 - DNA, 469 bp, Glycine max
ggaccgacacaacaacaaccaaatcatactttacatttgcgcatctcttatttaaccacacacctgtgagagtatataggaacatataccattactatggctctgaagttaggacatggcgtgatgatactagttattataagtgcttcaatgttttcagtgagcatggccaacaaggattggtcctttggtttcaactacactgattggtggtctagattcggaaatcatcctcagaacaaaacacagcaacaacccaagcaaattgtcgtgggtggttctgagcattggcactacggattcaactacaccgattgggcattcaagagtgccccattttacctcaatgatactctaggtgagttttccagtaaaacatgagtataataccttcaatatcaataatatatagttaattagtattgtaaaattaagttgggaagaatccattatatttacataaacactt

SEQ ID NO: 10791 - DNA, 377 bp, Glycine max
gcttatttcttactttacatttttcacattaggtggcttattttgtttagccacgcctctgagaccatgggtgcgaagtttggacatggagtgatgatactatttgttataagtgcttcaatgttttcgatgagcatggccaacaaggactggtcctttggtttcaactacactgattggtggtctagattcgggaatcatgctcagaacaaaacacaacaaccacccaggcagatacttgtgggtgggtctgagcattggcactacggtttcaactacaccgattgggccttcaagaatgcaccattttacctcaatgatactctaggtgagttttctagtaaaacatgagtatactaccttcaatatcaatacta

SEQ ID NO: 10792 - DNA, 1181 bp, Glycine max
gcctcgcgtccagtctctacaatcactccttcctctcatcctctataaagaaagtgcttaatttgtgttgttacttggttcagtttccatggattgggggcttgctatatcttctcatcctaaaccttattcagtcacaactggtggaaatctctggcggagtaaacacaccaccaagaatatttactttgcaagttcttggatatcaaaagcttcacgacacaaaagggaaactcaaatagaacataatgttttgaggttccaacaaccaagtttggatcatcattacaaatgcatcagaggagggtctacatatcaagaatgcaatagaaaatttgttgtgaaggcaatctctaaacaacctcttggttttgaagctcatgcttccaatcctaagaacattttggactctgtcaaaaatgtattgtctgctttctactggttttcctatccatacacaatgattggcataacattatgcgcattttcttcatctcttctcgcggtggaaaaattatcagatatatctttatcatttttaattggcgtgttacagggtgtgctgcctcaattgtttattgaaatttatctttgtggtgtgaatcaactgtatgaccttgaaatagacaagataaacaaaccacatcttccaatggcatctggacaattttcctttaaaaccggtgtcattatttctgcagcatttttagctctgagttttggatttacttggattaccggctcttggccattgatttgtaatcttgtagtaatcgcttcatcgtggacggcttattcaatcgatgtgcccctactgagatggaagagatacccatttgtcgcagcaatgtgcatgatttctacttgggctcttgcattgccaatttcatatttccatcacatgcagaccgttgtgttgaagaggccaattggctttccaagatcattgggttttcttgttgcattcatgaccttctactccttgggtttggcattgtccaaggatatacctgacgttgaaggagataaagagcacggcattgattcttttgcagtacgtctaggtcagaaacgggcattttggatttgcgtttccttttttgaaatggctttcggagttggtatcctggccggagcatcatgctcacacttttggactaaaattttcacgggtatgggaa

SEQ ID NO: 10793 - DNA, 438 bp, Glycine max
cgggtccgaacggttgaaaaaagacgattgaggggggaaccaaaaaacaaagaaccctgcctagaaaaaaaaatggagtactctaatggattccctagaaaaagagatgtttctcttcaggaacttagcaaaaggcttgctgagtttgctgaagtaagaggatgggatcaatatcacagtcccagaaatcttcttttagctcttgtgggagaggtgggagagctttctgagatcttccagtggaaaggagaggttgcaaagggattgcccaattggagttctgatgataaggagcacttagaggaagagctttcagatgttttgctttatttagtgcgtcttgctgatgtttgtgggctagatcttggacaggctgctctgactaaaatagtgaagaatgctcagaaatacccagttactagtactaattaatcacac

SEQ ID NO: 10794 - DNA, 2261 bp, Glycine max
gttttgacttcttcagaacgtgatgttattgccatgtctggggtcgacactgccgtctactttgtctttctcaccactgtgttgagtatcctagttttatctggagttattctgctaccagttcttctgcctctttctgttactgaccatggtatgaagacacaaacaactagcaacggaactttcggtgaacttgacaaattatcaatggctaacatcacggcaaagacttcaaggttgtggggattttttattgcctgttattgggtttcaattgttacgtttgctctcctatggagggcttacaaacatgtgtcatggctgcgagctgaagctcttaagtctcctgatgtgaagcctgaacagtttgctatagttgtgagagacatacctcatgttcctcaaggtcagactatgaaggaacaggttgactcttactttagagacatctatcctgagacattttacagatctatgattgtaacagacaacaaagtggtgaacaagatttgggagtcattagaaaagtatacaaagaagcttgcccgtgctgaagcagtatatgcagggtcgaaaacaactgccaaaccagaaggaacaagacctacaaacaagactggcttccttggacttgttggtaaaaaggtggataccatagaatattgcaacgagaagattaatgaacttgaggccagattggaatctgagcaaaaggtcactctcagagagaagcagcaagatgctgctgtagtatttttctcaagtagggtggttgcagcatctgcatctcagagtttacatgctcaaatggttgacacttggtcagtctttgatgctccggaacccaatcaactaatatggcctaatttgaaaatcaagtactttcagagagagctgaggcaatacttggtgtatttcattgtggcactgactatattcttctacatgattccaattacatttatatctgcatttactactttggataatttggtgaaatatctcccattcataaagccaattgttaatataaaggcattgaaaacagtgttggaagcttacctccctcaactcgcactgattattttcttggctttgttgcccaagttgcttctgtttttgtctaaatttgaaggcattccaactgaaagtcatgcagttagggctgcatctggaaaatatttttattttaccgtgctgaatgttttcattggagttactattggtggaaccttgttcaaagcattcaagagaattagggagcacccgacgttggatgaaatttcatccttgctagctgaaagcctcccaggcaatgctacttttttcttgacctatgtggcccttaaatttttcattggctatggccttgaactgtcccgaatagttccccttattatataccatttgaagagaaaatatctttgcaagactgaggctgagttgaaagaagcttggcgtcctggagatcttggttacggaactagagttcctggtgacatgctgattgtcacaattgtcttctgttactctgttattgctcctgtgataatcccatttggtgctctatattttggcctaggatggcttgttttgcgaaatcaggcactcaaagtctatgtaccaacatttgaaagttatggaagaatgtggccacacatacacaaccgtattctagcatctttgatattataccaaattacaatgtttgggtactttgggacgcagaaattctactatacaccacttgtgcttcctcttcccatattgtcattggtctttggttttgtctgtgcaaagaaattttaccccgcctttcaacatccagcacttgaggttgcagctaatacgcttaaggaagttcccaatatggaattgatttttggagcttacattccaccaagcttgaggtctgagaagatagatggtgaccgggttgaagatgcattgtctcaagcttcaagaacaacacctgtttgatgtaattatctgaatttcaacttttttttacgtgttagatgtagtcttgtagagatacttttagatattttattaattgttcagaatacgtcataggaaccagaggtgttgagtgttgactgtcgtgaatgtgattgtgtaagaaaatgttgggtggtctcgtaatattttcttttagtgtgatgtttgttcgacttgtgatagttgcggatcagtgttctctatgtattcaacattttctttatttgctctgaatgagaattcatgacttttcattgtgt

SEQ ID NO: 10795 - DNA, 390 bp, Glycine max
tgtggaaccttgttcaaagcattcaagagaattagggagcacccgacgttagatgaaatttcatccttgctagctgaaagcctcccaggcaatgctacttttttcttgacctatgtggcccttaagtgagataacttcttaactttattctgtttagttcatttatctgtggtgatacttcatttttttcatttataagttaaggtgcataactactttatggtgatggtagaaggaaatgtagaggccatgcttcatctacaaatggtgtttcacattatatcttgttattatcttttcctagattcttttgaagcaggagttaccatgtattccaaaagcacatctgtaacaaatattttctcacatgatattgtgtgtaaactgtaa

SEQ ID NO: 10796 - DNA, 390 bp, Glycine max
gaagcaacaaaccaaaaactcaagtagcaactatattgataaaatctgttccaacaactccaacatttatggcacctcctcaggcagacctatggaagattggcgcagaaggctttgctctgatagacaagttctatggtccatcaagggggaacagtgccaatgatgcattccatgggccaaggggagaacattgttgggtggtttataatgtgtccaatgatgtgatggaagaatctgctgtagacccatgaaattctaagctttttggcttatgcatgttaattattaggtatcttcaaatgggtctttgctgtttcatgttaggttactctcttgtatgatttatgtatagaaaaaaactcggggaccctgcactatatttgaatc

SEQ ID NO: 10797 - DNA, 554 bp, Glycine max
  unsure (1)..(554): unsure at all n locations
gacccacgcgtncggtgctacaagacgacttattggtactgtttttttataaccacccgaaggggaacgcaatatatattcaaaataaaacaacaatcagttaggagtgttgagtaagatcaaaatatggcagacttgatgaaaagaatcctcgaaatgattgaggccgagcaagctaggaaagggtccaatcatggtacctcaaactcacataacacctatggcagcggaagccagaatggatcaaccatcaacagcggcaatcatcataacaacggcaactggtatgacgactcataccactatggtgaacgccctatttataacgacggtactttcaatggtaatggcaacggggcacatgttgagggtggctttgactcctcaacaaggaactactatggtcgccgttatggttattaattatctgtatttgatatatagtatatgctgggcaacatcatatagtatgttatgttgtactacccataaataatgttgagctaaagctctaatagtccaatgttctatcataaatataatggttttagggc

SEQ ID NO: 10798 - DNA, 608 bp, Glycine max
gatgcaaacatctctacctagcattcagcacaatcaacagtccaataatcaacaacaatcaacacagtccgtgcttcagcaacactcccaagttatcaggcaacagcaaccacaacagacttcgatcattcatcaacaacaaacaccgatgactcaacagtcaatattacctcaacaacaacaaaacaacaacaattagttaagagagttgagtgagatcagaatggcagacttgatgaagagaatccggcaaatgattgaggctgaacaagcaagcaaagggtccaaccatggttcttcaaactcacataacagctatggcagcggaagccagaatggatcaaccatcaacagtggcaatcatcttaacaacggcaacaggtatgacgactcataccactacggtgaacgccctatttataacagtggcactttcaatggtaatggcaacgggtcacatatcaagggtggctttgactcctcaacaaggaactactatggtcgtcgttatgattattaattatctgtatttgatacagtatatgctagctagctgggcaaaatatataatatgctatgctacgttgtactagcaataaataatgttg

SEQ ID NO: 10799 - DNA, 526 bp, Glycine max
  unsure (1)..(526): unsure at all n locations
ccggtccgtgatattcccggtgtcgatcccacgtcgtctcgtaccggtctgcatgaagaacgacagtaagggggagagcatattcatttccgtcccgcgctctttgtttttcgctttcgatcggtttccccttctccaaatttatttgtacccgtattccaaccatctgggctccccaataaccgcgccgatgacccttcactttcgctggccccctctttgaaaaaaatcaacaccccctctttttcttcctttccttctgatcctccgattccaccattccattgaccatatggagaaccaactctcctcaaagggatttcgagcctccccagcacaaaaatcccttccgtcgaatgccctccgccgatggaagatcccgccgtcacttctcgtcaaaaaccaaccgccgccgcttccgcatggtcgccgatctcgacaagcgcgtccaagccgagcagattaagcaggggatcaaggttttttttctttcactttcctnctctttttttttatttcattatta

SEQ ID NO: 10800 - DNA, 587 bp, Glycine max
agaagacgacagtttgggagtgttgtgttgttgaggttttttgtagcagaattcagtgcggtgtgttgtagcagcgattagaaggaaggaggaaagatgaacacagacatcactgcatcgacgaagccagagtacccagtcattgatcgcaaccctcctttcaccaaagtcgtcggcaacttcaacaccctcgactatctccgattcgtcacaatcaccggcgtttccgtcaccgtcggctacctctccgggattaagcctggaattaggggtccttcgatggtgacagggggtttgatcggtgtgatgggtgggttcatgtatgcttaccagaactccgctgggagactcatgggtttcttccccaacgatgatgaggtagctcgctacaacaaaaaataattcctttttttgtgctcatcaaaaaacaaaaacaaaaaaaaaaccctcttttgtgccagtgtttgaacttcaataatcacatttcatttcagttatttgttaagcttttatttgtatcgactttacttcattcgccttttagaggaatgataaaaaatgcttattttggatttctaaaaaaaaaa

SEQ ID NO: 10801 - DNA, 641 bp, Glycine max
cctggatcaaagcttcacaagaaagagacatgtgaagctgttactatcattgaaactcctccattggttgttgttggagttgtgggatatgttaagacacctcgtggccttcgcacactcaatactgtttgggctcagcatctaagtgaagaagtcaagagacgattttacaaaaactggtgcaaatcaaaaaagaaggcctttaccaaatattcaaaaaaatatgaaaccgaggagggaaagaaagatattgaatctcagcttgagaaattgaagaagtatgcaactgtcattcgtgttctggctcatactcagataaggaagttgaagggtctaaaacagaagaaagcacatttgatggagatccaagttaatggtgggacagttgaccagaaggtggactatgcatatagcttcttcgagaagcaaatcccagtggatgctgttttccaaaaagatgagatgatagatatcgttggagtgactaagggtaaaggttatgaaggtgtcgtaactcggtggggcgtcactcgccttcctcgcaagactcacaggggtctaaggaaggttgcttgtattggtgcctggcaccctgctcgtgtttctttcactgttgccagggccggtcagaatggatatca

SEQ ID NO: 10802 - DNA, 642 bp, Glycine max
cctacgcgtccgcggacgcgtgggcggacgcgtgggtaagaagagtgagaaggtgattgacatgggtgttggttttgaagttgtttctggtgagtatttggggtcagcaattgtagaaccaccttggttagactttttgaggcaatggggtccaaaaatcacttatgacattgcaaaggagctggacaatttggcgaaggtgttccctgctttggaagcccttgaagatggtttgccaaatgagttgttgggacaggagggacccacaggacctaagctcaaaagaaattggcaaggtgatgaggtttgaaatggaagacttggagaatggtggcattattgacaccatgcaattaaaaaaggagactttaatttggttggtttgcactatctgttttgtatttttatagggttcacaacaaacatgtatttcttaataataactgacaaagttgtttcttgtttgtatttgcatgccagctttttcgggtgttcccacaacattaaaaagcatgtgatattgctcttcaaatagtaggtagatggaggacagaagaaaatcgaaaagatttttgtgtgcacttggcttataatgatttttttccccaaagatataaatattttatccctaaaagggagggg

SEQ ID NO: 10803 - DNA, 577 bp, Glycine max
acattttctaaccttcctcagggtggcaacaatgatggtgagtattggttggaccttccttctgacaaagccaacaaggaaagggtgaaaaagggtgatttcaagagttgccaagcctatgttcatgccaaacccatgtttggtggaacattcactgaccttgtcatgtgggttttctacccattcaatgggcctggaacagccaaagtagggctcatagatattccactagggaaaataggagaacatattggagactgggagcatgtgacactaagagtaagcaatttcgatggagaactaaaaaaggtgtatctctcacaacatagcaatggtcaatgggttgaagcttctcagctcgagttccaaagtgggaacaaatcagtgtgctattcctccttgaatggccatgccatttatccaaaagcaggacttgtcatgcaaggccttgatgggattggaaataagaatgaaacttagaagagtgagaaagtgattgacatgggtgttggttttgaagttggttctggtgagtatttggggtcagcaattgtagaaccaccttggttaaaccttt

SEQ ID NO: 10804 - DNA, 624 bp, Glycine max
cattacgtttgtgtttggttctctttctcttctctttatctgaacgaaggagagagtgaaagatccttttgtggatcgaacatcttgcgttttattgtggtgttgaggatcgaaaatggatcagatattcaacaaggtcggatcctattggttcaaccagaaagcctccagccagctcaattccgttggtgatgacatcaattcgatgacaaacagtattgaagggggaaccaaatggttggtcaacaaaataaaaggcaaaatgcaaaaggcattgccagagttactaaaggagtacgatctaccaataggaatctttcctcgtgatgcaacaaactatgagttcaatgaagagacaggaaagctcgttgttttcattcctcaagtatgtgaagttggctacaaggattcatcagtcttgcgtttcttcaccaccgtgactggttatctggagaacggaaagttagcacacataggaggaatgaagaccaaaccgttgatctgggtgaaagcaacaaccattttgtcagagggatcgaagctctatgtgacagctggcatgaagaaaacaaggagtacggaagcgtacgaggttacaagagatggtgtatgcatagataagtt

SEQ ID NO: 10805 - DNA, 388 bp, Glycine max
ctcgagccgttttttctttctcttctctttatctgaacgaaggagagtgaaagatccttttttgcgttaggggatcgaaaatggatcagatattcaataaggtcggatcctattggttcaaccagaaagcctccagccagctcaattccgttggtgatgacatcaattcgatgacaaacagtattgaagggggaaccaaatggttggtcaacaaaataaaaggcaaaatgcaaaaggcattgccagagttactaaaggagtacgatctaccaataggaatctttactcgtgatgcaacacactatgagttcaatgtagagacaggaaagctcgttgtttgcattcctcaagtatgtgaaggaggctacaaggattcatcagtcttgcg

SEQ ID NO: 10806 - DNA, 553 bp, Glycine max
  unsure (1)..(553): unsure at all n locations
aaagaagagaggtggtcgtcgtcttaggaagatgaaggaaaggtatgcaataacagacatgaggaagttagccaataggatgcaatttggagtcccagaagagagttcattaggagatggtctgggtgagggctatggaatgcttggtcaggctggcagtggcaagcttcgtgtgtctgttggtcaaagcaaacttgcagcaaaagttgctaaaaaatttaaggaaaagaattatggtagtagtggtgctacctctggtttgacatcaagtcttgcattcacaccagtgcagggtattgagctgacaaatccacaggctcatgcacaccaacttggtagtggaactcaaagcacttatttctctgaaacaggaacattttcaaagatcaagaggacatgaaaccatgcatgaatgcaaattcttgttcaatgcctggattattcttggtgtccaatgcctaaaaattgttgattccgatggatattactttatatgtntattggagatttttgaagaataaccatgtatgttggtgatacgttcccttggata

SEQ ID NO: 10807 - DNA, 455 bp, Glycine max
ccgggtcggcccaagccttccgtccggttgcaagaggccaccagagggggtcaggatctgtgctttgcggtcctctgctttgtcagggctgactgctctgcagctcgataacttcatggaaccatcaactcgttatggcgtgttttctcctatcgacaggtccaagaacgagcggtctggctgtttcattcgctgtcgcaagacggcttgagtgttcgtggccagcaccgaggcgttatattccgaaccccttgtccgaggccgttggtcggtgaggttggggcaaaccatggcagcctacatatcgcattcgcacgctagaatgctttcgcgtgtgggattgtctacttgtcggcacgatgcaggagaaaggagaggtgatgcgctgggttgaacagtaaacgatttgagaagtcggcgtgcttcagatgcagtgtttcgggccttctttgggt

SEQ ID NO: 10808 - DNA, 1274 bp, Glycine max
caaccgagaagtaacatttggatgatggcacccacaaattagagctaccggttgcatgtttcatgcacgctaggtacaggtctagccagtccggtacctacagggaaaatgggactgctgctgcaattcaatatggtaccggagcaatttctggtttctttagctacgacgatgtcagagttggtgacatagttgtaaaggaccaggaatttattgaagcaactagagaacctggagttacatttgtggctgctaagtttgatggtatactaggacttggatttcaagagatatcagttggaaatgctgttccagtgtggtacaacatggttgaccaaggtcttattaaggaaccagtattttcattttggttcaaccgcaaaccggaggaagaggaagggggtgagattgtttttggtggtgttgatcctgctcactataagggaaagcacacttatgtgcctgtgaccagaaaaggatattggcagtttgatatgggagatgtacttattggcggtaaacccactggatattgtgctgatggctgttcagccattgcagactcagggacttctttgttggcaggtccaacgactgtaataactatgataaaccatgcaattggagcatctggagttatgagccaagaatgcaagactgttgttgcagagtatggacaaacaatattggatttgcttttgtctgaaacacagccgaagaagatctgttcccgaattggattgtgtgcttttgatgggactcgtggtgttgatgtggggatcaagagcgttgtggatgagaatgaaagaaaatcatcgggtggtcatcatggtgctgcttgtcctgcgtgtgagatggcggttgtttggatgcagaaccagctgagccgaaatcagacacaagatcagatactaagttacatcaaccagctttgcgataaaatgcctagcccgatgggagaatcagctgttgactgtgggaatatctcttcattacctgtagtgtcctttactattggtggaagaacttttgagcttagcccagaggagtacatactcaaggtgggtgaaggtcctgtggctcagtgtattagtggctttactgctatagatattccacctccacgtggccctctctggatccttggtgatgtcttcatggggcgttatcacacagtatttgattttggcaaacaaagagtgggatttgctgatgctgcatagagtgtacgcgtgtctcagaatatggcgatccatgctattggtttatatact

SEQ ID NO: 10809 - DNA, 401 bp, Glycine max
gtcattaagatgccatctaacggcgacgttcccttcactcacgccaacgtcagcttggccttcagggatttcgcctacaaacccaccaccgatctctccaccggtctcagcaagttcgtcaagtggtacctcggttattacggcctccagccaagcctgaaaaaggataatcaccttcacaatattgaatgaccatttctataattatctctcctctattttgttctttttacggcaagaaaaaaaaaacaaaaaaaccttccccttgctcatggatcatttctcttggttttggtgaatcattattattattattattggtattggttgtgtggtgtagcaattatacatcatataaatatctggtatagatgaaagacatgcatatatataaatgtcat

SEQ ID NO: 10810 - DNA, 1219 bp, Glycine max
gggactaactaatctccataaaataatctgagtgacactcctcactttgtggccatggcttcactcacgtgcctccgcccaacccaccctcatcttcatcgcggttcagtgcttctcgccatttcgaaccgctgcttcaaccattcctccttgctgaactggattctctccgtaaaccctcctcgaaccgctcctccacgcgccatggccaagcccagtttctcaactgcccaagacctagtggcttctcctggcgattttgaatttgcgcagcctctgaaaattgtggagtatcccgacccgagattgagggccaggaataagcgcatagttgccttcgatgatagtctgaagaagcttgtccacgaaatgtttgatgtaatgtacaaaactgatggtattggtctctcagcaccccaattaggaattaatgttcaacttatggtgttcaatccagtaggtgagcgtggtgaaggagaggaaattgttcttgtaaacccaagagttagccaatactcaaagaaactgacactatttaatgaaggttgcctatctttcccaggcatcaatgctgatgtaaagcgaccagaatctgtgaagattgatgcacgtgatatcaatggaacaaggttttcagtcaacttgtctgaccttcctgcacgaatatttcagcatgaatttgaccatctacaaggaattcttttctttgagagaatgactgaagaagttcttgatggtatttgtggacagttacaggccctagaaacaaagtacgagggaatgactggactctcaagccctgaaaagatagaaaaccgcaggaggagaaaggtcgctgttggttttgggaaacgatgatcttcaaggtcaatattaggcataatactgaatgcacacttgacagacatttcaagtttgaacttcataaaaagatgaagcatagattacggctgcaattgtttatgaatagtcattggaaggcatctctattgtatccatgccattgagttgttcatgttgccctgaagggaacaactgtcttgaagggctataataatattcgggcgggcgtgcatgtgtgtaaaaaacaaattagttacaaattattaactttttttattataaattatcttgcgataaattacttatggattacttgttaatatttttgtagttaattgtaattcataatattaatcatattttgatggtaaggatt

SEQ ID NO: 10811 - DNA, 710 bp, Glycine max
cgcctcttccatctgcatcaaaggattttgcctactttgttgttctatttcccttcggttcgattaggttctctctttttctgaatcttcgctttcttcttcgttgttttttctttgttatatcgatcatatgatgagaaaaaaactgcaacaatatgattggattcgttccatgattcctagtatttaagtctctgatgattagttctgctctccctcttcttttgatgtttgaaattaatttacaatttctttccgttttcatttttttaatttgttctcgattttttgggttagagagtttgattagaaaaaatagcgaagaggcgtccggattattacattggtccgtgtttctgaatcaccgtgaccgacaacccttaccaatttctgatctccaatcgcagataattttttttaatatttaatttttaaatttcttaattttagcttaatttttgcgtggctttggctcagtgattttctgccattgttgcagtatacgctattccgactcaatatgtgagtagagatatcatcatagatgagagcctctgccacgaaggttgtactcagttagatattttccattggaaattaggctcgaatttgtttgattgtgttaggtttagatttttgtgctgtgggtctgcggtgacgaattagaatcaaattcacatgtcagacttcagagattttaaatcaatgag

SEQ ID NO: 10812 - DNA, 406 bp, Glycine max
ggtgtctctcttgtgcgcctattccatctgcgacaaaggttgttctatacccattgggttcgattaggttttccctttttccgaaactttgctttctttttcgttgtttctttcatcttctttcatttttgtatatcgatcatgtgatgagaaaaaaactgcaacaatatgattggattcgttccctgattcctagtatttaagtctctgatgattaactctcctctgtttcgtttgttttaaattaattttcgagttctttcttcagttttctaaatttccaattttttctcagcgttcgattagagcaaccatcaaagagagatgatgatgtttacattggtccgtgtttctgaatcaccgtgaccgacaacccttaccaatttctgatctcaaattgcaattt

SEQ ID NO: 10813 - DNA, 340 bp, Glycine max
gtgaagagtgatgtttatagctttggggtatggctccgcgaagcaattactggaagagacccagtggattatagccgaccagcaactgaggtaaatttggttgactggctcaagatgatggttgggaataggcgcgcagaagaggtggtagaccctaacattgagaccaggccatcaacaagttcccttaaacgtgcccttttgactgctttgaggtgtgttgatccagattctgagaaaagaccaaagatgagtcaagcttgcccgcattgcttgaatcagaagaatttcccattccacgcgaggatcgaagacgccgaaagagccaggcaggaaatat

SEQ ID NO: 10814 - DNA, 407 bp, Glycine max
tactataaggggtgataaacacaagcactatcaacaccaccaccaaattaccattatatcaatagccttgttgagaaagagttattgccacttccaaccccttcaattccctaagctttctacaacacaaaacaaactccggagacactatatactaattttagttcttttgcggcttcctgactcgaaattcagagactaatctcttgaagttggaagtatgtggcgccttgtggctgcgttgaccaagaaacttcaaaacacaaagaagggttcaagggtggccgatgagaacatgtttgaggctgcaaatggggtcgagctagccatgtctcgacacgatagaggaagaagagaccatggttggagtggaatctcacttatatatggcattcttcatgccccca

SEQ ID NO: 10815 - DNA, 442 bp, Glycine max
ggttacgggtgattctatctaagttgacgttttagcagtcgtcgctgccagcctagtctaccataacgtaatcgagattttcgctattcacacaatcccttcacactcttaatttacgctttctgttcagcttcgttgtgcggtacattttctttgtcccttcccttctcctctcgacgcaggacactatggccgtcaccgtcaagctaatggctctcattgtttcctttttcggcctcttgtctttcattttgggagtcatagccgagaacaaaaagcctcctgctggaatgcccgtgcccgtcaaggatggtgtgacatgcaagttctcagccgatctaacacttgcattggggttttcgactggactagctctaactatgctgttatggccaacaatcactgaacaccttcaccttaaacgcaatgtgcatcatgatct

SEQ ID NO: 10816 - DNA, 1084 bp, Glycine max
cgggttattccttgcttcacttgtatgctttagtttctagcatcgatcactcctaattacttgctgcatttctctactccttgtgcttgacacttttgtcatttaaaatggaacttaattttaagtaccaacttagccttttctgtgtcacactgctcttacctgccctgtgtacctctcaagactcttttacgtgctccagagcaacctattatggtagcccagattgttatggaaatccaaggggagcttgtggctttggagaatatggaaaaacggtaaacgatggtagtgtcgcaggcgtgtcttggctatggaagaatggatctggctgtggagcatgttatcaggttaggtgcaaaataccacaattctgcgatgagaatggagcatacgtggtggttacagattatggcgagggagacagaacagacttcattatgagtccacgtgcctactcaagattggggagtaacgcagatgcatctgcagaactattcaaatacggtgtggtggatgtagaatacagaagggtcccctgtagatacggtggctataacctcttggttaaggtccatgaacacagcagaaaccctcactacttagccattgtcattctctatcttggtggaacctacgacgtaactgctgttgagttgtggcaggaagattgccaagagtggaggcgaatgcgcagggcatttgggactgtgtttgacgctgagaaccctccaaggggtgacataaagttgaggttccaattgagtggtaatgcagagaagtattgggtgcaatccgagaatgttatctctagtgattgggagggtggagctgtctttgactccgaaattcagcttggttaaaatgaaaaaaggcactttctgatttcaggaatatagatagtgactagattactagtgttttattgtttatggtttgtgctattctaagaatgttccctttgtggtgagtcgatctagtgctctttgtattggggactaaaactgtggggattcatatatttcccgtatgaatcatcacagaatatgaataaataaaagtgatgctcagctaatgtcataag

SEQ ID NO: 10817 - DNA, 404 bp, Glycine max
ggaagaagagagtagcatactacaagaccctggactatcagctagcagagcgtgggagataccgtaatctgcttgatatgaatgcttacttgggaggctttgcagctgcactgattgatgatcctgtgtgggtgatgaacactgttcctgttgaggctgaggtcaacacacttggtgccatatatgaacgtggattgattggaacctatatgaattggtgtgaagccatgtccacttaccctcgaacttatgacttcatacatggtgactcagtttttagcctctaccagaacaggtgtaaagtggaggacattcttcttgagatggatcgaattttgaggccagaaggaagtgtaatcttgcgagatgatgtggatgtgttgttgaaggtgaagagtttcaca

SEQ ID NO: 10818 - DNA, 1058 bp, Glycine max
cggacgcgtgggttcatatatgtatatatagcatcagagagagaacaattctttgaagggtgaaaaaccttgatcaagaattgaagcattaatcttcaaccatggccacacccttggcctaccaagagcaccttccggcggcacccagttggctgaacaaaggtgacaacgcatggcagttaacagcagccaccctcgttggtcttcaaagcatgccgggtctcgtgatcctctacgcaagcatagtgaagaagaaatgggcagtgaattcagctttcatggctctctatgcctttgcagcagttctaatatgttgggtgcttgtgtgttaccgcatggcctttggagaagaacttttacccttctggggtaagggtgctccagcactaggccagaagttcctcacaaaacgagccgtagtcaatgaaaccatccaccactttcataatggcactgttgaatcccctccagaagaacccttttaccctatggcctcgcttgtgtatttccaattcacttttgctgctattacccttattttgttggctggctctgtcctcggccgaatgaacatcaaggcttggatggcttttgtgcctctttggttgatcttttcctacactgttggggcttttagtctttggggtggtggctttctctaccaatggggggttattgactattctggcggctatgtcatccacctttcttctggaatcgctggtttaactgctgcttactgggttggaccaaggttgaagagtgacagggagaggtttccaccaaacaacgtgctacttatgcttgctggtgctgggttgttgtggatggggtggtcagggttcaacggtggagcaccatatgctgcaaacattgcatcttcaattgcggtgttgaacacaaacatttgtgcagccactggcctccttgtgtggacaactttggatgtcattttctttgggaaaccttcggggattggagctgtgcagggcattgatgactgtacttgtttgcattaccccaggagcagggcttgtgcaattctgggctgctttact

SEQ ID NO: 10819 - DNA, 460 bp, Glycine max
ttgaatcaattcatcagcccatacacggaatggctgggcctcttttcctcttatccaattctaatcacgatcagacattaaatgtaaacacttctctatcaaaaatttgaacttagttcgcctcacacttttgttttgtcaccttgtgagagactaattccctctaataaacgcaacgttgttcatcagtggcacatacatatacagcatcacaattctttgaagggtgaaaaagcttgatcaagaattgaagcatattgatcttcagccatggctacacccttggcctaccaagagcaccttccggcggcacccgaatggctgaacaaaggtgacaacgcatggcagctaacagcagccaccctcgtcggtcttcaaagcatgccgggtctcgtgatcctctacgccggcatagtgaagaaaaaatgggcagtgaactcagctttcatggctctctacg

SEQ ID NO: 10820 - DNA, 388 bp, Glycine max
ggagaacaagggaaagatttcactgttctccagttaatgatctattgtgtctttggtgttctggctggtgtagttggtggcatgttgggactaggaggaggattcgttatgggtccactttttctggagttgggagtcccacctcaggtgtcaagcgcaacagccacctttgcaatgaccttctcctcatctatgtctgtcatagaatactacctgttgacacgttttccagttccttatgctctttacttcattcttgtggctactattgctgcctttgttggacagcacattgcgagaaaactaattatcctattcgggagagcatctcttataatcttcattctagcctctacaatatttgtcagtgccgtcttgttaggtggag

SEQ ID NO: 10821 - DNA, 587 bp, Glycine max
gatcgagaaaggggtgttcggaagggatgcaatcaatgtgatagcatgtgagggggcagagagggttgaaaggccagaaacctacaagcagtggcaagttaggaaccagagagcagggttcaagcaacttccattggccccagagcatgtgaatagagtgaaggaaatggtgaagaaggaacatcataaagattttgtggttgatgaggatggcaagtgggttttgcaaggatggaaagggcgaattctttttgctgtttcctcttgggttcctgcttgaggaatgaccaactcctaacccactcattggcaaggaaaattgttttaggtgtaaggtgcactaagggtatatttatccttgaatagaagggaatcatgatcatattttgtttctatttgaatagtgaaaataccctcttatatgtgcacttttatgaacaagagtagaagacttaaactcctctgaaatcactgattttaggagggatatctaatatccacattaatgtactagttttctagtgatgcctaggagcaacatagaaagaagttggtagttattataaatcttcatttgcttaatgctc

SEQ ID NO: 10822 - DNA, 678 bp, Glycine max
caggtaaattgtttacttggggtgatggagacaaaaatcgccttggacatggggacaaggaggcacgccttaaaccaacttgtgtggctgcacttattgattccaattttcataaaattgcttgtgggcacagtttgacagcaggcctgacaaaatctggacgtgttttcactatgggaagtactgtttatggtcagcttgggaatcctcaatctgacggaaaggttccatgcttggtcggagacaagattgccagggaatcgattgaagaaattgcttgtggagcatatcatgtagctgtattaacatccaaaaatgaagtttatacttgggggaaaggtgcaaatgggagactgggtcatggagatattgaagatcgtaaaacaccggctttggttgaagcattaaaggatagacatgtgaaatatattgcatgtggttcaaattactctgctgccatatgccttcataagtgggtatctggtgctgagcagtctcaggatagacatgtgaactaaaactatgttttggttttgcctatctcttatgctattaaaattattctagaatcccacctacagtttttttattcaaaaataagtgttggaactctaagatatgatatcaagtttattcctgtaatttgtttggtgacctatagtgaaaaatttctctatt

SEQ ID NO: 10823 - DNA, 575 bp, Glycine max
ctgaagatcgaaaatcacctactttagttgaagccttgaaagatagacatgtgaaatatattgcatgtggttcaaactactcttctgccatatgccttcataagtgggtatctggtgctgagcagtctcagtgctctgcttgtagacgcgtgcgtgggttcactagaaagaggcacaactgttataattgtggacttgtgcactgccattcatgtagttctaggaaagcattaagagctgccctggctcctaatcctgggaagccatatcgtgtttgtgattcttgttttgtaaaattgaacaaggttgcagaattgggcaacaataatcggaggaatgctatgcctcgtttgtcaggtgaaaacaaggacagattagagaagcctgagctaagattgaccaagacagcagtcccttctaatatggatttgataaagcaacttgatagtaaggcagctaaacaggggaagaaggctgatacattctctctggttcgcacctctcaaccacagtctttgctacagctcaaagatgttgtcttgtctactgctatcgatttgaagcgaacagctcca

SEQ ID NO: 10824 - DNA, 485 bp, Glycine max
tgaatcctaaaatcacaatacccgaccacaaggtctttttttttctctgtggcggcatcattggcaatggttaaaagttaaaacttcaacacacagaatccagattcgtcgagaaagagaaaagagaaaagaagaatgggcgattaccatttcgtgtacaaggatttagaaggggcttctactcaatgggacgatattcaaagaaagctcggaaatttgcctccaaaggcacccgctttcaagcccccacctttcacccctgcctctgatgatcaacccaaagacaaaacatggatcgattccaaaacctccgaggaactcgaagacctcgaagacaacctcgatgatgatcgcttcctccaagaatacaggaagaagaggctggctgagatgcaagaggcagcaaaagtattgaggtttggatctgtgattcccatttcgggatctgatttcgttcgagaggtgtcacaagctccatctgatgt

SEQ ID NO: 10825 - DNA, 421 bp, Glycine max
cagtcaatggtcataggaccatgatcgtgaatctaatgataaatcccaaggcaggtctgaaaacgtcaccgacagcaaaagaacaaatcttaagaccaagcgtacttttaaaaacgcgagtcctgatattatgtcggagggtgaccctcttgattgtctttttggttatgctcctccggtggaagagatccatcattcaaatttcccaaataaaccatcaggaatacataatcgggctcgtagaaaatctcaccgtaggcgtcggatgcataatcatgaggacctttcaaactctgagtctgcagcagctgtttgactatcatttaacatttgcagacgttgatgttaggattatgcaaattgtggttttcttaataacgtaggattatgtaaattggggtttttttaataacgttctgat

SEQ ID NO: 10826 - DNA, 1078 bp, Glycine max
ttctcgcgtccgcccacgcgtccgctttcgcggtggcttcctcttatttttttctttctctctctctttctcactcttatatcctttccgagttccgactctgttaatcattctccgttaagattctttcttctttcctctttccactcttggtcttatcttcttcacaatcccacaaccactccttgttataaatcagattttttttttctcttcttacagatccaaacatggccgaagaacaccgatgccaagctcccgaaggtcacagactctgctccaacaactgcggcttcttcggtagccccgccacaatgaatctctgttccaaatgctacagagacatccgtttgaaggaagaagaacaagccaaaactaaatccacaatcgaaaccgctctttctggatcttcctccgccaccgtcgccgttgcctccgccgtggattctcttccggcgccggttgaatccctccctcaaccgtcggtggtgagttcgccagatgtggccgcaccggttcaggcgaaccggtgcggcgcgtgtaggaagcgcgtgggattgactgggtttaagtgcaggtgcggaaccacgttttgtgggactcaccggtaccccgagaaacacgcgtgtggcttcgatttcaaggcggtggggagagaggagatagcacgggcgaatcccgtgatcaaaggcgagaagctacggaggatttaatctgcaccgttgatatgatgatcgaagcgattagggtgagttgatcaggaccgtccgtcgtgggccgttgatacgaacctatttcgagcgtgtgtaagaaaaaaaaaatctattagttatgacgacattgggaagggttgaataagtcatattttggaggctttgctttgtgtttgttcattaaaaatggaaaatgttaggtccacccacgttcggaaattgaggggtttgtttagaattgcaatgcaatgtaaaaaagtgtagtttaatatttttctacagagcatttctatttttcttccgtttgcgagaaaggtaaattatcgtctgcgttgtatccaaaaaaaaaaaaaaaggggcggccg

SEQ ID NO: 10827 - DNA, 742 bp, Glycine max
gatcccaataaccctttatttttctcgtttttttttttttttataaaaaaaaagaaaaaagaaacatattcttgcaatttcgttgtacaaacaaaattcccctattttcggcacgcctttgttgaatttccaatctctatttttctttctttctatttatacgtaataattccaaaaagcctaacgcgagagattcatcagtttttcaattattcctcgaattttgaaggaatcatacaaacgcttgaaatattcgtcatcaacaacaacctcacgctgctatagattttttttttctcttcttacagatccaaacatggccgaagaacaccgatgccaagctcccgaaggtcacagactctgctccaacaactgcggcttcttcggtagccccgccacaatgaatctctgttccaaatgctacagagacatccgtttgaaggaagaagaacaagccaaaaccaaatccacaatcgaaaccgctctttcaggatcttcctccgccaccgtcaccgcaaccgccgtcgttgcctcctccgtggaatccccttcggcgccggttgaatccctccctcaaccaccggtgctgatttcgccggatatagccgcaccggttcaggcgaaccggtgcggcgctgtgtaggaagcgcgtggggttgacagggttcaagtgcaggtgcggaacaacgttttgtgggagccacaggtaccccgagaaacacgcgtgtggcttcgatttcaa

SEQ ID NO: 10828 - DNA, 502 bp, Glycine max
ctcgagcccccctttatttttttcgttttttttttatggaaaaaaatattgtagcaatttcgtcgtagaaacaaaattcccctattttcggcacgccgttgttgaatttccaatctgtgattttttttcttcttctatttatacgtgataattccaaaaagcctaacgcgagagattcatcagcttttcaattattcctcgaattattttgaaggaatcatccaaactgcttgaaatattcatcatcaacaacctcacgctgttatagatattctctctctctctctccctctctctctctctcacacacacacacacacagatccagacatggccgaagaacaccgatgccaagctcccgaaggtcacagactctgctccaacaactgcggtttctttggtagccccgccaccatgaatctctgttccaaatgctacagagacatccgtttgaaggaagaagaacaagccaaaaccatatccacaatcgaaaccgctcttt

SEQ ID NO: 10829 - DNA, 284 bp, Glycine max
ctttcgcggtggcttcctcttatttttttctttctctctctctttctcactcttatatcctttccgagttccgactctgttaatcattctccgttaagattctttcttctttcctctttccactcttggtcttatcttcttcacaatcccacaaccactccttgttcataaatcagatccaaacatggccgaagaacaccgatgccaagctcccgaaggtcacagactctgctccaacaactgcggcttcttcggtagccccgccacaatgaatctctgttcca

SEQ ID NO: 10830 - DNA, 1636 bp, Glycine max
gtcaagtgtgaaaaagaagataaagaataaggatgatatacagcaaatgcatgcactagacgatattgaagagggaattgaaggaattgacaatgagaagtcatcactaatgtctcaatcgaagtttgagaagaagtttgggcaatcatctgttttcatagcttcaacactcttggaagatgggggtgttccaaaagcagcaagttccgcaacactcttgaaagaggccatccatgtaattagttgtggttatgaagataagacagaatgggggaaagaggttgggtggatatatggctcagttaccgaagatattttaacaggtttcaagatgcattgtcatggttggagatctgtatactgcatgccaaaaaggcctgcttttaaaggttcagctcctataaatctctcggatcgtctgcatcaagttcttcggtgggctcttggatctgttgagatctttttcagtaggcattgtcccatatggtatggctatggtggcggcttgaaatcgctggaacgattctcttacataaactcagttgtttatcctctgacttcaattcccttaattgcctattgcgcattgccagcggtctgtctgctcactgggaagttcattgtccccgagataagtaactatgccagtatcattttcatggccctcttcatctctatagctgcaactggcatcctggaaatgcagtggggaggtgtcggtatacacgactggtggaggaatgagcagttctgggtcattggtggtgcctcctcacatctctttgctctctttcagggtttgctcaaagttctggcaggagtcaacacaaacttcacagtcacatccaaagcagcagatgatggagagtttgctgaactctacatcttcaagtggacatccttgttgatccctcccttgaccctactaatcataaacatcatcggagtcattgtcggtgtctcggatgctataaacaatggatatgattcatggggtcctttgtttgggaggctattttttgccctttgggtcattgtacacctttaccctttcctcaagggtgtcatgggaaaacaagaaggtgttcctaccatcattttggtctgggctattctcctgtcttcaatcttaaccctactttgggtgagaatcaacccattcttggccaaaagtgatgtggtgttggaaatttgtggattgaattgtgactaaaggtaacaaaaaatggaagggcatgccatggtttgacgttttacactgataagatctgcaacatgcataagtttttggtcaaagacacatgacacatccctggatctgttggtgagaactgccactgcaaaaaaaaatgttatttgtgggtggtgtttgtagatacaacatatgttttgagaggtttcattatttttttttatacatgtgcattatctaaattagtctgaaatcacaggtgagatgttatttataacttcttcggaataaggcatctctcatttgtaatcataaagtgtgcccatgtgttttttagaaattccctataagttgggatttatatggttggcttcgatacttttgccccaagtgaataaaatgtctacaatgtatagtatcttcaaatccaataatagtgacatg

SEQ ID NO: 10831 - DNA, 375 bp, Glycine max
cccggtcgacgacgcgtcgacgcgtcgacactccgaaggactcctaagggggaaccttgatgaaaaacgtgatcaaagctgtgaagaaactcaagttgtggtccaaaaagaaaaggaagaaaaagacccatggccatgagcatcctcctcactattgctgcagctgctattgttcctcatccatccaaccatcagctccacccttaccttcatcctcatgccttgattttgaatacagcaactatggaacattcttaccaaccccggagccggagccggagccggaaccgcaaccacaagagattgccagcctaaactcatcgtatcagcaatatatggtatcagtttcggaacctgtttatggcattccagtcc

SEQ ID NO: 10832 - DNA, 1005 bp, Glycine max
caagcattggagaggcattaaaccaaggacaggggcaccatattcctgtgatattggctatgaacgatttctaggccctgagattttctttaatccccagatatatggcagtgactttaccacccctttgccagttgtaatagacaagtgtattcagtctgcgccaattgacacaaggagatcattatacaagaatgtagtgttgtctggaggttcaaccatgttcaaggattttcacaggaggttgcaacgtgatctaaaaaaaatagtggatgctcgtgtacttttatctgaatcacgcttgaatggggagataaaatcgcagccagtggaggtaaatgtactcagcaatccaatccagagatttgcaggttggtttggaggatcagtgcttgcatcaacacctgaatttttcccggcttgtcatacaaaggcagaatatgaggagtatggagcaagcatttgccggacaaatcctgttttcaagggaatgtattaaatcacccacaaattagttgattatcgatgcagttatttgataagactgttgaatgaatgtctggctggttatcgttatccttaattcacttcttggtctttcttcccacctaaattcagagggcggcggaagtgagtgtaaaatatgtatattaagtgaaaatatgcatttgtttttatcccattcctaggcagtcagtttcacacggttaatacagctgccagcaggtccagacggtacttaatggttagatagaaaattgatctttgacaaagctggctgaactgaattgcaacttctggtattcagcttaagtgttcgatgaagttctacattatttgtcattcattgatgggactgataattccatgaagtacttttctaggtatatagtaagttaaattcattttgattgaattgtaataagcaccagtgaaggttagatttgcgtttacgtcatatagtttggcatttttgggaacataatgtacaatagtattttgttt

SEQ ID NO: 10833 - DNA, 566 bp, Glycine max
ccggaggatcactattttctcttgactgagagtccgttgacttcgcctgagagtcgcgagtatactggggaaatcatgtttgagacttttaacgtacctgggctttacattggtgtggattctgtgcttgctcttgcagctggttacacaacatctaagtgcgagatgacaggagttgtagtcgatgttggagatggggctgctcatgttgtacccgttgcggacggctatgttattggtagctgcatcaaatcaattcctatttctggaaaggatattactctttgtgtacagcagcttatgcgggaaagaggagagaatgtaccactagaggactcttttgaagtggcacggaaagtgaaggaaatgtattgctacacctgctctgacattgtgaaggaatttaataagcatgacaaagaaccagccaagtatatcaagcattggagaggcattaaaccaaggacaggggcaccatattcctgtgatattggctatgaacgatttctaggccctgaggtttggtctatggctgctccttatattttctctattatggatacctg

SEQ ID NO: 10834 - DNA, 844 bp, Glycine max
gtgggttctttgtttgaggacactcccgaggcttgaagaatagagcacaccgaacagttccgtttcttggagaaagcagccattgtggcagaagatgattttgagacaaatttatgtggttctggaccaaacccatggaaattatgctcactaacaagggtagaggaggtgaaaatgatggtgagacttctgccagtgtgggccacaaccatcatattttggaccatttacgcacagttgatcaccttttcagttgagcaagcctccaccatggaaaggaatattgggagtttccaaatccctgcaggctctgtcacagtcttttttgtggctgcaatactaatcactctggctgtctatgaccgactcatcatgcccctttggaaaaagtggaacggcaaaccaggtttcactgacctacaaaggatagcaattgggcttgtattttccatttttggaatggcggctgcttctgtgtgcgagaggaaacggttatccgcggcaaaaagtgtaagtggtggaaaccaagcaacaacactgcctataagcgttttcctcctgatcccacagttcttcttggtgggttctggtgaagcattcatatacacaggccagcttgatttcttcataacaaggtcgccaaaaggaatgaaaaccatgagcacgggtctctttctcacaactttgtctctcggtttcttcatcagcagtttccttgtctcggttgttaagaaagttactgggacaagagacggccaagggtggctagcagacaacataaacaagggcaggctcgacttgttctatgcactgcttaccatacttagtttcattaattttgtag

SEQ ID NO: 10835 - DNA, 545 bp, Glycine max
gacaagggaacgcactccaggaaaagaaaatgagtctggtgtgaaggaatatggtgaaaaccttgtcggtttacgggtcaaagtttggtggcctaaggatcgtgagttttacataggtgttattgattcttttgattctgccagaaagaagcacaaggttttgtatgatgatggtgatgaagaaacattaaatcttgtgaaggaaaaatggaaggtcattgaagctgactcagatgcagatgaggaagaacgaagtgattgtgcagatcttgatgtttccactgatatgccactgaagaagaaagggaaaacaagtgctggtgaatcaaccaagcaaggaaagatggatgcttcttccaaaagcagtggagcagcagcatccaatagatcaaagggtgcatccacgaagtctagccagaagtccaaagatggcaacaaatccaaagattccaaggctaatagcaaatctgaggatggagttaatagaaaatctaagggtggtagtagtaaatctactgttgctgctaaaaaattcagtaataaat

SEQ ID NO: 10836 - DNA, 639 bp, Glycine max
gttgatatcccatgtctcacaaaatttaatgtttttttttttcatgtgttccaggtttcactgacctacaaaggatagcaattgggcttgtattttccatttttggaatggcggctgcttctgtatgcgagaggaaacggttatccgttgcaaaaagtgttagtggcggcaaccaagcaacatcagcacttcctataagcagttttccttctgatccccccaagaagaactgtggagctgactcagatgcagatgaggaagaacgaagtgatcgtgcagatcttgatgtttccactgatatgtcactgaagaagaaagggaaagcaagtgctggtgaatcaaccaagcaaggaaagatggatgcttcttccaaaagcggtggagcagcagcatccaatggatcaaagggtgcatccacgaagtctagccagaaggccaaagatggcaacaaatccaaaggttccaaggctaatagcaaatctgaggataaagttagtagaaaatctaaggacggcactcctaaaagtggtagcagtaaatctattgttgctgctaaaaaaatgagtaataaattaaaaaatacggatacttccaagacaagtgaatcaaaggatgatgacagcagcaaaccaaaaccct

SEQ ID NO: 10837 - DNA, 548 bp, Glycine max
ggagtaactaaacattgatcaaacctcaaaaaccttcttctattagatcattataagaccaagaagaagcaagagggtgtgaaaagcaaagtagagtagctagagagaatagaaatgactcaagtgatgagaggagaggtgattgagaaggcttatgctgggtcttggaaggctcacaagtccccagacaagccttaccttattgaaaagatcaacagaaacgaccctcaagaagttatcttttgttttccaggatcaggtgctgtcagggattggtactctcagaaaaactttggtgaaacaaaaatagatcttggtctgtttccctcactcagaagcattggtatcgatgaacaagcttttgtgaatgaggcctttcagaaaaaattccaagaaattttgtctgccaaaccatcacttgcggatgaggtggagaaagcaatgagtaaaaagaagcaaatagtgtttgcaggacactcctctggtggtgcggtggctattctggcaaccctttgggccttggaaaactaccaacctcctaaatcaca

SEQ ID NO: 10838 - DNA, 307 bp, Glycine max
ggacactcctgaagaggatgatgagaagagcggaggggtggttgagccgtcagaaatcatgaagggcagcaagatgtactacaggtacatgggatcactcactgcacctccttgcactgaagacatcatttggaccgctgataagaaggtaagaactgtttcaagggggcaagtgaagttgctcaaggatacggtacttaaatattatgccaaatggaatgcaaggccgctgcagcccctaaatcaacgagcgatacaactttacgtcccaaagacaaagaatatacccgtgtattagtttttcttg

SEQ ID NO: 10839 - DNA, 398 bp, Glycine max
ggtggctggctgtagtagtgctttgctgtccgagagtaaagagtaagcctctttctcactctctaatctatttgtgaactaggttttggttgcagagacatgggagaaaggattccgtgtgggagtggcatgtatttccccttccctcctccgccatctcccattcgcccttcttcttcttcttcagatcgcgataggtatttggccgaactactcgctgagaggcaaaagttggtaccctttctccaagttcttccacaatctaccaaactcctaacccaagaaatcagacgcatgtccgttggtggcggcggcggcggcggcggctttaatcatgagcctgcagcagacactcctcctccatattttaggcctatggatctcgagggatgggcaat

SEQ ID NO: 10840 - DNA, 494 bp, Glycine max
aattcccggttcgaccgactcgtacgtccacgcgttcgaccacgcgttctgagacgacagaaggggaggcaatagaaaggaaaaccaagtcaagttctcactttgaagagaaaataacaacgtaaagatgtctgcatcaggaggcagaggaagccaagaggaagagaagaagccttctgatcaaggagcacatattaatctcaaagtcaagggccaggatggtaatgaggttttctttaggattaaaagaagcactcagctcaagaaacttatgaatgcatactgtgatcgtcaatctgtagattttaactcaattgctttcttgtttgatggaaggagactccgagctgaacagacccctgatgagctagagatggaggatggtgatgagatagatgcaatgctgcaccaaaccggaggtggacacaagtttctttaaatgtatgatgatcatcttcatcaaaatgcttgataaaacgcatggtattcggtgc

SEQ ID NO: 10841 - DNA, 546 bp, Glycine max
acgagctcgtgccgaattcggcacgagagatatcaacctttgctacaaaattaggagttcggaacattgctttccttggttctggaattttgctggtgaattatattgtttctgttttggcagcaatttatatgcctcaggctttcaggcgttggttactcataccggctcatacgatttttgcaataagcttgatttaccaggcatggatattagaacaagcaaattataccaaggatgcaatatcaggattctatcgattcatatggaatctgttctatgctgagtatgcaatatttcctttcatatagcaagccttgctacatttttcttgggaaaaggtgcatacgtgcatagttagagagatcttctttgttgtctcaagtatcaattagtaaactagctatcatttttttaatgagtatttttgtatataaatgtgtgatactatttgcttttactttgatgtaatgccattaacatatttcataatgttacacggacaatattttgcattaaaaaaaaaaaaaaaaggggggccccccc

SEQ ID NO: 10842 - DNA, 474 bp, Glycine max
tggtctaaatttcaacctttgccccaaaaggaggagtttggaacattgcttgccttggttctggaattttgctggtgaagtatattgtttctgttttggcagcaatttatatgcctcacgtgaatataaactttcaggcgttggttactcgtaccggctcatacaatttttgcaataagcttgatttaccagggttgttttgtatgtatcagtcatcggcgtttgtgaaggaggagatatgccgaggcaattaaaaaggccaacgacgttcattttcttgaagcggctggtcgttcttttataaagtgaattgaccgaacaaaaagatagaggaagcaaaagaacatcacctagatgaagatgctcttgataccacttgatgtagctccattggagcttgtaggccttggatcttcttccacaatgagaagtcctttgctcttgaatatcaagggcacggaatggagcaggaga

SEQ ID NO: 10843 - DNA, 1433 bp, Glycine max
aagatctatgacgacgcacgcgcgcgcgcgcgcgcgaattttgggttggcgccgacattggcgtcgttttacggaaactgggttaagcgcgtctggagtgggagtgggacacccttgaagcccaatgagtcactcgacgttttcctcttcgcgcttttcaatgagaaccagaaaacgggtcccacatcggagaggaactacggcttgttttatccaagtcagaagaaggtttatgatattcagctcacggcggaggcgccaccgtccggagttgggaagagccaggttccggtgagcggtgacgtgacgacgtcgtctaagggccagacgtggtgcgtggcgaatggcggttcttcggagaagaaactgcagaacgctcttaactacgcttgcggagagggtggggctgattgcactccaattcaaccaggtgccacgtgttacaatcctaacaccttggaggcacatgcttcctacgccttcaacagttactatcagaagaaggcacgtgcatccggcacgtgcgattttggtggcactgcttatgtcgtcactcagccccctaagtatggtaactgcgaattccccacaggatactgaatggaccacggagatggattgtttctggtgaagccttgatttggatttaactgggatttgccggagtttttaggagcttttctcttctttgttatccattcgtagcacgtgtttaggctttgagaaatatgcgttagcattactgttagtaataaatcattatgattactttggggggttattgatttctttgactcatttattttgcattactgtttctaaaactacccctctgacgtcattttgccaacttgtaaacaccctacttttagtccttattctatacttatgtaattttggtcattaaaattattttattgcacatttagttttcgaagtttttaaaattaagctattttggtccattattagtttgtcattatttttttaacatgaattattgatgtgaccttgatatgctaacgtgataaataatgcgacatgtcaatttttatccttaatgtcacatcaatacattctcaatttcatgcaagggtgataaaaaaaatcaaaattgatgaaaaatcgagctatccaactctactaccactcaataaggctgaaaccaaagacacttcacaattgggtatggtccaaaaatattaatgttcgatattgagtgttttaggctcaaaaccgactgatgatttacgtgtcatgttaacatattagtatcacgtcatcattaacatgtcatatcaataattttttctaaaaaattgacaatcggcaaacaatagatcaaaattgttaaattttaaaaatatggagattaaatgtgcaataaaaaaaatttagagaccaaaattgcacaattgtgaaattatagagac

SEQ ID NO: 10844 - DNA, 1140 bp, Glycine max
cggctcgagtttcttttcttaatttctctctattagtctgcatgctctgcaaactgagcatggctcctctcgcattttccttcttcttcatccttatctctttcttttcttcatcatctgaagcgggatcaatcggaataaactatggaagaattgcgaacgacctacctacaccggcgaaagtggtggagcttcttaagagtcaggggctgaaccgtgtgaagctctacgacaccgacgccaccgtcttaaccgcgtttgccaactcaggaatgaaggtggtggttgccatgccaaacgagcttctcgccaacgccgccgcggaacagtccttcaccgacgcgtgggtccaagccaacatctccagctactaccccgccacgcaaatcgaagccatagccgtgggaaacgaagtgttcgtggacccgaacaacacgacaaagttcctcgtacccgccatgaagaacgttcacgcttctctagtcaaatacagcctggacaaaaacattaaaatctcctcacccatcgcactctccgcgctccagaactcgttccccgcctcatccggttccttcaaaaccgaactcgtcgaaccggttatcaaacccatgctcgacctgctccgccaaaccggttcctacttaatggtgaatgcgtatccgtttttcgcttacgctgcaaactctgataaaatctctttagactacgcgctattcaaggaaaaccccggcgtggttgattccggtaatggtttaaaatacacgaacttattcgacgctcaaatcgacgccgttttcgctgccatgtcagcactcaaatacgacgacgttaagatcgcggtttcggaaacgggttggccttctgctggggactctaacgagattggagccagccccgacaatgcggcgtcgtataacggaaacttggttaaacgcgtgttgagtgggagtgggacccccttgaagcaaaatgagtcactcgatgttttcctcttcgcgcttttcaatgagaaccagaaaacgggtcccacgtcggagagaaactacgggctgttctaccccactgagaagaaggtttacgatattccgctcacggcggaggaaatcaaggaggcgccgccgtcaggagtagggaagagcc

SEQ ID NO: 10845 - DNA, 452 bp, Glycine max
  unsure (1)..(452): unsure at all n locations
ctttctgaaacagagcatggctcctctcacattctccttcttcttcatccgtatctcttacgtttcttcatcatcagttgtcaactttctgacgggctttgcagaagcgggatcaatcggaataaactatggaagaattgcgaacgacctacctacaccggcgaaagtggtggagcttcttaagagtcaggggctgaaccgtgtgaagctctacgacaccgacgccaccgtcttaaccgcgtttgccaactcaggaatgaaggtggtggttgccatgccaaacgagcttctcgccaacgccgccgcggaacagtccttcaccgacgcgtgggtccaagccaacatctncagctactaccccgtcacgcaaatcgaagccatagccgtgggaaacgacagtgttcgtggacccgaacaacacgacaaagttcctcgtacccgccatgaagaac

SEQ ID NO: 10846 - DNA, 454 bp, Glycine max
  unsure (1)..(454): unsure at all n locations
ntccgccacgcgttcgcagagcatggctcctctcacattctccttcttcttcatccttatctcttacatttcttcatcatcaggtaaaaacatctcccacttctcttctttgagtttgtatttgaatttcgtcttaccaacatgaactctagttgtaattagaaaataacacttatgaaactgcatgtaaattttgttgcttcatctcattttgcatttgaaagttgtcaactttctgacgggctttgcagaagcgggatcaatcggaataaactatggaagaattgcgaacgacctacctacaccggcgaaagtggtggagcttcttaagagtcaggggctgaaccgtgtgaagctctacgacaccgacgccaccgtcttaaccgcgtttgccaactcaggaatgaaggtggtggttgccatgccaaacgagcttctcgccaacgccggcgcg

SEQ ID NO: 10847 - DNA, 458 bp, Glycine max
ctgattgcactccaattcaaccaggtgccacgtgttacaatcctaacaccttggaggcacatgcttcttacgccttcaacagttactatcagaagaaggcacgtgcatccggcacgtgcgattttggtggcactgcttatgtcgtcactcagccccctaagtatggtaactgcgaattccccacaggatactgaatggaccacggagatggattgtttctggtgaagccttgatttggatttaactgggatttgccggagtttttaggagcttttctcttctttgttatccattcgtagcacgggtttaggctttgagaaaatatgcgttagcgttacggtttgtaataaatcattatgattactttggagggttattgatttctttgactcatttattttgtaattatctctatttatttatttttaaatgaagagaagtatagaatacatttcttt

SEQ ID NO: 10848 - DNA, 348 bp, Glycine max
tggcacgtgcatccggcacgtgctattttggtggcactgcttatgtcgtcactcagcctcccaagtatggtaactgcgaatttcccacgggatactgaaatgatggagatggagtgtttttggtgaaaccttaattgatttggatttatctggatttcgcgggagtttttaggagcttttccattggtagcacgtgtttaggctttgagaaatatgcgttagcgttactgtttgtaataaatcattatgatgattactttgtggggttattgatttccttgactcatttatttgtaattatctctattttttaatgaagaataatatagaatacatttcttttgaaaa

SEQ ID NO: 10849 - DNA, 486 bp, Glycine max
agggatgttcgcggaggatcaagccaaggactaagcaagccgaagatgagcgaactcgagaattcagaaatatgaaaaagaagagaagtaaaactgaactcgataatctcgttgaactcaggacaaattgaatacttaatttctcttctctctagaaacgtatagacgaaacaatttctatgactatttctgcttctgcttcagatgcaaccttttagtttttgcagttgccacttcatgtcttcatcccttcttctaattctccgatctccgatgtttcccttcccaagaagacctcaacaaccgatcttggaggcgcgcatcacaaccatgcttcatcgccgaagatttatttgctacttctttttcacaatttccaattgcgacttgccggaagttgcagaagaggctgaagctctcctttcacgagcaacgcgtttcaccaatccatgacctgttcttccggttgcagagaatcaaacatga

SEQ ID NO: 10850 - DNA, 429 bp, Glycine max
gtgaggagcagatgatgcgcgccatggctgtctctttggctgaagctcgagccatgtcaagtggacagagtgcttcttggcagtagtttttggttgaggtgctggtttaatctttcttaaattggtgatgcttgccttggctatttgacaagccaagtccaaggttgagaatttgagggaagttcactcgtatgcaatttgttcaaggatcaggtagtgatctcttctcacagatttatatatataagcatcaaaagaaacctaatgattctagttggtgaaaggttgctgcttaatgccattttttttacttgtgctcgatgtcctctcctgccccctcattggttttctgtaaatagtttgtctttgatagatgtactctcattcttacagtaatatatggcacattttagacacgtactgaagaag

SEQ ID NO: 10851 - DNA, 357 bp, Glycine max
gccaaaggagggtggcaattacgcatatcagcaggtaagagagcatcaaaacgaagacctagttggctatccgatgaagacaggtccttgaagcctcgtaaagaggtgtgctcaggtgtatcgtttgatcttaacgaagctgctgctgatgcagcagaggacgacaggggagatggttccctcaattcaagtgacttcacagtggaacatgaagacaactatcatgatgtaggagggtcactctcagcagtaccacgtgagctgttggattctgtggacgatgccattgtcttcaagcccttgaatttctatctccttcgccggaatttctcgtcatccatcgcaaagaggttctcc

SEQ ID NO: 10852 - DNA, 816 bp, Glycine max
  unsure (1)..(816): unsure at all n locations
cttgtggttagtgaagaatttttttatcggtatcaaatagcaacaaacaaactaattaagcaacacacacttcaatttatcagcatggcctccgttcagtgccacaaaacctgcaaagtgagctgccaacaggaaaaccagcacgcctcgtttgggcagaaagtttctgacttgttcaaagggcatcaacataatgaccacagctccaattatgccacccaaaccaaagtgctttcccagtcagggtcagggttaggccccttcaccaccaaaactcaaacacaatgcggttgcccccaaacacatctcagtaccactcatggctccaacacaaaaggccatggccatggccaagggagaattaagagggagcacaagagagggatgctgcagaacatcaaggatcgcttatcaggtgacaccagcagcgacagcgagagcgacaacgaaacttgccacaagaggaaggactgaaattgagctttgtgctaataataataattggagttcgagatcagaattcgcaactcagtctcagagaggccaatatatatatgtgtgtgtgtgtgtgtgtggggtgattgttgctgtccagtttttaaaaaaaaaccctaaaaaattatagcagagaagatgctaagtaaaagtacttactaaataaaaatcaatgtactttggttatggtgcaagtctgaggattgagacatacaaaaaacaaatgcatctactatgatataaactcgagcttcctattatatgaataaaactgtttggtttggtgttaaacccnnnnnnnnnnnnnnnnnnnnnnnnnnn

SEQ ID NO: 10853 - DNA, 1099 bp, Glycine max
  unsure (1)..(1099): unsure at all n locations
gcatttgaagatggagctctctctagtaccagaaactatacctccccgggcacaagtgcaatgcccacttgaggtcattaatctccacccaagcagggatgttgccgttcttgacttctcctacaagtttggtaacgatatggtcaatgtcaagcttcgcctacctgctgtcctaaataaatttcttcagcctataactatatctgctgaagagtttttccctcaatggagatcacttcctggaccacctttgaaacttcaagaagtggtcagaggtgttagaccccttccactgctcgaaatggcaaacttattcaatagttaccatttgacagtttgcccagggcttgatcccaatcctaacaatcttgttgtgagtacaacattttattcagaaagtacaagggcaatgctttgtttagtaagaattgaaacagatccagcagacagaacccagctgcgaatgacggttgcttcaggggacccaacactaacatttgagatgaaggagttcatcaaggaccaattagtcagcattcccgccgcagcaacccgtgtaccaacacaaccagctccgacatctccaccactggcccaaccaggcagtgctcccgcagcattgacggatcctggggcaatgctggctgctcttttatgacaatgtagaggtgttcattaattattacacatttgtaaacctgattatctatacagcctaacccatgttcctctcaagctagcgagggtgaggtggatagacaaaatcatgatgcaagggctggcggaattaagagtgagcttgtttaccagctgagtgtttgagcagggatttctgggttggtgggcatttttgagattctttctgcacaaagtgattgtcctttaaacgagattttatacatcagttgggcgagggttttcagttttctcatatttttccccttcccagtttcactggattgtttgtggtgcacctgatagcatgtaagatattgcctttgatagaaacaattgtaagtttgaaattgttactttgacgttacatacaataatagcttgtggagtaaggacatacgcatttttgctatcnnnnnnnnnn

SEQ ID NO: 10854 - DNA, 535 bp, Glycine max
taggggataataatgattcgttacttgacgggtattggggaagtgataggacggcattggctaaagataaagcttatgctaggatatctctcggtgaaattagtattcaccaggcatggcttttgggacaagatgcaacttctccttatgggctttacaatggtcacagatgtcacatgtgtttgagatctgattcgctttacaaagtgatggagcggttggctaatcctggggttaggagacttgtggctgtggaggctggcagcaagcgtgtggaagggattatttctttaagcgatgtgttcagattcttgttaggctagttgggatatattggccggcttatatgaaggaaatagctgtggttggcattggaaggaactcgtttgttctatttgcactgcttttctgagctatccccagtcttccttggtgctgttgccctcgtatactgttttaggatagaaactggagagaaaaatctgtaaattgaggatcgtttttctccgttaaacatcttaacgaaattgttttc

SEQ ID NO: 10855 - DNA, 653 bp, Glycine max
gactacatcagaattcacaacacaaaccaaacttgccattcttctcaaaaccacaaagcatggcatcaaaactactactaagcctttctctgctactcctaactctcaccctccacacgtcttgcaccaccgcacttgccaaacgaaccaacccaaacccaacaataacaacaacaacagacttcatcaagtcctcatgcaaggccacgcgctaccccgccgcgtgcgtgcaaaccctctcgggccacgccagcgcgatccgccagagcgagcagcaactcgccgtcacggctctctccgtgagcgtgtccaagacgcgctcatgcgcgtcgttcgtgaagagaatgggctccgtgaagggaatgaagcccagagagtacaacgcactgcgtgactgcgtggagaacatgaacgacagcgtggaccgtctcagccagtcggtgaaggagctcgggctcgtcatgggtaagggcaagggtaagaaggactttacgtggcatgtgagtaatgttcagacttgggttagcgctgccatcactgatcaggacacgtgtcttgatgggtttgatgggccccacgtggacgccaacttgagggcttccgttaggcccagggtcgtggatgcatctcaggtcactagtaacggccttgca

SEQ ID NO: 10856 - DNA, 609 bp, Glycine max
tatgctgaattcagtgagactggaatcaggcgaactgggacaaccatatggggagtcacctttggtactgttaagcggacattcgcacgtttggtcattttattggtttcaatgggctatggtgttgtgagacctacccttggtgggctcacgttaaaggtggttatgcttggaggaaccttctttattgcatctgaagttcttgaattggtagagaatgttggtgcagtaagtgatctttctggaaaggcaaaactgttattggttcttcctgctgcagtattggatgtgttcttcattctttggattttcacttccctctctgcaactttaactaagcttcagaccagaaggatgatgataaaattggatatttacaggaagttcactaatgctttggcagcagctgtgctcgtatctgtgggctggatatgttatgagctttatttcaaatcaaatgatgtatacaacgagcagtggcagaatgcatggatcatcccagccttttggcaagttttgtcttactctctcctgtttgttatctgcattctttgggcaccatctcaaagtgcaacacgatatgcttaccgtgatgatgggaacgatgag

SEQ ID NO: 10857 - DNA, 819 bp, Glycine max
ttatgtgtggtataccatgtttgactattagtttaacttgttagaaggagtataatgggtgaacaattggggctgctaaaagtcattgttgtgcaagggaaaaggttggtgatccgggatttcaagaccagtgatccttatgttgtgctcaagctagggaatcagactgcaaagaccaaggtaattaatagctgcttgaatcctgtttggaatgaggagctgaatttcactctgacagaacccttgggagttctgaatttggaagtgtttgataaagatcttctgaaggctgatgacaagatggggaatgctttcctgaaccttcaaccaatagtctctgcagccagattaagagacatcttaagagtgtcctctggtgagacgacattaaggaaggtcatacctgatggtgaaaactgtcttgtccgtgaaagcagtatcaactgtgtgaatggtgaggtggtgcagaatgtttggttaaggcttcgtggagttgagtctggggaactagaattgaccatcaagttggtcacccatgttgctcctgcaatatagtgcaacaattgcatgtgtcataagtgtagatctctaactaacattttatgtctagtcgagtcttgcttttgattaactcctgcatagatgtttctacccaaaaatgaaaaaaaaaagaagcttttataggtttttggtttctcagtccaggtcacttttgtttctggtcgtttttttaatttctcaatttcaaaaaaatactctttttagtcccttctgactgattttcagcagtttggattcataattatagcagatgcactg

SEQ ID NO: 10858 - DNA, 466 bp, Glycine max
gattcacaattcacaacaacacacaacatattattaagacacaccccaaaccaaaccacttcacacagaacacatatccattggtgaaggagtatcatgggtgaacaattagggctactaaaagtcatggttgtgcaagggaaaaggttggtgatccgggatttcaagaccagtgatccttatgtagtactcaaactagggaatcagactgcaaagaccaaggtaattaatagctgcttgaatcctgtttggaatgaagagctgaatttcactctgacagaaccattgggagttctgaatttggaagtgtttgataaagatcttttgaaggctgatgacaagatgggaaatgctttcttgaaccttcaaccaatagtctctgcagccagattaagagacatcttaagagtgtcctctggtgagacaacattaaggaaggtcatacctgatggtgaaaactgtcttg

SEQ ID NO: 10859 - DNA, 257 bp, Glycine max
gacttatttatatgttaatttcatttttgtcttgtttctattaacaataacattaacattatgtagcatattttaaccttgaagtgttgttaaactgtaccagactgcaaagaccaaggtaattaatagctgcttgaatcctgtttggaatgaggagctgaatttcactctgacagaacccttgggagttctgaatttggtgagctccatgatatttagtatgcccctcattctttgatttcttcagtctttcctag

SEQ ID NO: 10860 - DNA, 835 bp, Glycine max
aaatcctcagttgagatggcaaagaagcttcctcatgaaaaacgattgtgtcttttaaaatggggagaggcatcattggccctctgtggtatcgggcaggaccctcctgaagatgctgttgtttcagtttgtggtcatgttttttgtaaccagtgcatttgtgaatatcttactggtgatgacaatcagtgccctgctccaaactgcaaaactcgactaagcacgccttcagtgttttccaaagtcacactgaatagttctttttctgatcagccttgtgataatttgcctgattactctggttgtgaagtggaggaatctgagttttgttctcaggctcagccatgcgattcttcaaaaattaaggctgcacttgaggtgttgcagtcgttgtctaaaccacaatgctttgcttcccaaaacaattctgtgcagagcacttctggggaaagtactgatggccttggtagttcatctagtgctgacagaatgaaatccttgaatgaaattcccgagagtcaaaatgtgcttgaggagagaagctctaataattcagttggtgtaggggagaaagctatagtgttttctcagtggacaaggatgctagatatacttgaagcatgtcttaagaattcgtcgatccagtatagaagactggatggaacaatgtcagtcactgcaagagataaagctgttaaagattttaacactctccctgaggtttcagttatgattatgtctttaaaggctgctagtcttggtctgaatatggttgctgcctgccatgttcttatgctagatctatggtggaatcctactactgaagatcatgctt

SEQ ID NO: 10861 - DNA, 596 bp, Glycine max
catgtttgagttggagaaggtgaaaggtggctccccatatggtgcaggaacttatgcttgagccaattccaattcactaggctgtatcatagtcagaattgagaacaatcgttggtgtggaacgtgacaatggtggcgacgaacgtgaaggcagaaaccatgtctctgatggacaagcgcagcgccttggaggctgagatgaactccatcatcgcccgcctctcccagcccggcgctcctggcctctccggaaatctcgtcgactctgagggttttccccgttccgatatcgacatccccgttgttcgagccgaacgacgtcgcctggcagagctgcgcagtgaccacaacgaagtaactgagaaaattaacctaaatattcagattctccattcggcaagactcggaaataggtcattgcccttcaagaattcaggtaacgatgatggttcagatactcagatctcatcaaatatggacactgttgcatcaacaccatcacaaaatgtccttctgatacgatctcccaactcaatggatgtgaacgtgttgattagtagaccatctgcaatggtagatgagatagcagatgcatc

SEQ ID NO: 10862 - DNA, 899 bp, Glycine max
  unsure (1)..(899): unsure at all n locations
gtaataattccttgtcaacatcaaaagaggagaaaaaagaggaaaatggagtctcaagagtcaacagcatagatgcaaatgatgattcagtaagcaataatatctcaacaaatcaatcggaggaatcagcgaatgctcggaaagacgagatgcctagttctttcaggttttgggtgatattcttgtgggcattttctggagtaggtttcttggttgttatttttgtggtgtattcaggtcatagaagaagaggaacaaggttaaaacacggtagaaggagaagaagcttgcatacaggattcatggaaacgaatagccgtgaccggcatagccgtggtgtcgatgttcctctgtagacagtgctccttttcttttttaatggtgtaaagctgatggtcagaattttaagactttcatgcgaagatcacaaattgaaggttaaaaggcatggaaacttgagtgagcctgtgtgacatcatttatgcaaagcaagttattctgaccctcaaagagacttcccattttttgatattgtcaatgaacatttaatgattgagaaatttgcaaagggaaaataatcttctgttctttaatttgagattgtttgtagtattttgtacccagagaacataagatctcagcaatgtataacaagggattggattatcctgcagcataggtgagggaagttctgtatacttctctttctcatttttttaccttgtgatagcaaagacaatttctgagtgctgacatatttagtctttgatgtaacttttttttatggatcttatccctctcaacacttgctgtaaagactcacttatataataaaatcaggttatgtnnnnnnnnnnnnnnnnnnnnnnnnnnnnnnnnnnnnnnnnnnnnnnnnnnnn

SEQ ID NO: 10863 - DNA, 834 bp, Glycine max
  unsure (1)..(834): unsure at all n locations
ttcccgggttcgatcccacgtcgtctcgttccatcactttcactggaatcacaatcctgaaacaaaaacatcttagcatttaacatactactagacaacatgaccaccacattggaaagaggtttctcggaagagcaagaagctctggtggtgaagtcatggaatgtcatgaagaagaattctggagagttgggtctcaagtttttcttgaaaatatttgagattgctccatcagctcagaaattgttctcattcttgagagattcaacggttcctttggagcaaaatcccaagctcaagccccatgccgtgtctgtctttgtaatgacctgtgattcagcagttcagctgcggaaggccgggaaagtcactgtcagagaatcaaacttgaaaaaattaggtgctacccattttagaaccggcgtagcaaacgagcatttcgaggtgacaaagtttgcacttttggagaccataaaagaagctgtaccagaaatgtggtcaccggctatgaagaatgcatggggagaagcttatgatcagctggtcgatgccattaaatctgaaatgaaaccaccctcctcttagactccagtttaagcagttcctttccttccctctcaattctcaaattggtatattaataaaagtgagaaagtttaggcttgtgcttttattttgtgtgaatgtaatatactttgtgtacgtagacttggctattgggagttgctaggttgggaagtgtttcgcattcaacaattctgtagttgaaggtgattaaatgaattatagctatttgtttctttacacttnnnnnnnnnnnnnnnnnnnnnnnnn

SEQ ID NO: 10864 - DNA, 423 bp, Glycine max
agggtctcttaattggtaatatcaatttattgtgtttgggtcattgcagacctgtgattcagcagttcagctgcggaaggccgggaaagtcactgtcagagaatcaaacttgaaaaaattaggtgctacccattttagaaccggcgtagcaaacgagcatttcgaggtatataaacatcttagtatgagtataattgccaaattaaacattgtttattagcaagggtcaatttatagattgaaaatgacatttgctcataactatttatatcaattgttacattcaaaaatataattggcataaataagtgatggcaagacttgtatttatttgtgttttttaactacactttggagggtaattctctagaagcatgatgtatatagtttattgtttggttttaaagtgacaaagtttgcact

SEQ ID NO: 10865 - DNA, 460 bp, Glycine max
aaaagatgaagagaacacatattgctgcaaaagctgttgagattgccgagagacgcatattaagagacaggtggccagaatattatgacacaaagagatctcgattcgtcggaaagcaatctcgactatatcagacttggtcaatcgcaggataccttgtggcgaagctgctgcttgcagacccaagtaaagcaaacacattgatcactgaagaggattctgagcttgtgaatgccttgataagtgccaaccctagaggaaagcgagggcgcaaaaatttgaggcagacttacattgtatgagtcttcatttgcaattcatttggttcctttgggtcaaattcatttttcctctgattgttagcagcatgttattcttgctagatacggcagggatatgcaaaaatatattgtagtttgggttggttgtgatgaaacatatactagtatatatataaatg

SEQ ID NO: 10866 - DNA, 613 bp, Glycine max
cgggtcggcccaagccttcctaccggttgcaagaggccaccggaagggtataggtggaaatttaacctttccctccccaatttctgtccatgttttcatctgcggaaactcctctattctcaaaaccctaacccgacgccaccattcatccgatccaatgagttcgagaggagcgaccgcggtgctatctcgtgccagcaggattcggtcgaagctgcaaacggcgctggaagccaccgttttggaggtggacgacgtgtcgtaccagcacgcgggccacgccgccgtgaagggtagttccgacaaagaaacccacttcaacctcaacatcgtctcccccaagttcgagggccagagccttgtcaaacgacaccgtctcatctacgacctcctcgccgacgagctccagagcggcctccacgccctctctatcgtcgccaaaacgccccacgaaacaaacccttctaagtgacgcctcgggagtgtcaaagttcgaggcttttccgctctgagtgccgaaatctttggtcttcttttgtttggaacgtgtttgctctgtgaatggaaccctaatcatcttatgtggctgtgtggtccgtagaatgtgagatgt

SEQ ID NO: 10867 - DNA, 697 bp, Glycine max
ctcgcgccgtgcaaccgacaatgcacgatccgttttttgcctctaatacagttgccgctccaccttctgttcagatggctgccatgtccaaccaacagcaaactttcatgtttcaacatcaacaacaacaacaaatgatgatgcccccccaacaacaatctgtaaatccttttggaaatccttatggagccgccgctgtccatccctatggctcaggtatgcctgttcaatcatacaatccatatacaggtctcatctaggcatttcctgtggaaaacaaatccttaataagctcaaggtaaaaaagaaatggatactctgattactctaagctttcgattccgagattgggaaacattaagaaagaatagacttgtatcatacgttgggtgtgtgccatagttagctagagtgaaattctttttgaataattagcacagagggagggttttgattatatgattttttatgtacaaggtaaattgataatgagctctgattcaaaccacttagtttcatttgcccctagttgagactacttcaacgctttagcagaaaatttgttcttgatatattggactatattgttctcagttgctatttcctgtatatggtgggaactatattcattatgtgattgttatacaatttgttccatgaaaacacgtcaagtctaataaatgaaaaattttggttt

SEQ ID NO: 10868 - DNA, 523 bp, Glycine max
ctttgttctcagtgtaagataacacaaaaaaggttcatagcatcctctgcaaattaatccagttactgttgaagatcgagaatgaagcttgtggtgattgcactactagtgttgatgctggcaagctattctatggctacaaataggatgaaattggtgccaaaattggacgagagatcagaactgggtaatgaatctgatgataatgatcaccaccaaatccctcgaaagaagtatggaaaacctggatctgccaacgtgaagtggatgaggggtttcgtcacgtctacaccgttggcaatgactatggcacaccttgccagggaggaaattaaatattaaatgttattaattagtctatatattaattaatatatgcattattatagctgtatatatgtatgcatatgtcttgcatagtttgatgtgatgagtcatgaatgctagctgatgagatggtgttggtaatttggaaattcattgtaagtataattagttagactaatactttactacttcacat

SEQ ID NO: 10869 - DNA, 967 bp, Glycine max
gtgaagaagagaggttgatcctgaagaggatttggttgacggtgctgcaaagtccttgactgatttgaatgtgaatgagcatggtgaaaatgttgatatggaggaagatgatgattttgaggagttagacccctcttgttgctttatgtgtgatcaagagcacaaaacaatagaagactgcatggttcacatgcacaagcatcatggattcttcattccagatgttgagtatttgaaggatccaaaaggcctcctcacctatcttggccttaaggtcaaaagggactacatgtgtctgtactgcaatgatcgatgttatccattcagcagcttggaagcagtcaggaaacatatggaggcaaaaagtcactgtaaagtgcattatggtgatggtgatgatgacgaggaggtagaattagatgaattctatgattatagcagcagttatgtggatgatcaaggcaagcagcttgttgcatcttgtgatgcatctaacaatgtagaacttgttggtgggtctgagctcataatcaccacgaaatctggtgaaagagcatcaaccaaaacactaggttcccgtgaatttttgcgttattatcgtcagaaacctcggccatcactagcaaatatggctatcactgctgcattggcttcaaggtacaggagcctgggcttgaccactatccaatcaagggagaagattgtgaggatgaaagtgctgaaggaaatgaataggtcaggtgtggacaatatgcgtaccaagatggcgatgaagagtaatgtcatcaggaacctgccaaataatgtaccatattagtcctcactggtaatagttttacatgagtggtgctgtgtattagttttttctataaggtttcctcatgaaataatttttcatttcttgatctcatgaatcatccacaaggtatccatcaaaggtagtagagtgacatgatatacgtgatat

SEQ ID NO: 10870 - DNA, 535 bp, Glycine max
actcttctctctctttctttaatttgaaaatctttgatcaactctagacgcgcattcttcatttattacagtctgttgtgaaacccactagaaccaaccccccctctctctctggtttcattaattttcttcttctgtgatgcccttttgatcaatccatcattccagggcagccagtagttgcttttactagcatggcatcaagcaatctattctttgatgatatacggagcaaagtcgatgttgatcctcctcaaaatgaagagtcaacagatgttggtgaattattaaatgatcctgcccaaactgctcttaaacctaatgggactgtttcaagcagtgttcgtgagcttttagagtgccctgtatgcctgaatgccatgtaccctccaatccatcagtgttcaaatggtcacactatatgctcaggttgcaaacccagggtccataaccggtgccctacttgtaggcacgagcttggcaatatcagatgcctggcactggagaaagtggctgcgtctttggaacttccctg

SEQ ID NO: 10871 - DNA, 445 bp, Glycine max
aaacagtgaagtaagaattctgagatctgatgtcggtggaggagaactggttgtgtcaatagaggtagatagacagcgaaacaggctgagagcagctgaggcaatggcggaggctagagttgcagccgagcgcggtgatttgtctactgcggtttcagtcctggatagctgtcacacggcattgtctgaaactgtttctgctaaagccggggatcggttatgtgttgctctttctgcagagttaaaggagatgcaagagaggatggcaaaccaacgcgtgtatgagcagtctggaagagcttatgttctgtcaggattgagttcacattcatggcaaagggcaacagcacgcggcgattccacagacagcaccagccttgtgcaagcataccaaacaccttccatggttgacatggtgacacgttcccaaactatggtttttgga

SEQ ID NO: 10872 - DNA, 344 bp, Glycine max
ctggaaacaagtacttccgccacgccactggacagttgtatgccatttcaaaagatctggctacatatatttcaaataacaagcacgttctccacaagtatgccaatgaggatgtctcactaggttcttggtttattggacttggtgtgaatcacatagatgatcgaagactctgctgtggtacaccaccagattgtgaatggaaagcacaagcaggcaacgtttgtgttgcttcatttgattggacgtgcagtggaatttgcaggtctgctgaaaggatcaaagaggttcacaagagatgtggggaaggtgagaaagcctagtagaatgcctctttctaagtg

SEQ ID NO: 10873 - DNA, 623 bp, Glycine max
ggccctcgaggccaagaattcatacctccattagccacccctttattatttcaggtgttgggtgggggtatgtacgtgtatcactgctcttactcaaatcatcaaagccgccactaacctcatacacacaatcgaaaacatggcatcttacgagggaaggccattggtgatggaaatggaaggagaagaaggtttcgaagaagccggtagcagcggttgcggatgcttccggtgtttcagcctgaagaaatggtggcaaggctatgaggaagaaggtaaagggctacttgttgatcaaaagggtgagggagagtcatgggtggtggagaagttaaggaaggcaaaggaggtttcagaagtaattgctggccccaagtggaagactttcattagaaagataagtgggtatgggaagaaggtgaagtaccaaaggaacaggtttcagtatgatgaacacagctatgctctcaacttcaactccggggctcagagtgaagatgaaggcatgcctcacagtttctcatctaggtttgctgctcctggtcgtcgccagaatgaatcatgatacatatttttcactagagacaatcccagttggatagaacctttaaacatgtatattg

SEQ ID NO: 10874 - DNA, 654 bp, Glycine max
ctgggaagattgaatgaagagtttgtggaggtttggaactaacagggccgacataacacagttctcctttctctgaatttttcgttagagaatggggaagagtagcggaagagaccgaagacgaagaagatcacatgactctgaatccgactcaccttccgattccgactccgacagacgccaccgtagcaatagtcgccggtcgcggcgggactccgatggcgacaggaagaagaagtcctcgaagtctgaatccgagtcgccttccgattccgactccgacatacgccaccgtagtagcagccgccggtcgtggcgggactccgacggcgataggaagaagtcctcgaggagcatcacagaagaggaaattacaaagtacatggccagaaaggcccaatcgaaggcaatgaaagtagcgaaaaagttgaaaaccagtacggtatcgggctattccaacgattcgaatccgtttggtgactctaatctcaacgagaaataagtagtggtcgctcatatgccagatctatatagattataaacctacacaaatgttatttataggtttgtctggcgcaagaagattgagcgcgatgtttcacaaggtgtgtctattgatgcgttttcaatgaaggcagagaaaaagaaacagag

SEQ ID NO: 10875 - DNA, 384 bp, Glycine max
  unsure (1)..(384): unsure at all n locations
nagggggggaaaacagagtactaaacggaatttgaaaaccaaggctcaagttttaataagagacatggagctctctgtggttgcaagaaacatggaagaagttgtgttgctggttgatgatttgagatcactttctgggatttctcgctgtagaatatgtcatgaagaagaatttgagagctccaaaaccttggaagctccttgtgcttgttctgggacagttaagtttgctcatagagattgcattcagacttggtgcattgagaaaggaaatacaacttgtgaaatatgtctctagcaacatgaatccggatatacagcagccttagagagatcgcaagtagctgatgcagcactgatcattagggacagcatgcaaatttc

SEQ ID NO: 10876 - DNA, 317 bp, Glycine max
cttcaatcaccattttcctcatagggggtgaagaaaaaataagtagcataataattaagccaaagtgttcatagatatggagggtcttctgcctcttgtttataaagcaatcaagagaaacaaaacacgaaggcaatacgagtgtctttcatcaggaacttctctagggtacaacatcagcatggccgagatgtaccctcaaactcaggaacatgtccttcagaaccagacacatgcccagaaagtgtttcaccaccaccataatgaaagtcacaaaattggtcacaggagatataactctgttgttcgatcaattc

SEQ ID NO: 10877 - DNA, 1343 bp, Glycine max
ttactgtaccacaccacacaaagctgttgacataacataacttcactttcaaggccaatcctctttaccttccactttttcctcctctcaaattcacatccccccccgaccctttaagtaaacaccaaaaacacacatacacactcacgcatatacataccctttgcacattcttcttcttcttcttgttctctttctctctctgaagcaagtgcagagcaattaataactcaagttttgggtcactccgtgaccgtgatgatcgtaaagttattgtcttttgagtgatgggtttgtgctcttcggtccccagaaacgctaacgaagacatgaagctcaaactctcgttcggttcaaaatctgagaagcttgtgattcctccaacatccatcaagggacaacaacaacaacaaccccaaaatgggtggtcaacggctcggtcaacgaccaccttcactgaccatggtagcaaagaggaagccttttttgattccaaggcctggttagactcagattgtgaagatgatttctatagtgtcaatggtgactttacaccatctagagggaccacaccagttcaccacacttttgggaccccttctaggaatagaattcatggctctatggctgaaacatccccagaaaagaaaaagaaattgttagagctttttcgcgaaagtgtcaaagatgaccaaggtgatgttcatggacacaaagaagtcaagccaactatacaagatgttattatgcctaaatctgcacattgcactccttatctctcagaggctaactctgcctgtagtagtgaaaggagcatgagcatgagcatgagcgaggatcgttcatccattagagagaaatcagtcaagtctttgcagtggtgcattccaagcttgtcttcatgccgaagctttcgcgagaggaggaggaagacaagtcctgcaatagaagtaaatggaaagcattgatttctctagcaatcagatgaatcaaagtttctctgatgagtttaatttatacatattatcaatgtaaagcattttttacacagatatccaataagatttgattattttatcacgtcatcgaattcataaatataatatggtgataaagtaaattgttattggatgtttgtgtaagactgttttatagggtgtatataaattaaactaaactctggttgaattaaattttggtaatatacatcaatggattctgtaaagaaccaagcagaatgaatttgaaatcttgtaaacataaacataagggatgctctaaatcgttatgtaatgagattttttctgccagtgatccaacatcttggataactgtttcttcat

SEQ ID NO: 10878 - DNA, 935 bp, Glycine max
ccagaagaagacatgtactcttgcaagcagcacgctagatggaacaaaatcttcgcaagatgcctggtgtgacaattgtttttggctaatagctcgcaagcttgttgaacacgctgagtggaccattgaacattgagagaaagctccagcaatttctgccagaactccgatgagagggggaagggcgtgtcgccgacgaaagttccgatcagatactccgccgtctccggagagtatgcgccacccctgcgcggcgttgacggcaccgaccccattcgaagaagtaagggtttttttctctcgcgatgtggtcgtagatagtgtatcaaatctaattcggtgctagattcagggtaacggcattgcgcaaaaactcacggtgagatcaaaagggaatgggtttttaaaatctcgcgagctcgtgaagagaacatagagtgtagagggagaagaaccgcttcaacaacaacaaccccaaattgggtggtcaacggctcggtcaacgaccaccttcactgaccatggtagcaaagaggaagccttttttgattccaaggcctggttagactcagattgtgaagatgatttctatagtgtcaatggtggtaagcatttccttcaactctctctccttttgtactttttttcttcttctggtagagcatttaaatttgtttacttgaccattttgttataatatagttatgacatggatgatattggttagaggtgaggctttgtggctgataatatgtgatggtaaacattgtcttaccattattgacattatttataatatgacaatttagtttgtcatggacaattggatattgtatcataatcagactttatgtaatgcaagttgatgaataaggaataactcattttagaaatcttggatatattgttttacctttcttatgtagtttctcttt

SEQ ID NO: 10879 - DNA, 1830 bp, Glycine max
ctcgagtcgcaattcacaaccttcaaacatatttataagaataacaccaatggatactccaatgaccctcacgggcttgctccgcgacgtcgccgccaaattcccttcccgccgcgccatctccgtcgccggaaaattcgacctcacccactcccgcctccatcaactggttgaatccgccgccgcccgcttagtcgccgccggaatcaaacccggcgacgtcatcgctctcaccttccccaataccgtcgagtttgttgtcttgtttctagccgtcattcgagtgcgcgccacagccgcgccgttaaacgcggcttacacagccgaagagtttgagttttacttgtccgactccgagtccaagcttcttctaacatcagcagaaggaaacaactcagctcaagccgcagcttcaaaactcaacatccttcacagcacagcttcaataacccaagccgaagacaaagaagccgagctgagcctctcattaagccactccgagtcagagtcaattaactcggttgagtcactcggaaacgatccagatgacgtggcgcttttccttcacacctccggcaccacgagccgacccaagggagtgcctttgacgcaacacaacctgttctcttccgtgaacaacattaaatcggtgtaccgactcactgagtccgactcgacggtgatcgttcttcctttattccacgtgcacggtttgatcgcggggctcctgagttcgctcggcaccggggcggcggtggcgctgccggcggcggggagattctccgcctcgtcattctggaaggacatgattaaatacagcgccacgtggtacacagcggttcccaccatacaccagatcatactggaccgccactcgaacagccccgaaccggtttacccgcgcctccggttcatccgaagctgcagcgcctcgctcgcaccggttatactcggtaaactcgaggaggctttcggtgcaccggtgttagaggcctacgcgatgacggaagcgtcgcatttgatggcttcgaaccctttgccgcaagatgggccccacaaggccgggtcggttgggaaacccgtgggtcaagaaatggttatattggacgaaacgggtcgggttcaagatgctgaagttagtggagaggtttgcattaggggtcctaatgttacgaagggatataaaaataacgtggatgccaatacggcggcgtttttgtttggttggtttcacaccggtgatgttgggtacttggattctgatgggtatttgcatctcgtgggtcggatcaaggagctcatcaaccgaggaggagaaaagatatcaccaatagaagtggatgctgtccttctttcacacccagacattgctcaggcagttgcttttggagtgcctgatccaaagtatggggaggagatatactgtgctgtaatcccaagagaaggatcagacattgatgatgcagagttgctaagatattgcaagaagaatcttgcatctttcaaagtccccaaaaaggtcttcattaccgattctttgcccaagactgccaccggaaagattttgcgtcgtcttgtggcagaacactttgtctctcaaatttgagcaactcaagtcctacatttgaagactctatacctggccatacatagttggagtccacacaccataaatttcaacagtagtttggcaaacttggcttttaggaggagggtatttctgcaaatggtctttcatacaggatacagtatattgtagttttcaatgattcatgtgaaatgttcacagtgtaatgttttcaaggttttaaagatcttaaataatttctc

SEQ ID NO: 10880 - DNA, 548 bp, Glycine max
attaaatcggtgtaccgactcactgagtccgactcgacggtgatcgttcttcctttattggacgtgcacggcttgatcgcggggctcctgagttcgctcggcaccggggcggcggtggcgctgcctgcggcggagagattcttcgtctcgtcattctggaaggacatgattaaatacagcgcctcgtcctttccaacagttgctccgtcagattggatgatactggaccgccactcgaacagccctgaaccggtttactcgcgcctccggttgattctaagctgcagcgcgtggctcgtaccggctattctgggtgaacttgacgaggccttcggtgcgccagtgctggaggcttacgcgatgacggaagcgtcgcatttgatgggttcggaccctttgccacatgggggggcccacaagtccgggtctgttgggaaacccgtgggtcatgaaatgggcattttagacgaatcgggtctggtccaaaaggctggtatcagtggaaaagtttgcattcttagattcaatgttacgaatggatataaaaa

SEQ ID NO: 10881 - DNA, 685 bp, Glycine max
ggaagctgttgggaaaaggttggctgcgatatctcagacatttaacatccgagttgagttccacggcgtgcctgttttagctccagatgtgacaaaagacgtgcttgatgttaggcctggggaggctttggctgtgaacttccctttgcaactccatcatacagctgatgaaagtgctgatatgagtaatccaagggatggacttttgagattggtgaaatcactttctcccaaggtaactacattggttgagcaagagtcaaacacaaataccactcctttcttcaacaggtttatagaaaccttggattactacttggcaatgtttgagtccattgatgtgtctcttgcgagaaagagcaaggtgcagattaatatggagcaacattgtttggctcgggatattgtcaacattattgcttgtgaagggaaggaaagggtagagagacatgagctgctacgcaagtggaagtctaggttaacaatggctggctttcgtcaatatcctttgagttcttatatgaattctgtcataagaagcctgctgaggtgctattcaaaacattataatcttgtggagaaggatggggccatgctactggcatggaaggacagaaatttgatttcaacttcagcttggtatcgattacatgcagataggaaataatgcagtggtagaaatatg

SEQ ID NO: 10882 - DNA, 526 bp, Glycine max
taggggaaactgaactgtgtaagaagagaaagaggacgcagcaaggccgaagcagagtttcaattcaattcaatagcgatttagagtttccgaaaagaaattgatttcacgcatttttagtcagtatcagatggatcactttgcagcacatgaagagcaacttgcttcacagagaatgaggcagaaacttgaagaagtaaatgtggctgctcaaactaatcttgcccctgtccaagactatgtcaattatacactccagaaagcatattttaagtgtgcatatgagtgctttgatagaagcaaaaggcaggaagaaataagcagttgtgtcgaaaattgcagcattcctctttctaatgtgcaacatacatttgatcatgagatggcacagtttcaggagaggttgaatagatctctgatggtgtgtcaagataagtacgaggcggctaggctacagaagaaaaatgatgctatgaatgatttggtttcctgtgctgaccagtcaatccaggaaagcatcaagacg

SEQ ID NO: 10883 - DNA, 1554 bp, Glycine max
gtttgctgataatcagaccattaatatcagaccctatttaaaagatggaggttcaagcaagaagtgggccattataggtggcgtcgtaggaggtgttgttctcctccttgtgttgtttgcctggagattgtttacaaaaccaaagagggctcccaaagctgacatattgggagcaactgagttgagaggtccggttagcttcaagtatacagatttgaaagctgcaacaaaaaatttcagtgctgataataaacttggagaaggaggttttggtgctgtatacaagggtactctgaaaaatggaaaagttgttgctgtgaagaaactaatgttggggaaatcaagcaagatggaggatgattttgaaagtgaagtgaagcttataagtaatgttcatcatcggaatctcgttagacttcttggttgttgcagcagaggccccgagagaatcctagtttatgaatatatggcaaatagcagccttgacaaattcttatttggttccaaaaaaggttccctcaattggaaacaacgttatgatataattttgggcacagcaaggggactagcatatctacatgaggagttccatgtgtccatcattcatagagatataaagaccggtaatatcctcctagatgatgatctccagcccaaaattgctgattttgggttggcaaggcttttgccaagggatcgttctcatctcagcacaaaatttgctggaacattgggatacacagcacctgagtatgcaatgcaaggtcaattatcagagaaggccgatacctacagttatggtattgtgctcctagaaatcttaagtggtcaacacagtaccaatgtgaatattgatgaccagggtcgcgagtaccttcttcaacgggcatggaaactgtatgagagaggcatgcagttggagcttgtggacaaggacatagaccccaatgaatatgatgcagaagaagcgaagaaaatcattgaaattgctttattatgcactcaagcatcagctgcagccaggccaacaatgtctgaattagtagtgctactcaaaagcaagagcttagtggagcacctgcgaccaactatgccggtgtttgttgaaacgaatatgatgaatcaggaaggtggcagctctcctggtacatctaatgctactatctccatttccgttctatcggcccgatgattattggatcaatgtggtaaagggtcttgatgaactgaatcaataagcaacagaataaaatggataaagattgcttttgattccagttgtttaattgtcaactgtttaagaatagctatgttgcaaagtagagactactgtgtggtgttgttgatttattagtagagtataaaattaaggatgttttgtcaatgtgtgatgctacatattttctactttgatagtttcctgttcaaaatcacgcaagtataagtgcatgcaatttcaaattccgtgttgtatatatgttaagctactatatgtatgtgatctgttggcacgacttgtgccttttaataaaatagttctttgaattccagatc

SEQ ID NO: 10884 - DNA, 261 bp, Glycine max
tctttatccattttattccagttgtttaattgtcaactgtttaagaatagctatgttgcaaagtagagactactgtgtggtgttgttgatttattagtagagtataagattaaggatgttttgtcaatgtgtgatgctacatattttctattttgaacaggaaactatcaaagtagaaaatatgtagcatcacacattgacaaaacatccttaattttatactttgatagtttcctgttcataatcacgcaagtataagtg

SEQ ID NO: 10885 - DNA, 296 bp, Glycine max
atattggaaattgttcaattaacttcaacctgaatttgtggtggcatggttcagagcacaacacttccattataatctattttttgcttcatcgcttccaagtcctttctcgtttatatttgagactcaagctagtggcaaaacagattatcaaaatcaaaaaatggaaggtggtttttttccaccttggaaaaacgggtcttggcaggagttaggttcagaggatgtgcaggaaagtgagcaattcaaatcttttccaccgttggctgagccaccgacaccccgtgaacctatgg

SEQ ID NO: 10886 - DNA, 539 bp, Glycine max
ggcagatgtgaatgtgagagacacccatgaatgacagaatgaaatgaactgagtaacaccaacgctgctttcttcattctttcattcattcgaatgtgttcttttgcgattgaatttgagggaacaataatcgattttcgctttctgggcacccctgaattcccctgcatcgctgtgaaagtagttcagttcgaacaacgaaaacgatgtcggctcgattgatgaagaaggttctgaacgagcagcatcaccttccgcaacacgtgagcgaagaagaagaagaagaagagaacgattctgagcccatcactcgttcctccatcaaccccttcgacctcctcaacgacaacgattctgagcccgaagaccagggagatgagttgatgtccaccaatgaaatattgacaagttatgatgacaaagaggagtcatcttcattgaaacctactgctgaggtttctacatcaaacccaaaatcgaagaagaagaaaaagaagaagaacaaggatagtgctgttgcgaataaaacgggagaagat

SEQ ID NO: 10887 - DNA, 860 bp, Glycine max
gatttaagtaaatttccttccttgcttctgtaggggaaatctagatgctggtttctctgaattttttgagagtagagacatggttctgagtgggaaagtggagactgaagtagagattcaagcacctgcagctaagttctaccacgtctttagaaagcaaattcatcatgttcctaacatgtctacagaaagagtacatggagctaaagtgcatgaaggtgactgggaaaatattggttcagtcaaacactgggactttaccatagaaggtagaaaaacaagtgctaaggagaaaattgaagctatagatgatgataacaagataatatcatacagcctctttgatggggaaatcagtgaaggttacaagagtttaaggggcacattacaagtgattaataaggaaaatggaggaattgtgaaatggaccttcgaatatgaaaagctgcaggagaatatcactgctgcatctcctgattcttttttggactttgctgctaaggtcactaaagatattgatgatcatcttgtcaaggcatagcaagaaaaaaaaagagtgtgtgattggtgatgaagtgggtttggctagagttttaatccttattatctaaataaaagcatcatttagtaaactttggaatgccggatgtgtaataatgatatatatgcttcttagtgttccttgtttgtgatagaatgcatggatatgatgtttgttcgttatattgcactactatatatatgcatgtcaactgaatgcttgtatatagctcatttgtgtagttttttgggttttgatgggtgtcctttgtaaaatatgcctgttttaaatataaatacaagaaaatgaataattgagt

SEQ ID NO: 10888 - DNA, 587 bp, Glycine max
aggacagtgagtatagtaaatattaaacaagttgagtgctagctgagttaggacagatgaggcgatctttggccctcaccgaaaaaactctgggcaattttttttcattctccgccattatgggatagaagtttgagtttcagagagcacagaaaggcccactataatgaattccgcaaagtcaaagagctgcaacaaaaggcttctctggaggatggaagtgatgaggataatcatgctgaggttgccaacggggagaagaaaaatgactcatcttctccaacgaatggtacgtgaaggagaccaacactgagaagaaaaaatgtctcttccaatcaatgcttcctacacgatcaacagataaaacccactccagtttcatcaacctttgtgtatggcggggatggaaacagcagaaggatttgctgtatttattgtgtcttttgtgtgtaaaatatcttttcttttgccacctggtatgtacgtctgaacttgcatgattcgtgaagtctcttgtaatatgccaaattagatttcttttggccagcaacaaacattctggttataagagtgatgatttcgaagat

SEQ ID NO: 10889 - DNA, 458 bp, Glycine max
atgaggatgagccagaagcaatggagcaagatgatgatgattctgaaacagataggaacttgagtggtaaagagcacagaaaggcccactatgatgaatttcttaaagtcaaagagctgcaacagacgggttctcttgaggatgaaagtgacgaggatcataattctcaacccagtaaggcggagaaatgtgagtcgtcttcactgagtcatagtgtaaaagagatggtcattgagggtaagaagtcttcaacgcctccagctaatggttcttagacagtgatcaacaaataaaatccactgtcttttcattagtttcattttgtgtattgaagaaaactaaatgattcactgtattgtatcatttgtatgtaaatagtttctttcttcatcatgcttattatgatcccgtcacactttggttgtattctggcaaattggtttatgtttcgcatcttc

SEQ ID NO: 10890 - DNA, 816 bp, Glycine max
  unsure (1)..(816): unsure at all n locations
cccacgcgtccgcccacgcgtccggtctgatcctacggagaatgacagtgttgaagggctgcggccaaatgctaggggtccaggattagtcacttttgggcctgatcgagtaatggaattttgcaacaacaatgatcttcagctgattgttcgtgcacatgaatgtgtgatggatggctttgagcgttttgcccaggggcatttgatcacacttttctctgctacaaactactgtggtacggcaaataatgctggggcaatattagttttgggtagagatctcgttgtggttcctaaattgattcatccattaccgcctgcaatttcttcaccagaaacgtcaccggatcgtcatattgaggatacatggatgcaggagttgaatgctaacagaccaccaacaccaactagaggccgtcctcaagtaacaaatgaccgaggttctcttgcttggatatagttatttattagtaagaatggccttattgtttatgccttgacggcttgtgctatcgcctgaatttccggtgttacgaatatgacatgatgccgtttacggggtattcaagttcgtgatataatacccgcagaaagcttgagggaccaagctttcatttgtcctggttctcatcactcgatcatctggcctgtagaagatccaagtccgacaagcgaagcaaagttggtagccactgctaagttggttcactttgacaaaagctagaagttgcagtatggttctcacccactgttgtaaaacagctcgtanngtacaaattcaggtcatggatgtccgtgtggctatttttctcatta

SEQ ID NO: 10891 - DNA, 510 bp, Glycine max
gaccttaaacagttgaactttgaaaggagacacaaaatctagattttgctgctccaatattaaaagctggtttggtatcccttcaaatagacagataaacgaattatttatataacttatttatataaactcgtccttgaatttttacctttataagaatacatactgatctaaaagaatgttttttctttcctaattagaggtgacaatcttattgatgaatttgcaaatgaaactcatcaaattttcacatctattttgaggacatctaccaaatagagacctaagaggtgaactcaggaggaagttctcctcgtaggaaaaatgagatcatggttagggctctctgcggttggtaacttggaaccatgtgcccagctcctcttacagtgattagtgtgagccctttgtacccaaccaagtatcctcgaacctacatattgtaagcagtatattacttacgtgttgcttgtaaattcagaatagtaaataataaagcttaattaatta

SEQ ID NO: 10892 - DNA, 336 bp, Glycine max
aaggggcgtatcaatcggagtagcagtgcaaggcatctgagtactgaggagcagcagcagacgaacaacaatgaagaaggggaagaagaagcgttgaagccgttggagatcgagaacggtcttcgcctagtcccgcgcgtgaagctcaacctcacggtgtacccttccacgcccctcacactctcccacccaatcgacgaatggaagatgaagcgcgcactcatcgacttcctccactcctcccactccctcacgctccccgaggacgacgacctccacctcacgcgcctcaaggacctcaagaaacgcaagcgcgacgaccccgtcgccgccgga

SEQ ID NO: 10893 - DNA, 617 bp, Glycine max
cattcattttttgttccttattgtcagaaccaaaatcatttctctgaccctcaatccaatcacaacaaccttatccaattgcctcgtttctaccaatacaacacaaccaactccttttatttatttctacccatttttctttttccttacattatttcatcggaaaaaacaaaagatacgatcttatgatgaggggaagaacaagacatgaagaagatgagcaatctcgagctttgtaccagctctccgcgctcgttctcaacctccttcgctcgcctctgtcgtcgttgacgttctctgacgaggttccgccgttggcggcgtcacggcgtcccgggctgggtcagatatcgccggcgggattcgcctccttgctgttgggaatatcgctggcgttgatgctttgtggatcggtgacgttcttcatcgggttcgtgttgatgccatgggttctgggattggtcatgctcttctacgtcgccggaatcctctccagcctctccgtcttcggccgctccattctctgctacgccaccgctccaccctcgccgcgtaaggacattcccgcatggaagcttatgtgaagtgaccaaatgaagaatgaaaatgagttgtac

SEQ ID NO: 10894 - DNA, 395 bp, Glycine max
gtttctaccaatagcccaacacaaccaacttttttttatttatttccaccaatcctcttcgggtggttgtgtttcattctgcgtcatcggataagcataagacaccatcttattcatatgatgaggggaagaaggagacatcaagatgagcaatctcgcgctttgtacgacctctcctctctcgttctcaacctccttcgctcgcctctgacgttctccgacgaggttccgccagcgtcacggcgtccgggccaggctcagatatccccggcgggattcgcgtcgttgctgctgggaatatccctggcgttgatgctgtgtggatctgtgacgttcttcatcgggttcgtgttgattgcctgggttctgggattggtcatgctcttctacgtcgc

SEQ ID NO: 10895 - DNA, 616 bp, Glycine max
agcaaacacggccttgttggagttgttcgcaagaaaccggagcgttgattttcttctatttctcgatcgtcttcacgaggaagaatggcaaagagttacttcaaacaagagcatgatcttgagaagagaagagctgaggctgctaggattagagagaaatacccagaccgtatcccggtgattgtggagaaggcagaaagaagtgatatcccaagtattgacaagaagaagtaccttgtccctgctgatctgacagttggacagtttgtctatgttatccgcaaaaggattaaattaagtgcagaaaaggcaatctttatatttgtggacaacgtccttcctcctacaggagcaattatgtctgccatatatgatgagaagaaggacgaggatgggtttctctatgttacatacagtggcgagaacacctttggggatctgatttccattcagtagccattataaattcacaccgtttgaccttgtggtctcattggtctgtctgataaatttgttatagtactcatgtcaagaaccttactctcgatgttttgtacagttgtatataaattccgtgaacttgatcaatattaaaagttctctcattcagtctttc

SEQ ID NO: 10896 - DNA, 634 bp, Glycine max
ctcgagccgttgaagtaatccacccacgggtttcttggagttgtgatcaactacgttacttctctcttggttttctcgatcgtcttcacgaggaagaatggcaaagagttacttcaaacaagagcatgatcttgagaagagaagagctgaggctgctaggattagggagaaatacccagaccgtatcccggtgattgtggagaaggcagaaagaagtgatatcccaagtattgacaagaagaagtaccttgtccctgctgatctgacagttggacagtttgtctatgttatccgcaaaaggattaaattaagtgcagaaaaggcaatctttatctttgtggacaacgtccttccacctacaggagcaattatgtcttccatatatgatgagaagaaggatgaagatgggtttctttatgttacttacagtggagagaacacttttggggatctgacttcccattagcattattttaaagattggcactataatataattgctttctcattggccagtctcataaatttgtatcggtactcgatatcaaagaacattgctctcaatacaatgtacaggttgtatataaactctaagaagaacctgtataatgttaagagagcaatgttctttgat

SEQ ID NO: 10897 - DNA, 425 bp, Glycine max
accacgcgttcggagttgtgatcaactacgttacttctctcttggttttcttcatcggccaccttcacctggtttacttccttcgataatgaactttgtcaaaatcaaactttgatgttcttgcttgtcttaattacgttctctgtcgtttgacgaatagtattacactattgtctgggaatgctgttcctttcctcttttctgaattccgcttctctgaaaagaagtttatcataaacacgcgtggtcgaagatgatcatcccatttattagggtactctttctcactctacatattagatctcgatttccgatggttattccccatccgcttctagtttttagctaattatttgctagcttcgagttgctcaagtttaatttttgtcgttttatgtattaatccttttagataacatgattga

SEQ ID NO: 10898 - DNA, 394 bp, Glycine max
aagtaatccacccacgggtttcttggagttgtgatcaactacgttacttctgtcttggttttcttcatcttccaccttcacctggtttacttccttcgataattaactttatcaaaatcaaactttgatgttcttgcttgtcttaattacttctctgtcgtttgacgaatagtattacactattgtctgggaattttgttcctttcctcttttctgaattccgtttctctgaaaagaagtttatcataaacacgttggaatggcaaggaactacttctaacaagaacatgatcttgagaagagaagagctgaggctgctaggattagggagaaatacccagacaggattccggttattgtggagaaggccgaaagaagtgacatcccaagtatt

SEQ ID NO: 10899 - DNA, 362 bp, Glycine max
gtttgtagtcatgtagaatagctcccatagtctcatgctgttttgtcttatattccgtgaaattttgagattctgctttctgtcaccacaccacatttggaacctgttacttctttgcagttgaacttgtgtcgaatccaagggaaccaaattaactactaagatcagatatttgcataatcctgaaatcaaatctgttaggaagagagaatgaattaatagcttttcagctcttactattgcagccaaggaggagaaatttttgcattgttatgttatgttgttatttctttagcctgttctctcacttttatgtttctggatgatagatgaaggacattgggagtagataagaagccttt

SEQ ID NO: 10900 - DNA, 1122 bp, Glycine max
cctcaagtctcaatctcattccagtttccagtttcccaccgtcacttttccttaacggcgaagctatcgccgaagggcacaaccgtcattcccactccaaaccgtttcttctatcctccactctccccatcccaataacaaagagaggaatcgaagtctgttccgttctgatcagaaagggaataacggtaacggagatatggggcttctgtctaacagagtaactagagagagcctgaaaccaggggatcacatctactcttggaggactgcttacatatacgctcatcacggcatttatgtcggcgatgacaaagtcattcacttcactagacatgggcaagaagtaggaaccggtactgcactagatcttctcctcatcagttcaggaccagccaagcctcgagaaagttgcccaacttgtacagcaccccaagaggaacacggggttatctcctcatgcatgaactgcttcctagctggtggcgttctgtatcggttcgagtatgccgttacccctgccctcttccttgcgaaagcccgcggtggaacgtgtactcttgctgtctctgatgacgatgatatcgtcatccatcgagcaaaatacctgctcgaaaatggctttgggtgctataatgttttcaagaaaaactgtgaagactttgctatctattgcaaaaccgggctcctagaaatcggacaaagtggccaagcagtttccatcatagggggacctcttgctgctgctctatcctcgcccctccgtatggttactactaacgtttatggaatggcagcgacggcggttggagtctactgtgctagtaggtatatggcagacattggaatgaggcctaatgcggtgaaggtaccggttgaacagttaaccacaaggttggccactggcttgctgcaagtggttgaaccccaaattccaacgaatatttctcgtcaatctcctcagcttgttactcaatgattaagcattgtctttgtttaaaatatatttgcctaagaatgtcccgggtatgtgaatcacatgctcttcttttttcaatacgggtctgtaagagataaatttatttgaatggtgctatggatttgaataatttattttgctgt

SEQ ID NO: 10901 - DNA, 475 bp, Glycine max
gcaaaagagggatccagataaacaaattataccctaaagagttgctaaacccaagctgtgggttttgcagtttctttgggttgaagcacttccgtcttcgagttgaggcattgagcagagcaacgaagctcctcccaaaccaatgactttggtcgacggcgcttccttctgaatttcctagacccttttggcttcacgatgggtcctcgacagtgccaagtctgcaaccaaactcagtccaaatacaagtgcccttcatgttacttaccttagtaagcaataaatatcttttttttttttcctttattattggtggtggtgctattatttttattttttgaaaattgttatgttgttccttttgctttcagttgttctctggtctgtttcaagaaacacaaagaatctccatgcgtcaagccacagccttcagagaccaaagcaactgctgtttcagaatcatttgtagaaaagc

SEQ ID NO: 10902 - DNA, 1687 bp, Glycine max
tcggtgtcggcacaagccccagaatccccatcactctacaacaccttccttcaatgcctcaccaacaatacttgtcatagaattcacaaccgacaatggcgacaaaacctcgtttggcttatctctcttccacttttcttcttcttcttgttgtaactgtctttacttcggtgtcggcacaagccccagaatccccatcactctacaacaccttccttcaatgcctcaccaaatacacaaataacccctccaacatagtcttcgccaacaccaaccccaagttccccactatcctccaaaactacatccgaaacgcgcgtttcaacacctcctcgacgcgaaaaccattactcatcgtcactccccagcaagaatcacacgtccagggcacagtaatctgcgccaaaagcgttgaaattcaactcaaaatcagaagcggaggccatgattacgagggcatctcgtacatctccgaggaacccttcgtcatcctcgacatgttcaactatcgcagaatcaccgtggacgtaaaaaacgaggttgcagtggtcgaagctggagcaacacttggagaagtttattacagaatctgggagaagagtaaagttcttggctttccagcaggggtgtgtcccactgttggcgtcggtggccatttcagcggcggagggtacggcaacatgttgagaaaatatggcttatccgttgataacgtcatcgacgcgcaaattgttgatgtgaaaggaaatcttctaaacagaaaaacaatgggggaagatctgttctgggctattagaggaggtggtggagcgagttttggtgtcattttgtcgtttactattaaactcgttccggtgccggaaacggttaccgttttccgcgttgagaagactcttgaaacgaatgtcactgccactgaccttgtcgtgcagtggcagcaggtggcgccaaatactgatgatagacttttcatgaggctgctgttgcagcctgtgagttccaaggttgtgaagggaacaagaaccgttagagcctcggttgtggctttgttcctcggaggggctaatgaggttgtgtcgattttggctaaacaatttccgcttcttgggttaaagaaggagaattgcactgaggtgagttggattgactctgttctgtggtggaacgatgacaatagtttgaagaatggtgacaaacctgaaaccttattggatcggaatttaaacaatgcaggttttctcaaaagagaatcggattacgtccagaatgctatttccagagatgggttggagtggctatttaaaaggatgattgagttgggaaaaacggggcttgttttcaatccttatggagggaaaatggctgagattccttctgatgcgacgccgtttccgcaccgtaaagggaacttgtataagatccagtactctgtgaactgggatgatccttcacccggtgctgctctgaatttcacgaaccaggctaagaggttgttcagttacatgaccccttttgtgtccaagaatcccagaagtgcgtttttgaattatagggatcttgatattggggttaacagctttggtgagaatagctttcaggaagggttggtttatgggaccaaatacttcaatgataattttcagaggcttgtgaagattaagaccacggttgatcctgaaaacttttt

SEQ ID NO: 10903 - DNA, 494 bp, Glycine max
agacagaccatggcaacaaaacctcgtttggcttatctccctgccatttttgttcttcttctagttgtcttcacttctgtgacggcacaatccccagggccagaatcttcatcactccacgacaccttccttcaatgcctcaccaaatacacaacaaactcctcatctcaactctccaacatagtcttcgctaacaccaaccccaagttccccactgtcctccaaaactacatccgaaacgcgcgtttcaacacctcctccaccccaaagccttcactcatcgtcactccccagaaagaatcacacgtccaagccactgtaatctgcgccaaaagcgttaacattcaactcaaaatcagaagcggaggtcatgactacgagggcatctcgtacatctccgacgaacccttcatcatcctcgacatgttcaactttcgcagaataacggtggacataaaaaacgaggttgcagtggtccaagctggagcaacact

SEQ ID NO: 10904 - DNA, 2142 bp, Glycine max
tattttctcattcgtcgtcgacatcgtaaattaccattatagtccgttcgtgcttcctctgttcttcttctttttgttgtgttgttctgttctctttctctctcttcttgcatcaccgccatgttcttcgaatcccgatccctcctcttcccgctccttttctctctcttccttgcttccgccttcgcttcagactcagatcacaagtatcaacacgatgaaccagttaacctttgggtgaacaaagttggtccttataacaatccacaagaaacatacaactattacagcctcccattttgtcatccatctagtagtgctagtgctgcacacaaatggggtggtcttggtgaggtcctgggtggcaatgagctcatcgatagccaacttgaaattaagttccaaagaaatgtggataagactgtcttttgccagatagatctcgatgaagcaaaggtgaaacagttcaaggatgcaatagagaataattactggtttgaattcttcatggatgatctacctttgtggggatatgttggtgagttacatcctgataagaacagtgataatggcaagcatgtcatttacacacacaaaaacattattgttaaatacaacaatgatcagattattcatgttaatctcactcaggatatcccaaagcctttggaagtaggaaaacatttggacatgacatattctgtcaaatgggattctaccaatgtcactttcgggcgtcgctttgatgtctacctggatcatcctttctttgagcatcagattcattggttctccatttttaactctttcatgatggtcatcttccttactggattggtgtcaatgatattgatgcgaactctgagaaatgactatgcaaagtatgctcgggaagatgatgatttggaaagtctggagagagatgttagtgaagaatctggctggaaacttgtgcatggtgatgtttttcgaccgcctcgcaacttagttattctttcagctgttgttggcacaggtgctcagcttgcgttgctggttcttcttgtcgtcttgttggctattgttgggatgttgtatgttgggcgaggagccatagtcacaaccttcattgtttgctatgctctcacatctttcatttctggttatgtgagtggggggatgtactcacgtaatgggggtaaaaattggattaaatccatgatccttacagcatcactgttcccattcatgtgctttggaattggttttattttaaacacaattgctatattctatggatctctagctgcaatcccctttggtactatggttgttgtctttgttatatgggcttttatctctttccctctagcacttcttggcacagttgttggaagaaactggagtggtgctctgaataatccctgtcgcgtaaagactattcctcgtcccattcctgaaaagaagtggtaccttacaccctctgtggtttctctgatgggaggactgctaccctttggcagcatattcattgaaatgtattttgtattcacttccttctggaattacaaggtgtactatgtgtatggctttatgctgctagtctttgtgattcttatcatcgttaccatttgtgtgacaattgtggggacatactttttgttaaatgctgagaactaccactggcaatggacttctttcttttcagctgcctcaacagctgtttacgtgtatttgtactcagtatactactactatgtgaagacgaagatgtcaggcttcttccaaaccagcttctattttggatacactttgatgttttgtcttggactgggaattctgtgtggagctgtgggttatcttggttcgaatttgtttgtgaggaggatctacagaaacatcaagtgtgactaaggcttttgtaggagtctgagaccagagcacttccatatgtttgttgctggagacaataaatttcttagaggaagcctctggtcatgtgtggggaacctaacaatgtttacaggtagtaagaatccacagggttttgagaatgaggatgtattatttttctatattggggaagccctgagattttttttccccggctgtaattgcccgtctttataattttagataaaaaattcataatacaactcttgt

SEQ ID NO: 10905 - DNA, 534 bp, Glycine max
gctgtgggttatcttggttcgaatttgtttgtgaggaggatctacagaaacatcgggtgtgactaaggcttttgtaggagtctgagaccagagcacttccatatgtttgttgctggagacaataaatttcttagaggaagcctctggtcatgtgtggggaccaaacaatgtttacaggtagtaagtatcacagggttgaggatgaggatgtattttttctctatattagttgatgtattctttctctatactagggaggccctgagattttttccctgactgtgtttgaaagccttgatttagaatgcagggattggtctttataattagatagtcagcaaaatgtcagactcgttgctactttttcatcctttttttttataatataaataggtgccctattgacggaatgatgtctgattcccctacgcggtttagctattgtacgtaaaggggatgaagtctcggaaatgaattttgtgattctgaattttgtatcaaatctgaatatcctttctaactacttcctgcccc

SEQ ID NO: 10906 - DNA, 396 bp, Glycine max
gggcaagtcctcctcctcgtcctcgtcgtgtttctctctgttctgattcgagatctgccgccatgtccatgctcttcagattctctctcctcctccctctcttcctctctacggccttcgcttccgagtcagatcataggtatcaacaagatgacccagttaccctttgggtgaacaaagttggtccttataacaatccacaagaaacgtacaattattacagcctaccattttgccgttcacctggtaatcctgcacacaaatggggtggtcttggtgaggtcctgggtggcaatgagctcattgatagccaaccttgagataaagttcctaggaaatgtggagaagaccaccttttgccgtatagaacttgatgaagcaaaggttcaacagttc

SEQ ID NO: 10907 - DNA, 358 bp, Glycine max
aggggaacaacacatccacgaactaataatctctgtgccacctgcagacattctactcacaaaagccaactctctccaccatctgaaacatgcagcgtcaaagccacatttcggttgcaatttcactaatatgcatcctgttttgttccacattaactagtgctcttgatgaacctgagtatggttacaatgaaaaaagtgcaaatgggccccaacattggggtgatctgaaagaagaatgggcagcctgtaaaataaggcaaattcaatctcctattgatttgtccactaatggagtggaagtgatccccaagttaggggggctaaagtactggaactataagcctcaacatgctac

SEQ ID NO: 10908 - DNA, 1489 bp, Glycine max
gatactgcagatgttcagataaagcgctgggctgcagggaaagaaggcaatatgcgggcattgctatcaacatttctgcaggttctttggccagaatgtggttggcagccagtgtctctgacagatatgattacctcttcggcagttaaaaaagtgtatagaaaagcaaatttatgtattcacccagataaagtccagcagaaaggggctactcttgaacagaaatacacagcggagaaggtttttgacattcttaaggaagcttacaccaagttcaatgcggaagagctttcttagatccctctgctaatgtctttgcaaaatcgatagatctattagcacttgcacggtttcggcatcggcctgtttgcttgcctagctggtgcctcatatatttgtttttgtgtcgttgaagataactgcataaatgtttcgtggcatcgtttggcagcagattctttttccctataacgttgaacgatctacgataatgatgagcatcttgaaaggaagattctagatcctgagcacttgagcaaggtggaatcaattttcggcaatctttcataaacccattaataatatgggatcttgggcctcttccttgggtaggataagttggaggggcatacaacagtgctggcaatcatgtttctaatagatttctaaacagcttttggtacttagatcaacttggaatagcatcctgctacagcactatagtctattgcaggcagactctaattggagggaactatggccttctcaataccaccacctctgctcccaatcctgacttctacagtgcacttctgtggcatcggttaatgggaaagaaggttcttgcagtctcaagtgatgtttcttcaccctttttacgcacttatgcccattgtgcaaaggacagagcaggtgtaacgttacttctgatcaacctaagcaatcagactgatttcatactcactgttcgaaacccggtgactgcaagtgttgtagaaaatgaagtggccacaggcacccataaggaaagttcattctttgataaactcaagaagacattctcttgggttggaacaaaagggtcagaggtcacattcagggaggagtaccacctgactccaaaagatggttacctcagaagccaaaccatggtgctgaatggcattccattggagttaacagacgaaggagatcttccaccgttggatccagtgcgcaataacgtgcgatctccaatatacatgactcctttgtccattgcatttgttgtataccccaactttgatgctccagcttgtgctactcacagaaaactttagtctaaggtttctataataaaccaagtaacttaggcactaggtggaatgcaattgcaagctcatggtaattgtaagtagtgagctattgttgtcttcacaagaaagtttcaacctttgcaataatttgatattgaagaagcatgcaagttaaatcatctaattgtgagtaa

SEQ ID NO: 10909 - DNA, 510 bp, Glycine max
acgcttcaattttccatgaatctggcttccaacaacattattctcaactaagtgatttgcattacaacggaattggtcataaaagctatgttcctcaattaccaagctatgattaccctccaatgtctgaatcctcaacttataacaattcctataataacagcaaccagaacttcagctacgcttcagttctttcaacgccttcttcaagtcccacaccgttgaattcgaactcgacgtttgtcaaggggagcagcagcactgaggatgagacagaaagctatgtcagtagcaacaacttgttgagatttgaaatcccagatatgctacgtatgaatgcgttaattatatgagtactcattcatacgtagcatataattaatgtattcacatcatgaaacaattgtgtcgaacaaaaattgatttatctggggctagctagctagctagctagataattacaatggatcgattgtgttcatacttgtaacattttctaaatttttaata

SEQ ID NO: 10910 - DNA, 2077 bp, Glycine max
tgggacgcttcgcttgaccaccaggcagacgtttcagctccatggtgttctcaagaaggaccttaaaacagtcatgggtaccattattaggaacatgggctcgactcttggtgcttgtggcgacctaaacaggaatgtgcttgctcctgcagctccccttgcaagaaaagattacctctttgctcaacaaactgctgagaacattgctgcgctcctcgctcctcagtctggtttctactatgatatttgggtggatggggaaaagattttgacatcagaaccacctgaagtagttcaggcacgaaatgacaattctcatggtacaaacttcccggattcccccgagcccatctatggaactcagttcttgccaaggaaattcaaaattgctgttactgtgccaactgataactccgtggacattctcacaaatgatattggtgttgttgttgttaccgatgacgatggggagcctcaagggttcaacatatatgttggtggtggaatgggaagaactcataggttggaaaccacttttcctcgcttggccgaaccattaggttacgtaccaaaggaggatattttgtatgcagtgaaagccattgttgttacacaacgagaaaatgggagaagagatgaccgcaagtatagtagattgaaatatttgataagctcttggggaattgaaaagtttagaggcgtagttgagcaatattatggcaagaaatttgaacctttccgtgcattgccagaatgggaatttaaaagttatcttgggtggcatgaacagggcgatggcaaacttttttatggtcttcatgttgataatggtcgtattggtggaaacatgaaaaagacattgagggaggttatcgagaagtataatttgaatgtaagaatcactccaaatcagaatatcatcttgactgatgttcgtgctgcatggaagcgtcccattacaaccacgcttgctcaagctggtttgctgcaacctagatttgtagatcccctcaacataacagcaatggcatgccctgctttcccattatgtcctctggcaattactgaagctgaacgtgggatacctaacatacttaagcggattcgtgatgtttttgataaggttggcctgaagtatagtgagtctgcggttgtaaggataactggctgccctaatggttgtgctagaccatacatggctgaacttggactagttggtgatggtccaaatagctatcagatttggcttggaggaaaccataaacaaacatcattagctcgaagtttcatggacagggtgaagattctagaccttgaaaaagttttggagcctttgttttattattggaagcaaaagcgtcaatctaaagaatcatttggtgacttcacaaaccgaatgggatttgagaagcttaaagaatatattgagaaatgggagggtccagtggtagcaccatcacgccacaacctcaagctttttgctgacaaggagacatatgaatcaatggatgcattagcaaagcttcaaaacaagactgctcatcagttggccatggaagttatccgtaattatgttgcttccaaccaaaatggaaagggtgaataattccatttttacttagcgaaggaagatgtatgtgatgttgctttatggttgacaggaatggtggataggctactgaacacaactctgttgttactgtgtggtaactcgggttcgactaaactaatgtttgggtttttgtttttttatctgaaacggctttccgtagaatcttttggttcatcatttagatcgagtttctgaacataaaataagcctttctgtcatttctgtatccaattttgggtgttcgacagcttggtttttcttcacaataatcttgctagccaagacctttttccgattttgcgcttgctccaataaagttcattaatcaggatttgtaaattgcaatcatgtattagttagtggttaattacagaatatggtgtggagaacacatgtatacgtgttcacttgttcagtttttattactattatgggaaagttattcttgaaaaaaaaaaaaaaaaa

SEQ ID NO: 10911 - DNA, 511 bp, Glycine max
gatcaccacgcgtccgccaaaataaaaagacttccttttttgcaattgtcatttgtcaccaaacaattgttgttagctctcacaagcaagcttcagcaacgacaatgaagaaagtagtcttacagttggacttacatggtgatagaatcaagcaaaaagctatgaaaacagcatctggcctttcaggggttgaatcagtttctgttgatatgaaagacatgaaaatgatcgtgttgggggacattgatccagtgagtgcagtgtccaagctacgaaagtgttgtcacactgaaatagtttcagttggaccagcaaaagaggagaagaaggagaatgtggagccagcaaaagtacctgttcctctaaagctccatgaagcctatcccctttattatcagatgacaccacattatggtcaaagtcactatgtcacaagttacgaagaggatcctagtggctgtgtcatctgctaaatttcagaatattggaaagtttgataaataaataaaag

SEQ ID NO: 10912 - DNA, 636 bp, Glycine max
gacttgtcacaacttcatttccaagatgaaaaccatctcctaattaatattccaacaacccaagttacctgttgaccctcctcagccaaaaaattcttgcttagctctcacaaacaatctttaacaacaatgaagaaagtagtattaaaggtggacttaaataatgatagaatcaagaaaaaagctatgaagacagcatctggcctttcaggggttgaatcgatttctgttgacgttaaggacatgaaactagtcttattgggtgagattgatccagtgagtgcagtgtcaaagctacgaaagtggtgtcacactgaactaatttcatttggaccagcaaaagaggagaaggagaaggaccccgctattcctctctacgaagcctatcccctttattatcacatgacaccaacattgtatggttcaaattactaggttagaggttttgaagagagtcttagggctgcgtgatcatctgctaaattctagaatattagaaagtttgataaaaaaaagacttcatagtcatttttgttggttttagttatatttttcattatctagttgaagaccattgtgtgcccaattaagggagtaaacatgcttcttgtatatatagacaaacgtacttggtgt

SEQ ID NO: 10913 - DNA, 564 bp, Glycine max
gagatttccagaataaaaagacttccttttttgcaattgtcatttgtcaccaaacaattgttgttagctctcacaagcaagcttcagcaacgacaatgaaggtcagaactagatgaagaaaccaatctcttttataatttcctccctttcatccactaatcaatgtttctaattgagtttaattttctcagggatagccttacactgttttgtttccactagatcttgtatttaactatttcctttcatgttttaaatgtagaagtaaatgtagaagtaattaactattgggtcttaactgctctttgatttgttgtgttacagaaagtagtcttacagttggacttacatggcgatagaatcaagcaaaaagctatgaaaacagcatctggcctttcaggtacatctttgcttttgtttcaagaagcacaattaatacatgtcatgcagcatcaaggaatcaatgatttttattaacaaaattgcttgtaattatttttgcaggggttgaatcagtttctgttgatatgaaagacatgaaaatgatgtgttgggggacattga

SEQ ID NO: 10914 - DNA, 537 bp, Glycine max
cataaaaagacttccttgtttgcaattgccatttgtcaccaaacaattgttgttagctcttacatgcatgcttcagcaacgacaatgaaggtcagaactagatgaagaaaccaatctgttttataattgcctccctttcatccactaatcaatgtttctaattgagtgtaattttctcagggatagccttacactgttttgcttccactagatctggtatttaactatatcctatcatgttgtaaatgtagaagtattcaactattggatcttaactgctctatgattagatgtgttacagaaagtagtgttacagtgggacttacatggtgatagaatcaagcacaaagctatgaagacagcatctggcctttcaggtaaataaattttttcactctagctactatatacaacttgctttaattagtttcaagaaacaaaatccatatcacaaagcgtgaatgattcatttgatttctgaacaaaattgcatttctaattattttgcaggggccgaatcgatttctgttgacgtta

SEQ ID NO: 10915 - DNA, 385 bp, Glycine max
gaccataaaatccatctcaaactcttggatcatatatttcaacctcctcagatttctttcttagcaaaccaattttcaaccacatgggtatccctcactttctcgttataccatatccagttctgggtcatgtgaatccccttatgcaattgtctgaggctctaaccaagcatggctgcaaaatcacatttctgaacacagagttcagccacaaaagagcaaacaacgctggtgctgaactagacaaccttaaggaatcaggaatcaagtttgtgacactcccagatggcttggaacctgaagatgatagaagtgaccatgagaaagtttttttgtctatccaaagcaacatgccttctttacttccaaagctcatagaagatat

SEQ ID NO: 10916 - DNA, 441 bp, Glycine max
ggatcaagaaaaatgagatctttgagctatttcatgtaaagcttcctgtatagcatttattggttaggcaattcttctatcacctaaatggtgtgtgtaacaaggtcagaagtgaccaattgatgtgaaaatcccatcattggcaatgcctttattgtgtcgtaggttttccctttttcccctccctccaaccctcacgatctgcctccaatttttttcaaagtataatttgtttgacaaattcactgaggtcaagcttaacgttaggtccccttctgatccaactctgctctcggcttgtaaatacccagttaatttttaaaaacaagtataatttttgctaattccactaacaaatcgtaaaaataaaataataaaaaaaaaaaatataatttaataaaatttatataattatgcttggcaagttttgctcttaatttt

SEQ ID NO: 10917 - DNA, 1053 bp, Glycine max
cccacgcgtccgaattaatcatggggagagatgtttcaagatcagcatttgtgtttggatttggatcattcatcatagtctcatcttcttatgcaaaggatatcaatctaagtattatttcagtgatgtcctatataagtcttgtttatctcgctgttatcttcctatatagatccttaatttgcagggggatcataaacgttgaggactcaaattatgttgtgggagaagaagatgcaatttggatgctaaaattaatcctcccttacttgaatgagttcctatcaaaactcaaagccttgttttctggagatccaggtaccacaataaagttggcagtgttgctctttgttttggccagatgtggcagctacataaccgtttggaagatggccaaatttggcttctttggagtttttactgtaccaaagatatgctcttcgtattctgcacagttaactgaatatggaaatttttggattcgtcgattccgggatgcatgggattcatgcactcacaagaaagccgtggctcttggcatcttcgggcttgtatggaatttatcatcagttgttgctcgcatttgggcagtgttcgtactatttgcagccttcagatattatcaacaacattatttggtgagagatgaatggggggaagatgaagcaggatgtgatgaaacatggcaagaccctgttggagttagaccgaaacaaggacctgcaaccaactttagtgataccaataaaataaagaaagggttctaaaagtatgtgttgatgctggcagctagttgtaccacatctaacaggctggtccaattgcatgcaccgtgccatgttttcctttaaaactttttttttttttttaggtttcacatggaagtttcttttgtctaggctgtaaatttttgttcagttaatataaaggtttaatttagtaaacaaatccaccacggttcaataggagaagggaataactttttttttaaaggaggacgtttgtgttctgtaattagcattcagttacaataatttatttttattatggttc

SEQ ID NO: 10918 - DNA, 650 bp, Glycine max
ggaatcaactttggtgtatatataaaaacaagagagagctagcagtgcaagctttcaacatccaaaacaacagagagtttttggctttagaagctgaaggaatatagttatcacaatggggagagctccatgctgtgagaaaatggggttgaagagagggccatggactccagaagaagatcaaattctcatcaattacatcaacacttatggccatgctaattggcgtgcactgcccaaactagctgggctattaaggtgtggaaagagttgtagactccggtggataaattatctgagaccggacatcaaacggggcaactttaccagagaagaagaggacactataatcagtttgcatgaaatgttgggaaacagatggtcggctattgcggcaaggttgtcagggagaacagacaacgagataaaaaacgtgtggcacacccacttgaagaagaggctgccacaaaattaccaacaaagccatcacactaaaaaacgaagcaaaaaacaaccaccaaagttggatgcggacacctcgaaatccaagcaagacgccaaactagaacaacaagaccccgttaatattcatggatcgaactctgaggacatgatgatgccactatctcctcctcactgttctatcgaca

SEQ ID NO: 10919 - DNA, 477 bp, Glycine max
gtgggcctggctgctggcctgggcacgttgtggtggtggagacttagggaggaggtggagactttggtacttgtggcccaagtcaagagtgagcaattgatggatgtggggattggtgactttgttggatggtggttgtattatctcattgtgactattggcatggtgaggatcgtgaagggtctcatttggattttcatgatttctctctgtagaagaaggccaacaacaacaacaatagaagtgggatcgattcagaacgatgacaaggtgtaattagagttgacccattttctattttccttcttttatgctgttctaattgagctacctttctccctcattttgttatttgattttctttggtcagagacgttaattacaatattttatacctttgcgaaattgtaacaaacccgcaaaacattattgaattgatggtattattgctcaacatgtcgataattagttctttac

SEQ ID NO: 10920 - DNA, 559 bp, Glycine max
ctcgaatccttcactttcactttcctctttctctcttcaaatcaaacactcataccccacgcacacgacccaacacaaaaccacacccgattctctctctctctctctctcctagtacaacttgggaacagtttcgattgtctctctctgacaccctacgatttctgcggcagcatcattccacacgcagagtcagtgtcgttcttcttctaattcatcgctcccgatgaaacgagggtaccaggaatccccttcaagctcgttaggtccacctcattccagagctagacatgatcctcaaggtggtgcacactttgttgaggatgaaagcacaaagatttttgctcggaaagtagcagatcattatagtgcgagatccaaccagactttggaagaacgggaggctagtccgataattcatttgaagaaactcaataattggattaaaagcgtcttaattcagctttatgctcgtcgaggagatgcagtactcgacctcggctgtggcaagggtggtgatcttatcaaatgggacaaggccaaaaatggatattatgtt

SEQ ID NO: 10921 - DNA, 1404 bp, Glycine max
cgatcgcgggcggccgctcgcctcgagccgaatcgctaaaacaagctaccctaactcagttcattagggcttgggttatttcgaggaaactgagtaactacgcaacggtgggtccgaccccgagtgcggcacgtgtgggaaacgacggtgacaatggttcgttgatgattcctcgtttcaacgcttaccgcgtaaacaacctcaacctgtgatcaaaagcatcatctccaaaatcccaaactcatatcataacgggatcggaggctaatctattaggcgctgttctctcgtcttctacaaaattttctgttcgatctcaaccaaggttgttccttccaccgccatgagtttcatcttcggaaagcgaaaaacacccgcagagcttctgcgggaaaataagaggatgctggacaaatcaatcagagaaattgagcgcgagcggcaaggcttgcaaacgcaagagaagaaattgattgcggagataaagaaaagtgccaaacagggccagatgggagctgttagagttatggcaaaagatcttgttagaacaaggcatcaggttgagaaattttataagctaaaatctcagctccaaggtgtatcactcagaattcagactttgaaatcaacacaagcaatgggtgaggctatgaaaggcgtgacaaaggccatggggcaaatgaataggcagatgaacttgccatcattgcagaaaatcatgcaagaatttgagagacagaatgagaagatggaattgacatctgagatgatgggagatgcaatagatgatgctttggaaggagaagaagatgaagaggaaactgaagacctagttaaccaagttcttgatgagattggcattgacattaaccaagagcttgtaaatgcaccatcatcagctgttgctgccccggctgcaaagacaaaggtaccacaagttgaaacgactgggaatgatgatggagggatagatagtgatttacaggcaaggttagacaatttaagaaagatgtaatctttcctctatgatatcagggactctagttttactgggaaaattgatgctcatttgtaccatatagcataattgagaagttgtgcgaggatttgatgaactcatggttataaaatgatggttttcttaaataaatagtgttgtgtaacatggagtatcctttgaattatttatttttgtagtaacagtgtgtaggttgtgtatctaatgtacatatcgattgatattttgatgtgcactgattctcttcgtgcataaagtaaattgttgtcaaaatgggtttttaagatgtgtgtagctgtagggatattataaaaatggaataatgtcccgtgactctgagaatatcttcaaatgacagtatatatcaacgtgggaattttaattct

SEQ ID NO: 10922 - DNA, 633 bp, Glycine max
ctcatcctcattcagcagctgataactaatcttaactcaatttttccccttaaacaattgggtaacatcaacatagattacttcttgggaattgaatttaaatatttctgtagtggctccatcctcttatgtcaaaggaaatatatttatgatctgcttgctgaatccaacaagtcaacagaaaagggaatttctacaccccatgattggaggttccaaactctcccatgtttggatcagactatgttcaggaccccagcatctacatattaattgttggagctcttcaatatgcaacaaatgttaggcaagaaataagccacagtttaggcatgccagttattatctcagcccctttacaatcattggaatatagtcaggcggattcttggatacttccaaagcatgatcaactatgggttaccttttcaacccgcttctgatctcaaatagctagccatacacccattctgtgatgctgattgtcctcagacccagatggtggaagatcaacatctggggcatgcatttaccttgaccagaatctgatctcatggtagtaaaagaagcagaccttgattgcttgctctattgcagaagccgaatatcacagcttggcaatcactacaactg

SEQ ID NO: 10923 - DNA, 577 bp, Glycine max
ctcgagccgaatcggctcgagatttgaaaagtagtatggcattagattgtgaaatgttaagcaatgtggttcctctagatagtggaactggcttgctcatgatgaaatctagtttcgtttcaatgttttttaccgacaggtttagaattttaccccaaatctatatgtgtctgtaatgccttaacgtgtttatctgctgtttatagttaaatttttatttaacctttaaggtgggtggcaaatgtttcactttcaccaaatgcctattgtatttcatgtaatgttgtccagggagctgttagagttatggcaaaagatcttgttagaacaaggcatcaggttgagaaattttataagctaaaatctcagctccaaggtgtatcactcagaattcaggtatgctattgtggtgactgtatctatttctttgtaatttgttctagcatatatggttaatgtaggataatggttcttccctaagattcatggcattttgtttttattggtatataactaactggccaacagtctcgaaacttttatcaaaacagatgtgtcttgtgatattcaagtaata

SEQ ID NO: 10924 - DNA, 447 bp, Glycine max
tctctctcctcacgactcacgaaggcaccaagtcacagacaatttcctcacccctttcccaatacttgtctctgtttctctcttaataaccacccttccatttcgaactaggatcgatgctacaggtggaatcactggtttcagcttgcgccggcggatccagcgatcggaaaatcgcctgcgagaccctgtccgacaacgtccaccccacggatccgccggagccccacccggattccccgccggagtcgttctggctctcgagagacgaggaatacgactggtgggaccgcaacgccgtttacgagcgcaaagaatccaccaaggccagtaataataattcaacaaacctaaaccctgccatcaactccaacaacaactcccagcgtttctctctcaatttcaagtccaaggcttccaccatcattggcttacctaagccgcaga

SEQ ID NO: 10925 - DNA, 458 bp, Glycine max
cggctcgagtgcagagaaacacaatcactgaaacactcaagtgagttcgatagtatatttgttgttctttttcacaaagatggtgagaaccccgtcttgtgacaaaagtggaatgaggaaaggtacttggactccagaggaagatatgaagttaattgcttatgtcactaggtcttgcaagatgtgggaaaagttgtagattgagatggatgaattatctaaggcctaatatcaaaagagggaacttcactcaacaggaagaagaatgcatcatcagaatgcacaaaaaacttggtaacagatggtctgctattgcggttgagttaccaggaagaacagataacgaaataaaaaatcattggcacaccgcactcaagaagaggtctcaacaaaacacactcataaatgaagaaaccaaagccatcaaatcaaagaataaagaatcagttcacaacaac

SEQ ID NO: 10926 - DNA, 373 bp, Glycine max
cgcttgcttaccaacagaaccaaaagagaattacacaaacactaattaacacactgagtcttaagtttctctgtttatcacaaagatggtgagaaccccatcttgtgacaaaagtggaacgaggaaaggtacttggactccggaggaagatagaaagttaattgcttatgtcactagatatggctcctggaattggcgccaacttcccaggtttgctggtctggcaagatgtggcaaaagttgtagactgagatggatgaattatctaaggccaaatgtcaaaagagggaacttcactcaacaagaagaagaatgcatcattagaatgcacaaaaaacttggtaacagatggtctgctattgcggttgagtta

SEQ ID NO: 10927 - DNA, 268 bp, Glycine max
ttgttcgcgtgggttgcagagaaacacaaacactgaaacactcaagtgagttcgatagtatatttgtttttctttttcacaaagatggtgagaaccccgtcttgtgacaaaagtggaatgaggaaaggtacttggactccagaggaagatatgaagttaattgcttatgtcactaggtatggctgctggaattggcgccaactccccaagtttgcaggtcttgcaagatgtgggaaaagttgtagattgagatggatgaattatctaa

SEQ ID NO: 10928 - DNA, 775 bp, Glycine max
gccatcccaaccccccacaaaccgcatttcatttcaaggcttaaaattgcgtgcagcttaatttcaagcaccatcatcatttatatcataatcagaatcagaatcccagtgtgatcttttgggtgtttcaatttcaaccccttgggttgatactgataacatgatgatgattcgatttccattggtggttcttgtgttgatgatttgtgccatgagatgcagaatggccaaagcagcagaacaaagtcctgattctgggaatgtgtacacgctagcttctgtgagagaggatttggttaggcaagaggataccatcatttatggtctcattgagagagccaagttccctagcaattctcacacctatgatgaaaagtatgctcaaatccagggtttttgtggctcattggtagaatttgttgttaagaatacagaggccattcaagctaaggctggaagatacaaaaaccctgaagaaaacgccttcttcccagaaaatttaccaccatcaattgtgccatcttactccttcaaacagtttttgcatcctggagctgcttcaattaacattaacaagtccatctggaaaatgtctttccaagagttacttccattgcttgctacttcgggggatgatggaaactatgcacaaactgcagctaatgatctttcattattgcaggccatctctagaaggattcactatggaaagtttgtagctgaggtgaaattcagggatgctcctcaagactacgagcctttaattcgagctaag

SEQ ID NO: 10929 - DNA, 404 bp, Glycine max
ccccactaagttttgtgtcccaatttattaaccccttctcttctttcatttcatttatgtaataaatttatatagtcccttctttataaaccacaaaatagtctctattcaaaagccatcccaaccccccacaaaccgcatttcatttcaaggcttgaaattgcgtgcagcttaatttcaagaatggccaaagcagcagaacaaagtcctgattctgggaatgtgtacacgctagcttctgtgagagaggatttggttaggcaagaggataccatcatttatggtctcattgagagagccaagttccctagcaattctcacacctatgatgaaaagtatgctcaaatccagggtttttgtggctcattggtgggaattgttgttaagaatacagaggccattca

SEQ ID NO: 10930 - DNA, 656 bp, Glycine max
ggagatcatcagattcaaaatcctcacagaagaaagaaatggaagaagttgaagaaaaactggatggtggacaagggaaaacttcagttcggcgcttcttttcaagattctgtacaccaatatttttggggtcttttattttaacattccttgctgactggggtgatcgtagccagatagcgacaattgcactggcaacccacaagaatgcaattggagtagcagttggggccactataggacacaccatctgtacctctctggctgtggtgggaggaagcatgctggcatctaagatttcccaacgctcagtagccactgttggtggcttgctcttcctcggcttttccgtatcttcatacttctacccgcctctatgatgattacaagtgcagagtaatctgattcgtaatggcttgtggcctctctgtcctgctttttctcccccctacataattgtctttattgtagatttgtgttgtacttgttccctaggaaagctcgatactaactggaacatgagattttgaatcccattctttttttgtaaaatatgttacgttctcgtctcctccacacattagcacgtagacagacactgctatttatcattacttccggaaggtaaaagtatcatcccctttacataattcgtt

SEQ ID NO: 10931 - DNA, 479 bp, Glycine max
gattgctaaacaaaagaagcatgtctaatcatcatcacgtagttcagacctcgccaccgaaactattcggtttcccactaacagagcaggaggaattgaattcagatgcagaaagaaaatacgaggttggagaggacagaaaattcagatgccactactgcaaacgagtattcggaaactctcaggccttagggggccaccaaaacgcccacaagaaagagcgtcagagggcgaggcgtttccaaatccacactcatagacgctccattgcagcaccatcttctgcttctgttctcaactcacatgcaataataagatcagtaccttcagttacagttactacgctacccttctccatttacttacgaggaggccctcctactacttcttctcttctacccatcttccatccttgtcaacccaataacactaagcacttcccatcacggcccattttgattccttctttcacctaccac

SEQ ID NO: 10932 - DNA, 681 bp, Glycine max
ctcgagccgaatgaggagaagagaagaaggctgagaacaacaacgaaaaagggtttttggttttggactctgaaagaaactcaaagtgatgcgtttcatcgttctttcgcccaaaccctaacctcgtcctcgtgcattcattccccgcgatcaggtgtgtttttatccattgcaaacagcatgaattttgcagcatcattgtgcagaagattgaatatcaaggaacttgtgacatatgttcctgtgtatagaagcaccagtggtgtttctggagaaggtttgaatttggcgttcaggcgttgggcttccaaaaagactgctggttccacaaagaatggacgggattcaaaacccaagaaccttggagtgaagaaatttggtggggagagggtgatacctggaaatatcattgttcgacagcgtggcactcgttttcatccaggaaactatgttggacttgggaaagatcattctctgtttgcattgaaagagggatgggtgaagtttgaacggaacaagttgactggtcgcaagtgggtgcatgttgagcctaaggaaggtcatgttctccaccctctgtatgcagcagatgcttctgcatctgaactaaaagttgctgtctaagtctcatctgtcatcagtatcatccatgatagaaatttttatttggtcacaaaattc

SEQ ID NO: 10933 - DNA, 347 bp, Glycine max
gcgagtgcgcgagctccctctctaccgtcgtcactacttctttaccgcttggggcgtcactctacctctgctttaccttttccatccgtttagagcaacgctcgatctttctcgttacacactcgatccctcgactcggtgctcgttgctcactttctctgttcatcacaatctctctctcactcattggttgtgtttttgtccatagaaaacatcatgaattttgcagcatcattgtgcagaagattgaatatcaaggaactcgcgacaaatgttccgtgtataaaagcaccagtgatgtttctggagaaggtttgagtttcacgttcaggcgttgggcttcaaaa

SEQ ID NO: 10934 - DNA, 561 bp, Glycine max
ggtgcaccagactaatgggttctaagagtagtaggtggtcggttacttgggtggttctttttatttgtttgctgttatgtttttctgccaaagcaatagcaacaagaaaccttgctggttatgcagatgaaaagggtccgagtaggagactccttggccgttctccatgcaagaggggaagaatgacttctgaagtggttcaaggagacaggaagcagcaaagggaggacagtccacgttgcaacaattatctgtgatttgcaggctggggttgtttgtatgtgttgcaattgcaaggatcaactacacgaattttttttaataaaatggacacatgagatgtcactgtttgttggtttagtttcatgaaatttgtgttcacagaatttctctcaagaataactttgagatatatgatccatttaaggatgggtgtgggtaatatctgatttttagaaacgggtataggaatgggtatgtacataccggccccaatatgtataagaactaaattttctttattttatgtaacatatattatttattaaaaaaaaaaacaca

SEQ ID NO: 10935 - DNA, 1122 bp, Glycine max
gttgtttgggaaataataatttggagtgggggagatgttcatgccttttgattggggttacaagcggtttttcaagagaacagctctagagacatcagactaccttaaagatgattgtctgtctgtgaattgtagtgttggtgttgtgaggtcacacacggaaggtccgaaaatctataccatagcaatacctccttctagcattggtcagaaatttggacaactgctggaaagtggtaaaggcagtgatgtaaattttgaagttaatggtgatatttttgctgcacataaattggtactagcagctcgttcacctgttttcagagcacagctttttggtcctatgaaagatcagaatacccagcgtattaaagttgaagacatggaggctccagttttcaaggcattgcttcattttatatactgggactcactaccagacatgcaagagcttactgggttgaactcaaaatgggcatcaaccttgatggctcagcatcttctagcagcagctgatcgatatggcttagagagacttaggctgatgtgtgaagcgagtctctgtgaagatgttgctattaatactgtggctacgactctagccttggcagaacagcaccattgtttccaactgaaagcagtctgtctgaaatttgttgcaaggcctgaaaatctcagagctgtgatgcaaactgatggttttgagtacttgaaggaaagttgcccatctgttttgactgagcttttggagtatgtggctagatttactgagcattcggacttcttgtgcaagcataggaatgaattgatacttgatggcagcgacgtaaatggaaggcgggtgaagcaaaggctatagtgctaaagtgcaaacactgacaagttctctgtacaaccctctactccttgttgcatttaaaaatttccgtgagagccacagatagagggagatgataagcatttataggattagtggcaatttctaattttttttagcttcatgtctaggagatgtaaatgtagtttgttttttatgctgttgcaggtctgtctggcgtaggtttctgtgataactttgctcttaaaacatttgtcttaaaaaagaaagtattgacctctgct

SEQ ID NO: 10936 - DNA, 361 bp, Glycine max
gggagaggagaagtaaaccctagagtagagaatggaaggtgagggtggggagaggaaaagaggcgcacgtttatgctgcgtgtgcaagaaatcaagagcttcggtgaagaggccgaaaaccctagagcagatatgcagggagtgcttctacgatgcttttgagtctgagatccatcaggtaattcttgagaatcagctcttcagccctggtgaacgcgtcgcaatcggcgcttctggcggaaaggattccaccgtccttgcctacgtcctctccaagctcaaccgcctccacaattacggcctccatctcttcctcctctccgtcgacgagggcatcaccggctaccgcgacgactctctg

SEQ ID NO: 10937 - DNA, 758 bp, Glycine max
tcaatttggaggctggaaatcaacctttgtcattggttatgggctaccattgcaagactttctttttgagtctccagatggcagaagatacctcaattttacttttggttgccctcttgttgagacagtggttcacaagttgctctgtaaaagttgtgctgccagagggatccaaagatcccactgttgagattccttttgaagtgaagcaacatctagagatcaagtattcataccttgatgttgtcggcagaactgtggtggttctagaaaaaagaaatgcagttcctgagcataatactcctttccaggtatactacaggtttaaccccatattcatgcttgctgagccattgatgctggtatctgcatttttcttgttttttgtggcttctgtggcatatcttcacattgatctttccatacgcaagtgatgaacacctagctagtttcttgaaaggcagtgactgagcagatccaaggttccttatttttgaaggtcatattgcattttggcaattttgtatggagttaagaggattaattgcagttatagatagacttgtttgtacattttttcccaggcaatttgatcttgtgccattcatccaactagcttaaaaccatttcttccacttaagaaaacataggatatgttcgttaaaggccatcctaaaggcacgtaatgggaagaaacttgtaagatcttgcttactaggtattagaaatatttatgtgatacttagcaatcaatatac

SEQ ID NO: 10938 - DNA, 748 bp, Glycine max
acttttctcaagatcgtttgatatggtatttggcttctttttatctcacattaaaagtctaatgaagaggttgtgtgtgttataatggaagtagtctaaatgttatgtattttgataaagaaatttgttgatgttaaaatgttgtttgtgctaggtgagggagcggtgtagaaaggagtggaccatgttccagagtcggttggcaaatgccgaaaacgcgtattacaagtccatgggaactgatacatctaattccacagctcattagggtgactaaggccaaagttgacttgtacacagatatcattactacccttacgcgtagaattttcccttgaagaaaaatatatattcctatgtaacgttacgtacatgcaatgcaatcacaatagagtcctagctggggaccaaacatcatttcaatgtagaattttgcagtactgaacagtgagtaaatcaagtgaagagaattattattgctgctaatgaaagtgcttataggaaatggaaatgctagtgtatccttaaattggaggctgacaacgaagttctttagggtttgtatgtttggattggagaaaacgaaatgtcataattatcatacccttgggaggaggagacaggactattactataatagtgttacattttcttattgttttgttcgacttgtcagatactggaataaaactttaaaagttgattttatcacaaactgtttaaataagtaggattgtctttagtgaac

SEQ ID NO: 10939 - DNA, 1582 bp, Glycine max
cacccttcatttatttcttcctattcaccagaaaaaaagcttccatttttgctcagatcttcctcttgctcctcccgttcctgttcctgtgaagaatagctcctccatatagttttatgaacatacagttgcagaagttccaacataaatggtgatcatcactcgcagttctgctggtagaaaaccaagtgaaattatgaagtttttcttgacaacttttattggtatagttttcggattctttataggagtatcaattccaacattgtcaataacaaagttgaatctcccatctggcctgcttccctccattgatctttcttacattgaagacagatatgcaggtcgccaggcttggtcttttatgaataatggtaacaaaagaagttcatcgcaagttcaattatcaagtgatacatcaaagatttgggttccctcaaatccaagaggtgcagaaagattacctcctggcattgttgaagccgagtcagacttttatttgcgtagattgtggggcaagcccagtgaggatctaacgtccaggccaaattaccttgtaaccttcactgttggctatgatcagaaaaataatattgatgcagctgtgaaaaagttctcagggaacttcactatcctgctatttcattatgatggccgaactactgaatgggatgagtttgaatggtcaaagaaggctattcatgtcagtgttcacaaacagaccaaatggtggtatgccaagcggtttctgcatcctgacattgtggcaccatatgactatatattcatatgggatgaagacctgggtgttgagcattttaatgcggaagagtacataaaactggtgaggaagcatgggttggagatttcacagcctggcttagagcctaataaagggttgacatggcaaatgacaaaaagaagaggtgatcaggaagttcacaaagtgacagaggagaaaccaggatggtgttctgaccctcatttgcctccttgtgcagcgtttgttgagattatggctccagtgttctcaagagatgcatggcgctgtgtgtggcatatgattcagaatgacttggtccacgggtggggtcttgattttgctcttagaagatgtgttgagcctgcacatgagaagattggagttgttgattctcagtggattgttcaccaaggtcttccctcactagggaatcagggtgaatctcaaacagggaaatcacggtggcagggggtgagggagcggtgtagaaaggagtggaccatgttccagagtcggttggcaaatgccgaaaacgcgtattacaagtccatgggaactgatacatctaattccacagctcattagggtgactaaggccaaagttgacttgtacacagatatcattactacccttacgcgtagaattttcccttgaagaaaaatatatattcctatgtaacgttacgtacatgcaatgcaatcacaatagagtcctagctggggaccaaacatcatttcaatgtagaattttgcagtactgaacagtgagtaaatcaagtgaagagaattattattgctgctaatgaaagtgcttatagg

SEQ ID NO: 10940 - DNA, 514 bp, Glycine max
caaaaaccaaaaccagaaacagaacaaggggtacaaaaaaatagaggagcatgaccctccatgctgtttaaactctaatagactcgatcttgtttggtagtgctatttctattgctataaacccaaaccaaagaagattccacccttcatttatgctttcgtacgtgtctctgccgctgaaaatttctttctctgctttgctcgctctataactttcgactttattttcgatcaacatcatcaaactcctcgcatttgggggtttttttttccctcagctattcaccagaaaaaaagcttccatttttgctcagatcttcctcttgctcctcccgttcctgttcctgggtttttattactttaatttgacaagcatatctgtttcttatactgaggatacttgccaattgataaacagtgaagaatagctcctccatatagttttatgaacatacagttgcagaagttccaacataaatggtgatcatcactcgcagttctgctggtagaaaac

SEQ ID NO: 10941 - DNA, 308 bp, Glycine max
ctcgagccgctttataggagtatcatttccagcattgactacaaagttgaatctcccatccagcttgcttcccgccattgatatttcttacattcaagagaaatatgcaggtggcaatgcaccgtcttttgtgaagaataataacagcatctcatcaaagcatcaattaataaatgatacattgaagatatgggttccatcaaatccaagaggtgcagaaagattacctcctgagattattgaagctgagacggacttatatttgcgtagattgtggggtcagcccagtgaggatttaacatcaaagc

SEQ ID NO: 10942 - DNA, 391 bp, Glycine max
agaagattccacccttcatttattttttcatacacgtgtctctgccgctgaaaaattctttcttttctcgctctataatcttcattgtttgttttcgatcaacatcatcaaactcctcgcacttgggctgtttttttctcagcttttcaccagaaaaagcttccatttttgctcagatcttcctcttgctcctcctgttcctgggaggatacttgccaattgataaacagtgaagaatagctcctccatatagttttatgaacatacagttacagaagttccaacataaatgggaatcatcactcgcagttctgctggtagaaaaccaagtgaaattatgaggttttttgtgacaacttttattagtatagttttaggattctttatagga

SEQ ID NO: 10943 - DNA, 634 bp, Glycine max
gattctaatcacaacaactaaccaacgtagttatggcttcctctctacacaactatgttcttgctatcttacttttggccataacccaattcaaaaccacatctgcgggctcccatcaccacctccagcacctcaaatcccttcacttctctctgtttcaacacgagaccataaacaaaaccggatacatcatagtggatggtataaaaggaggagcaggggtgactcaaaccacaaccccttttggcaccttatttgcctttcaggaccctttgactgttgcagccaacaggtcctccaaactagttgggattgcagaagggactacagtcacatctagtctcgacgggcttcggagcatttcgatcgccaagctaaccctgcgtttgaagcaccacaagggctccctttccattgttggtgtcacaaacaatgtcaaaccctctgatcttccagtggtaggaggcactgaagatttcatgtttgtgcaaggctatattagtacttctccagttgatctcaagggtcttactgttgtctacaagattgagtttcatctttactggcccccatatgcaactcaagcctcatgaactatgttgcatgggtagaatttatgtatgttgtgaatttt

SEQ ID NO: 10944 - DNA, 529 bp, Glycine max
ctttccatttcttccatcgttccgtttatatatgaaacaagtcacttatagggttgtgagattgaaggggtattattttttcatgcagaaacgagggatcatctaattaaaccagctttcatcagggtgtgggtgatttattgtaagctttttcttattatcttcgattgtgtttacacgtgtgtgttaaaggtggcgaatcctaaagagaagggaaatgaggttgatgacaataaggaattgatattattccatgaagggataatgaacaaccctacattgtcaaggctatttccgggtttgaatagggagagggagatgtctgctatggtctcagctttgacccacgtggtctccggagaggtgccaataaccggtgattcttcttcttcttcttctttggttcttcatcatcaacctcatgatgatactgttattgttacaccaaccatgccttcttcttcttcttcatctacttatgttgttggcacctcttctctcaagagaagtagggaaaatgatacatata

SEQ ID NO: 10945 - DNA, 783 bp, Glycine max
  unsure (1)..(783): unsure at all n locations
attcggcacgagcttagttatacttatcctttcctgaaccttcttgggttcttatcctttgctgaaccttgttgtgatctgacatggcagaagaacaacaacgacggatcctggtggccgtggatgaaggcgaggagagcatgtatgctctctcatggtgccttaagaaccttgcttttcaaaattccaaagacacccttcttcttctctacgtcaaaccccctcgagtcacttattcagccttcgatggcacaggatatttgttttcctctgacataacggctaccatggagaggtatagccaacaagtggccgattgcgtcttggagaaagccaagaaattgtgtaacaatattgaaaatgtagagacgagggtagagaatggcgatccaagggacgtgatttgtcagatggttcanaagttgcgtgctgatgtcttagtcatgggaagccatggttatggtctcatcaagagggctttccttggaagcgtcagcaatcactgtgcacagaacgtgaagtgcccggttttgattggtaagaagccaaaaccaaccaccggagaaacatataatgatatataataaattatcgtactagcttgttttatgtaaaaatagacaccagtttgctctgtcgctatgtgtatttgggctcctggtgtttgttgttctctctaaagaatatctcgccaaataataatgtaaaggctaaggaagaatagtgcaccgcctttgttgactttatatttgtattaaaagtccctattgtgttccttgaaga

SEQ ID NO: 10946 - DNA, 429 bp, Glycine max
ttatcctttcctgaaccttcttgtgatctcaaagcttaacgaatcaatcaaccgctgacatggcagaagaagaagaagaacgcaggatcctggtggccgtggatgaaggcgaggagagcatgtatgctctctcatggtgcctcaagaacctttcttttcaaaattccaaagacacccttattctcctatacgtcaagccccctcgagtcacttattcagccttcgatggcacaggatatttttttgcctctgacataacggctaccatggagaggtatagccaacaagttgccgattgcgtcttggagaaagccaagaggttgtgtcgagatattgaacatgtggagacgagggtagagaatggcgatacaacggatgtgatttgtcagatggttcaaaagtagggtgctgatgtcttaatcatgggaa

SEQ ID NO: 10947 - DNA, 729 bp, Glycine max
aaaaatttgacctttgccttaacgcccaaggatgcacgtgttccttccaccgcctctctttttctttctatgccggtttccgttatcataacataacttgcctcttcccccaagacccaagttttctcttttcctcataaccccctctctcccttccaaatttcaatttcctctttcctcccttaggttatggatccattggggaaacgccctgctgccgaggacgattccctaatttccgattgcgagagcggggtttccgctggagacacgccgccgccgttcgtcgaaaacgccgacctcgtccggaccagattcgttcgtggcctcgtcgcgcactgcttcaaacccgaggttctggcagttcgcagaaacgtgtgttcctccgtcatggccctggcgcgtcaacattcctttcacgtcttcgcgcgtgccggggccgaattgcccggcggcaatgccaacgtgaagttcgcctggtacggtgcgtccagtaaggaagagataaatgacatcattcagcacggtttcggtcacgctcacagtaacggcctgcgtctctctccacaagattctccacttgaaagtgtgaagagttccgttgtggacgaagacggtttgaggcacttgttgctgtgccgcgttatcttggggaagacggaggtggttccacgtggctcctaccgatgccgttcgagttctcaagagtttgattctggggtggatgat

SEQ ID NO: 10948 - DNA, 525 bp, Glycine max
tcatgccggtttccgttacctcttcccctttttctctcttttcattactaccaactcttttaatctaatttcccccaaattcttttattattttgctcataaccccaattttcaatttcctctttcttcccttacgttatggacccaccaattcaccatccacttgggaaacgccctgccgccgaggacgattccgtaatttccgattgcgagagcggggtttccgggggcgacacggcggctggctttgtgccggccgacgaaaacgccgacctcgtccggaccagattcgttcgtggcctggccgcgcacgggttgaaacccgaggttttggcggttggcagaaacgcgtgttcctccgttatggcgcaagcgcgtcaacattcctttcacgtttttgcacgtgccgtggccaaattgcgcgacggcaatgccaacgtcaagttcgcctggtacggtgcgtccagtaaggaagagataagcgacatcgttcagaatggttttttcggtcacgctcacggtaac

SEQ ID NO: 10949 - DNA, 1193 bp, Glycine max
gacagcaataataacaacaaattaacaatcagaattcgaaacagaaccatcgaataataaaaaaggaaaactaaaattccaaaaacgccactttcattcagctaagcttcgtctccaccatcatcatcatcttctttttcttctctacctttggatcctttcactttggcgtgaccgaaccattccactccctcgcaaaacggtgtcgtgccgatcgcgttcgttcggttaaactcgcgcgttcagaatcctccggaacaacgctcttcgcccaattccctataattcactcctctctctctctcgctttctctggtaacctcctcgcgacggtggctcttccgcattccgccgccgccactgccatcgccgttgccgccgccggaaaacactaatcaatagatggatgattctgcgttcaaacgaggcggtcactttaatcgaacttactcgtgctcttctcagagagatgtctgttacagctgtggcacttgtggttatgagctgaacctatcctcctcaaaccggaacactgcatccattggatctagatacgggaagtccataaagcgaggtattatatcattcttcagcattgatcttagcagatttacccaggttgatgaaattcagtgtgtgccccattttgataagcactcatggggtttgtttcgccgaagaaccaagcttctttgtcgcaaatgtggcaaccatattggaaatgcatacaatggttacacttcgtcctttcctcttgtgacagacggagctgaatcatctcctagctccaaagtggtcagtcatacaaaatacgacattcgcattcgtgccctacaaccttcatcttctgaagaatctggaatccctgtgtatgcttgaaatacctggtaaaaatagtacttcctacaccgccaaatctgatgacagggtggttagaacttagaagttcattaatatatgcagatggtttggcttgttttttgtgcttttcctaatgaaaatgtgactaatagtcgtgtgaaagagttgtaagaattaaattaaaaattattacaggtgtgggattttatgaagttgactaaactgtcaaaacttccgaggtaaaatattatattacttggaagaaaaacaaaaactaagggaaaagaaaaaataaaattatttttaaatgaattgttggattagtgtggtaa

SEQ ID NO: 10950 - DNA, 365 bp, Glycine max
atcactttggcgtgaccgaaccattccactccctcgcaaaacggtgtcgtgtcgatcgcgttcggttcggtcaaaatcgcgcgtcccgaatcctccggaacacgctctgtcccaattccctataattcacttctctctctctctcgcttaacctctcctccacggtggctcttccgcattctgccaccgcctccgccgtcgccgataatcactaatcaatagatggatgattcggcgttcaaacgagacggtcactttaactgaacttactcctgctcttctcagagagatgtccgttacagctgtggcacttgtggttatgagctgaacctgtcctcctcgaaccggaacactgcatccattgg

SEQ ID NO: 10951 - DNA, 377 bp, Glycine max
ggtaattaaagttttccaaactcaaacctaaacatttggcgttacattgattcatcattctgagtttcagacataacaagagaagttctagttcagaaagcacgcacttgtggaagtgaagttacggttttacccttcttctggtggtgccggagaggaacatgttcgtaggaagatcatcatcgacatggcgcgttgtttcggcttacgttccgttctggttctggcggcgctcgcggagtccatggtggtgccgcccttgatgcgcccgccgctcgcgctgcagcagctggttcctctcttcctccccgtcgggattatggcggcgctcatgttgcttgtgttctcgccgtcggatcagaacggggtcgtttacg

SEQ ID NO: 10952 - DNA, 471 bp, Glycine max
tacggctgccaaaaaaacaacaaaaggttacggctgcaaaaaaacaacaaaaggggaagggattaattttttcttctgtttttttttttttctgtctatgatgcatttgactgaactctgattcttttttctttttacatcaactcttggcttcttagtgtgtcacagtgacttcagtcctttctactaagggtgtgtttgacttaagagcaagcctaaattggaaaaggggattttttttttctttcattttggccattcatctctctctggggacattttgttctctctgcaactatggaaaagctaggtttaactgaatctccattccccaagctctcttcagatgagattctggaattggaaagaatatacgaagacatgggaggaaaagtgctaaatcggaagtcatgcctggagattgctaaacgttttagttcctcatcaaatggtgcttgtaaaacttcctta

SEQ ID NO: 10953 - DNA, 683 bp, Glycine max
  unsure (1)..(683): unsure at all n locations
ccaattgctgttacattgagtggtgcatattcatcatccatttgaatgaattgctgtggagacacgtctttctcaggctatggatcattggatttagtctctttgtaatttttatcatgtttgcttattgtacaaacgacagaataacgacttcgaagtagttgatgaagggcttctgataatttggggaaatcagatgtgatttttaagatagttggatcagattattgtggtttcattacacgtctcatttgattgatattaggttatgtcatgctaagcgagatgtatatggcagcactgcagctagatggatttgccgaaatatactagggacatttgaatcttgcaagccttttctggcttatctctaactgatgtcaattggggtcggatggagcggtgaaccctcatcatcaatttgaattgcactcgggtgttgctgtggaaacacatcattcattcacaggtgatggatttagtcaagtctctttgtaattttctgtaatcgtattgccttattgtaaaaactataaaatacgttttaggtgtgctctttcttgcaagtgtactcaggacccactttgaagcagttgccgaaggggttctaatatattattgaactaaatgatagggtatctaaggtgtaatgatatnnnnnnnnnnnnnnnnnnnnnnnnnnn

SEQ ID NO: 10954 - DNA, 449 bp, Glycine max
ggtgaatttaattgaaattgaaagggtgtttctagggttcgctttcgcagttgagatttgagaattgactctgagaatcgagaaaatggccggtttaccagcgaggctccgtctccaacccaccgacgtcaaagccgccgccttgtggggcgttaccgccgccactggcgctctctacctcattcagccatggggatggttgaagaagacattcttggagaagccagaacctgagcaaaaatgagttggcttctgagaagagtggtttgaatttttggatcatgccaaggatgggtaacagtcgaatattgttaatttctgctgaggtcttctcgcacctgtgctttatgttatgaatttggatactaaattttaatgttctgcgctgatcgtttttaacggagattttgctttaaatcaacttctcgcaccgtgttgaacgagcaaac

SEQ ID NO: 10955 - DNA, 510 bp, Glycine max
acgagagagtcctttggacaatttttgaaaccttttcctttactagtatggagtggacagccatttgaacaagaagaccgtaatgaagaggtgcggagaaacattcacacaccaaacaagaacggtgatgaagaaaaccatttggtggggtggccaccagttaaatcatggaggaggaaagagctccatcggcagcagtatcctgcgagaggccaaattaggaacgataggattcaagctaatgagaatcaaagtagaagaccaaactctttatatgtaaaggttaacatggaaggggtagccataggaaggaaaatcaatttgaggcttttcaattcttatcagacacttacaagcagcttgatcagcatgtttgctaaataccaaaaatttgaggaagttggagaaagttacacactcaactttcaaaacgaacaatgggaatggctgcaagtaggacatgttccatggcaatcctttataggtactgtgcggcgtttagtgatactg

SEQ ID NO: 10956 - DNA, 634 bp, Glycine max
aatagataaggctcctgaaggaacacctgctagtggtggtttacttgtaattatcgtccatgaagctgaagatgtggaaggaaaacaccacacaaatccatatgtgcgactgctatttaagggagaagagagaaaaaccaagcatgtcaagaaaaatagagatccaagatggggtgagtcgtttcaatttatgcttgaggaaccgccaaccaatgagagactatatgttgaagtgcaaagtgcctcctcaaagctaggcctgctgcatcctaaggaaagtctgggttacgtggatataaaattgtctgatgttgttaccaacaaaagaatcaacgagaaatatcatctcattgactcaagaaatggacgaattcaaatcgagcttcagtggagaactccttgatgatggctggtaccagttgcattgcacacacaaatttccagcgtacataattgtgtaaagcaatttttcttctgataaggtttggatgaaagccttcaaacttgatttctcattattgttgataaaaacaataacgtcagtgactcaatactgtcttacgagttacgctcccatagaatgttgttcataactctattgataatttgatattcaagttctgttcctctgttt

SEQ ID NO: 10957 - DNA, 338 bp, Glycine max
tcaacgagaaatatcatctcattgactcaagaaatggacgaattcaaattgtgcttcagtggagaactccttgatgatggctggtatcagttgcattgcacgcacaaattcccagcgtacataattctttaaagcactttttcttctgataaggtttggatgaaagccttgaaacttgattctctatgacacagagaaaattaggagtattgttattctattgttaataaacagaataacacgtcagtgactcaatactgtcctacgagttacgctcacatagaatgttgtccataactccattgataatttgatcgatattcaagtttctgtttgtc

SEQ ID NO: 10958 - DNA, 627 bp, Glycine max
atttggatgaatcgggctttgtccgttgcacatgacatagcaattgagaggaatttgctgctttgcctccaggttgttggtgtattgtgggtaatatcttacattggtagtttgttcaactttttgactttgatctattttggtgttcttctttgcttgtctcttcctgtgttgtatgacaagtaccaggaccgagttgatgacaggctgtgtgtgattcatgggattattcagacacagtatacaaaagttcacagtactgttttaagcaagattccaaaactctcaaacaaagaaaagaaggtgcagtaggaacatgggtgcaaatggataagtgaagtctagttaggagtgtacgatgaagttcttgaggtttgaaatttctttttgctgggattctattgctctgttgattgatggttagaagatggtatgcttattcttcagaatcagggttgaccaatagctttgacctaggtgcttattctcttacgattttcttatgtaccccttggaagatgctttacatgaacttttatcaatgggtatattaccctagttaaactatatttggataagaaagattatcagagaggggaaaaatagaaaagaaaggacatggagaac

SEQ ID NO: 10959 - DNA, 448 bp, Glycine max
cgacaatgctggagtaagttcccatgtgactccagtagccttgattatggatggtaccagccttgtgcatattcttgacagtgaacttgaagaacagctatttcaacttgcaagtaggtgttctgttgttctatgttgccgtgtcgctccgctgcaaaaggctggaattattgcccttgtgaagaatagaacatctgacatgacactagccattggagatggtgctaatgatgtctcaatgattcaaatggctgatgttggagttggcatcagtggacaagaaggccggcaagctgtaatggcatctgattttgcaatggggcagtttaggtttttagttcctctcttattgatacatggtcattggaactaccaacggcttggttacatgatactgtacaatttttacagaaatgctgtccttgttcttgtcctattttggtatgtg

SEQ ID NO: 10960 - DNA, 578 bp, Glycine max
  unsure (1)..(578): unsure at all n locations
aacaacacaaattcaaattttgaggaattgatcaacgttaacctatttggtgtctttctgggaacaaagcacgccgcaagggtaatgatccctgctagaagaggaagcatagttaacactgcaagtgtttgtggaagcatangtggtgtagcatcacatgcatacacaagttccaaacacgccgtggtggggctcacaaagaacactgcggtggagcttggagcatttggtgttagggttaattgcgtgtcaccctacgtggttgccacgcccttggctaagaatttttttaagcttgatgatgaccgagttcaggggatttattcaaaccttaagggtactgatcctgtgcctaatgatgtagccgaagctgctttgtacctggcaagtgatgagtccaagtatgttagtgggcacaatcttgtggttgatggaggcttcactgtggtcaatagtgggttttgtgtgcttgggcaatcttcgtgaaaattttatgcttatctttggagaatgacctttttatattttgaataagcgaataatcattggtatgttttcacttttcactgtttgagaca

SEQ ID NO: 10961 - DNA, 241 bp, Glycine max
cccacgcgtccgggtagtgcagcatggaaccaagcagaggacactggctcgtaaagtctgggacttggcattccttagctgtgaagagaacatgtagttgttgaatgtgtttgtagctcatacttcatgtactgtaccattaggaacaatttttcagcatgagtttatttttatatagcttcaccaaagttttgtcacatacaaatacaatccaattcatgatgattttatattttgagta

SEQ ID NO: 10962 - DNA, 512 bp, Glycine max
cagatctgactgctgatttttctcagagttctgatatactggagacctattctaggtcacccttcctagctacggataatgagaacttccttgacagaggagaacaagacaacaataggctggactccatatcagaaggcttgagttatgaagactttgggagtgagtgaatagttgaataccatttagtcatcaaactttcatgttgaacaaaatgcttaaaatgttgtacataaaactttagaggttttgaaattttaactgttggatgaacatatgcattggtgtgtagaacgtgcattcacctcattcttggtgatgggaaatgaaagttggaatgcttgcatggaagggaaagacttggtgcaaataaataataatcttttttcccttgtgtgtttggccttttgtactaataagcttattctacgttgtgttgatactagaattaatataattgtgttttgttgtttgtccgagattatactgcataaaatttgttttttaggaaa

SEQ ID NO: 10963 - DNA, 796 bp, Glycine max
ggagcgagagacgaagagaagaggaaagagcgcgttatgtggcctcttgtctcgttatttgcagaaacacccgcaaagccagaacagaaatcgcatataaaatgcgaaaagaaatgaattcaatgttcggagatctgcacaggatctctctccgtcaaactttctttaccccgtcctcataacatatttcagatccgaaaaccagatcccgcgaactctgaagatctctattctctttccctcacctttccactcaaattcccctttccactttcccgagaaaattaactttttccgtcaattttccctccacctcttccttcttcctcacaatggctctgagcttcaacaatcgaagaatccctctcgctcttcgcattttccttctgttctccttattcttcagcctctcaccgaccttcgctcaggattctctcgttcagaacgcgaaggaagattccggcggatctgtggatctcggtcgccgcgccaaaattgcattgaatgacatagagaatgattcgatcctttctcttggcttggactccaccggtcctggactcttcgacgcatttttcgcgagtttttcgatgatccttgtcagtgagattggggatgagacgtttataatagcagctcttatggctatgcgtcaccctaagtcaattgtcttgtctggtgctctcagtgctctgattataatgacagtactttctacagggcttggcaggattgtgccaaatttgatttctaggaagcatacgaatagtgctgctacagttctttatgctttctt

SEQ ID NO: 10964 - DNA, 398 bp, Glycine max
gcagaggaaagatcgttttatgtgtcctcttgtctccttacttgcaaagccggaacagaaatcgcatataaaatgcgaaaagaaatgaattcaatgttcggagatctgcacaggatctctctccgtgtccgttgaactttctttacgccctcctcgtaacataaaaattcagatcccgccaactctgaagacctctattctctttccctcccctttccactttcccgagaaaaataaacttttccgtcaattttctctccacggtttccttcttcctcacaatggctccgaacttcgacaatcgaagattcgttctcgctcttcgcattttccttctcctctccttattcttcaacctctcaccgaccttcgctcaggattctctcgtgcagaacgcg

SEQ ID NO: 10965 - DNA, 605 bp, Glycine max
  unsure (1)..(605): unsure at all n locations
acctcgagcgaatcggctcgagcactccatcaccacaaccccaaacgttcttttctctctcactctgccctaactccaactcctccataaccaattccatcttcaaatattccaattccaattccaattctattcctttcgattcctcttcctcttccccccacggttaggaaattttgttgctggaagaattgcttaagggcatatagctggttttgtgcacatgggatcagagagtgtggctccaatggttgagacctcgaaaaacaggtcttcttctggtaaaatgaaccaagggaaagtccccaggaaaattcacaaggctgaaagggagaaaatgaagcgtgagcatttgaatgaacgctttgttgatcttgccagtgcacttgatctaaatgagaacaatggaaaggcttctatactgtcgtgaaactgccaggttgctgaaagacttgctcagtcagatcgagtccctcaagaaagagaatgtcactctgttgtctgaatctcattatatgaccatggaganaaatgagctgaaggaggagaattgtagcctagaaactcaaattgagaaacttcaaggtgagatacaggcaagactg

SEQ ID NO: 10966 - DNA, 1290 bp, Glycine max
  unsure (1)..(1290): unsure at all n locations
cttcagctcccgcncactagaaagtgcctttctctttccctctctcaacttccctacaattcatatatagccaagtagtgcagatcccgtgcagaagccaaataaaatccctttgtttgctcacataagatttgggtttcttcaaaattatctttttttttctctcctaaaaaaaaaagagaaaactttgtttgattctttgaaggaggtttgaagaaagcaaaaggtgtagttttgttttaagtttctttgaaatggttttcatgtctgagatattattgttccccgaaaaaaaaattgaggaaggagagtgggagaaggagagataagaagaagaggagaagaatacctacccagcaagcagaattagagaattttttttcacaaactgttgatttgattcattttcatctgcttctgctgggtggttggcaatgtctgctcctatgatcattgaccctatgatgatatcggcaccagaaactcaatcagcagcagctagcatactagttgcacaaagtgaagttgaatttgctgtatgtgactgttgtggactaacagaagagtgcaccccagcctatatagaaagaatcagagagaggtactttggaaaatgggtttgtgggttgtgtgctgaggctgttaaggatgaaattgtgaggtctgagagacttgtttgcacagaagaagcaatggctaagcacatgaacttctgcaaaaaggtcaagggcttcagggccctcctcccaaatcccacagggcactttgatattagcccatggagacagattcctttagaagggactttggaattctccttagagtaaggtcccacaccaaattagtccaaccaaggactcttcacaaaaattcatgggttctgtgccttaccaagatcctgagagctgcttcccctactctctctgaagggttgtgatgaaagggaataccttggtatttagttggataaaaatggaagcaggaagcataaataaggaccgaaaaatataagctgcaaaagtttagatgttcaattgtagttttgtccagtacaaactttcaatctgtttgttagaaaaattgaacatatttggtcaaagatttgcctccaaagaaacaagagaccataaataacaacaaataattactcagggggacccgatcccaatccccttaggagtcgattaccgcctaacggcgtggttacacgcgtgacggtaatcctgcttacccactaatgattcaaacatctcttgtcactacgtataacaaaagccgaccaagacttcc

SEQ ID NO: 10967 - DNA, 552 bp, Glycine max
gtcgacgtacgatatcggatgcaagaaagactagaggaggggcatcacctataaggatttcagatgcagataagtttacagacaaggttattattgggaaagatgatcctcatgatattgctgctgtggatagtccaagaagatgctcagatcatgaggatgatggtgggagtgatcgatctggaacagctaagaaggataaatctttcaccattgcccataggtcagattttcaggacaagggtgttaatcacatgtcagatactaaacttaaagctcaaacaaccagctattgtaccaatgggggtgtggacactatagtcctagatgggacacattcaggcacagagcagattaatcatcctggtgaagacaagattgatgtttattatgctactacatctgaagcaaggaaaaatggcatagaatcaggtttggaggacaacaatgtcaatgacagctgtaagtcagagtcccatgcagataaagtcaagagtactagttctccatgtcaactgaaagaccagtctcctctacatgaggcaaaacata

SEQ ID NO: 10968 - DNA, 465 bp, Glycine max
cgaaaaaacacaaaagggggacgctatgagaagagaagtgttcccttagaagaatagtgtaaaatggcatcactcaaagctgagaaacctgttgaaaaatcttgttgctctcaaccatctgcaggacaggtgaagaaagagtcttctgccaaacctagttcaggcacttccaaagccccggtctcgaaaccaaccccaaagaaaattccaagccagactaggaagaaggcaagcagcaataaataagctgaagatgcaagagtaaaaagtacgaaagactaaaaaataatagttgttgcacttggaattatgggaagagtcctaaggatactgttatatggtgctcttcaaccatgtttataagtagtgctattaatgtctgtaccacttgcttatgttattttctcgtcatgtaactccaagatgccttggcctaataaataaaagatacttattctatgaaaa

SEQ ID NO: 10969 - DNA, 442 bp, Glycine max
ccaggtcgactcacgcatccgaagacgacagaatggggagaagggcagagaataaaattattagagtaatcatatgatgtaaggtgctggctaggcccgcttcctcagtgtttgatgcctctgctggcaggttaattgtactcttcaagtctgagaaagtagattctatactattcctgtctcactttcgccatgggaatatcatttttgcttttttcttatgtccaaggatgaatttatatgaatgaatttcactttacatcttcctttctccatgattcttctcagtttaatttgttggtgaaatttgtatcattttttgtacatatttttatatcatcatgtttcatgcccctcgtcttcagttcaacactactcaaatgaatcacatgattacgatcgattcaacacaacacacacgcacactccttccattttaatg

SEQ ID NO: 10970 - DNA, 1424 bp, Glycine max
ctcttttggtctttcctctttcgttctctctctttcactcgcttcttcgagtttcacagccaagtcgtaaaagggtttcaagggatggaaaacatgcagagcttctggcaattgggtgatgaactccgtgggcactcaaaagcatcggaggatcacaagtggttaatggttgcctcgaaactggccgaacagacaagattgaagggggagcgtgtgaacaaccttgatctttcaaagggacccattgaaacaaggtcaagggataaatttgggttccaggaagagaacaaatttgattctcttaacttaagcatgttgaacctggactctaaatttactgagaatgtgagcaaaagctcgcttcgaaatggtgtttatggtatgaatgcagtgtatcagaaaaacaatgcaaacttggtgagtaatgtgatcagtaacaagtacaatggcagtattcagcataacaaagagatcaacaacaacactggcaacaacatcaacaccaatgaaagcaacaacacaaatgcaactgacaaaaggtttaagaccttgcctgctgcggagacactcccccgcaatgaggtgcttggaggatacatctttgtctgtaacaatgacacaatgcaggaagacttgaaacgtcagctatttggtttgcctccaaggtatcgagattctgttagggctataacacctgggttaccattatttctttataactatactactcatcagctgcatggtatttttgaggcagcaagttttggtggctctaacatagatccaactgcctgggaggataaaaaatgcaaaggcgaatcaaggtttccagctcaggtaagaatccgtgtcaggaagctctgcaaggcattggaagaagattctttcaggccagtattgcatcattatgatgggccaaagtttcgtcttgagctgtcagttccagagactctggatctgttggacctatgtgaacaagctggttcagcagcataagcaagaatcgcacaaggaatgaatgtgcaaaataggtagtaggttttggtgtgccagctgtgtggttttggcagattttccgtgaagcgtaagcttggaaagtggatcatcatcttcttggggaagtaaagggagcgtgttgagagtgagagaccctttgttggtgaataaaaatggttgtggtatctatccccttaaaggtgctttgtagcatttgcatgaacatttaatacctttgtatgattaagtaaaagtacagacttggtatgcaatcaaagagactactgtttgtactgctaaaacatgaatctgttgaaccaagaaaaaaattgaagtcaaaagcttcatgaattacaaaaaaaaaaaaaacacaactcacaaacacacaaaaatctcccgaagcaacacagacaagaaacccaaacgca

SEQ ID NO: 10971 - DNA, 475 bp, Glycine max
gcgcaagccttccgcgaacccttggccggacccttggccggacccttgggttcacagccaagtcgtaagagggtttcaagggatggagaacatgcagagcttctggcaattgggcgatgaactccgtgggcactcaaaagcatcggaggatcacaagtggttaatggttgctctcgaaactggccgaacagacaagattgaagggggagcgtgggaacaaccttgatctttcaaagggccccattggaacaaggtcaagggataaatttgggttccaggaagagaacaaatttgattctcttaacttgagcatgttgaacctggactctaaatttactgagaatgtgagcaaaagctcacttcgaaatggtgtttatggtatgaatgcagtgtatcagaaaaacaatgcaaacttggtgagtaatgtcaggccagtattgcatcattatgacgggccaaagtttcgtcttgaact

SEQ ID NO: 10972 - DNA, 252 bp, Glycine max
ggagcgtgttgttgagagtgagagaccctttgttggtgaataaatggttgttgtggtatctatcccctggaagatgctttgtagctgttacatgacatttaatacctttgtatgattaagtaaagtacagactactgtttgtactgctaaagtatgtatctgctgaaccaagaaaaaaattaaagttaaaaagcttcatgtattactaaactctatgttgagttggttgaagtgatcttttattttattggc

SEQ ID NO: 10973 - DNA, 549 bp, Glycine max
gggtttcataatcatatcccaatgtgaatcctcgtccatttctctgcaactgcattctctttccctttccgccgcagcgattttcagagatttaaccttctttgttcgtagatatgcgcggttactgattagttgatgatagctgtcgacaaatttcacatggaaagagaacgaacacggaaacgccctcgtcttgcatgggacgttgcccctccctcagtgtccgaggcgcaacgggctctgccagtgcccggtgacgaagaattcgaaagaaagcacgtttcgcctccgaaaagggacgacgatcgagagggccattatgtcttcaatcttggcgaaaatctcactcctacatataaaatcctcagcaagatgggtgaaggctcgcgggctcgggttttggaatgttgggaccgccaaaccagagaatatgtggctatcaaggtagttagaagcatacggaaataccgagatgcagcgatgcttgagattgatgtgcttcaacaactagccaagaataatagaggaagctcccgatgtgtgcagatc

SEQ ID NO: 10974 - DNA, 293 bp, Glycine max
cgccttttggtttcgcaattgtagtttcctccgtttttctgacactgcattctcttcccctttcaaagatttaaccttatttgctcgcagatatgcgcggttactgattcgtcgatggtatctgtcgaaaaaattcacatcgaaagggaacgaacacggaaacgccctcgtctcgcgtgggacgtagctcctccctccgcgtctgaggcacaacgggctctgccgggccccggggtgaaggtttcgaaagaaagcatgtttcgcctccgaaaagggacgacgatcgagagggc

SEQ ID NO: 10975 - DNA, 886 bp, Glycine max
cggctcgaggttcccaatactgtacctatcagcagggacatgcaccacattgatcatcataggaggatccacagcaaggacattttaccaagtggtgtgtggtgaaacatgcactgccaaacctatgaccactgtggaatggtacttggtgttcacctgtgtagctgtggtgctatcacagttgccaaacttgaattccattgctggggtgtcactcattggagctgtcactgctgtagggtattgtactgccatttgggtaacctctgtggcacggggtgccctaccggatgtgagctataaccctgtgaggactggaaacagtgttgaagatgcctttagtgtgctcaatgcattgggtatcattgcctttgctttcaggggccacaatctcatccttgaaattcagtctactatgccttcaagcgagaagcatccatcacacgtgccaatgtggaaaggggtcaaggtttcttacacgatcattgcagcatgcttatttcccatggccattggaggctattgggcctatggccaattgattcctgcaaatggaggaatgctcactgccctataccaattccactctcgcgatgtgtcaagattcgtgctagggttaacaagtttttttgtagtggtgaatggtttgtgctcgtttcaaatctatggcatgccagcattcgatgacatggaatcagggtacactacaaggatgaagaagccatgcccgtggtggctgcgtgcatttattagggtgttctttgggttcttgtgcttcttcataggagtggctgttccgtttttgtctcaaatggctggtttgattggaggagtggcgttgccagtgacattcgcgtacccatgtttcatgtggcttaagacaaag

SEQ ID NO: 10976 - DNA, 572 bp, Glycine max
  unsure (1)..(572): unsure at all n locations
tctgctcccaagcttcgaagctcgcagaagaatcaaatggtgcaccattgtttactgtaactcagtctcggagtttctcaaagcaagtcaccagtaatgatgtgtcaggtgacaacactggattccaagaggaagatttccctggcatggaccgtggcaatgatacaggaaccaatgaggatgattggcaactcttataaatgcgattgctggactatgacatggattcaaagtacagggtcaaaaatttgttgcatgattctcatgggcctaattgccactgcaagtttggttgatccctggcatggggctccccactcttcaaacattgtttaatagtcgtgtagaaagtaatttaaactcattatgattctttggcttaaatcatttgctcatttgttcatattagctaaccaggtatttgttgtacattacaacggctagtttgatcatatttgttgcctgtacccttttattggctgcccaaaatgtagtggatagtactgtgggactatcaaataaatggtagaaagtagttcctttttnnnnnnnnnnnnnnnnnnnnnnnnnnn

SEQ ID NO: 10977 - DNA, 1006 bp, Glycine max
aagaactttatcgccatgccagattggtgacctcagctgtgattgcaaaggttcataccattggattggactgtagagctccttaaaactgatactttacttgcaggcatgcgtgccaattggtatggattattagggaagaaatttaaggatacatttgggcatgttggtggagtcatcttggggggattagtgggtcttaagagaccagaaaatcatggtgtcacatactctctaacagaggaatttgtgactgtttatagaatgcactcactcctacctgataacctacagctaagagacatatccgctactccaggacccaacaaatctcctccattagtcaaagaaattcctatgaagaatttgattggactgcaaggagaaaaaacattatctgaaataggagttgcaaggcaacttgtgtcaatgggtcaccaagcttgtggggcattagagctttggacctacccagagtggctcagagacctcgtaccacaaaacatagatggcacagataggcctgatcatgtggatctagctgctcttgaaatttatagagatagagagaggagtgtggctagatacaaccaattcaggagggcattactgttgatacctatctccaagtgggaagatttaacagatgacaaggaagcaattcaagtattggaagaggtatacggtgatgatgttgaagagcttgatgtactggtaggcctcatggcggaaaagaaaataaagggttttgcaatcagtgagacagcttttgttatattcctactcatggcaaccaggaggttagaagctgacaggttcttcacaagcaactttaatgaagagacatataccaagaaaggactggaatgggtgaatacaactgagagcctaaaggatgttattgatcgtcactatcctgaaatgtcacacaagtggttaaactcttctagtgctttctctgtttgggactcaccaccaaactctcaaaatcatatacctctctatc

SEQ ID NO: 10978 - DNA, 574 bp, Glycine max
attatttcttccgtgaaagcacgatgtcttccaggggatggattggaggagcattttgtaatacaaatggaaggtgttaacatcttggctgtcagttatggtgccccaggggcttgcccttatccccgacaactgaagcttcctggaaagtggtctttcaagtcacacacagttctaaaaagcagtgaacaggcaccaagagctccaatatttactgaagaggcacttggcgggctggagggagacggtgaggctgtacagccaatagaaaggtccttttgggctaaatactggatgtacctgatcccgcttggactcatagtaatgaatgctgttactcaagctatgaatatgcccgaggaacaagctggcggacaacctggtgctccggcacagcagcaaccaggatctgcagtacagcgtggaccaagttctggtggtgtgcgtagaagatgataagttagcttcctctaccgcagaaggcattatatgagggcgttggtaatcaatgaaatcttacgttgagcttttagtagcagtatttcatagttttaatttcatattaatagctctg

SEQ ID NO: 10979 - DNA, 1412 bp, Glycine max
tttaagaaagctacctagagcttgcacctattggtatcttctacaatatcctctcatagtgctcttcttcttcttcattttcattatcaagatgtctttgctttcggatctcatcaacctcaatctctcagaatccacagaaaagatcgttgctgagtacatatgggttggtggatctggtatggacctcagaagcaaagccaggactcttcctgggccagtgagtgaccctgcaaagcttccaaagtggaactacgatggctctagcacagaccaagctccaggggatgacagtgaagtcatcctatacccacaagctattttcaaggacccctttaggagaggcaacaatattcttgtgatttgtgatgtttacacccccgctggtgagccacttccaaccaacaagaggtatgatgctgccaaaattttcagtcaccctgatgttgctgctgaggaaccatggtatggtattgagcaagaatataccttgttgcagaaagatgtaaattggccacttgggtggccacttggtgggtttcctggaccacagggcccatactactgtggaactggtgctgataaagcatatggccgtgatattgtagatgcacattacaaagcttgtatttatgctggcatcaatattagtggcatcaatggagaggttatgcctggtcagtgggaatttcaagttggtccttctgttggtatatctgctggagatgaggtgtgggcagctcggtacattttggagaggattacagagatggccggagtaattgtttcatttgatcccaagcctattccgggagattggaatggagctggagctcactcaaactacagcaccaagtccatgagagatgagggtggttatgaggtgattaagaaggccattgaaaagcttggattgaggcacaaggagcacattgcagcatatggagaaggcaacgagagacgtctcactggaagacatgaaactgcagacatcaacaccttctcttggggtgtggcaaaccgtggaagctccattagagttggaagagacacagagaaaaatggcaaaggttactttgaggacagaaggcctgcttctaatatggatccatatgtagtcacctccatgatcgcagagactaccatcctctggaaaccatgaaaaacagtcatatagtctctagatttggaccactaaaaattgtgttcaatagtcatttgatctaaaaatttatatttgcaaggtgatgtttagttaggaatttctaagtggtctttttgagcctccatgtgccatgtctatggttgagaataatttcgtcattaataacaagaatttcccatacaagaaaaaagtaaaaaaaagcaacagaaaaaaaaaaagtaaaacaaaaaatgaaagcgtcgggagc

SEQ ID NO: 10980 - DNA, 934 bp, Glycine max
  unsure (1)..(934): unsure at all n locations
cggaanncccgggtcgaccgcacgcgtccgaaaaggtctccaaacacatagaagcacgtgtatttatgtattgtgcaagtcatagtattcaacgttaacaccactgactcacttgtaaaaggcgctttaacaccaaacggagtctctctatcaaaaaaagctacctagagcttgcacctattggtatcttctacaatatcctaaagtgtttttcttcttcttcatcaccatgtctttactttcagacctcatcaacctcaatctctcagaatccacagaaaagatcattgctgagtacatatgggttggtggatctggtatggacctcagaagcaaagccaggactcttcctgggccagtgagtgaccctgcaaaacttccgaagtggaactatgatgggtctagcacagatcaagctccaggggatgacagtgaagtcattctatacccacaagctattttcaaggacccctttaggagaggaaacaatattcttgtcatttgtgatgtgtacaccccagctggtgagccacttccaaccaacaagaggtatggtgctgccaaaattttcagtcaccctgatgtcgctgctgaggaaccatggtatggtattgagcaagagtataccttattgcagaaagatgtaaattggccacttgggtggccccttggtgggtttcctggaccacagatgcacattacaaagcttgtatttatgctggcattaacattagtggcatcaatggagacgttatgcctggccagtgggaatttcaagttggtccttctgttggtatctctgctggagatgaggtgtgggctgctcgctacattttggagaggattacggagatagctggagcaattgtttcatttgatcccaagcctattccgggagattgggatggagctggagctcactcaaactacagca

SEQ ID NO: 10981 - DNA, 347 bp, Glycine max
agggacacatgcaaacactaatcataagccacgcacttaaccctatcttcttagttacatatttcaattttaaaactccaattacaatgatccttccaaacatcaaagttcgttttttcttactcttttgccttattgggatagtgtcagctcagttatcctctaccttttatgccaaaacgtgtcctaatgcactttcaaccattaaatcagaagtagtgtctgctgtgaacaacgagcgtcgcatgggagcctccttgctccgtcttcatttccatgattgctttgttcaaggttgtgatgcatcagtactattggatgatacatcgagtttcacaggtgagaag

SEQ ID NO: 10982 - DNA, 714 bp, Glycine max
cggctcgagcggctcgaggtgcttcgccatcgcaaagtttgtggttttagtttctgaatcaatttcgaagtcatccaaccagccactggattcttggagagcatggacactcagaaaagtcaacctgagaagcagtcttcatccactgcaactgccccatctgttacttcatgtcgaaagaagaagaatgaagaagctgctttcttggacgatttgaaggaccacattgatgagtttattaatgcttctatggatgaacacaaaacttgttttaagaaaacaattcagaagatgtttggtatgtccaaggctgttgcagaaggtcagtccaatgcttccaaagaagttgaaagttctctgcctcttcagacaactgtacaagactagatttcttgcttttgaaccactaggttttaaccgaggcgtgtggttataccacccagatatttagttatattaggctatttgaaactaaattttgtttgtgaaaactacattcatgggttgttttttgtttttaccagtagggtttctaggcttaagcattgttgaattatgggacctgatccaatttttaaagtgagtcccacccatcagctcctgtacccttttccattccactgatgtaggatgttgacgcatcccaatgtaggatgttgacattgccccaaaacttggaaaacatattttcgaaaataaaaaaaattccaaccc

SEQ ID NO: 10983 - DNA, 632 bp, Glycine max
cttttcctgtgtctttctctctctctctctctctctctatatatatatatatatgtatgtattttctttacaccgtctggaatcatccattgatttcaatccaaagcaccaaatccccaaagcaaaagtgctactgtcttagaaagagagagagagagactgcgtttgacgccaagagagagaaaaaatggtgaacttcatgttgatgattagtgcagaccttgagaacctcaccaatctccaaccccaaggtggctgcgacgaccctaacttctcttacctcttcaagttgaaatgcggaagatgcggagaactgagccagaaagaaacctgcgtcgtcctaaacgacaccgttcctctccccgttggcaagagcaccactcatctcattcaaaagtgcaaattttgtggcagggatggcactgtgaccatgattgaaggcaaaggtaaaccactcacccaggaaatcagtgaatcagggaagtacgccccattgatgttatttgactgtaggggctatgagccagtagattttgtattccgtgatggatggaaagttgagtcgttggagggaactaagtttgagaatgttgacttgtcaactggagaatacgccgagtatgatgagaagg

SEQ ID NO: 10984 - DNA, 645 bp, Glycine max
ctggaagtgaagcaaatatggcatactctcaacttcaaaaggtggaagctaatgtgcacatcaaggcttctgctgatcagttccataatgttttatgcaacaggacacaccatattgccaacattttccctggaaaagtacagtctgttgaaattcataaaggtgaatggggcactgagggatccgtcatctcctggaattatttacatgagggcaaagtttgtgtggctaaggagatggttgaaggcatagacatgaaaaacaataaaatgacctttaaggtcatagagggagacctgctgggacattacaaaagcttcaagtttttattgcaagttactccaaaggaaaagggaagcgttgtgaattgggtcctggaatatgagaaacaaaatgacaatactcctgacccttataccttattggaattgacagttgagatgagcaaagaaattggtgcctaccttagtcaagaccataactaaatttaatggcaaaataaacgtactgtgttttacgctattgctatcagagaattaaaaattgatgtcttatggggcttatctaccccttaattaatgtcatcaattatatgtatgttaaaaaattaaataaattagggtgaaatatgtttttcattctcat

SEQ ID NO: 10985 - DNA, 999 bp, Glycine max
caaaccttccattccatttatagctctcacgcaagccaagaaaaaaaaaaattaagttagtatgtatggatgtatgtgttcttagtaatcataaagtgctaagtcaaatacaaatattgtttgtgtgtggtggtttgatcaacaacacacagaaggggtatctaaagaacacaacattggagattatggagctagaaccaaagaaaggaccggttcatgatcaatacgatgatcttgttggttctttttcttcttcttcttcttcaacatcatcttctgtttctggaatttcaagtgggtcatcattggaatctgattcttttgaagaagtaacatcctctgcctcctcttcttcatcatcagcagctgatgatcaacttgtagttgttgctgatccattgagtgacatgtcttctctctttcaacaacttcccatcaagagggggctatcaaaattctaccagggaaagtcacaatcttttacttcactaacaaatgtgaggagcttggaagatcttgtaaagccagagaaccctcacaacaaaagattgaagtcttacaagagctatgcaggagggttggcagagagccattcaacaagggttgtttctaaggggggaatgatgcattcaacaagttcaagaggttcatgttcttctttgggaaggggcagtgtcactaacttcatgggtagtaatagtaggccatcaattccttctcatagatctaccagcactaacaccatccctaatcaaactgtgttgtttgcttaaaagggattctgtgatgtttctgttttttgttcaaccaaggtttttgtttttgatgatgtgtagattaagtagtttcattcgaagagaaatgttggagattggaggaaaaaaatagtactttgggtacacctaatctgattttttttttttctttttaaatggaagtgccattcacatgtgcaattttgattcacaattttaatgcaattgagttaatttttctgac

SEQ ID NO: 10986 - DNA, 409 bp, Glycine max
cccacgcgtccgttttttttttaaagggaaaatgaaattcacacaagaacgcccagatcacagaagcagaggaagagagagaaacaccaaagatgggtctttgctttggttgcttcggcgtagacaaacgcatgagcaaggaagaagagagattggcctctgaagaagcgcgtgccaaagctgctgaagccgcacagaaaaggcaagagcaatttgagaattctgcagcaggacgagctgctcgtgcacagcaacaagcaatggcaaagcaatctgcaaataccaacaaaggcgaaccagttctaaagtggcaaatgagttgaggttagacattctgtcagttggagttaactttttattacgtgtaagtatcgatgacaggtccaaccagaattatatgctctgcatg

SEQ ID NO: 10987 - DNA, 506 bp, Glycine max
gaggatttaaaacgggttctaagtcatccacaggctcttgctcaatgtgagaacacactgacgaaatttggattggtgcgagaagcagttgacgatactgctggcgctgctaagcatgtcgcctaccacaaactacaagatgcaggagcagttgctagttctgctgccgcaaagatctatggcttgaatatacttgatcaagacattcaggatgatagtgataatgtcacccgatttttaatgttagcacgagaacctatgagtcctgacactgatacgcgatttacgactagcatagtattttctttaaaaaagggtcctgggatacttttcaaaccccttgcggtttttgctttgcgccaaattacccttacaacaatggaaggctccccttggcgcaacaaccttcaacgagcatatgataccaacatttccatatactttgaaaaccttttctatgttgattttgacgcaccagtgggcagcacagagtgcacagaatgccc

SEQ ID NO: 10988 - DNA, 651 bp, Glycine max
cgagccgctcccaaaccacaaacacttaatttctcatctcatcatttctaattctacctcttttctcttgcactaacaatccaagatgaataccaacaacgacaccgaaaaaaaccaatcatttccagaagcacaaggagcatcatcatcatcatcttctccacccaatgttgggactgagaattggggaactcacataatgggcacccctgctgttccaagcagccacccagataacaaaaaagcagctttacaaagtggacaacctcaaccagttcaatactaccatgaccaacatcaacatccctacgtgcaacatagcccagttgacaaaccaagcaacagtcccatggagtcaatccttaacatgttcgattcatggagcaaaaaagctgaagccaccgcacacaacgtctggcacaaccttaaaactggtccatcagtgtcttcagctgcactggggaagatgaatctgactgtgaaagcaatatcagagggtggatttgagtccctttacaagcaaacattcacaacctatccaaacgagaagctcaagaagagctttgcttgttacctttcaacatcaacaggtcctgttgcaggaaccctttacctgtccaatattcatgtagcgttttgcagcgatcgccc

SEQ ID NO: 10989 - DNA, 1132 bp, Glycine max
gggtaaccatgtatggaatatggtgcttcatcacggtcctgttgttctccccagtggcgttttcggaactgtgcaacccacaggacaagaaagtgctgctccaaatcaagaaggacttcaacaacccttacctgctagcctcctggaaccctaacaccgattgctgcaactggtactgcgtccagtgccaccccgaaacgcaccgcatcaactccctcgtcatattatcctctgttccccaaaccaatttatccggcccaataccaccctccgtcggtgacctaccttttcttgagacccttcaattccacaagctccctaaactcaccggcccaattcagcccactatagccaagctcactaaactcaaggagatctacatcagctggaccaatgtctccggcccagtacccgatttcttggcccggctcactaacctccagtttcttgacctttcctttaataacctctcaggcccaatccccagctcactttcccagctgtccaacctagtttccttacgcttggaccggaataggctcacgggcccaatcccggaatcattcgggtccttcaagaagcctggcccgagcctgtggctatcccacaaccagctttccgggcccattccggcttccttggccaacatagacccacaaaggatagacttctccaggaacaaactcgaaggcgacgcctccgtgcttttcggtcgcaacaaaacgacacagatagttgacgtttcgaggaactcgttggcgtttgatttatccaaggtggagttccccacgagcttgatatcgttggatctgaatcacaatcagatcaccgggagcattcccgtggggttgaccgcagtggattttttgcaggggttcaacgtgagctataatcggttgtgtggtgagataccgcagggtgggagattgcaaaagtttgatgtgtattcgtattttcacaacaagtgtttatgtggatcaccccttactagctgcaagtgaagtgaattgtgcagcagagaatacgtgcatttttaaataaaaagaatatctctttctgtagacattgaaagataatgtcaagctttacttccatccctctttgtaaagctaaagaacaggtttgaattttt

SEQ ID NO: 10990 - DNA, 856 bp, Glycine max
gacaatatataccttctaaacattctcttgcacccaaaccctggaattaagcacgttatttcattagggttggttttgttgaacagaaaaaaagagaaaaaaaaattatgggaagcgatggcgtgaggaaaccaagattcctatgccttcatgggttccgaacaagcggagaaatattgaaaacacagttacataagtggcctcaatcggttctagacaacctcgatctagtatttgtggatgctccttttccttgccttggcaaatccgatgtagaaggcatttttgatcccccttactacgagtggtttcagttcaacaaggaatttacagagtacaccaactttgacgagtgccttcagtacattgaggaatgcatgatcaagtacggacctattgatgggcttcttggtttctcacagggatcaatattatcggctgcgctgccgggtcttcaggagaagggcgtggcactcacgaaggttccgaaagtgaaattcctaataatagtaggaggggcaaagtttaggtcaccttcagtgatggacaaagcatattcttcttccattagctgtccctccctccactttataggagagacagattttttgaacaagtatggggctgaactactagaatcctgtgttgaacccgtggtgattcaccaccccaaaggacacacaataccaagattagatgataagagcttgaagaccatgatggatttcatcgaaagaattaagaaagatgtctcaaaataagaaacgagtttagacaaccagccagtgcttcaaaaggatttttgaaatatttattcattttaacataaattaataacattgctatttgtattctt

SEQ ID NO: 10991 - DNA, 592 bp, Glycine max
tgttccgccaccaccgactcatactccttcccaattttcgtacaatacaaacactttctctcggatttcgtttcatggaatcgccgcattcatagcacaactcttcaaaatgtattccttcaaagacaaagttacacagaaactctcccatctctttcccaactcctcctcctcctcgccccaggatagtccatattcgcaagaggataaacctttgtcttcatatttatcttacattatcccttccatcagctttgatggatcgaagtcaaacaagaatcaacatgaacttaaaccaattcaatcaacttctgctggatataattatgagaattttgagtatcaggatgttccatcggataattatgttgactgtactaacatggatttgttgaaagatgataatgataatattaatgaagatcctatctctagaaggaccagtagcagtagcagttctgaggtttttgaagaagcaaatgaacagcaaactccaaatacttcaaagaagtctcgactcaatcttactgatgactctacgtttatatctcctgaattgtatgaatttttggaaatatgcctccctaatata

SEQ ID NO: 10992 - DNA, 440 bp, Glycine max
gctgaagatgctggaacaaagcttgaggcagcaaagagcgtttcatcaaatggggatgatggaacaggaggcttggaggccccagagagggttgccagaacgatctgtcaacattttgagagcctggcttttcgagcatttccttcatccgtacccaagcgatgcagataagcatctgttggcacgacagactgggctatcgagaaatcaggtatcaaactggttcattaatgcgagggttcgtttgtggaaacccatggtggaagacatgtaccaacaagaactcaaagaggccgaaggggcagaagaagagagggaggggaaccaaagcagtagcaacaacagtggccaccaattggcacaaactccaacaccctcaaccacagcatcgacggcaacagcgccaccaccaccaacaacgacaccaccaaccggaaaaa

SEQ ID NO: 10993 - DNA, 480 bp, Glycine max
gtgctcactagggagcttaagaataggcctgtttttgaagctgacgatcaatctgctatggtttatttgttggcaactgcgaacgagacatggggtgacaaggtttaccgtgagaatcactactacttgcatggttattgggggattttggtggatcgttatgaggagatgattgagaattatcacccggggcttggggatcataggtggcctctggtgacccattttgtagggtgcaaaccttgtgggaagtttggggattaccctgtggagaggtgcttgaagcagatggatagggcctataactttggtgataaccagattttgcagatgtatgggttcactcataagtcccttgctagccgcaaggtgaagagggtgaggaatgatactagcaaccctcttgaggttaaggatgatcttggattgcttcaccctgctttcaaagctatcaagctcccttcgtcttgataagatcga

SEQ ID NO: 10994 - DNA, 826 bp, Glycine max
  unsure (1)..(826): unsure at all n locations
gattctcttcagtctataggggtaaacatgttgatgacagtggatttgatgaggacatactgtttgatccacacaattctgaaacttttggtgatcgaacttttggtggtgtgtttggttcggtcgttaagaggcctggtgaaataagtggtggaaaaggaaatgatggagctcgaacattggcaaattcttcctccatggatcacacacaatcatgtcaatcaaatacctgtgtggatttaagccgctctggttctgatgatcatgcgaagcagttagcatcggaactccctgccaaaagctactccacatcagatggggaaagcaggattcaggagaacttgaatagtaatcaacatggagacaatgctattaccaaggaagaaaatccaattcaagctgaggaggatgttcaactgtcaagatctgaggattcacaaggaccactctactcgaagaaggatggctctgataaaggggtattatctcctaatgccagctcttatgccccttcatctcatacttcatctaaaactcatgagaagatgggatcacatggagatttggtcgagggttcagcatcgggcaaggctaatggggaaacgaaatctgtaaattcacggggaacaccatctgggtcagatttggttggaggcattccagcatcttctgctcctggtttatctccaagttcatcagttggttcactgtcttctgaaaaatcaactctgaatcccaatgcaaaggtgtgaaagttcaagattgactttntgaaaaaggaatatttttcactagctgattctgatattttatattaccgacatat

SEQ ID NO: 10995 - DNA, 994 bp, Glycine max
atctgataaaggggtattatctcctaatgccagctcttatgcaccttcatctcatacttcatcaaaaactcatgagaagatgggatcacatggagatttggtcgatggttcagcatcgggcaaagctaatggggaaacgaaatctgtaaattcacggggaacacaatctgggtcagatttggttggaagcattccagcatcttctgctcctggtttatctccaagttcatcagttggttcactgtcttctgaaaaatcaactctgaatcccaatgcaaaggaattcaagcttaaccctaatgcaaagagttttattccatcgcctgctcggcctcccactccagtgtctgatggttccttctattttccaactaacgtaactactgtaccaagtatgccaggcatgcccgtgggtattggaattggacctacttttgctgggccacaacctatcatatataatcctcaggtagcacaaatgccgtctcaaggatattttcatccgaatgcaccccagtatggacagcttcttggtcatcccaggcaatctttatacatgccgagttacttgcctgaaatgcaatacaagggacgagattattgacgacttggctattcgcattcttgttggcaagtgaaatccttgcttgaaaagaataaactaagtggttgtcctgaaaagttttaaacgaggatatctgcaggttatggaaaaatctctgaaggctcatattatatattactgccaggttcgctaattctgggatataattttatgaccttgtgttaacccatacatcttttggggtttctcaggctttggccgtgcgatagattaactcagattgaccttttccatccctctctttttaactctttaatgccatgaaaaatttactttttataactttgctcattcatccgacactctccaaccattgggttgttgccatgttatattttttactggtaaaattcttatatccttttaatg

SEQ ID NO: 10996 - DNA, 764 bp, Glycine max
cagctatggagatgcaagcagaagcagatagaaaaaagagagctcaaattcttgagtctgaaggagaaagacaggctcacataaacattgctgatggaaagaagagttcagtgatcttagcatcagaagctgcgaggatggatcaagttaacagagctcaaggtgaggctgaagctatccttgctaaagcaaaagcaacggctgagggactggctgttgtgtcaaaatccctaaaagaaaatggaggacctgaggcagcaagtttaaggattgcagagcaatatattcaagctttcagtaacatagccaaggagggcacaacaatgttgcttcctagctctgcatccaatcctgctaacatgatggcccaagctcttactatgtataaaagcctgcttggtaatccttccagtggtaagcttagtggaacttgcacccccttcaatagcagggcaattagaaggaaatgattcatccagtgaggttaaaggcgagagctcgacgaatgctactgtaactagtggaatcccggattatcgtggaaaacctggattttcacttcagagcccaccaaaacgggaatagtctttcattttataaaacttgcctttttgatgaattcagttttttgatttatggatgttgctgtggaaattgagttcggactttagagagaagaaggcggaagagtctggttggaattgcattgctggttgttgtggcatttaccacgggatacacgttgtttaacttttaattttaat

SEQ ID NO: 10997 - DNA, 526 bp, Glycine max
cactgttggaccttttggatacatttgttacaaagaaaaacccttgtcttttgtatgtcaaagcaagctcgaaatgtttaggataaccgaaagtgacatggggtgcttgccttcaagcttcatgaatcttagaagacagcgatatctgagagttctagatccgagggagcttcgaatgatagaaagtggctctgtagatgtcatagattgcaaatcattgaagcacgcattggttcttgctgaacaattcaagtatatcagcagtggcgttggcattcagaattaccaaggattggtcgaagaatcggtggtggtggcattagatgcaatttcatcaactgttgaaactgtggttgaccattcagagcttatagatgacaagagatttattcgtattgatgaaagaaaagttgaatccatcgaagataattgatgaataatattcaaactgtggaaaaatatttaatgaaggtactaggtcctcaacaatgctttgaataatgttcaacatcaatgaaaagagagt

SEQ ID NO: 10998 - DNA, 321 bp, Glycine max
gaacctccgttatcaaaacgcagccaagtctctgttctgtattctagggtttggattctgagtttcgtttcagtttttgatcaccatgagagctaagtggaagaagaagcgtatgaggaggttgaagaggaagcgccgaaagatgaggcagagatcgaagtagtgtgcttgtttccccagcaactattgctactagttttgttttatttcagctatgtttttgtttccaaatgttacgatacatttttattggtttctcttgcttttgtcttacctcaagagagatgctcttaccgcaaattaattagatttaatatttga

SEQ ID NO: 10999 - DNA, 466 bp, Glycine max
ggaattcatcccattcctaattctaatttttttctactctattcaatttcaatttctctctgtgtttcccctctcatcaccatgcttccaaagttcatcattagccccttcagggtggaatcccaagaagggaagcatgtgaacaagagaagaaagcatgtgagatcatttgagagtaccaacatggatgttggtttgagacttctccctcaaattacaagctcaaatagcacatcaaatgtcctcttgaaatctgcagtgagaaaggcaaaccaacaatccatccctcaagacttttgcttccttaaaacttgcaatctatgcaataagcaactcagtccagacaaagatatttacatgtacaggtataaccaaactcccaatactctctacctacgcatcatttcttaattaaacattaatatcattatcttatgctaaaatttaacatatcttggatcactta

SEQ ID NO: 11000 - DNA, 522 bp, Glycine max
ttttcgcgttcgcccaagcggacacaaagaagaaaaaaaaaactcaaacaccttcaagaacttgtatctttctttgttagtatttgttactacaattttacattcttttcatctctacatatttcattagtcatggcacctcaagcagtttccttcaagtccttcgccgttgctcttattgtggcgcttttcttctccgcctccgctctggacttagtttcggggcagtcgccggtgccggcgccggcgccggcaccagatgccggagcagctggatccgtgtcgagctcggtcgccatgattggagcttccgttgtgatttcattgctcgccatcttcaagcactgaagaataatctgatgatggatcgattttgtgtgaagattattgattcgttctgcacactcagatttattgttgctgctttataatacgttacgagtgatgattattatgtacgtataaaagagagagagagagggattttacaccattcttatattgaaccatttattgtaggtg

SEQ ID NO: 11001 - DNA, 508 bp, Glycine max
cccacgcgaaaagtaaaaaaatctctcaacaccttgagaaattttatctgttagtaatttgctactactattttacattctctttctctctacgttttattatagtcatggcatctcaagcagtttccttcaagtccttcgccgttgctcttcttgtggcgcttttcttcgccgccgccgcctccgctcaggacttgcctccggcggcggcgccgggacccgatgccggggccgccggagccgtttcgagctcggtcgccatgattggagcttccgtactgttgtcaatgctcgccatcttcaagcactgagtataatctgatggatccatcttgtgtgaagattattgattcgttctgcacactcagatctattgttgctgcttttataatacgttacgagtgatgattattaatttattattattatgattattatgagtttatctatgtataatagagagagagagagagagatcttacagcatttatataatgaaccatttatt

SEQ ID NO: 11002 - DNA, 1041 bp, Glycine max
ttcacgcgtccggaaagcgcgaggagggtaagtgagcgtgtgtgtgaagactacgatcattctcacactcactttctctgtcccctcttcttcgtcgtctccgttttcttttatccgtttctatttttccaattttgccctccgctttttccctatttcccaattttgccctcttcttcttctaccatgacctacttgaagtcgtagctcgagtccgtgttcgccttttccaattcccaatttcaatttcccaaacttcgtaggatttccgtcgaataatggaacctcgagttgggaacaagttccgtctcggtcggaaaattggtagcggatctttcggagagatctatctcggaactaatattcagactaatgaagaggttgcggttaagcttgaaagtgtcaaaaccaagcatcctcaattgttgtacgaatccaagctgtataaaatactgcagggaggaaatgggattccaaatgtgaaatggtatggtgttgaaggagagtacaatgtgctcgtgatggatttacttggccctagccttgaggatttattcaacttctgcagtcggaaattgtctctcaaaactgttcttatgcttgctgatcagatgctaaatcgagttgaatttattcattccaaatcatttttacatagggacatcaagccagacaacttcctaatgggtttggggaggcgtgcaaatcaagtttatgccattgactttggtcttgctaagaagcacagagacacctctacccatcaacatattccttacagagagaataagaatttgactggaactgctagatatgctagtatgaatactcatctaggaattgagcaaagccgtagggatgatttagaatcacttggatatgttcttatgtactttttaagaggaagtctcccttggcacggattgaaagctggtactaagaagcagaagtatgagaagatcagtgagaagaaagtttctacttctatcgagtctctgtgccgtggctacccctcagagttcgctttatactttcattact

SEQ ID NO: 11003 - DNA, 782 bp, Glycine max
ggcaacaaggactactactcttcttttctttcttcatcgtcatcacgcactttttctctcaatctctttcacacactcaatctctctctctctctctctctgaattttctcctctctccgattccttttattaattggagtttactcgctcctttttctttccctgaaaacatttcatcttcgtattgatgtcggaaaagggccggccacttccaaaatttggtgaatgggatgtcaatgatccaacctcagctgaggggttcacagtgatttttaataaggccagggatgagaaaaagacaggtggcaacccagagtcaccaggaaagactgctactgatcctcatagcaaacctgcagtagagcctggcaaaactcagactaaaaaatggttttgctgcatgcaaaacccttctgccgaatcatagcatagcaatggttgctcctgtgaaaagcctgaacagaagaacaatgtttatgtgtaactagcgtcacagtattttctcaaagataagagctgtagagccataagcgaattctacggaatttatattttgtgatgtaaaagtgagctgcaatgggggaaagaaaagaagacagactattatttatgtgtgtgtatcaatgttgtggtttattattaggagccagggttgcttcctgttttgccttgtcttgcgctatgagctagagcgttgcttgtcacattgtattgcttgtattatgaaacaaatcctattttatgaacccattttattccttccaaaaaaaaaaaaaaaaaa

SEQ ID NO: 11004 - DNA, 508 bp, Glycine max
cccacgcgtccggcacgcgcgcgcacggaggaagagagaccatagacgtcgtgctcagaagtaattttgaagagaaaacgttgatctgattccgaatttgcgttcgttcccgtatcagagtccaggacgatgtcgtttgggtcctctctgttgtctcattcgcatacccttcaattcttgtccaacagaaacagaacctcccgcttcaaagccaccgccgaagttcccgatttcctctctgcagattggtttgaatctcgcaagaaaagaccctttggcccacgattagattttagtgcagaagatgcggtgcattaccagcttgaagccttgaagtataatgaccagccccgtccagattatggaatcgaggttatgtacaggtttgctggatttgatccctttgaaaggtctccctattttggccctttctttgatttgggtcagtttgaacggtttaggcgcatttttcaccattctacttatcgggtcttactaggtcacaagg

SEQ ID NO: 11005 - DNA, 669 bp, Glycine max
ggaaaagaaaccaaagaaaacgcgatggttgacgtggactttggaacctcgggctcgccgaagcgccacaaccacaacggcttcatcgtaacaatctcggcgatcttggcgctgttaaaaaagcgcaaagcagcagtgaaggcgagcaaagaggatgaattgaagaagtcgtcgcggccgaagaagcttctcagcaacataagcagcaaagcgcttttcggtcacaagaagaataataagaagcagctgcgaagcgtggaagagacacaacaagcacaagggtggggaaacggcggcgtttggcagaaggagattctcatgggtggcaagtgtgagccgttgaatttctccggtgttatttattacgatgggaatgggaagcagctaagccaaatccctctcaggtcgccacgcgccagccccttgcccggttacctcacgcgccgccaatgaatcatccatcaccaccgccacgagcgatttcagatcacgcgcgtctcttatttttgtttgaattttaggtttcttgaatttaatttaatttcaagcttctgtttgtttggctggttttgtaggttgttgctttcttcgattttattgtttttttcatcggataaatattaattattagtatttatagtttttgttaataaaatattttcgcatttc

SEQ ID NO: 11006 - DNA, 335 bp, Glycine max
gagaaacaaaagaaacaagaaaacaaaacgcgatggttgacgtcgacgttggaacctcggactcgccgaagcgccaccacaacaacggcttcctcgtaacaatatcggcggttctggcgctgctaacaaagcgcagagcagcgaagccgaccaaagaggatgagtggaagaaggaattgaagaagtcgcggccgaagaagcttctcagcagcataagaagcaaagcgcttttcggtcacaaccacaacaacaagaagaagctgcgaagcgtggaagagacacaacaagggtggggaaacggcggcgtttggcagaaggagattctcaagggtggc

SEQ ID NO: 11007 - DNA, 399 bp, Glycine max
ggaaccatggccaccgtttctttcaacgaaaactagcttctgtatttattcttctgtttgtgaaatatgtttttgtcttcgttactttttagagttactcgtccgatgttttcgatttgattatttttgttttgacggaggaacaggatgtgagttgtggttttctctgtgatgatgaaaacgatgacgagtctgatatgatatccattccttacaatactgacgacaaatcgacgcatttgtctgagaggattccactctttctcccgtcctttatatttgggttgtttaattttttgcgcgtggtttgttgtttcgattgtttgtattttttgtgtttttttgaaattacgcatggggatgattgtttattgtcatctgatgattcatttgatgaat

SEQ ID NO: 11008 - DNA, 320 bp, Glycine max
gtcattttttttgggaaaccttcggtgattggagctgtgcagggcatgatgactggacttgtatgcatcaccccaggggcacggcttgtgcaatcatgggctgctatagtgatgggaatattatctgggagcattccatgggtgactatgatgattttgcataaaaagtcaactttgctacagaaggtagatgacacccttggtgtgtttcacacacatgctgtggctggccttttgggtggtctcctcacaggtctattagcagaaccagccctttgtagacttctattgccagtaacaaattcaaggggtgcattcta

SEQ ID NO: 11009 - DNA, 1421 bp, Glycine max
ccgaattgaattccggggccggcatctccaattgcaacatactaagtgggttggctggtttagatctgagcaacagcttttaattttctacttgcttgaattttattggaagccatggattgttcatcatggattaacacttccttggatctcaacattaatccccgcagagttcatgaagaagttcccaaggaggtagaaagcgagcttttctctttgggaatgaccaagtttaacgtggaagaagagtctactagtgacttggaggaggaactgaagcgggtgactgcagaaaacaagaagttggccgaaatgctctcagtggtgtgtgagaactacaacactttgagaaaccatttgatggaatgcatgaggaaaaatggtgaaaaggaggtcagcccaacatcaaagaaaagaaagtctgaaagcagcaacaacaatagtaatttgatgggaactaacaatggaaactcagagagcagttctactgatgaagaatcttgcaagaaaccaagggaagaaatcatcaaagcaaaaatttcaagagtttatgtcaggactgaagcatctgatactagccttattgtgaaagatggataccaatggaggaaatatggacaaaaggtgaccagagataacccttctcctagagcatatttcaagtgctcttttgctccaagctgccctgtcaaaaagaaggtgcaaagaagtgtggatgatcaatctgttctggttgctacttatgaaggggagcacaatcatcctcagccttcttcccaaatggaagcaacatcaggttctggccgtagtgtgacccttggttcagtgccctgtaccgcatctctcagcacttccacaccaacacttgttacccttgacttgacaaaatctcagggaagcaacgattccaagagcacaaagcctaaaggagattcacctaaagtacctcaggttttggtggaacagatggctacttctttgaccacggatcctaattttagagcagcacttgttgctgccatctcaggaagattgttgcacaataattaaatggaattttggtgaagtgttgctaatttagtgtcaattgtttaagtattccataaaatagagatcattctttagagcaaggggtctctctatgtaaatacaacatggaaggctgggacatatttgatcctttaaagtggaaataaagttccactaaggatgacatgttgagctgattaaacaacagaaaatcaagctctgcaccaccctctgcctcatcatgatggtaaaggtttagcaagtcttttttggctaatatatctaggatacctcaaattaaatttcatagtaggttgtagcacacattctcggaaagatctttcataaagtgcatctctccggcaatttaatttctcccttttcatctctcg

SEQ ID NO: 11010 - DNA, 516 bp, Glycine max
ggaacttcacaaagtttaaacctttcaccttcctccatactttcttcatctgggttttgcttgctataaaaatctagctaaaatttgtcgtttgctttcagcaagagctttagcttaattatcaccaggaatttattcggcagccatggattattcatcatggatgattaacacttccttggatctcaacattaatccccacaggcttcatgaagaacttcccgtaagtataaacatattgggcggaagatcttctgtgaaatgcttccctcagaataataattctttcttcttttcttcttgtgtgttcatttcagaaaaaggaggtggaaaacagcttgttgtcattgaatttggaggtgaagaaatcttctgtaaaacaagaggttagttgtgcctgccaattctccgatccttttttaagcggttcttccaattatggagttgatttaatggaattattgttctgtaagacttacaaattaaaaacatttatttctatatccaaaacctgac

SEQ ID NO: 11011 - DNA, 574 bp, Glycine max
gtttaaacctttcaccttcctccatactttcttcatctgggttttgcttgctataaaaatctagctaaaatttgtcgtttgctttcagcaagagctttagcttaattatcaccaggaatttatttggcagtcatggattattcatcatggatgattaacacttccttggatctcaacattaatccccacaggcttcatgaagaacttcccaaaaaggaggtggaaaacaactttttgtcattgaatttggaggtgaagaaatcttctgtaaaacaagagtcagcaggtgccttggcggaggaactgaagcgggtgagtgcagaaaacaagaagttaaccgaaatgctcacagagatgtgtgagaactacaacactttgcgaggcaatttgatggaatacatgaggaagaatccggataaggagctcagctcatcaaggaaaaggaagtctgcaagcagcaacaacaatagtactattccaatgggagtcaacggaacctctgaaagcagctcaaccgatgaggaatcctgcaagaatccaaaggaagacatgaagacaaaaatttcaagagttt

SEQ ID NO: 11012 - DNA, 515 bp, Glycine max
ttatctccaattgcaacatactaagtgggttggctggtttagatctgagcaacagcttttaattttctacttgcttgaattttattggaagccatggattgttcatcatggattaacacttccttggatctcaacattaatccccgcagagttcatgaagaagttcccgtaagtatagaaataaagatcgaataatattatatcattcttcttgcgagcactccctgaagctcttacgggaaatgctttcattcagaacagtatatagtttgatatggggagttattcatcatcattgtcgtgtgttgatttcagaaggtggtagaaagcgagcttttctctttgggaatgcccaagtttaacgtcgaagaagaggttagttgagcaacaagttatattaattagtttcttcttcttcttcttctttatcatttatcagattgtagaacaattaattcaagggcatgtttacttatgttgtttcaatttttaaattacaaaattttcactttgtt

SEQ ID NO: 11013 - DNA, 780 bp, Glycine max
acgagaccattgttgtgcattagtttgacaggtttttcattttttttctacttgtttccagattgtgaaagatggatatcaatggaggaaatatggacaaaaggtgaccagagataacccttctccaagagcatatttcaagtgctcttttgctccaagctgcccggtcaaaaagaaggtaaatctaacagctaattaagaacgtactaagcattcaaactccactaagtaactggatcacaagttaagttaactgtgtttgctattcaattttcatcaggtgcaaagaagtgtggatgatcaatctgttctggttgcaacttatgaaggagagcacaatcatacacacccttctcaaatggaggtaacaacaggttccaaccgttcagtatcatgttcagcgtctcttagctcttccgcaccaacagttacccttgactggacaaaatccaagtccagcagtgagtctaagaatgtaaatcccaaaaccgaatcaccagaagtcccgcaggttttggtagagcagatggctacttccttgaccaaggatcctaatttcagagcagcactagttgctgccatctcaggaaaaatgttgcacaataattaagtagaaaatgagtgaagtgtatttaactcattctataagtggatcttgtttagagcataggatctctatgtaaatacaacataggacattgctacatatatattcctcaatttaatcaaatccttttggtgggaatcgagctccactcaggagcgatagcatgtctagct

SEQ ID NO: 11014 - DNA, 509 bp, Glycine max
aggggaaaacttccgggtctaatctccttgcaacatactactaagctagaaagacataaacaaagtgggttgatttagatttgaccaacagcttttgctacctctttgaattttattggaagacatggattgttcatcatggattaacacttccttggatctcagcattaatcctcgcagagttcatgaagaagctgttcctaaggtggtagaaagcaagcttttctctttgggaatgcccaagtttaacgtcgaagaagagtctactagtgacttggaggaggaactgaagcgggtgagtgcagaaaacaagaagttggccgaaatgctctcagtggtgtgtgagaattacaacactttgagaagccatttgatggaatacatgaggaaaaatggcgaaaaggaggtcagcccaacatcaaagaaaagaaagtctgaaagcagcaacaacaacaacagttatttgatgggaactaacaatggaaactcagagagcatgtctactgatg

SEQ ID NO: 11015 - DNA, 297 bp, Glycine max
gctcatcatctggaatttatttggcagtcatggattattcatcatggattaacacttccttggatctcaacattaatctccatagggttcacgaagaacttcccgtaagtataaacgtacatatagcgtccaagatcttctgtggaatgtttccctcagaataataattaattctttcttgtgtcctgattaaaaaaaaaatctttctttcttgtgtgttcatttcagaaaaagcaggtggaaaacaattttttctcattggatttggaggtgaagaaatcttctgtaaaacaagag

SEQ ID NO: 11016 - DNA, 767 bp, Glycine max
  unsure (1)..(767): unsure at all n locations
tagaagagctangaccgncgcatgcaccgcgtacgtaccagctcggaattcggcttcgtccgatttgttaaagatggataccaatggaggaaatatgggcaaaaggtgaccagagataacccttgtcctagagcatatttcaagtgctcttttgctcctagctgccctgtcaaaaagaaggtaaatatatataatcaaccaagtgctaactagtaactaggaaatggtttggtttggttactcacatgttagtagggaaatggatctcaagctaagtttgttttggttttggtttggttattcaggtgcaaagaagtgtggatgatcaatctgttctggttgctacttatgaaggggagcacaatcatcctcacccttctcaaatggaggtaacaacaggctccaaccgttgtatgactcttggttcagtaccatgttcagcgtctcttagctcttccccaccaacagctacccttgactggacaaaatccaagtccagcagtgagtctaagaatacaagtcccaaaaccgaatcaccagaagtcccgcaggttttggtagagcagatggctacttccttgaccaaggatcctaatttcagagcagcactagttgctgccatctcaggaaaaatgttgcacaataattaagtagaaaatgagtgaagtgtatttaactcattctataagtggatcttgtttagagcataggatctctatgtaaatacaacataggacattgctacatatatattcctcaatttaatc

SEQ ID NO: 11017 - DNA, 461 bp, Glycine max
gtttccttcttcaacttgtgctccttctaagtgctactccctccctatatatatatgcttctctcacttcacaaacttaatttgaacctctccccttgctcatcatctggaatttatttcccagtcatggagtattcatcatggatattaacactcccttggatctcatcattaatctccacacgcttcaccaactacttccacaaatagcagctccaaaacaattttttctcattcgatttggaggtgaagaaatcttctgtaaaacaagagtcagcaggtgccttggcggatgaactgaatcggttgagtgcagaaaacaagaatttaaccgaaatgctcacagagatgtgtgagaactacaacactttgcgaagcaatttgatggaatacatgatgaagaatcctgataaggagctcagctcatcaaggaaaaggaagtcttcaatcctcaacaacaa

SEQ ID NO: 11018 - DNA, 321 bp, Glycine max
gcttttactgcaaagggaatgcaagtgcttgaatatgttggtaaggagacaatggacttattaatcagtgaaactggaattgaagttgagaaagataaaaaagaaggtgaagaagaaaatgatgaggatcaattatcagaggaagtgacttttgatcgatgcttttacatttatggaggtccagaacaattggaggaactggaggctttgtctagtcattatgcattgttatttaaccgaagaaaagcaaagctatcagctgagcaaaagtctgtatatgatgggaagcttaaagaggtccaacaagtatttaatttgagt

SEQ ID NO: 11019 - DNA, 528 bp, Glycine max
gaatgcaagttcttgaatatgttggtaaggagacaatggacttattaatcagtgaaactggaattgaggttgatagggataaggaaggttgaagaagaagcatgacgaagaaggggaagaagcaattgatgtcatcggcgccgtggagaggcgaggagagtgaagaatccttcaaagagggaaagctgaaagtgacgaggcagggtgatggcacttccaccatgcacgtccctgcctccaagtccaagcatcatcaccatgacctccacgacgacctcggaatcgagattgatcctgaactacgctacagcttccagcgcaattttcagtttcttcagcgtgtttttagcattgacactatggtgaaacctcttcctcctgtcatggcatacaatgtctctcgcaacttgaacttcttcactcgcattttcacacaattctttgatcctgaaggtattgcaaatgcccagaaatccttgggcataggacaggaagataaagttcgcaaggttcgttgaagacaatggg

SEQ ID NO: 11020 - DNA, 1142 bp, Glycine max
tttcttttcgtccggctggatggtgcatttcgggatgctctgatgagaatgggggggaaaggatgcaagtgccctgtgttccttttcttttcggtcaatgctagtggtcaattttgcggagtagctgagatgactggacgagttgatttcaacaaaagtatggatttctggcaacaggataagtggaatggatatttctctgtcaaatggcacattataaaggatgttccaaatcctcaactacgccacataatactcgagaataatgatcacaagcctgtcacaaatagtagagacacacaagaggtgagttttccccaaggtgttgaaatgcttaacattttcaagaattatgtggcaagaacttccatattggatgactttgaattttacgaaagccgccagaaggtattgcaggagaagaaaacaaggcaatctatgccccataccagtgtacagcaaatagaggaattaaccactacacttgggtcagtagacctatcatctgtgaagaacatggaggatcctaaggtggttgagagagtgaatgactgaatagcatgtggggctgatgctattcctggggacccgccatgccagcatgccgatcacgatggtgtggcgatgtgccacgtggaccacaaagtaagaaaaaaaaaagctaatgaattcaaattttaagttctaaaccaaaaattcttgctgctgctgatgctttagaaagggagaaaagaaaaagaaaaagaaaaaataataataatttttatccgggcaaatggtgactgcattcctaattgtacaaaactacaaaggaagaaagtctttggaagtggaatggacccggtgagatagctgttacagggtgctatgaaaagcacgtgtcatttacttttttttttaatctttctttgcacataataagctcagtttggttcttcctttgttcttggtattttcaattttatttttcttgtagttgcagttaccgattttaacaacataacaaatggcacgatttggacagctcatcaataataatatgttgagaatgatgggttccatgtggaaaattattggagttgggaactctctgaccttgcattatttcaatttgaatatactccgcgcattattgcgtaatg

SEQ ID NO: 11021 - DNA, 584 bp, Glycine max
atcttgaaagtcaatcctaaccatgttttctgattagttgacgatagtaaaacttttatgctgacagtaagtgtctattaaactcttattttattttgcagcaaatagaggaattaaccatacttgggtcattagacctatcatccgtgaagaacatggaggatcctaaggtggttaagaaagtgaatgactgagtaacatgtagggctgatgctattcctggggacccaccatgtcagcatgctggtccgcggtaagtcatgtgggccacaaagtaagacaaaaaagctaatgaattcaaacttgaagttctaaaccaaaaaattcttgctgatgatgatgctttagaaagggagataaagaagaaaaagaaaaaaataataatttttatctgggcaagtgggtgactgcattcctaattgtacaaaactacaaaggaagaaagtctttggaaagtggatggacccggtgatatagctgttacagggtgctatgaaaagcatgtgtcatttactctttttaaaaaaataatttttgtttgcacataataagctcagtttggttccaaaaaaaaaaaaaaagga

SEQ ID NO: 11022 - DNA, 370 bp, Glycine max
  unsure (1)..(370): unsure at all n locations
gatcatcgtgatcatcacaattctaattcattcaccaaaaagttcttcgccccttctttgtccccattctttctctttaatatactttgtccatattttcctctttctcttcctatcaaacatccatggcttccttgtcttctagtacaaaacagagcaataataaccaagaggttgatgagaaaccaataccacacgatcaaaacgttctgcaaaagcacgttgcgttcttcgacaggaaccacgatggcatcatatacccgtgggagactttccaaggatttcgagcaataggttgtgggtacttattatcgtccgttgctgctattttcatcaatggaggtctcagtcagaaanaccgcccgggaaa

SEQ ID NO: 11023 - DNA, 359 bp, Glycine max
ggatacatgtagtaattgtcagttggcagttttttcttagaatgaaaatgtcgtctaaggtcactagtgccaccctttgcctagcagtcttattcctcttcttaaccttcacatatgcaggcagacttggccctgcatcttcctctatcacttcaatcaaaactcaacatggggttttggaagaggagaagttggacgtggaggaaacttgtgatggtattggtgaagaagaatgcttgatgagaagaacacttgtggctcacacggattatatctacacgcagaagcacaaaccatgagatattcatatatagctggttctcatatcaaattcaggctatatgcctcacccgtttaca

SEQ ID NO: 11024 - DNA, 503 bp, Glycine max
agcgccaccacaaattacatagtaactctttttctcgaatccacagagtgagactcatcgtgtgaacaacgataacggcatgtttgagcgtacttgaaaaatttgagcggccatggacgaaaccgccgtaacgacgaagcctgattggctcaacaaccgcgcgagggtcgccggagagagaaccgaagaatttttctgtggcggcgacgacgaagaggaatgcgacgacgaggcttgggacatgttgactcggagcttctggcaggcgcagactgtgctggacgagaaccgtgcgctgatcgacgaagtgaacagcaaccacgagtcgaagattcctgacaacatggcgaagaacgttggcctcattactcagatccacggtaacatctccaaggttcgctctatttactccgatttatctgtaaatttccccaacattattcgccagcgcggcgtcgccgccgtcaaccaccgcaatcgcgacggcgacgtcgaagaggatg

SEQ ID NO: 11025 - DNA, 698 bp, Glycine max
ggcaccatcactagaacatatagaaaaaccaagtaatactagccaaaatatgtctcccaaatacatgtcccttttcctcctagtaatactagggatggcttttctggccactacttcccttgctgatcgtcgttttctttcggtggaagatggtcatgatcaccatcaccaccacccaccaaaaaaacactggcctccaaccacacaaaatgaaccttcaaacgtagaaaacaaggagaacactgaggtggaggatggtcatgatcatcaccatcactacccacctaaaaaacactggcctcctaccacacaaaatgaaccttcgaaagtagaaaacaaggatggtcactataagcctccccacaagaagcatcctccttcgggaaattaattaatctagtgaagctgctacgtactaccatgcatgcactcttgtgaaaatatattagagtatatggtttaatcaattagagtccaatctcttggctcttgaaataaaggcatgcattaatccgatgttattttcttgtattagtgtggttgtttttgctttggtcactttggctttgtatttggtagaaataaagatgcacatgctacatgtatgcaatcatatatgttatcatttccttaattttctatgcagctttgtcaactagggtgacaaactattatttatgaaatgaattattacgtat

SEQ ID NO: 11026 - DNA, 390 bp, Glycine max
ccatcatgtctgtctggaaacttgaaacaggttgattttaacgctgaccatattgccaatcctatattacaagggagaaatataacttctgaaggaagagattctataggtgttgggatcagtgagaactcggcattggtcccagaacatgattcacacgcgtctggctttgtggaagtagccttaacaaagcaaaatgaagatgttgggatatctttcaaggatggccactgcaaaacacaggagcctgatgaaagtgacgtgttaactgaagttgtatctgatcatgttgacagcagcagttgccaccatgaaagacagccactggaggaacatgaggagaatcctgaaatgcttggtggcatattttgccttttccgaagaaggttg

SEQ ID NO: 11027 - DNA, 400 bp, Glycine max
agacaaattacttcctatcttgaaagtgagctccattttctatcctctagttttaccaagtggattggagctcagaaattctatccggaggccataaatggatggctgcacaaatgtgcttctcttaaacaaaagccaggcaagaaagagaccccaacgtccactcctaagaatgtatggtcctccaatatatgccacctgtgaaatctggttggaaaagctcggcgaattacccgtccaggctgttgtggattctatgaagagtttagcgggtgaaattgcccggttcttaccgcgtcaagagaagaaccacggtaaaggtgcaaatcacccccatttaacatcttggagtgctcataatatccgtagcgaatcgtcggataatctattgagagatggg

SEQ ID NO: 11028 - DNA, 1059 bp, Glycine max
cacgcggcgtaagctcgttgtatttttaacttgtctgttcttatcttcatcctacgccaatagcccaaaaccttgttctctttttgtggttcatttctctcttccagatgccacttgccgttcttcaccctcacgattttctcaggaaaaacccatctaaccagtaccagaccataatccctcactctcccaacatgaatcctaataagtctcatcggacttcccgaaaccgtaagaagcggcccgatccaagcccacaaggcgttgtcagcccagcccggctcacattatccccgaaaccccaagtcaaaaacaagccgcagcagcaactcgtcatgggtcaggtcaaaatactcaaacgcggccaacttttgacccaaacgacgccggatccaccgccgcagacggaaatcgtcgatcagaagttaactccgcagacggaaaccgtcgaaaaaaaggacttaacttcaatcgtagatggtttatatgcaggctattcgatgttggtgatgtctccacctcctagctccgttccgttaccggctttcatcactaagaagattgcggttgttagtgacgccacgagcgacttgcggaaaatgttacggcttgattttccctaatcctgtggcggtttgtgaatgaacgaggatttgaacggaggttgttggtgattagggcattgtagtgctcgatcttctcttattttttcagcgggaaggtcgtgtcacgaatgcaagtctcttattgtttagaactttcttcagattgccgtacatacatgttactactgggattagtcttcgtactttttagattaattactttgtgatactaattattagttttaaggaataggcttctgtatatctgtgtaatgctttgtaagtatttaggatatagaagcattttcttcctctctcaattatgtgtcctagtcttttaagtttaatgtttctatctcttttgttagcatttatatttacgaattcgtcatttaattagggaattcctgtaattgttgatttatggaatacaaggaagaaaatagtttgttgg

SEQ ID NO: 11029 - DNA, 561 bp, Glycine max
ccctccttctatctttctgtgcttcaattctctcttccacagatgggcgttgccgttctttaccctcaagattctctcccacacaaaccatctactcattaccagaccataatccctcactttcccagcatgaaccccaagtctcatcggacttcccgaaaccgtaagaagcggcccgttcccggcccagctcggcccacaacatcctcgaaatcccaagtcaacaacaagccgccgcagcagcttgtcatgggtcaggtcaaaatactcaaacgcggcgaactgctgtcccaaacgacgccggatccacagccgcagacggaatccgtcgagaagaagacggaaaccgttgtaaaaaagggcttaacttcaactgtagagggtttgtatgcaggctattcgatgttggtgatgtctccacctcctagctccgttccgttaccggctttcatcactaagaagttcgcggccctgagtgaggccacaagtgacttacgggaaatgctgcgacttgattttccctaaacctgtgtcggtttgtgaatgaacgaggatttgaac

SEQ ID NO: 11030 - DNA, 662 bp, Glycine max
  unsure (1)..(662): unsure at all n locations
gtttcaccggaagaacgtttccttattgggcgagtttgccccagaccataccgaatgtataggtgcattgtcagatatggttacaaggacattcaaagggatgatggagattttgagaatcatcttatacagagtatagcagaatttatccaaatggaagcagtgcaacctcagttctcaagttccgaagcttcttcttcacttgatgggaggatggccgttataagttctagaaactatgattatgcttcaagtttaatagtttctgagcaggaggatataggcgttgacatgtccgttcctagcagcagatctgcaaccctgcaaagtttgcaatcggtttacaatgatgatactccacaagttagaaggcgacgagtaagatttcagctaccagaaaatcctggtatggatcccgatgttagggaagagcttttggatttaattcaagccaaggaagctggggttgcatatataatggggcactcgtatgtgaaagcaagaaaatcatcctcattcttgaaaaagcttgtgattgatattggctactcatttctgcgcaagaattgcangggtccagctgtagctcttaacattcctcacattagtcttattgaagttgggatgatatattatgtgtagttcttggtgaaatttacaac

SEQ ID NO: 11031 - DNA, 477 bp, Glycine max
ggcacacaattaagctcaaatcaaaagtccctttgcatactatctatcacttatcagttatcacaaagcaaattcattaagtcttttgccatggcctccaacagctgcttcatcttggcttttttcattgctatttccttctcatgcatggattttggcctagcagctcgccatcttatgcaaacaagtactgcaccaaatttgcctttgccaaaaccaacattgccacctttgccttcacttccaacactgcctcagggcaatgttccacctttgcctacaatcccatctcttccaaccattccaactgttccacaggtcactcttccaccacttgctgccactttacttccaaacttccccacagtcccaaccactattccttccttccccttcttctccccaccaccttcagccaccactccctaaatgaagctactctgcttattggatatataggaactcgtatccttggag

SEQ ID NO: 11032 - DNA, 314 bp, Glycine max
aaaagggaaaaagagaaagcttcgtcaaccgcctgaggaaaaaagaaacagaaaaagaaattaaacataaacaccatgttttattttcataaatatggaatagaaaaacgaaagtcttgaaaaagaagaaaaaaaaaacaattcttttcccttagggtttgactgtgaattgctacatcgcgtgtggcccaaacagtggaatcaccgattccgtcaagttcggtcctctgcagggaaagatctgtccccaattgcccgaaagtttcggattctagagagagaaagtgggtgtcagtagacgcagctagagagag

SEQ ID NO: 11033 - DNA, 479 bp, Glycine max
tcgccctcgcgtccgcacaaaacaaagtttaaagctggcatacacaaaattaacgggaagagatatgtctgagaaatccctttcggttaaatcaaaggcaacaataacatgttttaatacatcttgacgagaagccaaccaatgaatgacaccgttgaaaaacaagccgaaatccgaaacaaaacgatcagagcagccctcgtaagacaaatagggaggttcaatttctttccacgcattgcctctgagtgagaaataatactccacatggatcacatgctcatctgggtgaacacctgtaaatggattgaagatgcaagaactttgattgcagtccaaaagtaaaaaaaaaaaccctgcaggaacctacaaatcggtcaccaaaaggttctgggagcagaaagaataatcataaaatgatgcattgatgtctatggataggatttcaggaatagaagagtctaaagtccgtgcgttct

SEQ ID NO: 11034 - DNA, 393 bp, Glycine max
gcttatggggccaaatgctttgcttactgcaggcaacacattgatagctagcatagctcattcacggaaaggccggtggaggaaccgtgtaattacttgttaacaccatatcttaaagagacacagttggtgtatcttgtcttgttgaattgaaaactgtgctatagacacccttaaaaaaggaattgcttgaaatgagcatgacttttttcttttctgcttctggggtgaaaagtctgtatataatatagactttcatagacaattgatttgcggccacagatagaggatttttggaggcttgactggagagatgattcaatttctgaaggaaatcttcagtctcattttgagatgtttctgttagctgattatagtgtccttgaacccagg

SEQ ID NO: 11035 - DNA, 448 bp, Glycine max
caagggtgcaactgggaatgtagccactgaggatgtcgtttacatgctgaatggacttggagtgaaaacaaatgtggaccttggaaagcttatgcttgctggggatttcatctgcaagcatttaggacgtgcatctggttcaaaagcagctactgctttgagtaaagttacaagtcatgcctccaaactataagttactatagctagtcatgcacctgcatgataggcacattgtttggccactgtagaatatgtatttatgttggtgtttactgtcccgtgggccctgcctatagaaaagagagagccagcaaacacaattgtaatgctgttcacttctgcttgtgttctgagtcagtttagtcgctttgattattgagaaaaatcacatgttgaacatgtactccggaacacacttataaaattgcatagaatgtccaagttcaac

SEQ ID NO: 11036 - DNA, 432 bp, Glycine max
  unsure (1)..(432): unsure at all n locations
gaaatggaactgaatagatcaaggtttgctgggacaactggacaagtgtgttttgattagataaaaagaacgtccaaaaataaaaattcattgtgttatgtataatcgcctttttaaaaatgatcagaagtcatttttatttttgcacattaattaatgattatatcatgatattttgtttgaacggtataaaaagttgctcttatgtcgaaaatgcagaagtagtattttgtttttggtttatcaaaatattgtattacaaggatttgaaggtatgaatatgtattttaagctaaggctactgtggaccagtttgtaagtggttcatggggaacaattaattttaaccgttagaataaacttgttattataggttaaatcacacctgatttcctcaccacttctccttcgnacactatatatattgccgac

SEQ ID NO: 11037 - DNA, 1108 bp, Glycine max
ggagcctaataaatcttgcaacaattctgtatcttaactcaattagggtgcctgccactatagcatatgttttctgagcaatatttggttttcaagtgctctttggcattgtgaagatcaaaaagctagatgaacgggaaaggttgattacagggactgcataagcaactacttgatttatgatggacatgctgctcatgttaatgtcatggttacaagtcaacctccggggcaccaaaatgactaggagctcagagtaagagctaacatcttggaatatatcaccatgtgctaaatctttatactggcaggcatgctggaggcttctgttctcatttacttccctaaaatcatcgagctgaggtagccaactggcgagccacatttttgtcattaacacgatcccccttgcgtcttcattgcaaaattttatcatcaaataacatgtattagtgcttttttgtacctcatccatgttgtaaattttataggcattggtgtagattgtagtgtttattggtgtaatcacatatagtatggtgcagcttccaatatagtttgacaacgggaagctttgcttgtaattgacatacataaatttattcaatgaaaatgcaaatataagtattttctataaagcaaaacaaaagccataggttactactcttcgccttttcctttgcaattgttaccaaacaattcttgcttagcccttacaagcaagcattaacaacaatgaagaaagtagtgttaaaggtgggcttacatgatgatagaatcaagcgaaaagttatgagaacagcatctggtctttcaggggttgaatcagtttctattgacatgaaagacgagaaaatgaccttattagggaacattgatccagtgaatgcagtgtgcaagctacgaaagtgttgtcaaactgaaatagttacagttggtccagcaaaagaggataaggagaaagagaaggtggagccagtaaaagaacctgctcctctcaaactctatgatgcctatccctattattatcaaatgacacccccactgtatatgtatagttaaaatgtaacataggctagaagttttgaagagaatcctataaagctgt

SEQ ID NO: 11038 - DNA, 501 bp, Glycine max
gacaacccaaaaactactgaaattcccaaaggcaaaaaaaaaaaaaaaaatacaagatgaagagcaagttcctttttgttttcctattattgggaattcttaactgtgaggcacaatatttcaatgccaacccatacgactatttacaactagccttaaggtggcctaattcctattgcttgacacatgaaggtggttgcagggaaatagtgccacaatattttactattagctaccttcatcccatgagaagaggaggccctgatctgcaaaattgcccctcaccatttaatatgccaaatagcactatggagataaacaagaatgacctactcaaatactggcctgatctgagaactgataattttattgagagcaagtcattatggagggaccaatggagaaagtttggttcatgctatagtatgatgccagatgactatattgtttatgcactcaacagtagaaagagaaatgacctcaagaaaatcttgacaaatg

SEQ ID NO: 11039 - DNA, 830 bp, Glycine max
acatgctcgacttgtttcaaataaaaaagttttgttaagaatcgaaaatcttaatgatggtatcagaatgataaaaatgtaaaaatttgttgttgcgataaaagtatatataaaagtgctggtgggagtgggcagtggtgagtgaggagtgaagatggggtcagaggtgtctaaacagatggagcgaagaaagacaatccagacagagaagaagagtctgtccgatctgaaaagcagcggagaagactaccctggctccgactaccgtccccaagacagaaaaaactggatgtcccatctcgaccctcagaaactccgcatcaaccaaatcgtctggcccggcacccacgactccgcaaccaacaaaattggcatccctctcctcactcgccccttcgcccagtgccaatccctctccatctaccgccagctctccctcggcacccgcgtcctcgacatccgcgtccaagaacaccgccgcgtctgccacggtatcctcctcacctacggcgttgacctcgtcctcaacgacgtcaagaagttcctttccgacacgcagtccgaaatcctaatcctggagattagaaccgagttcggccacgaggaccctcccgaattcgacaagtacctggaggaacagctgggggagcatctgatccatcaggacgacgccgttttcgggaagaccgtggcggagttgttgccagagttatctgcgtttggaagcccagaaaatcgtcccagcccaaacctgggagtcctctctggagtgcgggctttctgaaggataattggatcaacacggatctgccttccaccaagttcgacgg

SEQ ID NO: 11040 - DNA, 374 bp, Glycine max
aaagaaagagccacataattcacaattcatagatagagaggctatggctggtcttcaaagatctgcagtgtccttcaggaggcagggttcatcaggcttcgtttgggacgataggttcttacaagaggaattgaacaaagtcaaggaagatcacaacaacaacaacaaccacgaccacgacaacgatgacggcggtgaaattaaagagcttcaagttcaaacaacgccgcccctccagagaatccgctccaacggcggagcacgcggctaccgcactggaaaagtttcgccggcgattgagccaccgtctcccaggctctctgcatgtggcttctgcgccgcctttggaaaagcaggggacaacatgcatcgac

SEQ ID NO: 11041 - DNA, 1217 bp, Glycine max
ggagaacgaaaccttcatatgcacggtccccatgtttcacatatacggcctggtcgccttcgccacggggcttctggcttccggctccaccatcgtcgtgctctccaagttcgagatgcacgacatgctctcctcgatcgagaggttccgcgccacttacctcccgctcgtgccgcccattctggtggccatgctcaacaacgccgccgctatcaagggcaagtacgatatcacgtcgctgcattcggtgctctccggtggggctccgttgagcaaggaggtcatagagggctttgtggccaagtatcccaacgtcaccatccttcagggttatggtttgacggaatccaccggcgttggggcctccaccgactccttggaggagagtcgaaggtacggcacggcggggctcttgtctccggccacccaggctatgatcgtcgatcctgaatccggccaatcgcttccggttaaccgcaccggggagctctggctcaggggtcccaccatcatgaaaggttatttcagtaacgaagaagcaaccacatcaacccttgattcaaaaggatggttaagaacaggggatatttgttacattgacaatgatggattcatatttattgtggatcggttaaaggagctcatcaaatacaagggatatcaggttcctccagcagaactagaggccttgctactgactcatcctgctattttagatgccgctgttatcccgtatccagataaggaagctgggcagcatccaatggcatacgtggtgaggaaggctggaagtagcttatcagaaactcaagttatggattttgttgcaggacaggtggctccgtacaagcggattcgaaaagtggcatttatttcctccatacccaaaaatccatctggcaaaattcttcggaaggatctcatcaaactcgcaacgtctaaactctgaatagatgagctttttcgtaatatattttttctatcggagttggacaagtgaggaaataatctttagctccttttttgctgtaattttctggcttgtttacttttgctgctttcatattatctgttctttgttcaacagtctattgtaatttgtagagaacaaagtgctgtgagtacaccttataggcaataaaattgtctctttgtaatctcttttttcaattggaataacttctctatcagtttgtcatcagactttgtggacaata

SEQ ID NO: 11042 - DNA, 467 bp, Glycine max
ggaagacagagcagagaagccgcttcaatgtccaaagatgacaactcttcttctcaagattcttcatctgaccttgaattttctctctccctatgcccccgctaattcctccttcacttctcttcccattaccgctcccagtcaggttgttggatggcctccccttggagcatatagaatgaacagctataatagccatgcaaaatcaccagccacagaagttttcaattctacacctgacaaaagagcaagcaatagtgctggggttaggaagagtgcagatggtggcagtgatagtagcaacattatttccaaagaaaaaggaaacctcaggacttccctgtttgtgaaagtaaaaatggacgggataccaatcggaaggaacgttgatttgggtgctcacgattcttatgaaaccttagctcaaaccttggaagatatgtttgatgaatcaactacagtcctca

SEQ ID NO: 11043 - DNA, 393 bp, Glycine max
gaagctagcagccaagtaatattcaataaaaatatggaactgacgaggctcatttcggttctcttcttcttgctagtgatcacggtgggatcttctgcttctccacagcattggagacaaaaaagggttcgcgagccgtgcaagaagttggtgttttatttccacgacataatttacaccggccacaattccaagaatgccacttccgcaattgttggaacacccgcatggggaaacaggaccatactagcggggcagaaccacttcggtgacttggttgtgttcgatgaccccatcaccttggacaacaacttgcactcgccaccggttggacgtgcccaagggttttacgtttacgataagaaggagattttcaccgcttggcttggcttc

SEQ ID NO: 11044 - DNA, 577 bp, Glycine max
ctccctccttttttgacccaaaccctttcttttttcttccttccaataccgctataggtttgttgtgactttgatcgtataattagcttagctctctttgtcaactaagcggtgtgatgatggccatggaaggacaacaaccacaatcatcatcagaaaatgggagagaatcagaggattatggagaagaagggagagaaaagggtcctcatcctcttgctcaagctggaactggctctttccctggaggcttcattgggaaacataggttgcaagcagccataaccaacctcaataaccaaattagtattttgcaggaagagttgaaaaaagttgaaacaattggtgaatcctccaccgtttgcaaggatttaatttcaagcgttgaatccactccagatcctctccttccattcactaaaagttcggtcgatgcgggttgggatcgatggttcggaggtgcccaccactctcgaaatcacaaacgttggatttagatattttggtttgcatttatttatattttttgggtactatgaacatttaatttaaaatttacctgcttgtgatggaaaca

SEQ ID NO: 11045 - DNA, 431 bp, Glycine max
ctccttctgcgtcccccaagcacctcacccattagccatgccgccgcgagccgtgaaggggcagaaatagtgttggtagtgagataccttggtggtattgaaattaaatttgtctatcaaggggaataactgatggttgttgcgtggaataggtgactgaaaaagacaagacagagtgagaaagggaatggagaagaagatcactttggttcagactattgccactgctggcgtcttctctgccatttcattctggtatgggttcatgtttggcagagagtcatcgcgcaaagaactctctcacctgatccaagatctccgtcacggtggcggaaaccctccctcttcctcttcctcccattcttaatccaactttctctttctctttcaatttctttaacatcgttacttacactataatatgtctcttc

SEQ ID NO: 11046 - DNA, 377 bp, Glycine max
gaagacgacagaaggggagagagaatggagaagaagatgactttggttcagactattgccactgctggcgtcttctctgcgatttcattctggtatgggttcatgtttggtagagagtcatcgcgcaaagaactctctcagctgatcgaagatctccgtcacggcggcgaaaacactccacctccctcccattcttgattgagctatctctttctttcaaatcgttacagtgtatgtctcttccaaatttccccctaacatttttgtaactagcgttgattctcaactctttagcttgttctaagtgcaccaaacaacacagtattgcagcttccttatattattaccgttatgaattatctttattagagagaatc

SEQ ID NO: 11047 - DNA, 1590 bp, Glycine max
tcgcagctacattcatactcgagtcaaaggctggcttggctagcttgcgtctttgttaagactttgatgacatgttcacaaccccgcccgagaacctacttttttgtttcataggaataaaacatttactttgatcaccttttcattccttttatgtaaaaaaaaaaaaaccacaacacatgggtgtgtagtagaattgcagtgaaattggaaaaatactcaaacatggagcgctatgagatcctcaaagatattggttcaggaaattttgctgtggccaagcttgttagagacaactacaccaatgagctttttgctgtcaagtttattgagagaggccagaagattgatgagcatgtccagagggaaatcatgaaccacagatcattgaagcaccccaacattattagattcaaagaggtcctgttgacaccaactcatttagccatagtaatggaatatgcttctggaggagaactctttgagaggatatgcaatgctggtagattcagtgaggatgaggcaagatttttctttcagcaattgatatcaggagtcagttactgtcattcaatgcaaatctgtcatagagatctgaagcttgaaaacacactcttagatggaagcactgcaccacgagtcaaaatttgtgactttggttactcaaagtcatcagtattgcattcacaacctaagtctacggtgggaacgccagcttacattgcacctgaggttcttacaaggaaagaatatgatggaaagattgcagatgtttggtcttgtggagtcaccttatatgtgatgttagttggggcttatccttttgaagacccagcagatccaagaaacttcaaaaaaaccattggtaagatacttagtgtccagtactcagtcccggattatgtacgagtttccatggaatgtagacatcttctatcacaaatattcgtggcaagtcctgaaaagagaataacaataccagaaattaaaaaccatccatggtttttaaggaacttgcccatggaactgacggaaggtggaagctggcaaatgaatgatgtaaataatccatcacaaaatgttgaggaagtactgtctattatacaagaggcaagaaaatctcttaatgttcccaaggttggaggccttcttactgggggcagcatggacctggatgactttgatgctgatgaagatcttgaagatctacaaacaagtggtgaatttgtgtgtcctatttaagtgtgtacatgaacaagctgagctatagtttgctgtgaaaatgtaaatagatttttctgtaggggctaaaattccttggtggttaatttttcaattaagatcagtagccccacttgcacggcttgttatttatcagttttgagttttgacatttaaagggttttttttttttatttctgtatgtttatttttccctcttccctatcacacgtgtggatgtgatcagatttacgaccttccgaatccatgggctgctttcctagagaagtactcccgcatgttccatagatgtgtatattaaatcaagcaagttgtggcaggttcctcttttgcaaaaaaaaaaagaaa

SEQ ID NO: 11048 - DNA, 500 bp, Glycine max
atgtaaataatccatcacaaagtgttgaggaagtcctgtctattatacaagaggcaagaaaatctcttaatgttcccaaggttggaggccttcttattgggggcagcatggacctagatgacttggatgctgatgaagatcttgaagatctacaaacaactggtgaatttgtgtgtcctatttaagtgtgtacatgaacaagctgagttagctgtgaaaatgtaaatagatttttctgtaggggctaaaattccttgatggttaacttaattttcaattaagatcagtagccccatttgtatggcttgttatttattagttttgacatttgaaggttttgtttccttatgttcattttgccctctcccccatcacacatgtggatgtcctcagatttaggaacttccaaaaccatgtgccgttttcctagagaagtaacaccacatgttccaaagatgagaatattaaataaagcaagttgtggcaggttccacttttgc

SEQ ID NO: 11049 - DNA, 330 bp, Glycine max
cccacgcgtccgcgggtgtgtagtagaattgcagtgttggtggggagaaaaaaaaatacacgctcaaacatggagggctatgagatcctcaaagatattggttctggaaattttgctgtggccaagcttgttagagacaactgcaccaatgagctttttgctgtcaagtttattgagagaggccagaagattgacgagcatgtccagagggaaatcatgaaccacagatcattgaaacaccccaatattattagattcaaagaggttctgttgacaccaactcatttagccatagtaatggagtatgcttctggaggagaactctttgag

SEQ ID NO: 11050 - DNA, 493 bp, Glycine max
ggaggagtcttccttgacaattttaatgtttccacgcggtatgcgcccctcggtggcgctgaattgcagcggtttgagcactcaccaaacttcactctgaactctgatgacgatggtgatgatcacacaccagaggatgacaatgttgggaacaagaaggtggttgttgtggagcatgctgttaatggtaatggcgtattgcctcacaccactgagtgaatcatgttatgttaagagaacaatagttcaaattgtataaaggggccggtttgtattgattgtttttgctgtttgctgtgtcttgtgtttggcatgataaaatagtacaatgtgccggaaattgctttggattgaattatgcaattcggtgttgttgtgaatcagagttctttatagagcatgtacggtcttatttgggattgaattttgtttggaatttgggacttggttgccatcaatgtaaacttttttagaaatgaagtaatatgttctg

SEQ ID NO: 11051 - DNA, 1015 bp, Glycine max
acacccacgcgtccgccgcgacgtcgttttcagacacggcttcgatagtgaagcaacgattcaatagttgacaagtggttttggtttgatatatagatgtggtgcgcgtcgtgttgttcgaaggaagtgaagtaaagactaaagagagttgtggtgtggtggtggttgtcgtttttgaaatggcagcgtcgtcgtcagagaagcaagtggtggtgataggcatagacgacagcgagcagagcacgtacgcgttgaattgggctctggataactttttcccgagcccaattttcaagctcgttctcatccactccaggcccaccgccacctccgctgtgggcttcgccggccctgtgtttgcaggagccgctgaggtcttgcctattgtagattccgatttgagaaagattggcgccagagtcctcgaaaccgctaaacaactttgcatcaacaaatccgtaaatgatgtgacagcagaagtggtggaaggtgatcctagaaatgttctttgtgatgctgtagataagtaccgtgctgcaatgttggttgtgggtagtcatggttatggggctataaaaagggcggttttaggtagtgtcagtgactattgtgctcatcatgctcactgcactgtgatgatcgtgaagaagccaaaaatcaaacactgatctgtaatggctgcgtctatatagtacaacaataaacataatcctttcagccaaagaagagagaaagaaaataatgttcacagaaattcgtaactatgcttgttgtatggatatggcttattgactttatggtttgatacgttgaggcacagtttatttttaaagatggaaccatcagaaaatatgtacgtatcaggactttaccttacattgtacacgaaaagttcttgaactgatgagttcaattccattactgctcttttcatccttaataaaataaaatagtaaaaaaatattgtactagtttattgcaatgcactactagcctgaacaatttctagttattc

SEQ ID NO: 11052 - DNA, 476 bp, Glycine max
acgaggaatccgcgacgtcgttttcaaacacggcttccatagtgaaggactgattcaataattgacgagtggtttgtttggtttgataggcatagacgacaaccaagtacagagaagtaaagagagttttgctttttgaaatggcagcgtcgtcgtcgtcgtcggagaagcaagtggtgctgataggcatagacgacagcgagcagagcacgtacgcgctgaattgggctttggatcacttcttcccgagcccaatcttcaagctcgttctcatccactcaaggcccaccgccacctccgccgtgggcttcgccggccctggagccgctgagatcttgcctattgtagattccgatttgagaaagattgccgccagagtcctcgaaaccgccaaacaactttgcttcaacaaatccgtgaatgatgtgacagcggaagtggtggaaggtgatcctagaaatgttctttgtgatgct

SEQ ID NO: 11053 - DNA, 416 bp, Glycine max
agactaaagagagttgtggtgtggtggtggttgtcgtttttgaaatggcagcgtcgtcgtcagagaagcaagtggtggtgataggcatagacgacagcgagcagagcacgtacgcgttgaattgggctctggataactttttcccgagcccaattttcaagctcgttctcatccactccaggcccaccgccacctccgctgtgggcttcgccggccctggtaggttcattctgttacgctcttccttttcacgctttcttcgttaattgagaatccctttcttagtgtttgcaggaaccgctgatgtctaaactattgtaatccattgaaaaatgcccaatctcaaacgtacaattgatacaatcgaattgtttctctcttctccttcgtattttatctttttgatttgtttactt

SEQ ID NO: 11054 - DNA, 547 bp, Glycine max
acgctttgtgaacttgtccattcaacttcttactacttaccataaagagctatctcactgcggtcgggcttattagaacaggaaggtggtgttattagccttacacaacacctaccagatcacgtacgcgttgaattgcgctctggataactttttcccgagcccaattttcaagctcgttatgatccactccaggcccaccgtcaccttcgctgtgggcttctccggccctgtgtttgcaggagccgctgaggtcttgcctattgtagattccgatttgagaaagattggcgccagagttctccaaaccgctaaacaactttgcatcaacaaatccgtaattctgtttttcttcctctttccatgccttttcgttaatctcttaatccttcttctgcatgtttgtttttcacgtttaactttaccggttaacgtgattttaggtaaattttcgtatgcatgactccacattaaggaattaattatgtgtccataattgcttctcaattgaagtgactccttcgaatgaaaaattgatttttactat

SEQ ID NO: 11055 - DNA, 412 bp, Glycine max
ctcacgcgtacgtgatgtgatgcgatgtactaaataacactaactattttatgtaggtgtactgaagaacctcgagcattgtatggctgcatttctcgtactaagttcctcttgtcttatggattttctgatgctctgttaagatactattcggttccagtgatgtatatattttgcctccaaaaaaatttaaaactctgatcatagatcatataattgatacatatagatcaattggacatttaatgttaatgtatcaagatcaaaaacggtaatttagtatgactcaaaaaatgtacacctatttatatggaacgaggttcgtaacatttgaattctgaatgaaaaacgtttcaatgattcaaccaaaattaaattaattgcgcctcttattaacatatttatttttttt

SEQ ID NO: 11056 - DNA, 664 bp, Glycine max
gttccgcaactagttaaagcagctgaagagaaacccgttgataaaagttcttcctcctgtgtcccatttggagagccagttgaacaaggtcataaaaccatgcaagaagatcatctgaagcttgaggaagcctgtgttatggtgaatggagatgaaatccaattacctcccaaagcaggtggtaatttagatactaataagaaaaaggcgcggcaaaccttttctttgtctaagaagtctgccagaaagcaagagtataaggagcttgcagcatggcatatgaacagtgaaaaagtaaagggagattgcatgaagaatttagatccaactttaccacaagaccaaaacaaattactgcttcctagtatgtctgaaccagaatgggagcttctctaattctaaatgccaggatgatcaagttgtgttgatacccaaaagccaatcctacaagtttggattccctcataagcccttgtggagattaagatgcccaactggaaatttaagatgctgaaatgatataaattcatccaatacttatgctatctttagttctttcctagcccctgaactttcctacacaacctctttctttttcctgctcccagaaaatagaaaagggtacctgtaattaggccattgaaatgagaatgtctaatagaat

SEQ ID NO: 11057 - DNA, 577 bp, Glycine max
cctcgagccgaatcggctcgagctcactgattgtttcccgagaaaatgggttttcttttttcgttttcgttttcgttttcgtggaatagacgatgaagtcttatcgcttttaatttgtgaattttttaatttggttatgaaattcaccagactcatggtttcggacttgtggttattgctcgcagcttaacgctgcaatttctttccaagttgatcgagcgacttcaggattgccttgcatacttttggtgtttgaagagctaatctgtctaccaaaatgaagggacgtgtaaggtgggatgaggctaatattggagaaattgaggcaaacaaacctgtgaggcagaaaattactgagcctaagactccatatcatcctatgattgatgatgacagttctctatctcctgtacgaggaagttttgatgcatgtattgataatgaaaatcgtgctgaagcaatatggagtgctctgaatgatgtagcctccagtagcagaagaggcactggacaatctggtggttggacatcatctgaggatgagccagaagcaatggagcaagatgatgatgattct

SEQ ID NO: 11058 - DNA, 561 bp, Glycine max
atctcaaggaaattcaatgttatgtctgcaagagacttggccatctatgctgtgtcaatactgatgatgcaacagcaggagaaatttcttgttacaaatgtggtcagctgggtcatatgggtttggcatgttcaaggttgcgggatgagattgcaagtggagccacacccagttcatgcttcaaatgtggtgaagaaggacattttgcccgggagtgcacaagttctatcaagtcagggaagaggaattgggaatcatcacacacaaaagataaaagatcccaaaaagaaaatgattacatgggaaatagatctgcatctaatgatatggttggggctcgcagaaagaaacgttcacctaccgaagaaagaggcttttcaactcccaagaaatcaaagagtagaggtggttggacggcggagtatcctaccgaagaaagaggctttacaactccaaagaaatccaaaagtagaggtggctggacaacagagcatcctactgaagaaagaggctttaccactccaaagaaatccaagaatagaggtggctggacatcggagc

SEQ ID NO: 11059 - DNA, 430 bp, Glycine max
ggaggctgaagctgagaagcaatatctgtatgagaagatcaaattgcaggagccttctcgtgtatcacagagcagtagtgggggtgacccctcttcaatgctggtgtattccaaaatccatgatcttctctacagtgttcctcccaaggcagacggtcaatctaatgagtgccaccctttcagaacaaacccatgagtactggttcagtgtatgttataatcttttacatattatagcaatgttattctgttgcacaattgatgaagagttagtctaattccattaggttcaagacaatgtaagccttttgtagatcaaagaggtactagtaagtaaaggcttaactcagtttgaaatttggtttgttctatccggtatatgtatgaatacgcatttgtgacaaattattgattaaaaaaaaagaacgaa

SEQ ID NO: 11060 - DNA, 327 bp, Glycine max
  unsure (1)..(327): unsure at all n locations
tacgccaatcctttttccacaataatccaaataattttgctgatgtaggaggtggtgtcctaggctgtagaggattccactcaagctttagaatccacacgagagtggcctgtctcttaacatagatgtgtcaactacaatgataatttctcctgggcctgtggtggatttcttaatttccaatcaaaatgtgagagatccttttcaacttgactgggctaaaggccaaaaggacctaaaaaatctgaggattaannactagccatccaatcaagaattcanaatttctgggctcagtgaactcccatgcagagagcagacttttac

SEQ ID NO: 11061 - DNA, 482 bp, Glycine max
aatgctggtgtgtgtgatgggatgacgtatgaagaaatcaagaagaacatgccagaggagtatgaatcccgcaataaggacaaacttaggtatcgttatcctcgtggagagtcttacttagatgttattcaaaggttagaacctgtaattattgaacttgagcgacaacgagcacctgttgttgtgatatctcaccaggcagttttgagggcattatatgcttattttactgacaggcctttgaaagaaattgcagatattgagatgcccctccatacgataatagaaatacaattgggagttacaggtgtcgaagagaaaagatacaaactaatgggctgaaatgaataactgaaggagagaagaaactggaaggaaagaatagatttaagtcagcattttttgtttttatgagagaagaataaatgatgattatcaatttatcgtgtatattgtaatcttctaaaacaaccccttttaat

SEQ ID NO: 11062 - DNA, 836 bp, Glycine max
ggggaattgggagtttcattttcattaatttttatttctccccttttctcaatgcttttcttaatgttgaatccttcacaaatcgtcaagagttagcccacccagaacaacaacgcgtttcagctggccacacacattcttaatttttttggctggcctatagtaaaaactcatatcaatgtcctcaagaacgttgaggagaagactccatcatggggatgttgatggcaaaaggcaggagcatttggagacttcgggattagattcgttgagtgagcccttgctggcagatgatgattatattgagaataagaagatatgtactcttgaagatctatgggatgatgagaggaagaaggcccagtttcattggacattcatattctcaaacctcattgcacaatgggcacagtggttagcaaatgttgtattaggatctggatctattcttgggcgtcttttatcttttccttctgctgcactaaatatgcaaaacaataggatgcttcctccatctctaagccctctgcaggaagacaggctaagaaacctacggcaacggcttgaagtcccctttgatggttctaaagcagagcaccaagatgcacttaaaccaattgtggaaattggctcacccggacagggagcttccttcgcttaaatcagacctttggaacgaaatgggatggcaaggttctcacccctcaacagattttaggggtggaggatttatttcattagagaatctcatcttctttgcgatgaagtatcctgattcattccagcgattattgcataaacaagatggaaccacagctgagtgggaatacccactt

SEQ ID NO: 11063 - DNA, 614 bp, Glycine max
gagcaccaagacgcacttaaacaattgtggaaattggcttacccggacagggagcttccttcacttaaatcagacctttggaaggaaatgggatggcaaggttctgacccttcaacagattttaggggtggaggatttatttcattagagaatctcatcttctttgcgatgaagtatcctattttcccaaatatacactcatttctctgacggagaggctatgcaagctataccctcatttctctggtgtgagcattactttccagttaaaggttccagaaaatagcatactcatcaaactgccacattttgccctcatttctctgatcaaactacttagcttgtgtggcgttgagggcatgcccaacattcaccaaaaacttgcaaaagcctattcatactgtatttgacagctggtccatgtaaaaataaatgttgctgtttctgaattagtgtagcaaattacacccatatttgaagacaaattcatgtttgatttaagaagacttcttttaaaaattccctagtggttatataagaaaaccttaatgtaaaattcttgatactgcactgctataggctcaccaacttttccttgtgtaaaaaaaaaaaaa

SEQ ID NO: 11064 - DNA, 464 bp, Glycine max
ccacaatgtattttattttatttattcttatcaggcacgaaaagcaatagcaatagaattaagcaaccattttttttaattctgttttatcaaccctaatttttaattatttttgcatttccattcaaagactcctttcctttccctctttgaaattcaggtgtttttaagaacagcccaattcagttgatttgcgtttcatattattcggctcggtatcaatcgagaagaaaaaaagcttctttttttttttctcgttttaatcggctggcctatagtaaaaactcatatcaatgtcctcaagaacgttgaggagaagactccatcatggggatgttgatggcaaaaggcaggagcatttggagacttcgggattagattcgttgagtgagcccttgctggcagatgatgattatattgagaataagaagatatgtactcttgaagatctatgggatgatgag

SEQ ID NO: 11065 - DNA, 430 bp, Glycine max
ccaatttgacacaggactataaattcctttttcatggaagcaagaattgggagtttcattttcgttcaattatttctccccttttcttaaaatcgaattgaatcgaatccttcacaagtcaagagttagcacacccaaaagaacgcgtttcagctggccacactgttgatttggctgacacatagtaaagaatcatattaatgtcgtcaagaacattgaggagaagactctatcatggggatgttgatggcaaaaggcaggagcatttggagacttcgggattggattctttgagtgagcccttgctggcagacgatgattatattgagaataagaagatatgtactcttgaagatctatgggatgatgagaagaagaaggcgcaagttcattggacattcatattctcaaaccttattgtgcaatgggc

SEQ ID NO: 11066 - DNA, 1245 bp, Glycine max
gaagaataatgagcagcagtgcagggaagttggtgtgtgtcaccggtgctgccggttatattgcttcatggattgtcaagttcctacttgaacgtggttacactgtcagggccactgttcgaaacccaaatgatcacacgaaggtagaacatttgctaaaacttgaaggtgcaaaggagagactgcacctttttaaggcagatcttttgggtgaaaattcttttgactccattgttgagggctgtgatggcgtctttcatactgcttctccttttattatcaacgtcaaagacccacaggctgacctacttgacccagcagtgaagggaactcttaacgttcttaaatcatgtgtaaaatcgccatctgtgaaacgagtcatcttaacatcttctgtggctgcagttgcatataataaaaggcctaaaagtcctgaagttgtagttgatgaaacctggtggtctgatccagattactgtagggaattaaagctgtggtatttactttcaaagactttggctgaagatgctgcctggaaatttgccaaagaaaacgaccttgacttggttgttgttaacccagcaatggttgtagggcctcttttgcaagcagagcttaacactagtgctgctattattttaaacctaataaatggttcagaaactttttcaaatgatacatatggatggatcaatgtgaaagatgttgcaaacgcccatattcaggcatatgagattgcttcagctagtggaagatattgtttagttgagagagtggcacactactctgaactcgccaggattttacgtgatcagtacccgacatatcaaattccagaaaagtctgcagacgataagccttatgtaccaacatttcaggtttccaaagaaaaggcaaagaccttggggattgaatttattcctttggaagtgagtcttagagagacagtggaaactttgaaagaaaagaactttgccaacttttagtctctgatatctctgcttgatcaggagtgaacacgttgagaatctcaacggtgtttcgtttgtggttctggttttagaatctcattgcttgaaaataaactattgtactgaaatgtcaagcttgtgtgttgtaataaaacaagattaattgttggttttatttcggtttgtactcatgaaggaaaccaacgtgtggtataacaagataataattaagtatcaggctatttctagtccaaaaaataaaaactatagaaat

SEQ ID NO: 11067 - DNA, 386 bp, Glycine max
gagggatgaaaaaaagagaactggaaatacgaaaccctaaacccatcatcgctcccagaaagttgtatcggtttctcttcttaagttttcttcaccatctcaagattaagctttttgggttcattacaggaaaatgttgaaattcttgtcgagagtgaaaatcgagttcaacgcgttggacccgcgaacggcgtcgtgtatggagtttctggcgcaatgcaactcgcggaaggcgaaggagtcgaacccggcgtgcgaagtggaggtgaagcgcgtgagggaagagcgcgcgccgcagataacggtgacgttcgttaacggcgttgaggaagtgttcgacgcgacggcgacgccggctcagagcatacgaaaactgattctggaaa

SEQ ID NO: 11068 - DNA, 1110 bp, Glycine max
cccacgcgtcctcaattaccactttccattatttttattcttaaaaaaatgaccaaaaaagaaaattgcgtaatcctagaaacgtaaaaccaacctcaacctaacctaggaaactccgtcaccactttccctctcccatttttatatcattcgccacacacatcatatgtcttccgcactgacaaaaaacgatctccaacggtcatgaacggcggcgctgaggcctccgtcaatcacaggcgcagacaccaagcagcttccgctaacggcgttaagatagcaaacggggccatggcgaagccgtcctcgacgctctgctacgacgcctcgttcatgaaatggaccgtggcggatgctgtccacgtggcgacgcatcattggatgccgtgcttattcgcattagggcttctcttcttcatggccgtggaatacacgctcctcatggttccgccgtcgtcgccgcctttcgatctgggcttcattgccacgcgttccctccacgcactcctcgagtcatcgccgaatctcaacacgctcttcgccgggctcaatacggtgtttgtggggatgcaaacgagttatatcttatggacgtggctgattgaaggacgccccagagccacgatttcagcattgttcatgttcacatgccgtggaattttagggtactccacccagctcccattgcctcagggatttttgggctcgggtgtggatttcccagttgggaacgtgtcgtttttcttgtttttttcggggcatgttgcgggttcagtgattgcttccttggacatgaggaggatgcagaggtgggaactggcttggacttttgatgtgctcaatgttttgcaagctgtgaggttgctgggtacaagaggacattacactattgatttggccgtaggggttggtgctggaattctctttgattctttagctggcaagtacgaagatagcaaaaggaatgctgctctatccacaacccacagagcacaatttgattgcgtcaacaatgtggatatagctaaaaaaattaacaaatgatcatggaaaagtacacatggagtgtaaaagtacaagggtgagtgagagggcaagagtctgaattgt

SEQ ID NO: 11069 - DNA, 404 bp, Glycine max
gagaaacgtttcatcttgaccagtcattttaatggcaccatatgccagctgcacttgaagcgttctgaaggagagaatggagaagctaccaatcttctaaagggtagtctgttgaaaaccataattttcttagctgagatggtggggggtggtgtatagccttcaatagtgattaaaactcgtcttttgagcaaacaaatctttggttgttaggaggttgaatttgaaattcccttgtcatttggtacataacattttggggttgggttttgtgtagaaggtataggaatgtaggtatagttaaactcttttctatggcccatttcaccatagtgggatctttatttgcttcagttggtgaagctccgcgaggatggggaaatgtgtaatgtttctacaggagc

SEQ ID NO: 11070 - DNA, 441 bp, Glycine max
ctctctacaaacaatatcaagacaacttcatctaattaaccatgaatcaccaacaacaatctcctgtgactgcatatccagcagtgagtcagagcaacccagcagctccaccaccacctgtgggttatcccacaaaggatgatgttccttcccaacaaaatgttccaatcaaaacctctactaggggtgatggcttttggaagggatgttgtgctggattgtgctgttgctgtgccctggattgttgtctctgattgaagttatggatttgggcttatcctctctgtcctttgtcattttctttactaatttaattttgtacttgtctaataagggtatttgtgtcctccgagacagcaaaattttatttatgtatgtgatggaatttgtatcttgttgatctttttttaactttggatagggaatcaatcacatggacca

SEQ ID NO: 11071 - DNA, 595 bp, Glycine max
  unsure (1)..(595): unsure at all n locations
agaaagaacaaagaaagggaacaaaatcaccaaacccaaaccccctttctctactaacaaaaaaaaatcaaccaagttccaaacgaataatcacaaacaacaatccccggtgactgcatatccagcaggggcccagagcaacctagcagctccaccaccacctgtaggttatcccactaaggatgatcttccctcccaacaaaatgttcctgtcaaaaccactaccaagggtgatggcttctggaaaggatgttgtgcgggcttgtgctgttgctgtgccctggattgttgtctctgattgaacatccctgcagtactttatggatttgagcttgttctctctgtcttttgttattttctttagcagattaattttgtatttgtctacgctaataaggatatttgtgtcctaagggacagcaaaatgtatttatgtgacggaattttgtatcttgttgatctttttgtactttgtggaaggtaactaatcacatggaccattattgcaattagaaaccataacggttcacatcaataaaaccactttatttaacangggangggtgggggtagaaaaaaaaaaagcggccgctct

SEQ ID NO: 11072 - DNA, 332 bp, Glycine max
gacaatcagctaatcccacactctcttttctctacctacagaaagaataaaatcatctaagttctaacggtgaatcaccaacaacatatctcctgcagtgactgcatatccagcaggggctcagagcaacctagcagcatccaccaccacctgtaggctatcccactaaggatgatctttcttcccaacgaaatgttcctgtcaaaaccactaccaggggtggtggcttctggagcggatgctggacggcactccgctatggctgctggtgcatacactgtctgcaatgatgttactcctcttgaacatacgttgactttatggatttgagc

SEQ ID NO: 11073 - DNA, 327 bp, Glycine max
tcgacattttatatcaagacaacttcatctaattaaccatgaatcaccaacaacaatctcctgtgactgcatatccagcagtgagtcagagcaacccagcagctccaccaccacctgtgggttatcccactaaggatgatgttccttcccaacaaaatgttccaatcaaaacctctactaggggtgatggcttttggaagggatggcgagttcatttataaccaaaatctttccttggcctatttatttgggtactgatatttatagcaagtacaataattaaggacacaagttaaagaattttaaaatagaaagttttgtattgaa

SEQ ID NO: 11074 - DNA, 673 bp, Glycine max
  unsure (1)..(673): unsure at all n locations
tcgccgacgcgtccgactagctagtgttctataagttcacggtcagttctgaaaaatgggttccaaggttttgcttgttgtagttatgttcatagcggctatacttctgatctctgctgaggttgcacccaatgaatacgaaaattttaacaaaaaagatgggaagcatgctccaaatgggttatatgatagcaaatggggttacggtggttggggtggtccttggtatggcggctggggtggcccttattatggtggcggctggggtggcccttattatggcggtggttggggcggtccctggcgtggtggtggcggtggtggctggggaggttggcgtcgacctaatggcaaccctcacaactaagaagaaaacttgctaaagcttctttacgggtttaggttttcgcaataaataaaacttcatgagaagtgtagttgtaataaaagtggaagtctctcttctcttgtgatataaaggaataatagttttatatatgtattttcttatatgtgttaggataaaggtggtgaaaaaaaaaggtaataaaaaaagagcggcggctgttctggatgctnnnnnnnnnnnnnnnnnnnnnnnnnnnnnnnnnnnnnnnnnnnnnnnnnnnnnnnnnnnnnnnnnnnnnnnnnnnnnnnnnnnnnnnnnnnnnnn

SEQ ID NO: 11075 - DNA, 1614 bp, Glycine max
tcgaccacgcgttcgatcacacaccaacacatccattcattgtcttaatgttagcaatgtcttcctctttctccatccatttcttcctcctcctctcaatagcccttttctcagtttgttgcttagcagcatctcaagctcccaccaccaaatcacacccctatatccttcccattaagaaagaccccgcaacaaatttgtactacacttcagttggcattggaactcctaggcacaactttgatttagtcattgatctttctggtgaaaacttatggtacgattgtgacactcattacaactcatcatcctacagacctatagcttgtggctcaaagcaatgccccgaaattggatgtgttggttgcaatggccccttcaaaccaggttgcacaaacaatacatgccctgctaatgtaatcaaccaattagccaaattcatttacagtggtggcttaggtgaggatttcatattcattcgtcaaaacaaagtgtctggtttgctttctagttgtattgacaccgatgcattcccatcattctccgacgatgagttacctctatttggcttacccaataacaccaaaggaatcataggcctttcaaagtcacaacttgcattaccaattcagcttgcatcggcaaataaggttccttcaaagttcagtctttgtttgccttctttaaacaaccaaggtttcactaacttgctcgttagagctggagaagaacatcctcagggaatatccaaatttctcaaaaccactccgctaattgtcaacaacgtttccacaggtgccatatccgtggagggtgttccttcaaaggaatacttcattgatgtgaaagctgttcagattgatggaaatgttgtgaacttaaagccttcccttttagctattgacaacaagggaaatgggggaaccaaactcagcaccatgagtcctttcactgaattacaaacaactgtctacaagactttcattcgagatttcatcaagaaggcttcggacagaagattaaagagggtggcatcagtggcaccatttgaggcatgttatgattcaaccagcattagaaattcctcaactggactagttgtgccaactattgatctagtgctgcgaggtggagtgcagtggactatttatggagccaattcaatggttatggcaaagaaaaatgtagcatgtcttgcaattgttgatggagggacagagcctagaatgtcgttcgttaaagcttcaattgttatcggtggatatcagttggaggacaatcttttggagtttgatgtggcttcctccaaattaagcttcagctcatcgctgttgctccacaatgccacatgttcacgtacttgaatgtcatagccttatagccttattacgtgttgaaattagccactttcaattatctagtagcttctatatctttcaatattaatattatataataaaatatttaattaagtttgctatgttgtaagcaaaaacacatccgtgtttcatttgtagtagtagcatttatttttatgcttgacgggactgtgatcccaaagtatgataacttttgtgacatgtgtaaataatatcttcaagagttcatgcccgc

SEQ ID NO: 11076 - DNA, 608 bp, Glycine max
atttactagctagtgttctataagttcacggtcagttctgaaaaatgggttccaaggttttgcttgttgtagttatgttcatagcggctatacttctgatctctgctgaggttgcacccaatgaatacgaaaattttaacaaaaaagatgggaagcatgctccaaatgggttatatgatagcaaatggggttacggtggttggggtggtccttggtatggcggctggggtggcccttattatggtggcggctggggaggttggcgtcgacctaatggcaaccctcacaactaagaagaaaacttgctaaagcttctttacgggtttagggtttcgcactgaataaaacttcatgagaagtgtagttgtaataaaagtggaagtctctcttctcttgtgatataaaggaataatagttttatatataagaacacacacatgctaaaacatactcaaagatacacgctataccctaccgcaaaaggttacagaagcaacctacttaaccggatatcacacttaaccgtacagcgggtgtaaacagttatgttatatattagaaaacttgtgctttatgaatacgatccctttgaatgatcaaacgctgct

SEQ ID NO: 11077 - DNA, 826 bp, Glycine max
  unsure (1)..(826): unsure at all n locations
ctccaactactggcagggttcctttgatgctcttcctcctgaatggatagatcagtttgagtcaggcattcagacaatcgctgtgattcaagctgggcatggccttctgcaacttggttcttgcaagattatccctgaagacctccattttgtgctaagaatgaggcacacttttgaatctctaggctatcaatcagggttctacctctcccaactcttctcttcaacaaggaacacatcctcttccacttccctttcttcaaaaccatcctccattccaactaggccaccccctccactcctcaactggggtcagagaccacttggatcttccgcttctatgctaccctctcccacctttcagcatgcagccagaatggggttcccacaggccaaagatgagacccatatgttcctcatgcctcatgcatcagaacatgcaagaatgggagacatcatgggggagcatgagaatgacataaaatggccaaatggcttatccatcttcaatgcactcactggaagatctgatgatgctaaactcttgttcaatcaagagagcttggggggcaaaccaagtgatgatcacaatcaccaccaccaccaccaccactctctcaacccaaataatcccacctcatcagtgcanaatgctaatagtgtggcaaacccaaatgagttcttgagcttggatagccacactgaaggaggaggggcaaggaaactggacaagttcaagaggtgcttcactctacctgctagaatgacttcatcttcatcttctacttcaatggatcaccatcaacaagcaggtgtggagtatagg

SEQ ID NO: 11078 - DNA, 417 bp, Glycine max
cccacgcgtccgggaaaaagttccattttcagagttcttagaggactatggccaattgccagtggaagactctctagaccatctgaagttgtggatgaagaggatggatctggttgtggcatcttctatgttcctcaacggccatatacatgtttgggaaccctaagggatcaaattatatatcccctttcctgtgaggaagcagaggttaaagtactgaagatgtatggaaaaggtaaatatcttgggtgggagaaataaggcaggccttagaaatgcgtaaaaatgaagtttctgatcataaattaacataagcaagttggtaaatccacttagattctctattgaccaataattttggattattaccatggttaaagtgagtaatttgaagtctagatgcaatgaactactctt

SEQ ID NO: 11079 - DNA, 501 bp, Glycine max
agtggaaaaagttccattttcagagttcttagaggactctggccaattgccagtggaagactctctagaccatctgaagttgtggatgaagaggatggatctggttgtggcaacttctatgttcctcaacggccatatacatgtttgggaaccctaagggatcaaattatatatcccctttcccgtgaggaagcagaggttaaagcactgaagatgtatgggaaaggtgaaaagcatgctgacactagaaatttgtgagacacacggttaaaagctatcctaaatagtgttcggttgaattatcttctaccacggcctggaagcaactgggatgcgaatttcacatgggaagacatcctttctcttggagaacagcaaagattggggatggcacgcttgttctttcataagcccaaatttggtcattcttgacgagtgcaccaatgcaactagtgttgatgttgaagaacacctatatgggcttgcaaaagatatgggaat

SEQ ID NO: 11080 - DNA, 587 bp, Glycine max
gacattattcaggtaccctctaattcttttaatttatagctatcttctttaataagataagatctcatccttcactaccacaaaagatgaccagggtcactgccctatttttcaccttattactctgctccatgctcgtccatgccatgtccatacgccttgaaccagcttttcaccaagaatccttagccaaaccgcaccaacagagcgttgaggcggttgatgagagctgcgaaggcgttggagacgatgaatgcttgatgaggagaacacttgccgctcacgttgactatatttatactcaaaagcataataatccttgaaatatagtactcgtagttagtactatagcatccacaaatccacttatggaaagatataggagcgagaatctatgtttgattgtttttataaattaggagttggtacgtaactggctcattaaatttgtttggagttgagaattatttgtattttccttttctcttctcttttgcttatatgtagtgtattatatgaagagttaatgtaatggttgtgtaaagggatttcacactctcaattaataaaaaggtaatggatttttg

SEQ ID NO: 11081 - DNA, 817 bp, Glycine max
caattcggatagaactcgagtagaatcggttcgatagccgaaaaaaaaaagtaacttatgtttgtttaattgtcttatgagtataggaatggagacagtgatggaagaggaagaatacaactatagagaagtgaggcttccttctctgatagcagtggtgggcgagccagagctggggagggaaacaggggaaaggagaagaggaagggacataataatagccatagatcatggccccaataccaaacatgctttcgattgggctctggttcacctttgcaggctcgctgataccatccatctcgttcacgccgtttccgacttgcataaccaagttgtctacgacataacccagggtcttatggagaaattagccattgaggcttttcaagtactaatggtgaaaacagtagctcgaattgtggaaggtgatccaggaaaagtaatttgcaaggaagcagagaggatcaaacctgcagctgtggttatggggacccgaggcagaagcttgattcaaagtgtgctacagggaagtgttggtgagtactgctttcaccactgtaaagcagcacctgttgttattgttcctggaaaagaggctggagatgcgtcaatcctctagtcgaattatgttgtaaaaggctgtgtttttattatcgcatttgttttatcgtgtgtatctattatcaaatactagtgtgaagattgtttctaattcattagaacaagaaaaaagagcatcacatgctgtgattattaatattcttttctggaaagtcacaattaaaaaaaaaaaaaaaaaaactcgagacctcgt

SEQ ID NO: 11082 - DNA, 988 bp, Glycine max
gacggaatatcttcccaagggagatcatcgtgatttcttgaaaagaataggagctttgaaaccatcgacagctgtgagatttgcacttgatattgctaggggagtgggttatttgcatgaaaataagccatcacccattattcaccgtgatcttgagccctcgaatatattgcgggatgattctgggcacctaaaagttgcagactttggggttagcaagttgctggcagttaaagaagacaagcctctaacttgccaagatacttcctgccgctatgtggctcctgaagttttcagacaagaagaatatgacactaaagtggatgtattttcatttgcactaattctgcaagagatgattgaaggctgccctcctttttctgcaaagcaagacgatgaagttcccacggtatatgctgcaaaagagcgtccacctttccaagcaccagccaagcgttactcccatggaattcgagaattgattgaagagtgctggaatgagaatccagcaaagcggccaacatttaggcaaataataacaaagctggagtccatctacaacacaattggtcacaaaagacattggaaggttaggccattgaaatgcttccaaaatctggaggccttgttgaagagagatcattcaaatggaagtagtcgtggcggttcatctcgctccacatcaagcagaatatgaaggagaacattggtcttatcctgtaactaaaatattggtataaagataaaagatagcaaccaaatttgacttcttgagttggagctttgcaacgttttctcgtgtgtattcattcacaggttcatggttgttttcgtctttcaagattctttatactcgatgatttatttccaattacatttatgtctggtgacagaattagtatttgtatgtaacatatacacgtattctaaggaatttgctccctgtcatgtacattattatgtaacaagacatttttgttgggtaaaa

SEQ ID NO: 11083 - DNA, 645 bp, Glycine max
ccttcagatgtcataattttggaaggcatccttgttttccatgacccacgtgttcgggagttgatgaatatgaagatatttgttgacacagatgctgatgttcgtttggcaagaaggattaggcgtgacactactgagaagggtcgggatattggagcagttcttgatcagtattcaaaatttgtgaagccagcttttgatgactttattcttccaacaaagaagtatgctgatataattataccccgtggaggagataatcatgtggccattgatttgattgtacagcatatccgcacaaagcttggtcagcatgacctgtgtaaaatatatcctaatttgtatgtcattcagtcaacttttcagatacggggtatgcataccctgatacgtgatgccaagacaacatagcatgattttatattttactctgatcgtttgattcgattggttgtggaacatggtttggggcatctgccatttacagaagtgcaggtaatcactcccactggttctgtatacactggtgttgatttttgtaaaaggttgtgtggtgtctctgttatcagaagtggggagagtatggagaatgctttgagagcatgctgtaaaggtatcaagattgggaaaattttaattcacaga

SEQ ID NO: 11084 - DNA, 1336 bp, Glycine max
cataagtaacattccctagctccccctgtctccaattaatcaatattgattagccttagccacaaaacaatgttttccccaagagacatgccttctccatcctcaatcttttctgcctacgcctccatgacagcctccatcatgctcctacgttccatggccaacgacctcgttccccaaccaatccgtggctacctttacagcacgttccgttacctcataaagcctcgctccccaaccctcaccctcatcatcgaagagtccaccggcatagcccgtaaccaagtctacgacgctgcagaagcctacctctccacccgtgtcagccccgaaaacgagaggctcaaaatcagcaagagcgcaaaggagaagaaattaaccgttcggttggagaagggcgagaaggtagtcgactgcttcgacggcgcgtgcttcaagtggagattcatctgcgcggaatccgagaagaacaaccccaacgaccacagcaacaataacagcatctccgtacggtccgaaaagcggtcttttgagctgagcttcccgaagaagtacaaggaaatggttctggactcttacctgcccttcattctcgacaaggccagggagatgaaggacgaggaaagggttctgaagatgcacactctcaacacctcgtattgttacagtggggtcaaatgggactctataaatctcgagcatccttcaacttttgagacgctggcgatggagccggagttgaagaatgcggtgattgaggacttggataggttcgtgaagaggaaggagttttataagagggttgggagggcgtggaaacgtggctacttgctctatggccctcctggtactggcaagtctagcttgatagctgctatggccaattacttgaagtttgacatctttgacctccaacttgggaacatagtaagggattctgacctcaggaaactgcttctggcgactgctaatagatccattttggtcattgaagacattgattgcagtgtggatctgccagagcgtcgccatggtgatcatggacgtaaacaaactgacgtacagttgaccttgtctggattactgaacttcatagacgggttatggtctagttgtggagacgagagaatcatcatattcaccaccaaccacaaggagaggctagacccagcactgttgaggccaggaagaatggacatgcacattcacatgtcctattgctcctaccaaggcttcaagattttggcctcaaactacttagaaacttcctctgaccaccccctctttggagaggtagaggggctaatagaggacatacagataacccctgcgcaag

SEQ ID NO: 11085 - DNA, 626 bp, Glycine max
atcggataagatgttgcaattaaaagcgcaaatcgcaacacttgagccgcgcgacgaacgatacaagactgtgtttgcagacagaatttcagtctcccggcgggcatgctgtgagctttttggttacaagattgtgcatggctgaacaccagcgttctaatggaatcccggtgacacggtttaccttgcaatccatttatgcacaaagtgatgacgaaaagcttgaatttgaatatgaatcagggaatactaacattttggcaaatcattatacatctcagcctgaggtttctcgtcaggttgagatattcattcggaagatgaattcaattcctgctttcactgccaacatgacagtggagtctttcaatagacgaaccttgtcttaaatccaacaatcaacttgtgtctaagtactggtattttttgctggccactatcagctatgatgtatatatcttgcatcttcaatctcaggaatttggtcagctggtaaggctgttacgactggacacattttgtatccatacattggtaatggatggcttggatttgaaaaatgtcacattattttttttcaaataattgaatagtgaggtggaattttgggcgtgcaaaatataaaa

SEQ ID NO: 11086 - DNA, 1080 bp, Glycine max
gactctaatttgttttaagtaaaaaaaacaaagaccaccttgttcggttgtttttgttgttatgggtgccacctctatggtccgaggaggagtcacgaggtttctaccccgaagggaatatttggggtgcgagaaattacaacttggagatgtggagtttgaatttctcgatgatggtgagatcatgtcgttggccaaaagtgatgaagttctggcgatgagtttcatcaatccaatgaaatggaattggatgatgaagatgatggtgagagggttgatggtggcagcgttgaggagaatagaagcttttgggataatcaacaccagcttttgcagaactacctatatagatcaacttcagttgagtcaaggataagaaatgtcaccaaagaagccgttcaggatatacaaaacgcggaaatagtgtgcagttgcagtagacagataatttccagatcctgtagaaactgtttcatgatacaagtctcaaggcgccttcagaagtctggttatgacagtgccatttgcaaaacaaaatggagcagctcaccaagtattccatcaggggagcatacttttctagatgttatagacagcagaagcaaaaagcaagaaattagggtgatcatagaactgaatttccgagcagagtttgagatggcaagggcaagtgaagagtacaacgggcttgttcggaagctccctgaggtgtatgtggggaaaatagagagattaagcaacatcatcaaggtgttgtgcatgggagcaaaaaggtgcatgaaggaaaacaaaatgcacatgggaccatggaggaagcacaagtacgtgcacgctaagtggctaggtccatgcaaaaggaacacctcaacaacttcactttcaaattcaatgatgggaaattccgaggtgatgatgccaaaaccaaagcctagggcatcactgctaacagtggatctgatgctagaaacgaataattctaagacagaaatgttgaagcttcccaatatgcattgttcagctgttgaagttttgtgattgtaattactccagaaaagtaggttttatttctctaatctctat

SEQ ID NO: 11087 - DNA, 467 bp, Glycine max
gacagcagagaaagaagcttcacaattcacattcccaccaacggaaccatggcctccgtgtacagctgtacggagtgcggatccaacctgaatcttaactccgctcatgcctaccctccagacttctacttcgaagccggcaacaagggctccgtctccttctccgccgtggaccccaccaagttcaagttcgagaaggaggacaagcttcgccccttcttcgaaaccgtcaactactggggaatccagaggaagaggaccaagatcaagtgcaacacctgtgactgtctccttggctacgtctatgacgatggtccacctcttaccaatagtcccggtcaatttcacatgggtcctagccaagttatccccagagcgccaagatataggttcaagaccaaaaccctcagaatcacttcaacttaacgcgtatttggttttttcgatgtcattattagaagctaact

SEQ ID NO: 11088 - DNA, 667 bp, Glycine max
tctctctctgcaaactccgcgtataccccaagtttctctctctacccttttctttctagtttccacctccgtcgccgcactcactttgatgccaattttctgaacacgcttttgaagagggtaagttcgagcaccggtactgtgctgtgctgcattacttgcatttcctctataatgggttgtttccactctaagtcagcgaggcagtttcctgcacaggagaatactgttaatcttgcggcagagacagcttttactgtcagtgaggttgaagcactgtttgagctttttaggagcatcagcagttctgttgtcgatgacggactgataagcaaggaagaattccaattggcaatcttcaaaaacaagaaaaaggataacctttttgcaaaccggatctttgatttatttgatgtcaagaagaagggagtcattgacttcgaagactttgttagatctctgaatgttttccacccaaatgcatcattagaagacaagatagctttttcatttaggctctatgatttgcacaatactggctttatagagcgccctgaggtcaagcaaatgttaattgcacttctttttgagtcggatatgaagttggcagatgatgtcatagaaacaattcttgacaagactttcgtggaagctgacctaaaccaag

SEQ ID NO: 11089 - DNA, 1221 bp, Glycine max
gaaattaccagttactatactctctctttctgaaacaatttgcccaattgtttgagtggcttttgccaggatggtactcttatccagtattttggtcttggatcagaaacaagaggaaccgccactgatattccagacccttttggaattgaagttggaaacccttcagaaattccatatggatatgatgataaatggttgatcaacgtgcatgccattgacacaaggggcgtggaagataggttggggtgcattgagtgtacgtgtgacctttataatatcacaaaggatgcagatggtaaccctttgagtccagattataagggaggtttggattgttgccctgataataccacgtgcaggctaaacaaaggcttcaagggtccaaagagaaccttataccttaaatacacagtgaagtggttcagttgggacaactacgtggtgccccttaagatttatatacttgatgtgactgatgttttgaacgtgtccaaaggagggactccaaagcataattgcgaggttgagtatcaggttgaacctcgcagcaaaggctacaatagtagtgatgtcagaaaaacaagcttcccaatgcagactggtggatatgtcatctatggtgttggtcatcagcatgcaggtgcaattgcatcaacgctacacggacaggatgggggagttatttgttcttcaataccaaaatatggtactggaaagtgaagcaggaaatgagaaagggtatgttgtaggaatgtccacatgttaccctcgaccaggtactatcaaaataaaagatggtgaaaccctaactctagagattatctacagcaacagcgaaatgcacagtggagtaatggggcttttctacatcttggtggcagaacaactgccacaccaacaccacctttgacattattatgtgtcctaactaaattcatcttggaagtggatccaagagactattatattatatggtatctatataagtcaatatgtgttgtgatgaaaaataaagccagctctgagtcttgtaataataggtctagtattaatgtattatactatagtcgcacatctttagatatatatcctgtcaacatattcttcatcccgccgaagaatatatagtaattaatcagattaagaatagctggttcttatctgaaatgcatgatcccgtgtgttgattgtactctgtaaatgatatacatagtaagt

SEQ ID NO: 11090 - DNA, 611 bp, Glycine max
ggaatttctgtagttgaaattaccagttactatactctctctttctgaaacaatttgcccaattgtttgagatgttcaatatgagatttgtatctcaagattgggtggtttcatgtgcactaatacttctggtgtcatgcacaacatactcatcagcttctttggggaaacctgagaacaacataaaaacatctgtttttaaatcacccaagattgagctaggtccagggttagtttcaaacaaattttattttgatgttgactttccaagaggccatattgcactcaagagtttcaatgctgaattggttgatgagtcagagaaatcagtgcctctccaagaaacctatctccatcactggcttataataaaataccaccagccaaaaaatgtgacacacaataaccaaacagatattgtttttgtgagaaacagtggcttttgccaggatggtactcttatccagtattttggtcttggatcagaaacaagaggaaccgccactgatattccagacccttttggaatagaagttggaaacccttcagaaattccatatggatatgatgagaaatggttgatcaacgtgcatgccattgacacaaggggc

SEQ ID NO: 11091 - DNA, 482 bp, Glycine max
gcccgaccaagccttcattccggttgcaaaaaaacaacaaaagggaatcaaaacaaacctaaaaacaaacacacttattctttctttcttgtctttaaggtcaacaacagagttatagcacatacctaattcacaatggtttttccaaaaccctcttctgagtctgacctctttctttattccaactttgcttctcgctatgccagggactctcttcccaggttcagcatgccagaaaactccatgccaaaggaggctgcgtaccagaacatacacgatgagttgcagcttgatgcaattccaaagctgaacttggcttcctttgtgaccacttccatggaagaagagtgcaacaagctcatcatggaatccatcaacaagaactatgttgacatggacgagtatcctgccaccactgaccttcacaatcggtgtgtgaacatgattgcacgtatgttccatgctgagatcggagaaaatga

SEQ ID NO: 11092 - DNA, 403 bp, Glycine max
ccacgcgttcagtacaggctggcaagaaaaacgaacaaaaggggttgaaggaataaagcacatactcaatgcagaaaatgattgattcataaccctcaagagagagctcaaatgccatgcactggctcagatgacaattcagtttattctatttgtggtgaatttaaagtgaagcttggaagatcaagaattaaggggaattcttttatccaaatttgggatgtatgtagtgatgatgcatctatacaaagaaattattgtgtttagttcccttgaacaagggcaataagattgacttgttgctctacatggtctattagaagcagattagctccagcattcaatttttctgtgcaacaacagattggcaacagatgctgaaaatacattccttgtaaaaatg

SEQ ID NO: 11093 - DNA, 420 bp, Glycine max
gatgcacatcacatgccggagacctgaggctacccctctctttcacattccctcagcgcttaatttctgcatccaaaactgttggcattaattgctttccaataccctttgagactacaatattaaatttgtggtttttacatatgtatatatatgtaatggatacggtgccacagatggcatcagagacaccagtggtgatattcagccggagttcctgctgcatgtgccacaccatcataaccctcttcagtgactttggagtgcatccaaatgttcatgaacttgatgagataccaagagggaatgacattgagcaagctctttcaaggctagggtgcagcccctctgtgcctgttgtgttcattggcggtgagcttgttggtggagccaatgaagtcatgagccttcaccttaacc

SEQ ID NO: 11094 - DNA, 364 bp, Glycine max
gaatgcacaccacatagcaaaacctcaagtaccttctccttcacattccctcagcactttctgtattcaaaacttttggcattgtttccaatatcctaacttgagactatatatatagcagcatatatatatatataatggatagggtgacacagatggcatcagagaggccagtggtgatattcagcagaagttcatgctgcatgtgccacaccatcaaaaccctcttcagtgactttggagtgcatccaaatgttcatgaacttgatgagataccaagagggaaggacattgagcaagctctttcaaggctagggtgcagcccctctgtgcctgctgtgttcattggtggtgagcttgttgg

SEQ ID NO: 11095 - DNA, 812 bp, Glycine max
acccacgcatcagcccacgcgtccgagatcatctcaaatcatattcatatcgcgtttggttttgttttgtttttctattttaacacaacacaagcaccaactttctttttctctttcttttagggtccttcctcactctgaatccgccattgggctgcgatggcgaagaagcgaaagtcggtggcaacgcgccttgacgaagtggatcgaacgatgtactccactttctgcagcaccgccaactccctctctcatctctacacccacgccatgaaccaacaaaaactctcatttcaggccggtgaacgacacgctcttgagaaattgtatcaatggattctcaggcaacagcaagaaggatctagggtggccaccattgatattgttacccatttgcagaatgagcttgaatatggaggagaggaggcaccagtgtccccaaggcagccaatgcatcaacagaattcccagactgcaatgcacaacactaactttggtgcgtccataccctctaatgcatttggagcaactgtggcaggacaggggatacgtgctggacaacctgatcaacaaccaaagaactcagtgttctcaaatgcactctctagtcctattcgacgcagccttcagccatatcatttggcacaggggagctttccttcatgtaatatcatgtcttcaggaaatggaacccggaatagtgacatgacttatcctaatggccagaacagggacacaaattcttccaactccagtgattgcatggatatgcattcagatagtcctggtcatgatttttcatactgatgctg

SEQ ID NO: 11096 - DNA, 1198 bp, Glycine max
aggccaaactcacaaaccataccctaacaaattgaccttattttgcaacaaaattcaattttgagcactaaccagcaccacttccaatggcttcaaatcatgaagaagtgatacttttgggcaagtgggccagcccatttagcaacagagtagaccttgctctcaagctcaagggagttccctacaaatactccgaggaagatcttgctaacaagagtgctgatcttctcaggtacaaccccgtgcacaagaaggttccggttttggtccacaatgggaacccattacccgagtcacttatcattgttgaatacatcgatgagacatggaaaaataatcccctcttgcctcgagacccttatgagagagccctggctcgtttctggtctaagaccttagatgacaagatcttgcctgctatatggaatgcttgctggagtgatgagaatggacgtgagaaagcagtggaggaagccttggaagcattgaaaatcctacaggaaacactgaaagacaagaaattctttggaggagagagcataggattggtagatattgctgccaatttcattgggtattgggttgccatattgcaagagattgcagggttggagttgctcaccattgagaaatttcccaagttatataattggagtcaagactttatcaaccaccctgtgatcaaggagggcctgcctcctagagatgaattgtttgctttcttccaagcttctgctaaaaagtagagccgttttagaggtaggattcctaataagttagcatgattttgttgggaaactaatgataatcttgttgtgagcaaaagattgttctgttttaaatttaattgactgtggtattggttgagggtattggctattttaattttaactataaaaaactggtgttctgtgttgttgcctgatttctcaacaaaattgaaccaagctaagaagttgcccgaatgggtgtgcagtatacgattttggtgcaagaggaatgagtgttgtgcttaaacctttcttcattattaatgttcctatctcccccatctatggtgtctggtgggaataagacacaagtcaaacatcattagatattgtatctgctctttcatgatcatttatgattgttcacaaaaggtttctccaaggatcagaaaacactaggtgaatacattgtccaataagttcccaat

SEQ ID NO: 11097 - DNA, 956 bp, Glycine max
ggaggaaaagagaaaaaaagagggaaactcaaagtcatcatcatctaccatggcaaattctgtggcattttccgacgagattcctaacatgagcatgagcttccctttctcccctgctttctctagtagcatctttgacatgatgccaccaccaccaccttcctcatctcacgatcctaaagctcccaactttgctaatagcttcatggacttgctcgctgtccctgctgattattataccccttctttattcgactggtcccaaaacaccgcccccacgtcagcaccaccaccttccaccacccaaatcaaccaccctcttccgtcgccagccagctccaatgtccccgacggctccgaggttctcaacactccggcgtctcccaattcttcgtctatttcatcatcgtccaacgaagcagcagccgccaccaccgccaacaaaacaacgggaaatgataatgaagaggaggaagatgaaacagcaatagatgcaacagcaggcagagaagaagaagatcatcaagaccaagacaagactaagaaacagctcaagccaaaaaagaagaaccaaaaaaagcaaagagagccgagatttgcgttcatgacaaagagtgaagtggatcacctcgacgatggctatagatggcgcaagtacggtcaaaaagccgtcaaaaacagccctcatccaaggagctattatcgttgcaccaccgcgacatgcggcgtgaagaagcgcgtggagcgttcctcggaggatcctacggtggtggtgacaacctacgaggggcaacacactcacccgtgtcctgccacgtcacgggctagcttcgggttcatgcactccgaagcaagtgggttcggacccaccagtggactaggttcggcacactttatgctgcaacaacaacaacagtttcgggaccaagcacaagcacaagcagcaatgttgtata

SEQ ID NO: 11098 - DNA, 714 bp, Glycine max
ggcaaatacaaacctaaaccaaaacccgtgtctgtgtttgtttccactttgcaaatcagtgtgtacccaggaatctcttgattgagaaagtgtgttagggtaagagttgtgtcgtgtccacgagacactgggagaaagaaagtgtgtgtgagttgttgtaaactgaattttcatttttctttagccatgagcacacttgttcgcaacaccaccctcaccttcagccgcagaaacagatacgagcttcttggtttgcagggcaaagacaagatggtcaagtccatcagctacagacgcagaagggcaaagcaaaggcaaatctttctcacaacctacaagttatcttctttgaatagtaacacttttggggagccgacacaaaagcctaagctgaagctgaagaaggttgctgttaaggttaagaagattgtggcctcggttttgatgttcatgcgagttggttcttttaggtcatgcagttctaggtctcagatttctgccacctcaccaaataggaagaactcttgaggatgttgttctgacgtgggtttaggatggtttataattctctctataatctttggttctttcacactcaggagttttagtgtgtgtttgtgaaagcgaacgcaggcgtttttgtattggaacgcggaatttttccgttttcaaacacatccttattagtatatttatatggttgatgatgaagga

SEQ ID NO: 11099 - DNA, 443 bp, Glycine max
ctcgagccgattcggctcgagcaaaagccgtgtctgtgtttgcgtttgttttcactttgcaaatcactgtgttccaaggagtctgttggttgattgaagggtatgcgtgaattattataaactttccggtgtttgagttcaattttgtgtccgtgtgcgtgaatctccattttttacagccatgagcacgcttgtacgaaacgccaccctcaccttcagccgcagaaacagatacgagcttcttggtctgcaaggcaaagacaagatggtcaagtccatcagctacagacgcagaagggcaaagcaaagacaaatctttctcacaacctacaaactatcttctttgaacagcaatacttttggtgagccacaaaagcctaagctgaagctgaagaaggttgctgttaaggtcaagaagattgtcacctcggttttgatgttca

SEQ ID NO: 11100 - DNA, 355 bp, Glycine max
ggcttgatgagttaaccaaaaccaaccttggcctgcactcaaagaacaaaaccttcaaaatagtatccaaaacaccccttttactcccaatatctcaaacccaatttcaatttcaatttcaaattctcttctccaaagatgtctcttcaagctcaaccacaacaacaaccacaacaaccagtccaagtttacccaacaattcagccaccttcatctcctcatcactcaaatgggccatttggggcagtttccatggtccttgccataatactagtcatttctgtagttgcatgctttctagggcgcctttgcaacaagcgctataataatagccacagcaaccgccagaaaccct

SEQ ID NO: 11101 - DNA, 844 bp, Glycine max
ggctcgagggaaaaatgatcgggtagccaaatcaccgttaacctaagaaagagaagtagtagcagtagcagtaggaagaggatgatcggcgtcggaaagatcaagcagtacagtaacgtcctcgacaagcccctcaccaagggcaagcaagaggttagtttgagcgcattcgcgttcttgttctcggagcttgttcagtacaaccaaacgcaggtcgacaatattggcgagcttgaacgaagactggaggatgctggatatgcggttggggctcgagttcttgagctgctttgccacagagataagggaaacagaagagagacacggctgttgagtattctttcttttgtacacagtacagtgtggaaagtattatttggaaaggtagctgattcactggagaaaggaactgaacatgaagatgaatacatgatcagtgaaaaggagctcctagtaaacaaattcatttctatcccaaaggacatgggaacgtttaactgtggagcatttgttgctggaatagtacggggcgttttggatggtgccgggtttccagctgttgtaacagctcattttgtccccatggaaggtcaacaacgaccacggacaacaattttgataaaatttgctgaagaggtgttacgaagagaagcaagattaggctgatgcttataccaagaattttcaattaagaatatttgtaatgctctacaccaatatagaaagatgtggaacttgcacctatgcatgtgaaaaagtaatttaggattttcaccagcctaccctattgatttgtcaattgaactcatgcttttcattctaatgtatgttctgctttgaagtc

SEQ ID NO: 11102 - DNA, 653 bp, Glycine max
ggtacaaaacataaatttgtttgctattatggcttcttcattaaacaatggccgtaaagcaagtgagatttttcaaggtcaagctctcttgtacaaacatttgcttggcttcatagattctaagtgtctaaaatggatggttgagcttgacatacccgacataatccacagccatagccatggccaacccattactttttcagagttggtgtcaattctacaagtcccaccaactaaaactcgtcaggtgcagagcctcatgcgttatctagcacacaatggattctttgagatagtaagaatccatgacaacatagaagcatatgctctcactgctgcttcagagttacttgtcaaaagcagtgagcttagtttagctccaatggttgagtattttcttgaaccaaattgtcaaggtgcatggaaccagttgaagaggtgggttcatgaggaagatctcacagtatttgaggtctccttaggaacacctttctgggactttatcaataaagaccctgcatataacaagtcattcaatgaggcaatggcttgtgattctcagatgttgaacttggcgtttagagattgcaattgggtctttgagggactggaatccattgtggatgttggtggtggaactggaatcacagcaa

SEQ ID NO: 11103 - DNA, 710 bp, Glycine max
gcgacctgatgaaggttctagcacgggagggaatattatatcttatcccacatcgatggaagcgtgtggacggtgcattgaattgacacaaaatggccaaaaacattctttcacatatgataaagtttttgcacctgatacatcacaagaagaagtttttattgaaatttcacagcttgtgcaaagtgctcttgatggttacaaggtttgcatctttgcctatggtcagacagggtcagggaaaacctatacaatgatgggaaggcctggacatccagaggagaagggcttgatacctcgttcattagaacaaatatttcaaacaaagcagtctcagcaacctcagggctggaaatatgaaatgcaggtgtcaatgttggaaatatacaatgaaacgatccgtgatctgatatctacaacaacacgcatggaaaatggtactcctggaaaacaatatacaatcaaacatgacgcaaatggaaatacacaagtttctgatctcacagtagtggatgttcatagtgctaaagaggttgcatttcttttaaatcaagctgcaaatagcaggtaactaatttctagtgtatattctattgtcttgtaaggtgtaacaaactattgattattactacctcaaacatcgcaagtgagcttaccattttttactaacattatatacttatacatcttgacgcatttagaaactatca

SEQ ID NO: 11104 - DNA, 449 bp, Glycine max
gaaatgcaggtgtctatgttggaaatatacaatgaaaccattcgtgatctgttagctacaaataagtcatcagcagatggaacaccaacacgtgtggaaaatggtactcctgggaagcaatacatgatcaaacatgatgccaatggaaatacacacgtttctgatctcacagtagtggatgttcagagtgtaaaagaggttgcatttcttttaaatcaagctgcaagtagcagatctgtgggaaaaactcagatgaatgaacaatcttctagaagtcattttgtattcactcttcgaatatatggtgtaaatgagagcactgaccaacaagtacaaggtattctaaatctcattgatcttgctgggagtgaacgtctttcaaggagtggatcaaccggggaccgattgaaagagactcaagcaataaataaaagtctgtcatcattaag

SEQ ID NO: 11105 - DNA, 853 bp, Glycine max
ctttgttaaagaagctgaacctctaatgcgatctactagtcttgatagatcatcctcagattcaggcattgaggaactaagcaaactagaattgtcaaagaaaactgggaagaccaagaaaaatcgtctcttcaggaaagaactctatctcgcattaattttgttgactgcctcagttagaagcttattatctgcccaaggaattcacttctacttcctattatttcaagggataagttttctggttgttggtcttgatttgattggagagcaggttagttgatgtccagattttggatttttagtgcatacaaaacctctaagatcctcattgataaaggtcagaatggccaaaccataaacccatccctgaacacattgatttgagcctaagctgttcagtgtggtttttggctcccaattaaagcaaatcagttgctgcttgacgccaaacttgcagttttgtttttggtataagacttatgcctcattgttgttgccgagtcatatgccttaagttacataacagttgtttcagttcctaatggcaaaacgtatcaacactttggaaaaaagataaaggggtttaacattcctgtcctataatgcaatgccattatagaattacttgcctgcctgaattgaaaaggtggagattgttaagattataacatttgttattcttttttttttttcctatattgacatactgtacaatcacataatttcattgtgtcgttgctcaatttgtatttgttatcaggcagagaggtttttggcacacctgtcagcaaacatattttcatcttttaccattaattttaactgttgtctttatcatagttaattttgc

SEQ ID NO: 11106 - DNA, 552 bp, Glycine max
gactgcatttcccacctcaatattaatatatttctttccccacaagagagatcatggaaaaggatatcattcttctttctccaacatgggatggtgacaatggcaattccactgagaaaaggctcaggctatttggttttgagctaaacccttcttaaagatggttatgccaaagaatctggtgaaggagatgaaagtgtgaactcctctaactcagtttcttctggaggagacaaaactgtgcaagagaaaccctctgccaaagactctgatgagagaaagtttgagtgccaatattgttacaaggaatttgcaaactcacaagccctaggaggccaccaaaatgctcacaagaaagagagaatgaagaagaagaggttgcagcttcaatccataaaccgctacctacaacaccctttccaatccaagcatggctttgcttacccttctgatactccttggttctatgacccctctacctataataataactctgagttcaccctttgtgaagaacctcagattagcttcaattcaaatagcgttttggat

SEQ ID NO: 11107 - DNA, 444 bp, Glycine max
aaatgataaggaggttatggatgtcttcaataaaatatcagaactcttccctggagtaggttcaccttgatgcatttgtgtgttgttgctgtttgctgggtcaagttatgcatccctttcctgatgaccaatgaagattagctcggcctaaccacacggaaccatgcaaaactcttatgctcatggctgtatactgcaggctcgcggttacagctccattgtgacatgcggatagtaactgtgtcttcttcgctgggctaaaataatgccacagttggatttttttgtttcactaaaatagttgagattgtgtagattgatgttttatgttttcattaaatattttgtttgacgcattgtatttgcagtgtggtttttggttgagtattcaggtgcagtaaaaatgtgaatgcttcgtataataatttcataaagtataatctg

SEQ ID NO: 11108 - DNA, 554 bp, Glycine max
agaacacaaatttacattaagcatagtacaaaacaatgaagaccaaactgctagcatttctcctcttctttgccttgactacaaaaccactactacttggagcagctggagctgctccagagccagtgattgatacatcaggcaagaagctgagagctgatgcaaattaccatatcatccctgcagtgcccttcaccatatgtggctttgttggctgtttcactggtggaggcctttcactagacagcatagatgaatcttgccctcttgatataataatcgagaaagccaatgaaggcctaccactgagattctcaccagttaacaccaaaaaaggtgttattcgtgtctccaccgatttgaacatttttttctctgattctgatgaaaggtgtccacaccattccactgtgtggatgcttgatcaatttgatgcctctattggacagacatatgtgaccactggtggtgttgttggaaacccgggtgagcacacaattctgaattggtccaagatcaagagtatgaggatgctaataaccgggtctattgcc

SEQ ID NO: 11109 - DNA, 486 bp, Glycine max
gtttggaatggccggggcgacgccacgcgtccgtatgcgataagactacagattgtgagaggaaaggatgcggaaagagatcttttggccaaactacttgtcaaccttgtgaaatctcagcatggaaccttgaatcaagttcagctcattaaagggtttgaatctgctctcagtacattggaggatgctgttaatgatgctcccagagcagcagagtttcttggccgaatttttgcaaaagccataacagagaatgtagtttctttgaaggagattgggcagttaatacatgatggtggagaggagccaggtagtctcttagaagttggacttgcagctgatgttcttggaagcactttggaggtaattcaaagcgagaagggggacgtggttctaaacgagatgcgttcagactctaacttgaggttggaaactttccggcaacctaatgctaaaacatcaaggaagttggaaaaatttatttag

SEQ ID NO: 11110 - DNA, 1307 bp, Glycine max
ccctcgcgtccgaataaacttcttcacttgtctcataaccaaagccacattctggcatgtctccaggagaatagtgagtggaatgagttggcaagctacagttcttcagcagcgtaatgtggtcgagaatgttcaccgttgggcttgtggacgtccaactgcattacacagataggatgagggatagtgatgatgaagaccttcatgacagagactatgatgttgcagctttagcaaataatttgagccaggcttttagatacaaaatttatggaaatgacgataatgaagaggaacatggtggtcttgatcgagatgatgaggatgtctactttgacgatgattctgctgaagtagtcatatcttccctgagacttggtgatgatcaagggagtaatctgtttacaaattccaactggtttgccttccaagatgacagaattggtgatgcacctgggggcacatcatcctctgagatgatggatgagataaaattgaatgcagttgcaaatagtggtagcaacagtagtgatgatgaggtagtggttggagaggatgaagaattggctgacagcaaaaatactgtgaatggtacatctagcttaagtgcagacttctttagtggattgactgccagtgattccatgaatgggggcactttaaactttgaaagtgagaagacaagtccttcaaatgatatgggattcttcaggtttgaggcaccagacaacgaggacttgtttggagataggcctttacctgattgggttggatggggtgaaccatcagaaatgcaagatgctggctcaagtatgaacccctttctggataatgacgagtctggtagtaatttgcctattaagcctcaagaaggtagtcctaatctgagttctccttcaaatggggaatccataccttcaaatgggtcgccaactactagcgattcaatcaatgggagcagtgactccagtccaacatctgtagcggtaccctcgctatttgaagaggatgtggaatttgtaggtgtagaattagaaggtacagagaaggcaatggaccaggctctcaaagaagggatagttggggaagcaggaccattgaaaagaaacgtagtctcaaaagttccagaaaaggaaaattctgaagaaggcagtcctggtgtgaaggagttcaacgatgcaaattactggagggttgacaacgaggttgctgttctagagtgacggacaaattggtaagctcttgcttgtttgtatcaaaagttagaccaacaccagtggaccctattcttggttcgcaggagcgac

SEQ ID NO: 11111 - DNA, 724 bp, Glycine max
tctcgagccgagcaagatgccgggtcaagcaagaatccatttatagatcatgatgattcttctggtagcaacctttctactaccaaacctcaaataggtagccctaatcctagtcctccttcgaatggggaatctgttccttcaaacaggtcgccaactaaagattcgattgatgggggtgttgatttgaatcaaagagcagtagcagtaccatcactctttgaagaagatgttgaatttgtaggtgtagaattagaaggtactgagaaggctatggaacaggctctgaaagaagggatagttggggaggcaggaccattgaaaagaaacatggtctctaaagtgccagaaaaggaaagtactgacgagggtggtcctggaataaaggaattcaccgatgcaaattactggagggttgacaacgaggttgctgttctagagtgatggccaaattggtaaatcttgcttccattgtttgtctgtatgaaaatttggatcaacgccaaggttatgcaacaaattagtgtacagtatttttgtttcccattatgttctgtttcggttgtttcatcattgttagatattaaggttgtttattaatttgaagttttgcctcgccctgcaaggggcttatagggcattcccccatttattgaatattgaccctggtgtcaattttgtgccaaatttgtccaaaaaaaaaaaaaaaaaaaaaaaaggacga

SEQ ID NO: 11112 - DNA, 509 bp, Glycine max
cccacgcgtccgtccacgcgtccgaatcctctgatactgttgttttcctgaaaccatcacaatttgtttctcaatcatgtcaacctcatcctcttcccaaagcctcaaaattggcatagttggattcggcaactttggccagtttctggccaagacaatgataaaacaaggccacactctcacagcaacttctcgatctgattactctgaactttgtctccaaatgggcatccattttttcagggatgtcagcgcattccttaccgcagacatagatgtcatagtgttgtgcacatcgatattatcgctatccgaggttgtcgggtcaatgccactcacctccctgaagcgaccaacgctctttgttgatgttctttctgtcaaagagcacccaagagagcttctactgcgagagttgccagaggattcggacatactctgcacgcacccaatgtttggtcctcagactgccatgaatggatggacagatcacaactttcatgtatgac

SEQ ID NO: 11113 - DNA, 502 bp, Glycine max
gccacgcgtgcgagaaaatgctctgatactgttgttttcctgaaactatgacaaccatgtcaacctcatcctcttcccaaagcctcaaaattggcattggtggattcggcaactttggccagtttctggccaagacaatgattaaacaaggccacactctcacagcaacttctcgatctgattactctcaactttgtctccaaatggggatccattttttcaggtaaatcaaaccaaaccaaaccataccatgcatgaatacatatatacttgatccatcacatacaatcgaccagtaatataataaaaaaaatgtatataagtaaagaacaagtctatcttgtgaagttatgtctaaaggcaaattcttagacattccatgatccatatttcaaacattgcacagggatgtcagcgcattcctcgccgcagacatagatgttatagtgttgtgcacatcgatattatcgctatccgaggttgtagggtcaatgccactcac

SEQ ID NO: 11114 - DNA, 497 bp, Glycine max
  unsure (1)..(497): unsure at all n locations
gtcgctcacaaatacacacagaaagttgagaggtggtagtacctgctgcggaagcgttcagcagccaatagctttcgcagcagcatcaacaacaaaccaacgattcaaattcaacctcctcattcagatggcacaatctttctcaccagccaaacgcgcccttgccttttcccttcaccggcgagggtacgcagtggcgtctgatgcttctccttcggtgagagggggattggatagcattggaagcaggagtgcaatcgagaagggtgtgacaaaaaacaattcgggcccatcgggggcctcatcagcttgggccccggacccagtgacgggttactacaggcccatcaatcacaccaatgagattgacccggtggagcttcgaaggatgctgttgaaacacaaagtcagatcatcatcctcctcctagagtggcaaggggcaccaacacccacaccttattncatcaaatcaagtttattttgctnttcttgtgt

SEQ ID NO: 11115 - DNA, 469 bp, Glycine max
ggtggtgcgcctccccacaaatacacacagaaagttgggaggtggtggtagctgctgcgaagcgttctgcaaccaataatagctttcgcagcaaaagcaacgattcaaattcaacctcctcagatggcacattctttctcgccagccaaacgcgcccttgcctttgcccttcaacggcgagggtacgcagtggcgtctgatgcttctccttcgatgagagggggattggatagcattagtgtaatggagaagggtgtgacaaaaaacagttcgggcccatcggggacctcatcagcttgggccccggacccaatcacgggttactacaggcccatcaatcacaccaatgagattgacccggtggagcttcgaaagatgctgttgaaacacaaagtcagatcatcaccatcctcctagatggacaaaggggcaccaacacccacaccttattccatcaaaatcatgttat

SEQ ID NO: 11116 - DNA, 411 bp, Glycine max
aaatcaaatcatgcaacatgatggtctgccaatgcaaccttgaccaagtgcagattccgaaaaacctgctgggggttctgttcttgcaaaagaacatgataagcgatttctgaacaggggtggtttgagtgtacaaaaatttaaacacaatattgttggccagagttcaaaatctttgatcgctgatgagatggacattggtgtagatggggatgatggagttgttgaacgtaaccaccctacttcctcaagcttgacagactcatctaatggctctggctcaatgatgcataccagttcatcaggctctcggagctttgagaaccaggatcagtccaaagtcaaatcaaccatcattgattgtgggtcgaaactaattgtcaaagctacctatagagaagacaccattcg

SEQ ID NO: 11117 - DNA, 704 bp, Glycine max
agggatttcttgtttgatagttatgaaagtggaaatgatctcaaaggtggtgtgaaaaagggtggactaatggatggtggtggagatggtggtggattctacggtggggtacatacgcgtgtgtggtcactcacagagagtgatttcaaaggcatggatgagtcacgctttagtgacttgaagcttgagtactcatcagaatcaaagcacgagttttctgctgcaaagatgagcaacaatatggggggtgatactttctcttctttcagaaatgggaatttcatgccacatgatgttggtggaggttcttatggagggttggtacgggatggagttttatccaatggagggtcatgtagactcactgtgaatgacagaggaatccagaggggaaggaaaagcatgaagggttggaggtggattttcagataccattcaaattggggaagctcaaggaaaagagatgaagactttatgttcaaagcatgatatagtagtgatagtagcatcatcaaatcaaatacatatgcaaaaaagaaaccatcttcctgggtagcttcattagggtagaagagtcatagtctgtggtttaaattgtctctagtttggtcattagccattatctttcttgtgtactaatgttttttcagtaaatgaggaaacttcatacttcttggaaactgcatgccttctcaaaatgtttc

SEQ ID NO: 11118 - DNA, 976 bp, Glycine max
  unsure (1)..(976): unsure at all n locations
cgtttggtcaagcttgtgtgttctgnatgtggggagcaaaggctttcttcatgtccttgctctgatgagatggcctcttcgcaccgcaactcatgcactgttgaggtggggagtgttgggagggtctcattcctcattgagaatgagaataacaatgagagtaccccagtggttcttcagcgtttgaatcacaataacaaggccaaggaggataataataatgacgaggatgaggttgtggtgctgaggaggagcagcagcagctgtgttgagatcaagaggcatcatcatggtggtggtgggttttggagaattgggaagctttttcggaagaaaaaggatcagaagggttgtcgcagaagtgttgttgggtttgacgagaggaatagagagatgtgggtggtggatcatcaagggggggtgtctaggtcaaggtcactatgcagcttcaggggtggagggctatttggatctgaggatggtggtgattcagtgttgtcaggtgctagaagctcaatttctgcagctaggagttctggggttaatatgttggaatctggcaggagaagtggatacaggtgaagctgagccaagaaggagtggttttgatggagtagagagaagggatttcatgtttgataacaataattatgaaagtggaagtgatctcaagggtggtgtgaaaaaggttgttggattaatgcatggtgttggtgatggtggtggattctatggtggggtaaataggcgtgtgttttcactcagagagagtgatttcaaaggcatggatgagtctagcttcattgacttgaagcttgattactcatcagaatcaaagcatgagttttctgctgcaaaaatgagcaacaacatggggggtgataccttctcttctttcagagagagtgatttcacaggcatggatgagtctagcttcattgacttgaagcttgattactcatgctttgattctgat

SEQ ID NO: 11119 - DNA, 695 bp, Glycine max
atgagagtgggcatggagggagttagaagagggaagggatgaaaaggagtgctgggggtgagattgcgcccaccactaggcactataggagtgtctccatggatagtttcattgggaagttgaatttcgatgaggagtcgcccaagctgcctccttcccccgggcagagaagtgctctgatgtcgcctgctggtggaattgatgggaattcggcggccttcagcttggagtttggaaatggggagtttagtgggcctgaattgaagaaaattatggccaatgaaaagcttgcggagattgccttgaccgatccaaagcgtgcgaaaaggattttggccaaccggcaatcggctgcgcgatccaaagagcgaaagatgcggtacatttcggagctagaacacaaggttcagactctacagacagaagccaccacactatctgcacagcttactctgttacagagagattctgctggactcactaaccagaatagcgagttgaagtttcgccttcaatctatggaacagcatgcaaagctccgagatgctctaaatgaggctcttactgctgaagttcaaagattaaagattgctacagctgaactaagtagcgattcgcatggttctagctgtttgattcctcaacattctgtcaaccctctgatgttccagcagcagcctccttctgcatcccaa

SEQ ID NO: 11120 - DNA, 377 bp, Glycine max
  unsure (1)..(377): unsure at all n locations
ctcgagccgtgaaaatgtctcccaaatacatgctagtgctgttgatagcattggttttggcagtctcgtccctttcccatggtccagtacacggttcagtacacccaaggcctcatcctcctccaaaaattactcgatactccgcgccacatatacataaaccaaaaccaccaaacgtggcaacaacaaacacctatgcagcaaagaagcctccaactaaaggttgaactgttaggctatgatcaaaggttttgcaacgtcaagggagtatattacaacagtaatcgcaatttgaaaccttgactagagatacnttaatggcatatagtattaattactggtcagtgctatgagtatgcatgtatgattaaataata

SEQ ID NO: 11121 - DNA, 1110 bp, Glycine max
atcagatagttgaacacctgattgtttgcttcctcaaactggtctctctcttccctcacattccatagtcgtgcttgaggaagcaaacaatcagatagttgaacacctgaaaataaaggaagatgaactttcaaaatcaatcagctcatgtagggttgaagcagatgttatcaaaacctggattaattttctggaagatacttgggttcttcagtggtcaaatgcagaaattaatgacaagcaggtcaatgatgaattggagagacatgaggactactttgtgaacttggccattcaacttcttactacttaccagaaagagttagagccttgcattaaccatatcggaacatttgtcgtgaacctcaagaatttaagtcagaggttagagatgacacccagtgcagatactgaggagtcagaagtattaagtccaaggagaaatcttgaggaggaatatttgacctatgaagccaagattattaccaccttcagtgtagtggataacataaaacagcagttttatgctcaacaggggagaatttccaggaaagatgaagagagagttaaagagctgtttgaagccattgaaaagttacgaactcaatttgagtctatagagagaccaattcttgaaatagagacccctgcaaaggctgaaacaccaccttttgagaaaaagtctgatgctactccttcagtttctgctccaactcaaggtgccgagctttcaaagccagaaacggatgagctgccaaaatcaccttcagttaagacagaccagatattggatcatgaagctgaattagctaaactggaatctgagtttgggaaggttagtcaggattattcaactgaggaaattggtgattgggaatttgatgagcttgaaagagaattgagcaagtagttaggttgaatcttatttctgagtaattaatgcttgctgttgtatttttatgattaagtgcaagtatcatataaatttgtaagccatatagatcggctgttgatgaagctataatttggatcagattcctttgaatttgtgaacattaccaagcatgatttctttattctgtaaattaacgagtttgcaacttgcagcac

SEQ ID NO: 11122 - DNA, 385 bp, Glycine max
ttatgactttgagagacatgaggactactttgtgagcttggccattcaacttctgactacttaccagaaagagctagggccttgtattaaccatatcggaacatttgtcgtgaacctcaagaatttaagtcagaggtaatacctttttaagggcatatgtttttggaaatttctttaagaatacaatatcttcacaatgtcaacacacagatgcacacaaatataaaaatgagcagttgatcaaatggtcagtatattcatttgtacacaaaatatcagacttgaattttaaaaatgtacatttgcatgtgcccatttatatatggttattcgtttatccattttctccaattttctggagggtacaggttagagatgacaccca

SEQ ID NO: 11123 - DNA, 793 bp, Glycine max
caagctcctaatgaggaagaggtttcccttctcctggagatgtttggactttgtcttactggaggaaaagaagttcataatgccatagtgagcagcctgcaagatttagcaacagctttttcaagctatgaagatgaagtgctggtgaagcgagaggaattacttcagtttgctcaaggtgccatcactgggttgaaaatcaattctgatgctgcaagaatagatgctgaagcctttagtcttaaaaaaaagctcactgagataacaacttcacaggggcctgtaagcaatgttgattataaagcggctgaggaaacaatagcaatgctagaggcttttaaaattgcccttgctcagattagaatctgttctagactggaagccttattgctgaagaaaaaaaattcaagcaatggagagtctcccgaaattcatgctcaaaaggttgataagctgaaggtattaacggagtctcttgccaactctgctgcaaaagctgaaaagcgtattttagataacagactacaaaaagaggaagcattaaaggttcgagtgactaaagatggtgaggctagtaaaaaggagaaggaactggttgctgagatatctgaactgcaatgcaaaaaagaagatcttgaagctgaattgaaaaaggttagcactactttggctgctgctcaagcacgactatggaatgtgagggaagagagagaccagtttgaagaagcaaacaatcagatagttgaacacctgaagataaaggaagatgaactttcaaaatcagttagctcat

SEQ ID NO: 11124 - DNA, 262 bp, Glycine max
cttattttcttgtcaaaatgactcctcactttaataatctatggggtattgttggtggatccgtgaagcctttaacttgatttataaataattgaaacctggcttctgaggtgtaggttagcactactttggctgctgctcaagcacgactatggaatgtgagggaagagagagaccagtttgaggaagcaaacaatcagatagttgaacacctgaaaataaaggtttgaggttctatttttcatggctgtgaattgttaaa

SEQ ID NO: 11125 - DNA, 325 bp, Glycine max
ggtttcgctttttggttgcacactgtatagccagaggagcgttcgagtgagcgagagaggttttcttctttccggttgttgtcgcggcggaaccctagctagtccggtggtgcgcgacagagtgtgtgagagcgagagacgatgagtgggcccggcggtggcagccacaccaatggcggcggcaaggcgctgtcggcgacgattccggcgtcatcgcggaagatggttcagagcttgacggcgattgtctccaatttccccgatcacgagatctacgccacgctcaaagactgtaacatggcacctaacgaagctgttagtcgtc

SEQ ID NO: 11126 - DNA, 670 bp, Glycine max
gatcttaagcttgttctctctctctctctcttgttacacattctacattctctctctattatttttcaccctttttctctcttttgcaaagaaaacaatttaattaagtcaatttgtaccaaaatggcttctcaagtttgtgaaactttggctttcatcaacggtgatgatgggttgaaaatcaacggtgctcttctaatgtcatcattgatggaagagccatcaccaagtgatgagagtgatgatgatcgattggatagcttgattaggtcctttgaggctgaaattagtggaagcaagatgggggatcatcatgattcatcatccatagggtcagaaatattgatgagcaataatattatagaagagtgtgcatctcaatcatggaataataacatgggagagattgatggagtggagtgttgggctaattcatcatcaagtgaatttggggtggagtgggtagatatggattttgtgcaatcatccccatttgaagaaaggagctggagtgttgacccttgtggagatgagtatgctatcgcaaacaacttgaaagggtatgatgggtttgccttgggagaacatggatgcaattccttgtggcaagacatggcatgcaattgatcatgccttgctaatttatgatattgttcatgtaaaatcatgt

SEQ ID NO: 11127 - DNA, 1106 bp, Glycine max
gattttttgcaacagcaaggtatccaagtgaaagttattccaggtataactgctgcatctggaatagcagcagagcttggaattccattaactcaccgtggcattgcaaatagtgtgagattcctcacagggcattcaaggaaaggaggatccgatcctctctttgtatcggaaaatgctgctgatccggattctaccttggtggtttacatgggcttggcgaccttcccttcacttgcacagaagctaatgcatcatggtctgtcccctcagaccccagctgcagccattgagcgaggaaccacacttcatcagcgcacggtgtttgctgaactaaaggaccttcacgagaaaattacatctgctcagctggtgtcaccaacgctgattattataggaaaagttgttgaactatcaccattttggccaattcctacaaaagaagaatcatgtttaatgcaggcatgatggatgttgtcaagaaatattattgtgaagcttggtggcaatgaagggttaccttggtaatgaaagcttgcacagaacaaggggtaatgataaatgtaatttggatctattcaggacgggggaaagtaagcacgctatctgatgtttatggaaatgtagaacttctgccctgcttttgggctatctattggagtgtttggcatgggcagagctgtttcagaaccaattttgattttccatgttccagattgggaataaaacaaagtaatacacagatttactcatttttataaagaaaaacacaggtttcgactgccgcagttatctaagtcaggtaacttgttccttagccattggagaaaatttgttccatatgctatttaagcatctttctttcaggaagaaatatggagatgaagtgtcaagtctgtgatttcacgtgttcaatttatcaatgttgctattcagagccattgattctatttttcattcatgttttcttgtaacttgatgttagagatactgccttcgtcatgtaaacttggtggttattagcattcagttttggtttgcatgtgatgtattataatgtcccagtagttatgaaataaaaatcatgtaactaatgatatctcttg

SEQ ID NO: 11128 - DNA, 1240 bp, Glycine max
cacgaagatgcattagtaagaccactcgacagtggaatccttgctcaggctgctcttgatgtcttcaccgaggagcccccttccaaagacagtcagttagtgcaacacgagaatgtcaccgttacccctcatcttggagctagcaccaaagaggcacaggagggtgtagctattgaaatagcagaggctgtgcttggagcattgaagggggaactttcagccactgctgtcaatgctcctatggttgctcctgaggtgttgtcagaattggccccatatgtggtgctggctgagaagctgggcaggctagctgtgcagttggtgtgtggaggaagtggaatcaaatctgtgaaggttgtttatcgatcagctaggggcccagatgacttggacactagacttctgcgagccatggttacaaaaggcctcattgaaccaatttcaaacaccattgtgaaccttgtgaatgcggatttcatagccaagcagaaagggcttcgcataagcgaggaaagagtggttgttgattcatctcctgagatgcctgttgattcaatccaggtacagatatccagtgtggactccaaatttgcgagtgctgtatcagagagtggtcagatcagcattgacggaagagtgaagtttggagaaccccacctgacatgtgtggggtctttcgatgtggatgtgagcttagaagggaatctaatcctgtgccggcaggtggatcagcccggcatgattggtcgtgttggaaacatactgggtgaacaaaacgtgaatgtgagctttatgagtgtgggaaggacatcgcgtaggaacaaggctattatggctattggtgtcgatgaagaaccaaacaaggaggctcttgacaatattggagccgtgtctgccattgaagagttcgtcttcctcaagctctagtactagttgataatgtaatggtatacaaacaatcatgcgtatctacctaccatctatggatggtacgttttagaaagtaaaatagctactattttggttataaagaaatgtttttgtttttttgacaattctcaagtgcacatgcacttcagatgatctagatctgtttttacaccgtagaagaggtattttgatggacaatttgaggaaacttgaagctatggtatgcgaatgtaatataatttggattggatgattcagaataaaactagctgtttgcagctagtagtgtgcacctctgtggcctgtgcat

SEQ ID NO: 11129 - DNA, 1995 bp, Glycine max
tttcgagctcttcgagttgtaacctctctcttcaaccctaacttagggtttatgttctaaaacccttttcaggttgattggaggagataaaaatgctcgtgttgtttgaaacccctgcgggttttgccctgtttaaagtgctggatgaaggcaagctttctaaagttgaggacttgtggaagaacttttccagtgcagatactgctagacaggtggtcaagttgaaagcattttctaaatttgagaacacttcagaagctctagaggcagctactttacttattgatggaaaagctagcaagggtctgcgcaagttcctgcgtgttcattgtgaaaatgaaacactaggtgtggcagattcaaagcttgggaatgtgatcaaggagaaattgaaaattgactgtattcacaacaatgcagttatggagttgatgagaggcgttagaaatcagttaactgaacttatatctggtctagctgttcaagacatggccccaatgagcttgggtttatctcacagcttatccagatacaaattgaagtttagtgcagagaaggtggataccatgattgtccaggctattggtttactagatgatcttgataaagagttgaatacctatgccatgagggttcgagaatggtatggttggcattttcctgagcttactaaaataatacaggataacatcctatatgccagggcagtcaagttgatgggtgatcgtgttaatgcagctagcctggatttctctgagattttgccagaggaagttgaggcagagctgaaggaggcatctgtgatatctatgggaactgaaattggtgagcttgatttggcaaatattcgagaactctgtgaccaggttttgtctctctcggaatacagggcgcaactctatgattatctgaagagtagaatgaacaccattgcacccaatttgactgcaatggttggggagcttgttggtgctcgcctcattgcccatggtggtagcttattaaatcttgcaaagcagcctggtagtactgtgcaaattcttggtgctgagaaggctctctttagggcactaaagactaagcatgctactcccaagtatggtcttatataccatgcttccttgattggtcaggcagctccaaagttcaaggggaaaatttcccggtcacttgcagcaaagacggcattggctattaggtgtgatgctcttggagatagccaagataacaccatgggattggagaacagagccaagcttgaagcacgattgaggaaccttgaaggcaaagagttaggtcgttttgctggttctgccaagggaaagcccaagatagaagcatacgacaaggaccgaaagaaaggagctggaggactgataaccccggccaagacatataatccttcagctgattcagttattgggcaaatggtcaattctgctatggatgaagatgcacaagagccttctgttgctgataaaaagaaagaaaagaaagaaaagaaggaaaagaagaaaaaggagaaaaatgaaggggatgaaactgtgcaagctgatggtgacgttggtgaggaaccagaaccagaagttgtgaaaaaggaaaagaagaagaaaaggaaggaaactgagagtgctgagttgcagaatgggaatgacgataatgcaggagagaagaagaaaaagagaaagaagcatggagagcaggaagaatctcctgaaatgccaagcaagaagaaaggcaaaaaaaagaaaagtgaggactaaagtgaagtcatctactaatcaatcctgtggtgaatgacaaccatttttgtatactcctggcagctcagtagtttgtttggtataatttttgttttcatttttatgcattttgtagctttatacatcctttattattatttaatgggattcgttccatctttcgggacttgagtggataatttgatgcaatcatgtttatgaatggaagatggtggtgcgctaccttttttgt

SEQ ID NO: 11130 - DNA, 575 bp, Glycine max
ggagaattggcggggataggcgaaggaggtggcgactgactagtgaataggcttgttgatggattgatagcaataattgctgttagcgaagcttgggaattgacatttatgggtcgcaatcgcagtcgcagtcgcagtgtgtcacgctctccttccaattcccgcagaagaaggtactctccatcccctgtttctcatcgccactcgagaacttccaggcgccgctctccttcccacaagcgccgtcgaaagcacagaacctcttcctccccctctctttcacgcagccccactcccaaacccaagaaagatcaaaacaaaagcaagcgtcaacacgaggaagagttgaaactattggaagaagagactgcaagaagactggaagaagcaattcgaaaaaatgttgaggagaagcttaacacagaggaagtcaagttagaaatagaaaagcgcgtagcagagggagtgaagaaattgtttgatgatgttgaagctcaacttgaaaaagaaaaggaagatgctcttactgaagctagaaggaaggaagaacaagcccgtaaagaaagagaagagct

SEQ ID NO: 11131 - DNA, 439 bp, Glycine max
cgctcacgctctccttcccgcagaaggggatgcgcgccatccaccgcggctcatcatcgccactccagaacttcccacaggcgccgccgaacgcacagaacgctcttgctccccctccctgtcacgcagccccactcccaagcccaagaaagatcaaaagaaaaggttaatggcattcttctctattggctgtgctgaaggaagttcaacttgttaaatatgatgaacaatggctgcctccattatctcctcttgctctagaaacttgttagagagcaagcgtcaccacgaggaagagttgaaactattggaagaagagactgcaagaagactggaagaagcaattcgaaaaaatgttgaggaaaagcttaacacagaggaagtcaagttagaaatagaaaggcgcgtagcaaagggagtgaagaaactgtttgatgat

SEQ ID NO: 11132 - DNA, 416 bp, Glycine max
gaggagaattggtggggataggcgaaggaggtggcgactgagtagtgaatagggtttttgattgattgatagcaataattggtgttagcgaagcttgagaattgagatttatgggtcgcaatcgcagtcgcagtcgcagtgtgtcacgctctccttccaattcccgcagaagaaggtactctccatcccctgtttctcatcgccactcgagaacttccaggcgccgctctccttcccacaagcgccgtcgaaggcacagaacctctttcctccccctctctttcacgcagccccactcccaaacccaagaaagatcaaaacaaaagggtaatttcattcttctctattggctttgctgaaggaagttccacttgttaaatatcatgaacactgactgcctccattatctcatcttg

SEQ ID NO: 11133 - DNA, 491 bp, Glycine max
  unsure (1)..(491): unsure at all n locations
ttcattttggtggcgtaggttcctggaacggatgctggaggaacacgcgagattgttgagaacaatgttactggtcgtcgtcaccctgttggacatccggggaatcttgttcttgcacagaatctccggtttttactcaaaaaccagttggcaaggaagcaaatgggggtggaaggaagaaagaaggtgcagaagatgtatttgaagcaacacatgtataagaattttgtagaggttattactaggtgcatgagaagcaaataagtgaaagaactgcttggtacttgcaatgcaatgctcccattcttttattggattgcacaaacccgagactgttagtttctttgtactactactactgagtccaatttatgagaaagattaccggctcctttgttttctttcatttggacaaaataaataaatatagagatgttcctgnnnnnnnnnnnnnnnnnnnnnnnnnnnnnnnnnnnnnnnnnnnnnnnnnn

SEQ ID NO: 11134 - DNA, 331 bp, Glycine max
ccattgttggtgcatcagggacaccttatcacgatggcttgtttttctttgatatatgcttccctccagagtatcccagcgaaccccctatggtgcattataattccggcgggctacgattgaatcctaatttgtatgagtccgggaaagtctgtctgagtctcctaaacacgtggactggtacagacaccgaagtttggaaccctggagcttccacaattcttcacgtccttctttctctgcacgcccttgtccttaatgataagccttatttcaatgaggctggatatgatcaacaaattggtagagccgaaggggagagaaactcagt

SEQ ID NO: 11135 - DNA, 502 bp, Glycine max
caagttcttgcaggaactgccagaatcgcagagagaagatgctgtgagcagcatggtttatgaggcaaatgcgaggatcagagacccagtttatgggtgtgctggtgcaatatgccaacttcagaagcaagttagtgagctacaagcacagctggccgaagcacaagctgaggtagtgaacatgcagtgccaacaagccaatttagtggcccttacttgcatggaaatgagtcagtcacaggagcagcacgtgcttcagcctcaacctcacgttgatatgagctgcttcatagaggacaacagttttggtactgcttgggagcctctttggacataatggaaattaatgaaatgttatttatgtatcttagatatttgcatcagagagattaattttgttctatagtaactggtaaaactttcaacctcccaataagtggaggaagagataatgaaaattatacttggggaatccaatttcaataaagtcatttaattagtt

SEQ ID NO: 11136 - DNA, 601 bp, Glycine max
cacaaaggtgctttcttccagaatgaatctgatgaccgagctgccaccgttggatctgatggtatttttgctcgtgatttctctgccccaactgggcaggataaaatggacaagacaatattgcctcaggttatgcaagtcaagcactttggtcgtagtggaagaaccaagtggacccatcttgtcaacgaggatactactgattggaataacccgtggacttacaatgatccacttcgtgcaaagtataatgacaaaatggcagcaatgaacgcacctatagtgaaacctacaggaagcaggaaattataggattgggaatctcgatgaacttgaagttacaaaagtatgcatgaagatatcatcctttcagttattagactttggagaaataccatagtagatatgtccttgtcctatgtatgattgtgttctgtcttaaacagaacgtaaagtaattcatcacggttggatcgtgtatgttgtggaccatggaacgcaattgtgacgagaattcatcactactttaactggatattcttcccgagttaatgaatcatacctgatttagagtcctgcgagcgcatcctaatgactaggt

SEQ ID NO: 11137 - DNA, 1669 bp, Glycine max
tttctgtagtcccaattatagtaacagtgcaagatctattttccgcatcttggatatctggctaaaagattgaatattgtgttaatctttctagtagtcaaggggaacaatgaatgcactagcagccaccaacaggaactttaagttggcctctaggcttctgggattggattcaaagcttgagaaaagtttgctgattccattcagggaaatcaaggttgaatgtaccatacctaaagatgatggcacgttgcaatcttatgttgggttcagggttcaacatgataatgccagaggccccatgaaaggaggaatcagataccatcctgaggttgaccctgatgaagtgaatgctttagcacaactaaggacatggaaaacagctgtagcaaatataccatatggtggtgccaaaggagggatagggtgtgacccagcagaattaagtatatctgaattagaaagacttactagagtttttacacaaaaaattcatgatttgattggaactcacacagatgtgccagcacctgatatgggaacaggaccacagaccatggcatggatactagatgagtattccaaattccacggctactatactgcagtagtgactggaaaacctatagatcttggtggatctctcggtagagacgcggctacaggaccaggagtcctctctgcaacagaggctatgcttaatgagtatgggaagagtgtatctggacaacggtttgtcatacagggttttggaaatgtagggtcatgggctgcccaattaattagtaataaaggtggaaaagttgttgctgtgagtgacataactggagccataaagaacagcaatggtcttgacatcccaagcctacttgagcattccaaagtgcacaggggagtaaaaggattcaatggtagtgatccaatagaccctaactcaatattggttgaagattgtgatgttctagtcccagcagctcttgggggtgtcatcaatagggaaaatgcaaatgaaatcaaggccaaatttattgtggaagcagctaatcacccaactgacccagaagctgatgagattttgaagaagaaaggggttgtgatcctcccagacatatttgcaaattcaggaggcgttacagttagctactttgagtgggttcagaacatccaaggtttcatgtgggatgaggagaaagtgaacaatgagctaaagacctacatgaccaaaggtttcatagatgtgaaggaaatgtgcaaaacccatgaatgtgatcttcgtatgggagccttcaccctggcagttaaccgtgtcgcacgtgctactgtccttaggggctgggaagcttgacatccattgcttctgctttcaataaattaattaaagagctcccactctcagcaacacttcacaaagtttttgttgctttcaactaatgtgttgggtgaatcgtattttcacgccaaattttctttcaataaattagtatagtatataaatctttttgtaactacatgtgtggttctatgccacttcttgtgacagccacgctttttaatataatgtcactttgctttgaaaaaaaaaaacaaaagcaatagcaccaaataaagatgaaatcaagaagcgagcaaatcagaaagaagcaaatagcaaaaaagggccagcaggaaa

SEQ ID NO: 11138 - DNA, 459 bp, Glycine max
gaaagacttactagagtttttacacaaaaaattcatgatttgattggaactcacacagatgtgccagcacctgatatgggaacaggaccacaggatcttggtggatctctcggtagagacgcggctacaggacgaggagtcctctttgcaacagaggctttgcttaatgagtatgggaagagtgtatctggacaacggtttgtcatacagggttttggaaatgtagggtcatgggctgcccaattaattagtaataaaggtggaaaagttgttgctgtgagtgacataactggagccataaagaacagcaatggtcttgacatcccaagcctacttgagcattccaaagtgcacaggggagtaaaaggattcaatggtagtgatccaatagaccctaactcaatattggttgaagattgtgatgttctagtcccagcagctcttgggggtgtcatcata

SEQ ID NO: 11139 - DNA, 787 bp, Glycine max
ttgtgcaatgaaaccatctatatttatagccatttatgagtgacagtagaaccacgttttgcttcctaatgtttattattattatacttatattgtaccattcctcttgagcctagtagtaatagtgaactggagtgatgctcaagtgtgttgtgtgtcagtgttttagggaccaatggtggagagtgagttttctgagttaagatataagatatatgctatctaatgcctagtgggatataggaaaggacctcaaatctgctatctttcgttcacatacgcatcatattcttttaattgttagttctgagttctgaccaaagttgttgatttgagtgtttttagcatatttggggtgtctgcaaacaccgcaggaattttgctttttctattgaattagattcctctgggaattcaattctgattcttccttagttttcggttttctgtctttctttttttccttctatttatattttgggttggttttctgttgagtcttgacttgcttgctccaactccaacccagtttcacactagtttgttgctccaattcttgtcaaggggaacaatgaatgcactagcagccaccaacaggaactttaagttggcctctaggcttctgggattggattcaaagcttgagaaaagtttactgattccattcagggaaatcaaggttgaatgtaccatacctaaagatgatggcaccttgcaatcttatgtagggttcagggttcaacatgataatgccagaggcccccatgaaaggaggatcagataccat

SEQ ID NO: 11140 - DNA, 519 bp, Glycine max
ggaggcaaatggcagcatcgtcaccatcgccgccgctgaaggcgtgcaggaccgcgtccaagcagccgccgaacgctctggccgtaatgtgcaagagattcgtgtagtggctgcgagcaagacgaagccagtttctgctctccgtgaggtatacgacgccggccttagatgcttcggcgagaactacgttcaagaactccttcaaaaggcaccacagcttcccgacgatatccagtggcatctcatcggaaatttgcagagcaacaaagtcaagcctcttatcgctgctgtgcccaaccttgcttgtgtggaaactgtggatgataagaagatagcaaattttcttgatcgtgctgtagcaaatgttggcaggaaaccgttaaaggtttttgttcaagtgaatacaagcggagaaacatccaaatttggtgttgaaccagctctgtgtgtggatcttgtaaaacatattacaaactgcccaaaccttgagttctctggcctaatgacaattggcatgct

SEQ ID NO: 11141 - DNA, 760 bp, Glycine max
  unsure (1)..(760): unsure at all n locations
attggtttggaattncggatagagttatggggagccacgcgtccggcttcctcctcttacgagcctttcctttcagtccattgattcggtgggtgcgggtgcagcgaaaccgagctagaccctgatcggcgtcggcacaccgccggagaacaagatgattgtctgcgtcgccgtcgtcggtcaccagaacaatccgctgtacatacagagcttcacggaggccgatgatgctctcaagctccaccacatcgtccattgctcgctcgatgtggtcgacgagcgagtgaacaatcctaaaaagtctgggccgatgcttaatgagacgtttttgggactgctttatcctattgaaaactacaaagtatatggatatctgactaatacgaaggtgaaatttatcttggtgaccacggatctggatgttaaagatgcggatgtaaggaattttttcaggaggttccatgccgcatatgtagatgcagtttcaaacccattccatgtaccaggcaaaaagataacctccagaacttttgcagaaagagtgagcacaattgtcaagtcatttggcttgagttctgctgggtgaacatctataactggtgcctagtatgatgatgcttggttgatatttggcacaacttttcttttgttattctaagctcctgccttgtagttttagcagtggtaaatgcttaggaacattttgaacagaatcctattttcaatatatcatattcaaattgaaccatcacatttgctt

SEQ ID NO: 11142 - DNA, 500 bp, Glycine max
aaatttaattccagtagacccatgcacaccagaacacttccttctgcggcgggttgcttcctcctcttacgagcctttcctttcagtccattgattcggtgggtgcgggtgcagcgaaaccgagctagaccctgatcggcgtcggcacaccgccggagaacaagatgattgtctgcgtcgccgtcgtcggtcaccagaacaatccgctgtacatacagagcttcacggaggccgatgatgctctcaagctccaccacatcggccattgctcgctcgatgtggccgacgagcgagtgaacaatcctaaaaaggctgggccgatgcttaatgagacggctttgggactgctttatcctatggaaaactacaaagtatatggatatctgactaatacgaacgtgaaatgtatcttggtgtaccacggatctggtggggggaaatttttgggggttttttttttaaaaaaaaaaaaaaggatgcggatgtaaggaattttttca

SEQ ID NO: 11143 - DNA, 488 bp, Glycine max
ttcccttgtcgacaccacgcctgcggtccttccttcatccattttctacacgtatctcctttcactttattgcctccatgtgtacgggtgcatttgaaccgaaaccgagttctagaccctgatcggcgtcggcacaccctcgccggagaacaagatgattgcgtctgcgtcgccgtcgtccggtcaccagaacaatccgctgtacattcagagcttcacggaggccgacgatgctctcaagctccaccacatcgtccattgctcgctcgatgtggtcgacgagcgagtgaacaatcctaaaaattcggaaccaatcctaaataaaactttttgggaacggcttaacccaatgaaaaccaccaagtttaaggaaaaccgaccaataccaaggggaaaattaacctggtgaccacggatctggaagttaaagatgccgatgtaaggaattttttcaagaagttccattctgcatatgtagatgccgtttc

SEQ ID NO: 11144 - DNA, 370 bp, Glycine max
gggggaaatgggcagcagagataagggacccattcaaagcggcaagagtatggttaggaacatttgacacagcagaggcagcagctagagcatacgatgaagctgctcttcgtttcagaggcaacacagccagactcgattttcctgagaatgtcactctccgacaacctcaattcactgtttccaatcctccatcttctcttgtatctattacgacatcaacagacccagttgttcgcagtactcgacctctccttcttccttctcaggcttcaactgcgaccaatgtttacgagtattttcaactctcgggcttccccaccaacaccaacctttatgatggtaataggatgtttgtgacgtctaatgc

SEQ ID NO: 11145 - DNA, 445 bp, Glycine max
cgcatgcaatctgctcaaaactctgtcttgctaagctcattgctaattgtttttgccagactggtacacatgagtgttcctaatgttggacaatttattgatttgctgatctcaattcctgcggaaggacatggtaattcctttgcttatataatgtcagaatggactaagcagcaaggggagatacagggggcatatcaaataaaagtcactacaagtgccctggccttgttgctaaccagtaggcacaatgaattggcaaatatacatgtccagggctatcttattaagtctggcgagggaataactacaagatcaaaagctaaatcagccccagatcaatgggtaatgttgccactttctacaaagatagtggctttattggcagatgcattaactgagatacaagaacaagttttggccgctgaatatgatgatagtgact

SEQ ID NO: 11146 - DNA, 407 bp, Glycine max
gaaggcacccacgtagagaacctctaaaaacaaaaataaaaacattctctcccattcctcccccccttagcccttccttccttcattttttttctctttcttttgttggtttgtttgttccttttgttgtacgttctcctttgttctcttcttccgcatttggtacatgcggtgttctacttctctcttggtttgataacaggatttgacacaagtgttgtggtctcccatttcaggagaatcactcactggcataatatagagcttgttaaaagcaaaaaaaaaaaaaaaagtgaagtgttttgagatctggcatgttatccttttctctctagctttaatttctttgtcggggtgtgtatgtgctagagtaactgacattccagctctgcctcctttgttttgcc

SEQ ID NO: 11147 - DNA, 265 bp, Glycine max
taaaaacaaaaacattctctcccattcctcaatcctcccccttagcccttcattttctttttctttcttttgttggtttgtttattcctttattctctgcttctgcattttgtacatgcggtgttctatttctcttggtttgataacaggatttggcacaagcgttgtggtctccccatttcaggagaatcatcactcattgccataatatagagcttgttaaaagcaaaagacagaaaagtgaagtgttttgagatctggcatg

SEQ ID NO: 11148 - DNA, 927 bp, Glycine max
cggctcgaggttcgatacattgacattgaaacatgccagtctggggttattaagacttctggtgctgttccagtagctcgtgtgggacagtctgccacaatggttggttccagagtgatattgtttggtggagaagatatgagcaggaagctgttgaatgatgtccatgttctcgatcttgaaagtatgacttgggaaatgataaagactacgcagacacctccatctcctagatatgatcattcagctgctattcaaggagagcggtaccttctaatattgggtggttgctctcattctatcttcttcaatgatcttcacttgttagacatgcaaacaatggagtggtcccaaccacaaactcaaggtgatttagtatctcccagggctggacacgctggtatcactattgatgaaagctggcttatagttggtggtggagataatagaagtggttgccctgaaaccctggtgttagacatgtctaagcttgtttggtcagggttgactgttgtgaagcaaagagatccactttctagtgagggtcttagtgtctgttcagcaacaattggtggagaaaagtatttgttagcatttggaggctataatgggagatatagcaatgaggtttttgttatgagacccaaggccaaggataccatgcgtcccaagatttttcaatcacctgctgccgccgctgctgcggcttctgttacttctgcttatgcattgtctaagtctgagaagttggatttcatgcaactggatgatataaattccaagttatctgcaaatggtcatcctaaagatgatgtcacggataaagttgaagccattaaagaagaaaaacggttattggaattgtcatttccaaaattcagggttaaaattccaaaccttggaggcaaattaaagaaattaattata

SEQ ID NO: 11149 - DNA, 688 bp, Glycine max
gattattgatgaagatacgtgtcgctgcaaaatacaaacacaagtatagcaatggataatggttctgagtcaaaggagataccaaaggaggagaatattgcagctcccgttgttcctgttgtaagcacggattccctccggaacattgatctgaatgccatcacgaatgaaaacgatgacaaaaaggctagtgcagaagctgatgcctccgcctcggtgcctgaacctgatgcctcattgcctgaacccccaacagagagcaagcatgaagaaattccggggtggtcactttctgatgtggacaagatggccattgattcgctgcagcttgcacaacttggtaggccactagaagaggaggaggaagactatgatgaagaggaggggttaaatattattagtctttggtgattagattagtgaaaagttcatcatgataactgtagaataagtacatactagtgttatgattatgagtatccactagctgtcaatgcatgtaccatgttgttggctgaagaaagatctgaatgccccttttcattaatctgctttgtatgtggagctgatgtatcttccccttgaccagtaatgttagcttcgtgtacttttagccctacaatgtatatcacaattctagattgagttaaatttttgcatgcaaaaaaaaaaaaaaggggcggccgcc

SEQ ID NO: 11150 - DNA, 967 bp, Glycine max
cagcaatgctcgggctcatagattatcaagcagccattcatttgtggaaaatcgacaaatttgatttacttagtgtgcttcactgcttatgttggcgtagtctttggcagtgttgaaattggcctagtcatagcagttgcagtatctctgcttcgagtacttctatttattgcaaggccaaggacatttctcttaggcaacattccaaattctgcagtatacagaaatgtggaacaatatccaaatgcaaatcatattcctggaatcctaattcttgaaattgatgcacccatttactttgccaatgcaagctatttaagggaaaggatcacaaggtggattgatgaagaggaagatagaatcaaagctacagagcaaaccagtttgcaatatgttataatggacatgaccgctgttgctaacattgatacaagtggaataagcatgcttgaagagtgcaagaagactgttgacagaagagggttacaacttgctttggtgaatccaggaagcgaggtgatgaagaagctgaacaaatccaagttccttgatgaactggggcaaaaatggatctatctgacagttgaagaggctgttggtgcgtgcaacttcatgctccattcctacaaaccgaaccccatgaaggatgaatcagaaggttggaacaatgcctaataaaataaagcattgttaaccttaattacagtatgtgacgtgagagtttgagaatcatgctgcagaaagttttagagtgatagttgcatgagtactttaattcctcaagatactgagttggaggaaagtttccaacgtaggctgttgaatctttatatatcatgcatacttaataatctattcaaatagaaagtggctgcaatggaattgagaagtgttcagttggaaattaatgttatagagctgatcagtgatcaatggaaattataaataaaattttaatttcgttttc

SEQ ID NO: 11151 - DNA, 483 bp, Glycine max
ggactttgaaactgcgattcagaaagagtcatcgaagaaaccggtccctggcggtggtgttcaccctctcacgcgctacgtgatgaactacctcacgttcctcgccgattacagcggcgtgttggtcgatataattgccgatttgccgcaatctccgttgccggagtcgtactaccgcagcccgatgcgcgaggaaaacccgccggcttcggagctatcggagcgaatcgcgtggatcatactcgtcgtgctctgcaagctcgacggcaaagcggaactctacaaagacgtggcgcactcgtacctgtttctcgcgaataacatgcaatacgtcgtcgtaaaggtgcgcaaatcgaacctagggtttcttctcggcgaagagtggttggcgaagcatgaattgaaagttagagagtacacgtctaagtacgagagcgtcgggtggagcgctgtcttctcgtcgttgccggaaaatcccgcggc

SEQ ID NO: 11152 - DNA, 841 bp, Glycine max
tgcaagaactacaccaactaaaaccttctttttcaactttttttttttttggtttgtttttcttcttcttctccttcttccaatccttaaggaaaaaagaaactaaagaaaaaaagtgagccatgtcaggcttgtataatcccaacttctctcctgctagagctgcttctcctcagattaggagcaatccagaagtggacagccagtacctatcagagttgctggcagaacatcagaagcttggacccttcatgcaagtgcttcccatatgcagccgcctcctaaatcaagaaatattaagagtttctggaatgctgtccaatcaaggttttggtgactttgatagactgcgacatagaagccctagtcctatggcttcttcaaaccttatgtccaatgtaagtcggacagggttgggtggatggaatagtcttcagcaagagcagagattatgtggagcccctggaatgacaatggactggcaaagtgcacctgcaagtcctagttcgttcactgttaagagaatcttgcgcttggaaattccagtagatacatatcccaatttcaattttgttggaagacttctgggccctagaggcaattctttgaaacgggtagaagctacaactggttgtcgtgtgtatattagaggaaaaggatcgataaaggatccagacaaggaagagaaattaagaggaagaccaggttatgagcatctcaatgagccgctccacattttgattgaggctgatttacctgctaatggtgttgacttaaggctccggcaggctcaggaaattatagaagaattgctcaaacctgtggaagagtctgaggacta

SEQ ID NO: 11153 - DNA, 511 bp, Glycine max
gaagacgaaagaaggggaccctttttcgtttttctccttattacagacccccctaattgatggtgctctgtatcccctttttcttctgcaagaactacaccaacgaaaacctccttcttctttgtttttttttggaggctggtgtgtgtttttctttttcttcttcttcttcttccaatccttaaggaaaaaaactaacgaaaaaaaaagtgagccatgtcaggcttgtataatcccaacttctctcctgctagagcagcttctcctcagattaggagcaatccagaagtggacagtcagtacctatcagagttgctggcagaacatcagaagcttggacccttcatgcaagtgcttcccatatgcagccgcctcctaaatcaagaaatattaagggtttctggaatgttgtccaatcaaagttttggtgacttcgatagactgcgacatagaagccctagtcctatggcttcttcaaaccttatgtccaatgtcagtgggactgggttgg

SEQ ID NO: 11154 - DNA, 490 bp, Glycine max
aattttctcactactatagtaacacaacgcagtttgtggacaaactaagcaatactaattaattaaaagggaaataaataaataaataaggatttgttttgttggatgtaaatttgagatagttgctgcatttgacgacacacgacacagacactaaactaaacctacaacggctggtctggtttaggtttaggtttaggttgagcgatgtcgggtctgtataactccaacttctcaccagtgagggctgcttctcctcagattagaaccaacccagaagtcgacagtcagtaccttacggagttgctggcagagcatcagaagcttggtcccttcatgcaagcccttcccatatgcagtcgtctcttaaatcaagaaatattaagagtttctggaatgctgtccatcaaggttttggtgactttgacagactgcggcatagaagccctagtcctatgggttcttcaaacctcatgtcaagtgtcactgg

SEQ ID NO: 11155 - DNA, 283 bp, Glycine max
agccagcatttgacgacagacactaactattcctacggctggtttaggtctggtctccaaccacgtttaggtttagcttgagcgatgtcgggcctgtataactccaacttctcaccagcgagagctgcttctcctcagattagaaccaacccagaagtcgacagtcagtaccttacggagttgctggcagagcatcagaagtttggtcccttcatgcaagcccttcccatatgcagtcgtctcttgaatcaagaaatattaagagtttctggaatgctgtcca

SEQ ID NO: 11156 - DNA, 1341 bp, Glycine max
ctcgagccgaaacacgcggatatgaaattagcgagcggtggtaggttctagaaagtcctgggggcttacggaaaggtaaaatatattaggacttaccctccaaagatttgtcttccttgttgcagaagaaccgtgctttctaatcttgtaattttctgtgtcgcttcgtggttcattcttctcgttcttgtgatctgttctattttggagtacttacaacactcctttgcaagtttaattaattaaagaggctaatcaattttcaattggactgcagcagatggctgaggagggttgcagggttactctaaatgtttatgacttgagccaaggactagcacggcagctttcaatgtcctttttggggaaagctattgaaggcatatggcacacaggagttgtggtttatggtaatgagtattactttggtggtggcatacaacattctcctgctggattaacaccatatggaactccacttagagtggtagacttaggtgtgacacatgttcccaaggatgtctttgaaatgtatttgcaggaaatcagtccgcgatacctgcctgaaacatatagtctgcttactcataattgcaacaacttcagcaatgaggttgctcaatttttggttggtgcgtccattcctgaatatattctccagctgcccaatgaagtcatgagcagcccaatgggagctcttatattgcctatgatacagaatcttgagacaacactgaaatctggtggagttcctcaagtacctcaattcaggcctgcaactaccctgaatgtttcagctaacacccaaaagaactctagtatctccaactcatccactgagaatgttgtgagcagagaggtgaacaaggaagtgaagggcaaagatgaaaactctaaggcagcaccttctgcaaacacaacagggcaaccacaaaagccatcactaaatggggtcacagcagaccctcttggagatgcacgcaacaaggttcaagatgagattctcaaagagtttgctgcaattatggcaagtgggacaatgcgtgctagtgaggctgcagctctagccactaaaagagtcatgcaaagatacggccatactactgctgtgtctcagaattagctacttttcttcatcagaaaacgatttgtgggtctaaaacctctacttactatcactgcaataattgcggtgtttcatatcattggttattatttgaaccgggaaaaacatgatcaacttgtagcacctattctatgagtttacttaatggtttcaagttaatgtgcatgtcggatgaaatgctgattaagggaatcatttcaccacattttctgaat

SEQ ID NO: 11157 - DNA, 549 bp, Glycine max
ggttcaagatgagattctcaaagaatttgctgcaatcatggctagtgggacaatgcgtgctagtgaggctgcagctctagccactaaaagagtcatgcaaagatacggccatactactgccgtgtctcagaattagctacttttcttcatcattctgacgatttgtgggtctaaaatccctacatactatcactgcgcaattgcagtgtttcagatcattggttattatttgaaccggggaaaacatgatcaacttgtaacatctattctatgaggagactactttattggtaatgtgtatgtcggattaagtggattcgagtgaaatgttgatcaggggagtcatttcgacatattttctggaatataactcttggattataagcttttaagaaggctcttttcacgtggcagaaaagaagtatataaagtggttttaatggtcgctccaattcagctttggataagatatccaaaacttctggaacaaaaattgagaaggggttcttcgtcagttaaaattgtttagcttatgcataggttaaaaag

SEQ ID NO: 11158 - DNA, 444 bp, Glycine max
caggaaccgtgttctctaatcttgtaattttctgtgtcgcttcgtggttcattcttctcgtaagttctctctttctctgtagggtatttttaggattcatgttgtgtgcgtggtttactaattgattcagatatttttgaagagtttattttgttccttaaggtagaatttggggtgccaattttgtgttggatctgtaaatgtttgacagtttgaattttggatttgggtctaccccgttgtggaacaaaacttttttattcttgggttgggggattcaaattgtgaaattttcaaggggtggttttttgaaaagggtctttgcgttttgtgttgcttctggatttggattttgaattgttgttttattgatttatttttatgaaatattttcttattcggttgctccatgttgagatgtttttctgtttatcaatgtttagt

SEQ ID NO: 11159 - DNA, 597 bp, Glycine max
tcccacgcgtccgaaaatttgctttcatagtctcatcattggtccaacatagcccagcctaaaatttaagtagcagaagctagcactagctagttaggtttaatttctgtcttgtaattgagacaatttatgaaataaccgcacaattgattcatgatgaagaagagagtagcaagcaccagcaatgagtcctctaaacttgatcgcaaaaccattgaaaggaaccgcagaactcacatgaaatccctctgccatcagctttcttctcttattcctcccaatctcaaaccagtcaaacccaagttgatgctagggctgcaggaccagctggatcttgcagcaaggtatataagacaaatgacagagagagtagagaaactgaagaggcagaaggagcaagccatgtcaaaccaaagcaatgatggtagaaaaatgttcaacaataatgttgagtccaaattgccaatagttgagctgagagacttgggttccagcattgaagtgattgtggtgagtgggttgacaaagcattcatgttgtacgaagtattagtgtactcgaggaagaagggctgaagtgcactgctacttctcaatg

SEQ ID NO: 11160 - DNA, 1111 bp, Glycine max
aggcgattcgtattcggtgagctggtccgtttcctagacgaaatggtgtaagaattgaaagcatgatgattgattgatgggagcagcgaaccatataatttaatttaatttgtgtccacatgagaacgtcgtgacctgcattttctatctcgcaacaccgcgataatggtataaaatagtttcagatacgttgcgttgattgattggtatgaagtgattgactttttttcttcttctattctcacacatacccatctactccttccctcatggctgaacaatcttccaactccatttacgatttcactgtcaaggacatcagtggaaatgatgtgagtctgaatgattacagcgggaaggttctactgattgtgaatgtcgcctctcaatgtggtttgacacagacaaattacaaagaattgaatgtattgtacgagaagtacaagaatcaaggatttgaaatcttggcatttccgtgcaaccagtttgctggacaggaaccaggaaacaatgaagaaattcaggaagttgtttgcacaaggttcaaggctgaatttcctatctttgataaggttgaagtcaatgggaagaatgcagtgccactttacaagtttttaaaggagaagaaagggggaatatttggcgatggtatcaagtggaacttcacaaagttcttagtaaacaaagaagggaaggttgtggacagatatgcacctaccacctcacctctgaaaatcgagaaagacatagagaagctcttgcaatcttgaatagtaagattttattctacatatctaatgtgctgaggacataggcaatctgtccggtgtcttcgaaggacaagtagcaatatgtatcatcaattaatataatgccctgaaaagttcttaatatatctcgtgtatttggattttggattgctcaataagtgtaaattggtgttctcactctgttaccaaaaccataaaataataatatatttggatgcatctttatgttattatgcatgtcaacaaaaaaaaaaaaaaaaagggtggcccccgaaaaattaacccttaaccccggggtttatttccgggccggcacctttaggggacacagatttccccaa

SEQ ID NO: 11161 - DNA, 838 bp, Glycine max
  unsure (1)..(838): unsure at all n locations
gtgcattttctacattgcaacaccgcgatatgaacgatgcaaaatagtttcagatacgtcgcgttgattgattgatatgaagtggttgactttctggaactgcatatctatcctcgtgttgtcttttgctttcttcttcttctattgtcacacatacacatctactccttccctcatggctgagcaatcttccaagtccatttacgatttcacagtcaaggttcgtttttttgcttctaaaattgttgcctgctcatacccaactgttgtttctctatagttacgtgaaaagattgtggcttgctcatgcccaattgtgtttacactcgaattgcttgatgggtgagtgaagattatctaggaaatatcagggcacactatgatgacaattatatttagtaggttctgattttgtattttttgtatttcaacttttatggatccggatcaatgaagctctctgatctagttttcttttcaattgattgatgattttgctgattgcagtatttagatttattttccctaacacttttattgtggtattcatggaaaatgaattgagttcggattattcttgttgattattggtttgtctatgccctcttctgtatatcatctgtgtctgttctgtcctaccaaattgtttgggataaggctggtagatttcattgctgctaattttattgtaattgcttgggtgacgttttacttttaatagttttttttttttggttctgggggggaccataattgcaggacattcatggaaatgatttgagtcttaaatattacagcgggaaggttctactgannnnnnnnnnnnnnnnnnnnnnnn

SEQ ID NO: 11162 - DNA, 393 bp, Glycine max
cattcctggagtttacacattaatagtatattttgtttgatttgttgctaaaagagtatctgcattgccgtgtttgatgtttgacagtttgagaaatgccatggcattagcaaaaaactatatataagattggactttcgtaggtgaacttaatgtgaactaatccctataattatacttataatattcttattcattgctgcagtggtttgacacagacaaattacaaagaattgaatgtattgtacgagaagtacaagaatcaaggtttgtcactttactgaaggacaaaaaaaaagaaagaaatatatgtcaactatatttatgagctagtgaatttttaacacagaattctaagttgtctccaggatttgaaatcttggcatttccatg

SEQ ID NO: 11163 - DNA, 528 bp, Glycine max
tgcattttctacattgcaacaccgcgatatgaacgatgcaaaatagtttcagatacgtcgcgttgattgattgatatgaagtggttgactttctggaactgcatatctatcctcgtgttgtcttttgctttcttcttcttctattgtcacacatacacatctactccttccctcatggctgagcaatcttccaagtccatttacgatttcacagtcaaggacatcagtggaaatgatgtgagtctgaataattacagcgggaaggttctactgattgtgaatgtcgcctcacaatgtggtttgacacagacaaattacaaagaattgaatgtattgtacgagaagtacaagaatcaaggatttgaaatcttggcatttccatgcaaccagtttgctggacaggaaccaggaaacaatgaagaaattcaggaagttgtttgcacaaggttcaaggctgaatttcctatctttgataaggttgaagtcaatgggaagaatgcagcgccactttataagtttttaaaggag

SEQ ID NO: 11164 - DNA, 1160 bp, Glycine max
  unsure (1)..(1160): unsure at all n locations
ggtcatggattccgggtcgatcagtcgtgcttccagatgacaacagaagggggatagaagaaaggcatagcatanggcggttgactcaagtaaacagcgttccaacgctgtttcctttctgtttcttttttcttcttccttcttcctttcttcgttgttgttgttgctgcgattctctagatcttgaacagtgttttcgtgttcggtgagatggaagaaaggaagcaatcgcgttatgtgaagttgactaaagatcagacacctctcgaagatattacccctggcgaactcaatcagccaattcaggttcctcagttggatgttcgtaagtgccctgaatgtagacagccgctacctgaaagctatgctcctcctgctgatgaaccttggatgactgggatctttggatgtgctgaagacagagaaagctgcttgaccggactgttttgtccttgtgtattattcgggcgcaatgtagaaagattgaaggaagacactccttggactggaccatgcatttgtcatgccatttgtattgaaggtggcatttctctggcaatagcaactgctgctgcaacttccatctttcctgctattgagccagggactgtatgtctcattattgagggtttattgtttacatggtggatgtgtggcattcacactggtcaagtgcgccaatctttacagaagaaatatcacttgaagaattcaccgtgtaatgcatgttgtgtgcactgctgctttcactggtgcgccctgtgtcaagaacacagggagatgaatggacggctctcggacaacattttttcagaaatgaccgttgtaaaccctcctcccgttcaagagatgaaatctaccgatgacaaggaaactcctgaaacgtcttcacctaacaacggtgagcatactgatttggagatacaggctgtataaggaaggcgggatactattgttaatattctggggtggggagggggcaatactatgcttttttaatagagaatttttttctttttatctttgactagagttctttctccctgtttcattggacgtgttatatgtaggagtgtctcatataactttccttggctatagagagcctaacaaattcccccgaatccttaattttttaatgtgttcagaattcaaccatt

SEQ ID NO: 11165 - DNA, 447 bp, Glycine max
gatggcggttgactaaagtaagcagcgttgcaacgctgtttcctttctgtttcttttcttcttccttccgacgagatctacaacgttgttgttgtttagatcttgaatagtgttttggtgttcggtgagatggaagaaaggaagcaatcacgttatgtgaagttgactaaagatcagacacctctcgaagacattacccctggcgaactcaaccagccaattcaggttcctcagttggacgttcgcaagtgccctgaatgtagacagccgctacctgaaagctatgctcctcctgcagatgaaccttggatgactgggatctttggatgtgctgaagacagagaaagctgcttgaccggactgttttgtccttgtgtattatttgggcgcaatgtagaaagattgaaggaagacactccttggactgggccatgcatttgtcatgcc

SEQ ID NO: 11166 - DNA, 594 bp, Glycine max
  unsure (1)..(594): unsure at all n locations
catgacttgagttctcattttccgttccccgcgacactcgacacactaaataaataacataacataaaatactatacacccctttcttggtgttcgtttctcatcacttcgtaaccaagatcatggaggaaaggaagcaatcgcgttacgtgaagctgactaaggacaatgtttctatggaagatgtcacgcctggtgaactcaatcagccaattgaggttcctcagttggctgttcacaagtgcatggaatgtgggcagccattacctggaagctatacacctcctgctgatgaaccttggatgactgggatctttggatgcactgaagatagggaaaattgctttgacagggctgttttgtccttgggtattatttgggcgcaatgtagaaaccttgcatgaagaaactccttggactggaccatgcatttgtcatgccatntatggagagggtggcattgctctggcaactgcaaccgcaatctctaatggcttcattgtcccagggacatcatgtctcatttttgagggcttattctttacttggtggatgtgtggaatctatactgggcaggtttgacaaaacttacat

SEQ ID NO: 11167 - DNA, 303 bp, Glycine max
ctaccgatgacaaggaaactcctgaaacgtcttcacctaacaacatcgagcatactgagttggagatagaggctgtataaggaaggaaggaatactatgctttttcaatagagaattttttcttctgacctttgactggagttctttcttcctgtttcattgggcgtgtcatatgtaggagtaccacatattactttcctcggctatagagagccaaattataccgtatccttaatcttgaatgttttccggcttcaaccattaatcctctctgcaagagtctattttctcatcttggtgaaa

SEQ ID NO: 11168 - DNA, 880 bp, Glycine max
ctcgagccgacaaaccagggacccaaaacattgaggtagaacaactgaagaaccaacaagaggggtattgagattgagattcaagtaatggggaagagcaaggttcttgtggtggggggaactgggtacatagggaggaggatagtgagggcaagcctggcactgggccatgagacctatgtggttcagaggccagagttgagcctccagatagagaagctgcagaggctcctctccttcaagaagcaaggtgctcatctcattgaggcctctttcaatgatcacaagagccttgttgatgctgtgaagcaggttgatgttgtcatcagtgccatctctggtgttcacatcaggagccacagcatcactctgcaactcaaacttgttgaggccatcaaagaagctgggaacgttaagcgtttcttgccttctgaatttggcctagacccagcaaggatggggcatgcattagaaccaggaagggtaacatttgaagacaaaatggctgtaaggaaagcaatagaggaagctaatatccctttcacttacatctccgcaaacctctttgctggatactttgctggcagcctctctcagatggggtcttttgtgccaccaagggacaaggtgcatctctttggagatggcacactcaaagctatttttctggatgaagatgatgttgcaacatatacaatcaaggcaatagatgatccacgaacccttaacaaaacattgtacctaaggcctccagaaaatattatctctcaagcagagcttattggaatttgggagagacttattggaaaggaactagagaagacatacatacctccagaacgctttctgacaacactgaaaaggttggattataaacttc

SEQ ID NO: 11169 - DNA, 347 bp, Glycine max
gagttaattacaatattgggaaagtatggagttaaggttttgttcgtaaacccatggctgaaggtcatgcagtagcttataatacccaagtttgttcagaaaattgggaaggagtcgttttatctaatattggatgatgcagtgatggcaagtcaatatacacttcgttcatcaaaggctgcaaataatgctcaagaggtggtttaagaagaaattcatgcctaagtagttaattaattagcctttcggttgcccaaatcaatgttgtattatagaatagtattattatacaactatatatttgtggaattgagaaaatattcgctaataaattaatgacttttccc

SEQ ID NO: 11170 - DNA, 885 bp, Glycine max
gaacgctagaaagaatgtaactaaaactattctaattgcgtctcagtttctctcaggttggcttcccctctcccctatcgctctctccctaatcgcatctcaacttgtcgtcgtcggtgattcattctccctaatcataaccctaatcgcatcttaaatcgaactcaatcagagacaaaacaaagttgttgattctgttacaaaacatagcacggtggacaaacgttaaacaaggctacagatctttgattcagttgaaagcagattgaaggggagtaaaacaggaacagagcaacctgcagaattactcaatcgaggtgtcataaacttgatgtatttgtgtctccaatctctttgaactgtgagagaacagccatggacagacgcacgaacacctccaggccagtggcattgtcttccccttctatcactgccaccaccaccaccaccataacaattttgaactctgagccatcatcctcttcatcccagcaggaacaacagcaaccagaagtcctcttcctcccactcaatcgcaagaagaagaaggtttcttggaaagagggcactgtagacaacgagttcatgcagaaaaagagttccaagaagtgctgtatcttccataaacaaaagccctttgatgaagatgatagtgatgaagatgaacatcactctgatgaacaccctcacgatagtgggttttgctgtaagaattatgatgaagctggcccaagcagttagggatctgattgagctgagaggtgactaataaaccgaaaaatggcatatattttgtagggtaaatgattcaagaaaccattgaacttgagtttgtaagtcaggaaatatttaatttctgttgcaagtataaaatcacgacattgg

SEQ ID NO: 11171 - DNA, 397 bp, Glycine max
ggacgggacatggagagttacgggtcgggtcatggttcgggtcaccgtccgcacggaggtggccgtaagatggaggttgtgagcggcaaaagccacggttggagttctactagatcaccggattcaactcaggcgagtgaaatgccgtggagattcggcgatcctgaagcgacgacgaagaaaaggatagcgaagtacaaggtttacggcgtagaaggaagggttaaggctacgctcaagaaaggtcgtcgatggatcaagaaaaactgtgctcagatccatggctactagtagaaatactcagaagccagccacgtcaaatgctgacgtgtcagtatctaaatgttgggatgctactcctcatatcatatcacatgcaaagggtcaattctttgtt

SEQ ID NO: 11172 - DNA, 851 bp, Glycine max
agcggctcgtgatgatttgggtaaaggtgctattgacaaagaagtggtggagaaggtgtgggaccgaattgctcctggtttagcttcccaatttgactcaccttattcagttccaactatcgcaccacgtcctttgcttattgttaatggtaagacccttgtatatattgtacattaaacattttcaaaatgaatcaggctatcttattcatatacaacggcatatattgacaattcaggtaaccactctgctgcaacataagctttttgcttctttaggatatatcaataaatcgtagacccctgtattagtcaatttagttatcccgttcatttagattttgtggattttttttaagctaacttggaattgaagcatttgcttgggttttgggaactctaaggtgcggaagatcctcggtgtcccgttgcaggcttggaaattccaagggcacaagcaagccaggcatatggacagtttgactgtttagataatttcaagattattacagaacctggagttggacaccaattaacgagacttcaagtgaaagaatcatcttattggtttgacaggttcttgaacccttagcccgtgccctcatatgtgttcatcaagccctgtgtggttgttgctctagctcattgcctcatttctattgtcattgtgtcatgatatcaaagtcaataaattgtcaaatagaaatcatcatcatgatgactcttaaggtacagtcaataaatttattatgtatgatggtgtgtaattgaatgatagtaaaaaaaaaattatattgtcattgcatatattatttattcaaactttttttgccccgttataataacatgtt

SEQ ID NO: 11173 - DNA, 428 bp, Glycine max
aggggtgttcagggatttagatgggccatagacaacgataaatggcaggctcgagttaatagtacaaagcctctttttgaggtggctcgtgatgatttgggtaaaggtgctattgacaaagaagtggtggagaaggtgtgggaccgaattgctcctggtttagcttcccaatttgactcaccctattcagttccaactatcgcaccgcgtcctttgcttattcttggtggtgcggaagatcctcggtgtcccgttgcaggcttggaaattccaagggcactggcaagccaggcatatggacagtttcactgtttagataatttcaagcttgtgtctgaacctggagttggacaccaattaacgagacttcaagtgaaagaatcatcttattggtttgacaggttcttgaacccttagcccgtgccctt

SEQ ID NO: 11174 - DNA, 645 bp, Glycine max
gatgttacggttgggccatcttgtccatctatcccacaactaatttttgattttccttgtttatttatcttcttcctcccttgtttgtttgtttctttgtttctttggcttgacaagaagaagatgatgatgatggacaagggggtgttggatgatgtgataagaaggcttctggaagggaaaggagggaaacaggtgcagctctctgagtccgagatccgtcaactctgcgtcaacgccagacaaatcttcctctctcagccaattcttctcgaccttcgtgctcccatccgcgtctgcggtgatatacatggtcagtaccaggacttgctgaggctttttgaatatggtggctaccctcctgcggcaaactacttgtttctgggggattatgtggatagagggaagcaaagtttggagactatatgtttgcttttggcctacaaaataagatatccagacaaaatttatctcttgaggggaaaccatgaagaagcaaagataaaccgtatatatggtttttatgatgaatgtaaaaggaggttcaatgttaggctatggaagatatttacagactgctttaactgtttgccagtggctgcactcattgatgagaaaatactttgtatgcatgggggactctct

SEQ ID NO: 11175 - DNA, 390 bp, Glycine max
cgcaactaatttatttatttatttttcctttatttatcttctttctctggctcgggcctcccaaaagggtgtttttttttttttataagaagaagaggagagggaagatgatgatgatgacaatggaggggatgatggacaagggggtgttggatgatgtgataagaaggcttctggaagggaaaggagggaaacaggtgcaactctctgagtcggagatccgtcaactctgcgtcaacgccagacaaatcttcctctctcagccaattcttctcgacctccgtgctcccatccgcatctgcggtgatatacatggtcagtaccaggacttgctgatgctttttgaatatggtggctaccctcctgcggcaaactacttgtttctggggg

SEQ ID NO: 11176 - DNA, 433 bp, Glycine max
cacttgtccatctatcccacaactaatttttgattttccttgtttatcttatcttcttcctcccttgtttgtctgtctctttgtttctttggcttgacaagaagaagatgatgatgatgacaatggaggggatgatggacaagggggtgttggatgatgtgataagaaggcttctggaagggaaaggagggaaacaggtgcagctctctgagtccgagatccgtcaactctgcgtcaacgccagacaaatcttcctctctcagccaattcttctcgaccttcgtgctcccatccgcgtctgcggttttacggtccatttaaaaaaccgtggatgtacttcgtgttctagtgtagataagggattttggctgaggggagtgcattttaggatataaaatccaataatgtcccatcttcaatcccttgttcctaa

SEQ ID NO: 11177 - DNA, 946 bp, Glycine max
ggggttgggagaggagagagagtgggagtcagagagcaaagtaaagcagccgattggtccccaccaaaacagaagaaacacgttcgtttcgtttcgttcccatggcggtctccgtttccgcgtcctccgcgattgcttctttgaactccgaactctccacgcgcttgccaccctcactcgcctccgcatcttcttccgccaagcaatcctttctgcaattcccgtcgtgcacgcgccttcttcggattagcactccacgcgctcccgctccatcgcgacctcgattccttcctctggttcaagcgaagaaacaaacctataactcgtttgacgatttgcttgccaattctgagaaacctgtgttggttgacttctatgcaacctggtgtggtccttgtcaatttatggttcccatactcaatgaagtaagcactcggcttaaggataagatacaggtggtgaagattgatactgagaagtatcctagcattgctgacaaatacagaattgaggcgttgccgactttcatcatgtttaaggatggagatccttatgatcgctttgagggagcattgactgcagatcagctcattgaacgcattgaagccggcctcaaggttaagcaataaccctactataatgaagacacaaagaagcttgtctattggaatgttcgatcacatacatgatatgattgactggaatcacttgttgtttcaacatcattcagacattttttgaagtgattaatgtatctcaaaatgcatagattcagccctaaaatatttgttgtttacttattagcagtggcattttttttttaaagaaatcacgactaaacctagttgtgtttgtgagttccttgaacgagctaattcttgtctcttcttttgactcgttccactttatctattttcattttctgaggtttagaagcaaaaaaaaa

SEQ ID NO: 11178 - DNA, 466 bp, Glycine max
gggggttgggagaggagagagagtgggagtcagagagcaaagtaaagcagccgattggactttgagtccgtttgttccttggttttgttttcttcagatatttttctttttttcgttttttctgtcgtttcaccccaaacagatattttggtatccaaacagacctcatctctacattttttctttaccagcagaacagaagaaacacgttcgtttcgtttcgttcccatggcggtctccgtttccgcgtcctccgcgattgcttctttgaactccgaactctccacgcgcttgccaccctcactcgcctccgcatcttcttccgccaagcaatcctttctgcaattcccgtcgtgcacgcgccttcttcggattagcactccacgcgctcccgctccatcgcgacctcgattccttcctctggttcaagcgaagaaacaaacctataactcgtttgacgatttgc

SEQ ID NO: 11179 - DNA, 568 bp, Glycine max
tttcttggtttttgggttgcaattccactgtgactatacgtacagcgggttccttctttatgctattacgtgtatataccattcgtttacagattcttctgtgaactcgttgaaagtgggaatggaggtttatacaaataagatactcagttttgaatggttttatactaccatcttgcgtggttgtattgtagtagtcattctgtaggggagtaattgatattcttcttttctagatgagtgttttatttataattttcttcttttccttttatcgccgctgactgtcctattaaatttcatactaagtgaccaatcagttaattttgcatagcaaaacatttttaaattcaattaccacatctctactacctttcatttaaattcaaatgaagtcactcggttctcaatagttatgccgctgatacttaagtgagagttgagttagtcaagtaaaactattgtgtaatgtgggattagatacaggggcaacaaaataattcaaaatactaaaatgaccaagaataattttggcattttatgttaggtatgagtatgattgaacacg

SEQ ID NO: 11180 - DNA, 744 bp, Glycine max
atcctcattggcacagcctactcagtcaaatcctgaatctgctgaaggagaagtaaaagctaatgttccttctggaaacaggggaggtgaattctctgcttctgcaggtggacacggtggcaatccttcaattgagaatggttctcaaagaaattttattcatcatggagcttcctatgtagtgaaggatgatggtgcagtcagtagtataagcaaagggaaaccttccaagaaaagtgttgggcatagtgctcacgagaagcaagtctgggtccataaatcttcttcagggtcataaaatatctgcgtcagggcatcattcctgctatggtctccgtataggacgtaatcctcaactaattcaggtcaacctgagtctgagcgacttgaaagagcctctgcacaataaagggaatgcaaagttacagacctcgttgacatgattattactgaaaacagattggcattgttacccatgctgatggatttagacccattacggttcgtgtctccttaaattgaatatttcagtgttgggaaatattgtgtttgggatgtaactgtaaagttcttggtacataacatgggatagtatgttggaaagagtgaagaatcttgtcttgttcagtggacaagtagttaaataatgttttgtattgaaggcttatactttagcgtgcacatgtccgtgttattgtaaggatattagaacgtctttggtcctcaagaatcatccttattccc

SEQ ID NO: 11181 - DNA, 1584 bp, Glycine max
gttgatgaatctgaagatgatgatgattctagtgatgatggtgattctaatgatgatggtcctgtggagtgggcttcatattggaaaccaaatataacaataaacttggttgctgacttcactcagtacccaaagacaggtgtagcaccaaacattgctccttacttgaatgtcgatcctcttactgggaactactatccaattgtttatttcaatgagttctggttactcagggataagctgatacctttaaacgagacagtgactgaattatcacttaacctggaagttggtcccattagtatgacaaagtggcagttattcctgcagattgaccagtccttccagattcaccgtagttatggaagcatgcttgaaggcgaggctgatgaactcaagagggtattcttggaagggaatccttacctacctggcaattaccatggttgtttctcttcttcattcagtctttgacttcttggctttcaagaatgacatccaattttggaacaaaaataaatctatggaaggactctctgcaaagaccgttgttgtgagctttgcttgtcagcttatcatcttcctttatctacttgacaatgacacctcttggatgattcttgcaagctctggaattggttgtgttattgagttttggaaaattggtaaagccatgcgcatagagattgataggacaggaaggatacctatgttgaagctccgcgatcgagagtcatacgtacggaataagacaaaggaatatgatgatattgctatgaagtatttgttctatgttttatttctccttgttgctggcttttctgtttactcgctgatgtatgagcgtcacaagagctggtattcttggattctgtcttcgctcacaagttgtgtatacatgtttggctttattatgatgtgccctcaattgttcatcaactacaagctcaaatctgttgctcatctaccttggaggcaaatgacttacaagtttctcaacaccataattgatgacctttttgcctttgtcattaaaatgccaacactccatcggctttctgtcttccgtgatgatcttatctttgtcatatacttataccagaggtggatttataaagtggacaagaaacgtgttaatgaatttggttttggaggcgaggatgatcaggttgtggcagagacagacgccacaaaggaagaagagaacactacaacggaagaagagaagaaaactaattgatttggttttctctaaacaatttgagaaaatcttacagtagataccaaatactgtagaattctacggggattggtttgtttttctcccccttttgttacacatttgcatttagatttttgttgaaagaaagctttagtttggccttgtctactggaatttttactaggatcgaaggattgagggaatttatcgactgaaaccttcatggttgactgtaatggtcataacagctttttagttaccccctctgtagtttttctttgatctcaaatgtcttttagtttgtgatagataacccttttatatgtattattttcttccactcatgtatttttaactaattt

SEQ ID NO: 11182 - DNA, 390 bp, Glycine max
ctacctcaaatgcaaacatgcaatggccatcttttgatatgcctcaaagcacctcctctactgcacaagtggaaattccagccactgcaccctcaagtgctaaatctttacacgaaacatttgatccattttcaagctcaaatgcaaacaggcaatggccatcttttgaaatttctagtgtcagtgtaccttcttcagttacatctaatttatggcatgatggtgtgtggaatggagaagaacaagtttctgctatggcagcaaacactcaaccatggaatgcatttgaagattctggtggccatcatcctgtggattcccttagtcaaggattacaattgcacaattttccatcagctgataatcatattttgggtttaagagagtctg

SEQ ID NO: 11183 - DNA, 1198 bp, Glycine max
cacccaatttatataagaccactcgcaaattcccatgtttcatacaatagccctaatccaacacatatagtacaactcaaatttccattttcatacaagttacattttgttacctatactactacactctagttgttccaccactagcgtttgtggcaacaactttgatttgaggttctggtttttttgtataatcaacaagtatttgaggcttctatttgatactcatcgagtcttcattccaccgaggtcagttcatttttgaacaaagtgactatcttctcattcttacgccgacaatctatactccacactttagttgttccaccatattttttgttacttatactacaccttttaagtgtttgtagcaagaacttttgtgtgaggtttgttgcaatcaagagatatctaagccttctatttgatactcaattaatcttttgatcgacttattttgagataaagtgatatctttagttgtgatttcattcctagaccgagaatcgagtctcaaactttgattaggaattcaagtgtcaaatcacttgtactaaccattttttggttaatttgaggttcgatgcactataacatggggaagcaagttggctttgaggatgttctaagatactttgacgaagatggtgatggaaaggtttcgccttcagagctgaagcacgggctcggaatgatgggtggtgagcttccaatgaaggaagctgagatggcaattgcggcattggattctgatggcgatgggttgccgagtttggcggatttcattgctctcatggaagctgggggagaggagcagaagttgaatgacttgaaggtggcttttgagatgtatgacactgaagggtgtgggtttataacccccaagagcttgaaaaggatgcttaagaagatgggtgagtccaagtccattgatgagtgcaaagccatgatcaaacagtttgatttgaatggggatggtgtcctaagctttgaagaattcagaattatgatgcagtaaggcatgcgtatctaaatgttgattatgtatagtgtgtatttgaaatttgattgatttgtttgcacatcatatgtataatcacactataactcctatgatagtactattttagcagcttctcgatagtgatcaaaataactatcggattttgccccaactgtgctatttcaataattattc

SEQ ID NO: 11184 - DNA, 442 bp, Glycine max
ccagatacaaagttacaactcaaatttctattttcatacaaagttacaatttgttacttacactactacactttagttgttccaacacaagtgtttgtggcaacaactttgatttgaggttctactttttttttgtgtaatcaagaatatttaaggtttttatttgatattcgtcgagtcagtccattttttgttttttgagtaaagtgatatcctctgcttcttcattcttaactccaaactttagacgctccaccgtgtttttttgttacctatactacaccctttaagtgtttgtagcaaggacttttgtgtgaggtttgtcataatcaagagatatctaatccttctatttgatactcaattactcttctggtcagcctattttgaggtaaagtgatatctttaatcgcaattccgttcctaagcttaagaatcgaat

SEQ ID NO: 11185 - DNA, 1128 bp, Glycine max
cagtgaagacagtgagggtgattactactgagattcttgtagtgaaggaagtagtgattatgaatatggaaaaaggactgaatttatgacacaaagaagtagtcagcatctaacaggtggtgtctcactgaaaaatggacacactatctatgcatgataaatgcagtacagtgcaagaaggattttcaagtgatgatagtgaaactgggaatcctcaagatctactattcgagtattttgaacaagatcctccttatagtcgtgaaccattggctgacaagatacaagatcttgcacgccactatcctaccattaagtcattgagaagctgtgatttattaccagtcagttgggtgtctgtggcatggtatcctatatatcgaatacccacaggcccaactttaaaagatttagatgggtgctttctaacgtaccatacactccatacacccttgacaggaagtggtcgtactcatgctccaacactggtttatcccagtcagatggatgttgtaccaaagatttctatgcctacttttgcaatggcttcctataagttaaaggggtctatttggatgaaaaaaggagttagtgaatctcaacaagtgagttccctcttgcaggctgccgataactggttaaggctagttcaggttcatcacccggattttcagttctttaaatcacatggcacataccatagatgaactgcataagacgacatgtctttcctgcttttggctaaaactgagccttaatttctgtgttcgttgcttggtgcaaacttgataaaagtccatccatctgtagagattgtgatggcgcgagggctgcctaattgtggattcttgtgatatgcctaagcagcacaaaaagatgaagccaatatgaagcaatgaattcatagagattgctaaagtgaaaaagaaaaagacagacaaaatgttttatatggaggaaaaactatcagataattggagggtccaaatgtaatgggataaaaactaaatataaaaccacagttaagtatgacaatcaaattcacaggaaggatattggggattaagccagactgtgcgagcattttcggttcaataatggttgagatccctttaatttctagagata

SEQ ID NO: 11186 - DNA, 684 bp, Glycine max
cagctacatggaattgatactggcgagggtacaattggggagaatcctccagaaggaaaagcgcagaatggtaaattcacataatgcaaatacaaagttgctgcatgactgtgcaatccttcagaagaggcttcgggagtgtactgtaaatttccttgttgaagaggaagataaactaaatatcgacactttgccagctgatgctctggatttattagcaacatcagataatcggattggtctcttgcttgcagacgcacagctcttggcacatgatgtacaagatactggcgttgctgttgaagagacccgggatataaccacagacaatactgggaaaactcatgatgaattgagaaagatgctggcacatatgtttgttgacaatgccagattaaggaaacaaatcagttctggtattcgtcgtgctctaaatgcaaatatcaattacgaagaggacggtgaagaaatccatttgcaaaaaactgtcctaagcaagttcttagaaagatagcttgttcaatactacaccgtgtatctattattgagttacttctctgttaattatggtctataaatttttgcacttgtatggtttcactgccattcgttccgagccgatcttaaaaaaacaaaaatgcgtttattgttccgccaaaattgatatgaatagttcgagtcatt

SEQ ID NO: 11187 - DNA, 1384 bp, Glycine max
ccctctcgtccgcccactcttccgcccacgcgtccgctaccaatcactacataaactcttcatacttcacaacacaacacaacacaacacacccaaatcttctttcaaggtttttttttttttttttgaaaaatttctcatcgtatctgaaacaacgaatgatccatggccccttcattcgacacaagtactcatacggtatgcgtgatggatgcttcgggccacttgggcttcagcctggtccaaagactcctccaaaggggctacaccgttcatgcctccgttcaaaaatatggggaagaaaacctattcactggaatttcatccgatcccgataagcttaaggtttttcgatctgacccatttgattaccatagcataatcgatgctctccgaggttgctctggtttgttctactcattcgaacctccctttgatcaaccaaattatgatgaatacatggcagacgtggaagtaagagcagcgcacaacgtgttggaagcatgtgctcagacagaaactatggataaagtggttttcacatcctcagctaccgcagttgtttggagagaagatcgcaagaccatggaactagatctagacgagagacattggagtgatgttaatttctgtcgcaaattcaagttatggcatggggtgtcaaagacaatggcagagaagagcgcgtgggccttggcaatggacagaggagtgaacatggtgtccatcaacgcaggcttaatgatggcgcatgatctctccatcaaacacccttacctaagaggagccgctgagatgtacgaggatggggttttcgtgaccgttgatttggctttcttggtcgacgcccacatctgcgtctacgaggatgtctcatcctacggtcgttatttgtgtttcaatcacattatcaacacccacgacgacgccgttcagctcgcccgcaagttgacgcctggtgcctcttcctccttgcagcaaagtgatgactacgggaagagttttatcgaacagagaattaacaacaagaagttgaacaaattgatggtggacttcgaggcttgatttcgatggtgatctttttgaacggtgattagagcaatcaatcaccttcaccgtttttctgcgggaaagtatttgtgtacaaaatgttagcaaaatttgtacctataccccccatatcattattattattattatacattacaaattaatgtattttcaatcaaataagcatttctttatttatttcaacattagatagtgcaaaataattgtctgtttttacccttgcttttcccctgtatcctactaattttagatccaactatatttacaatgccacatcttcttataactaaataaacatcaaattaatttttct

SEQ ID NO: 11188 - DNA, 510 bp, Glycine max
cttcccacttatctaccccccacactcttcaatgctagctgctctacttccatttataaatccaactcgatcctttctccctctcttgtcttcctttctaccctttctttccctaactttacaaaatcacaacacacacaaatcttctttttaacatttatcatcgtatctgaaactaccaactatcgatggccccttcattcgacacaagtactcacacggtatgcgtgatggatgcttcgggtcacttgggcttcagccttgtccaaagactcctccaaaggggatacactgttcatgcctccgttcaaaaatatggcgaagaaaacctattcactggaatttcatccgatcccgataagcttaaggtttttcgatctgacccatttgattaccatagcataatcgatgctctccgaggttgctctggtttgttctacacattcgaacctccctttgatcaaccaaattatgatgaatacatggcagacgtggaagtaagagcagcgc

SEQ ID NO: 11189 - DNA, 444 bp, Glycine max
gttcttttagtggccaagcttcagcaccggaatttagttaggctacttggtttctgtctggaaggcacagaaagactacttgtctatgaatttgttcctaataagagccttgattacttcatatttgatccagtgaagaaagcacgattggattggcaaaggcgttacaaaatcattggaggtattgctcgaggcattctctacctccatgaagattctcgactgcgtattatacatcgtgacctcaaagcaagcaacattctcttggatgaagagatgcatcctaagatatctgattttgggatggcaagattggttcacttggatcagactcaggcatatacaagtagagttgttgggacctacggatatatggcacctgagtatgcactacatggtcaattttcagcagaatcagatgtgtttagtttcggtgtattggtt

SEQ ID NO: 11190 - DNA, 401 bp, Glycine max
gtccaaggatatacccgacatcgaaggagatacaaaatttggcatacgttcttttgcaacacgtttaggtaaaaaaaaggtattttggatttgtgtttccctattcgaagtggcttttggagttgtcctcctcgcaggagcatcatcttcttctcccctctggattaaaattattacgggtctaggaagtattattcctgctacaattctctggtacctgaccaaatatgtagatttgtcaagtccagattcgaccagatccttctatatgctgaactggaagttgttgaacgtagcattcttgttcctgcctttaattagataacgatgacactgaagaccaagacaatgttcgtaaagcgtacaacaaaatagtatagatcgtttgcacctaaatttat

SEQ ID NO: 11191 - DNA, 1379 bp, Glycine max
gatttgtttaagagcctcacaaattctgaatagatggatttttagctaggaacaagggaatactattcgtggctattgaccataataggcctctttcagatcaaggtccttttgatattgtcttgcataagttatcagggaaagagtggcgccaggttcttgaggattataggctgtcacatccggaagttactgttctggatcctccagatgccatacaacatttacgcaaccggcagtatatgcttcaggctgttgcggatatgaacctttctgattcctatggcactgttggtgttcctcggcaattagttatcaagagagacgcattagccatcccagagttggtcaacaaagctggcttgactttaccccttgttgcaaagccactagttgccgatggaagtgcaaagtcccatgaattatcccttgcttatgagcatttttcccttcaaaatcttgaacctcctcttgttcttcaggagtttgttaaccatggaggtgttcttttcaaggtttatatagttggtgatgctataaaggtcgttaggcggttttcattacctgatgtaagcaagtgggaactctcgaaagatgctgggatatatcgttttccaagggtttcttgtgctgcagcttctgcagatgatgctgattgggatcctactgttgctgagcttcctccaagacctttcctagagaaactggctaaggaacttcgatggcgattgggtcttcgtctattcaacctggatattatccgtgagtatggaacaagaaatcacttttacgtcattgacataaactacttccctggatatggcaaaatgccagaatatgaacatatatttacagacttcctgttgagcttggggcaggggaagtacaagaaaaaataggctaaaataactgtttccagcccttttatttatgtcccccacatgacgtaagcccccttttatgctgtgtgatggaagtgccatggaaaactatcaagacttgtgtttcgggaacttcgacctgtacagaacaactgctagtattttgttgtgcgggaactttctgctgtccttccaaagtaacaaaatgttgtttcaaatcctgaagttctatagctgggtagcttgatgaccgaaggggtcaagtctgcaatttgaaggatttgtcttcgcaccgcagtggatgttaatatgaccgtgttggataagttgacggatttcaaatgtactgacccgttctttgctttagattcctagtgtcaagaatttatgccttatatacagcaaagaacgggtcagtacatttgctgtatataaggcataaattcttgacactaggaatctaaagcaaattttcgtcagaaatataaaaaatggggc

SEQ ID NO: 11192 - DNA, 778 bp, Glycine max
gggccgagccacacgtccggccacgcgtccgctgtgctccatctttttcttattatgctcatttggatcctactgagtctgggcttacttcaagacctttactatagaaactgtctaaggaacttcgatggcgattgggtcttcttctattcaacctggatattatccgtgagtatggaacaagaaatcacttttacgtcattgacataaactacttccctggatatggcaaaatgccagaatatgaacatatatttacagacttcctgttgagcttggggcaggggaagtacaagaaaaaataggctaaaataactgtttccagcccttttatttatgtcccccacatgacgtaagcccccttgcctctcagtttgaagctcaaaactatggctgtaggaaagtatcttagaaagcattagtgataataactttttcagttatgctgtgtgatggaagtgccatggaaaactatcaagacttgtgtttcaggaacttcgacctgtacagaacaactgctagtattttattgtgcgggaactttcggctgtccttccaaggtaacaaatgctgttgcaaatcctctgaagttctataagctggtagcttgatgaacgaaggggtcaagtctgcaatttgaaggatttgtcttcgcaccgcagtggatgttaatatgaccgtgttggataagttgacggatttcaaatgtactgacccgttctttgctgtatataaggcataaattcttgacactaggaatctaaagcaaattttcgtc

SEQ ID NO: 11193 - DNA, 951 bp, Glycine max
cgtcgagccgactcggcgttccgttaccttcgattttcctttctctcttgcaaatttcatatctctctttctttctcagccaagcatttctccctttttcgtttccaatttccccttctcttaactcacctatttcgcctccttcgtgtccctttctcttcaaattaaggctcggtagggttaggttaggataggttttcggtgaggcgagagaaagagagagagtatgaggttgagggaggaggtagcgtgtaaaaacgacgacgtttgtgagaaagaggaagtggtgatagagaatgacgtaaccgtggcccaaaatcattggtgtcccgtggtgaatgcggggttttcttcgcccaagagagtggttgtggttggttacgctcttactactaaaaagattaagagctttttgcagcctaagcttgaaggtttagctaggaacaagggaatactattcgtggctattgaccataataggcctctttcagatcaaggtccttttgatattgtcttgcataagctatcaggcaaagagtggcgccaggatcttgaggattataggctatcacatccagaagttactggtctggatcctccagatgccatacaacatttacgcaaccggcagtacatgcttcaggctgttgcggatatgaacctttctgattcctatggcatcgttggtgttcctcggcaattagttattaagagagacgcattagccatcccagagttggtcaacaaagctggcttgactttaccccttggtatgtatatgttggtttttcaactacttttagatgctgcagttatgcgatttctcagagcatggacgcatggacatttattgttacgagggtcgtgtttttgaggcaaagtcattagaacttatgacaaataggcatggtaatcccatcttattatgtgtctgatcaggatacttaattt

SEQ ID NO: 11194 - DNA, 532 bp, Glycine max
ctcgagccgctcgagccgtgcaattccaaatctctcttctttctcagccaagcatttccccctttttcgtttcgaatctccccttagacaacaccgatttcgccttcttctttctctttaaactttaggctcgctagggttagggttagggttagggttaggttttcggtgaggcgagagagtatgaggttgagggaggacttgccgtgtaaaaacgatgacgtttgtgagaaagaggaagtgatgatagagaatgatgtaaccgtggcccaaaatcattggtgtcccgtcgtgaatgcgggcttttcttcgcccaagagagtcgttgtggttggttacgctcttaccactaaaaagattaagagctttttgcagcctaagcttgaaggtttagctaggtaaattattaaccgaaacattcctttcattaatcgcaaaccaaaaaccgctaattaaattcatcatatcttgttccgatttttaatttctttttcaaagaaaataaataaataattcactgaaaatcgtttta

SEQ ID NO: 11195 - DNA, 490 bp, Glycine max
tctattatttattaagagagacgcattagccatcccagagttggtcaacaaagctggcttgactttaccccttgttgcaaagccactagttgccgatggaagtgcaaagtcccatgaattatcccttgcttatgagcatttttcccttcaaaatcttgaacctcctcttgttcttcaggagtttgttaaccatggaggtgttcttttcaaggtttatatagttggtgatgctataaaggtcgttaggcggttttcgttacctgatgttagcaactgggaactctccaaagatgctgggatatatcgctttccaagggtttcttgtgctgcagcttctgcggatgatgctgatctggatcctactgttgccgagcttcctccaagacctttactagagaaactggctaaggagcttcgatggcgattggtaactagctcattctttggttcaaggtgtcatgttattgatacaaggactataattatgctt

SEQ ID NO: 11196 - DNA, 554 bp, Glycine max
tttactttgtaactgtgaccgtgttccggtactcggtttgttactgagttcaatttttacgaattttcgtgcaggaacaagggaatactattcgtggctgttgaccacaataggcctctttcagatcaaggtccttttgatattgtcttgcataagttatcagggaaagagtggcgccaggttcttgaggattataggctgtcacatccggaagttactgtgcgggatcctccagatgccatactacatttacgcaaccggcagtacatgcttctgctgctcttgtcttaaccttatctgattcctagactatctgtatatgctgtagtgaattcgttattatgagtgacgcataatccatgccagagttggtcaacaaagctggcttgactctaccccttgctatgtatatgttggtccttcaactacttttacatgctgcacttatgcgatttctcagagcatggacgcatggacatttattgatacgagggttgtatggttgaggctgagtcattagaacttatgaaatacactcatggtaatcccatctt

SEQ ID NO: 11197 - DNA, 482 bp, Glycine max
atttctggcgtaggaggtgttctcttcaaggtttatatagttggtgatgctataaaggtcgttaggcggttttcgttacctgatgttagcaactgggaactctccaaagatgctgggatagatcgctttccaagggtttcttgtgctgcagcttctgcggatgatgctgatctggatcctactgttgccggtaagttatcatgtattcttgaccaagagctttctatagacctttaccttttcagacttaagacaggttttctcattctcccccctcgggaaggggaaaatagcctccttagaaacctggtcctggccctgccattcacaaacatatgaaagacgagttcctgagcttcctccaagacctttactagagaaactggctaaggaacttcgatggcgattgggtcttcgtctattcaacctggatattatccgtgagtatggaacaagaaatcacttttacgtcattgacataa

SEQ ID NO: 11198 - DNA, 348 bp, Glycine max
gagaagaagaaagaaacaaggtgctactgaaggtgagtcctccagtgttggaggtcacggtgaaatatctgcagaagaagctgctgagcaagcagctgtcatgagatcacaaattcacctcttctggggtaatatgcctttcgaaagatcccaagttgaatgcacattacgaatgactggatggaacgaaaacctggatgctgcaactgaacgctttaagcttgcaggagcttctgaggcagatgtttcgatggttctaaagaatcattgctcaaatggagatgcaaaagatggagatgataaaaaggttgagaacccacagcacaataagactgttaaaccagagat

SEQ ID NO: 11199 - DNA, 428 bp, Glycine max
acgcgtccgcccacgcgtccgcgataagacgacagaatggtgagggaaagatgatgagatcaatggacttgttcggagagatggacgagcaggtatcgtcgatggcaatggacgtggacgacgtcgaccctctcgagatcttcgccgagggcgtcatcgccgccgacaacaaactcgccgacgccgatttcttcaacaatttccaagacgatttcgatgactctgatatcaactaaaacccctttcttcttcatgggtattctcggggttaaaataatttctcggttagggtttcggtattttggagtttcctcttcattatggagaaggaaatagaaaaaggaaaaacaggttgtactttgtttctgggattttcttgttgatatgataatggctctttcgtgattaacaaaacctcaacaaccctg

SEQ ID NO: 11200 - DNA, 1669 bp, Glycine max
aattcggctcgagaagtagtatttgcctacaaagttagagagtgtcaaacttgaaggcgtcacactccttggccaccattcttttttatgtggtgcttctgattccccttcacgcccattggctcttccaaaacacacttatccctttccatccaccaaaccaatactcccaaatctcacaaacaccacctccattggccctatcacgctacgccgtcgtttagcacctccttctccacccttcgtctctcaatccacacaccctcttatcgtttttgtccttctctccctctcgtttttcgccaaatttgtcttctttttgcaccttctccctgatttttcctcgcctcaaataatattctgcggctccttccccccccccccctttaacttttctgaggagctgaacagattttgggggttcctttcttcttctttcattattattattcataccctcctagttatgtttttttcacagtctttctacgatttgtttgagaaccctgcaatattgggtttgtgctcagttattggaatgttttttagtcctctgtgggtaacatttttcttcggtgtcatcgttggatggttgtggaaaccgaaatgggcgaggttgggggaaagaaaaattgacgacttccctcgccaaatccttagattttgcctcaccctcctcggcttcttcaccattaaagtctgctccagtgtctcctatgaagagttgttcttcctctccttgccttaattccattaaaatgctacctccaaacctagaatctttgctcctcaaaaaaggggtggataaaaaggcttcctcatcatcctctcccgtgaaatttgcaagttccgtcagttcacccaaatcctgcgaggaaacttctgatgctgtgacaatagcggatttacatcatctatggcagcttgtggaggagaaagatggaggtctcccttggattcagatgatggatcgttctacccctaccatgagttacaaagcatggcgtagagaaccaaaggatggtcctccccaatatagaagcagcactatttttgaagatgctacccctgagatggtgagggacttgttttgggatgacgagttccgaccgagatgggatgacatgcttgcaagctcttcaatcattgaagagtgtcccactactggtactatgaaagtgcagtggatacggaagtttccctttttctgtaaagatagagaatacataattggtcggagaatatgggaatctggaaggcattactattgtgtgaccaagggagtaaattgtccttcaatgcctagaaaagataaacctagacgcgttgatgtgtactactctagttggtgcattagagcagtggaatcaaatagaggtaatggccagttaactgcctgtgaagtcttgctcttccatcatgaagaaatgggcattccatgggagattgcaaagcttggagtaaggaaaggaatgtggggaactgttcagaagattgaacccggtttgcgagcttatcaagaagcaagagcttctggtgctgcactctctcattcagcctttatggcccaagtcaacacaaaaataggccctgagtacttgcaatcgatcgggggcgatgacaattcagcagagaatgaaagtgtggttgcttcagagaaaccacaggg

SEQ ID NO: 11201 - DNA, 963 bp, Glycine max
  unsure (1)..(963): unsure at all n locations
acgngcatgcacgcggcgtaagctcggaactcgagccggtggaaaccgaaatgggctaggttggggaaagaaaaattgacgactgccctggccaagtccttagatggtggctcaccctcctcggcttcttcaccattaaagtctgctctagtttctcctatgaagagttgttcttcgtctccttgccttaattccattaaaatgctacctccaaacctagaatctttgctcctcaaaaaaggggtggataaaaaggcttcctcatcatcctctcccgtgaaatttgcaagttccgtcagttcacccaaatcctgcgaggaaacttctgatgctgtgacaatagcggatttacatcatctatggcagcttgtggaggagaaagatggaggtctcccttggattcagatgatggatcgttctacccctaccatgagttacaaagcatggcgtagagaaccaaaggatggtcctccccaatatagaagcagcactatttttgaagatgctacccctgagatggtgagggacttgttttgggatgacgagttccgaccgagatgggatgacatgcttgcaagctcttcaatcattgaagagtgtcccactactggtactatgaaagtgcagtggatacggaaggtgaataacatttttaacttgatttaagtgtatttaattaattggtgtcttggttcagtgtgctaatggatgctaattatctgtgcaacagtttccctttttctgtaaagatagagaatacataattggtcggagaatatgggaatctggaaggcattactattgtgtgaccaaggtatgagaatcaagttcactttttttcttctggaatatttgaagatgttgattgataatggttatttttccactgtgttattacagtgttgttcttaccttctttttgtttttattttttctttcagggagtaaattgtccttcaatgc

SEQ ID NO: 11202 - DNA, 757 bp, Glycine max
  unsure (1)..(757): unsure at all n locations
acgctgntcgcaacgacacagtgccatttcacacgcatcactccttccttggccaccattctttttttatgtggtgctactcattccccttcacgcacattgcctcttccaaaacacacttatccctttccatacaccaaacaccgccattggcccacatcacgcgacgccgtcgtttagcaccaaaccaacgctcctccttccccacccttcgtgtctcaatccacaccccccttatcgtttttgtccttctctccctgtgatttttcgccaaatttggcttctttttctgcccctctccctgatttttgttcggctcaaataatattctgcagctccttctcccccccttaacttttccggggagctgaacagattctgggggttcctttcttcttcttcttcttcttcttcttcttcttattattattattattattattattattcatttttcattctctcctagtttttttcttcttcttggtgttatggttttgtcacagtctttctacgatatgttggagaaccctgcaatattgggtctgtgcacagttattggaatgttttttagtcctctgtgggtaacatttttctttggtgtcatcgttggatggttgtggaaaccgaaatgggcgacgttgggggaaaataaattggcgacttccctcggcaaatccttagattttgcctcacccttctcggcttcttcgtcttctaagtttccagtgtctcctatgaagagttggtctttctc

SEQ ID NO: 11203 - DNA, 637 bp, Glycine max
gagaaaatatggacaaaagatatcaaagggcaatccttgtccgtcgggcctattatcgctgcaacatgggaactgcatgtccagttcgcaagcaggttcaaaggtgtgctgaagatgagagtgttgtcatcacaacctatgaggggaatcataatcattcactcccaccagcagccaggtccatggcgtgcacaacatcagcagcactgaaaatgttcctttctggctcaaccactagttcacatggaagcacttattcttattcaaattcagaccgcttctctccactatgcacttctaccgacgatccatctgcagcgccatcatgtccaactataactttggacttaacccaaaccgctaagaacaacatgaaattcccaagtgctatttcttcataccatttgcaaccttttccactttcattgcatggtcaacctcaacaatctgagggaatattaccttcagagaaaaaccttgccttggtggatgttgtcagtgctgccataaccaacgatccttctcttaaggcagcattagaagcagctgtttcctcaatcattggagactctcagaaatcactgccaactttgtaggagtgataatgacccctcttctaagatgtctgcagtatcac

SEQ ID NO: 11204 - DNA, 553 bp, Glycine max
tctcgagccgctcgagcggctcgacggctcgagagcagaaattcatacaggcttttaaattgatgttatttgcaaatatgtgtctcctaacagcaactgacttgaagcgtatttttgagaaagtggacgtgaatggcgacggattggtgagccttgaggaactgaatcgattgcttcagatgacgggcaattcccaatatagcatagaagagttggaatcacttgtggaaaagaaaagtcttggtttcagtgatttcttgttcttttacaactcaatatcggagcagaacaagggagagagcaaaggaagtgagttggagagcgacctggccaagacgtttgaggtgtttgacttggacggagatggtttcatcacaagccaagaccttgagtctgtcttgaagaggcttggcttctgggatcaaacacatgccaaggattgcagaaccatgattcgtttctatgacaccaatttcgatggtcgccttgattttcaggaattcaagaccatgatgttgctcaccaaagcttgaatatattcatcattcaattc

SEQ ID NO: 11205 - DNA, 1042 bp, Glycine max
ggacgtttgattgattgtttggagcgccgctatgctgtgctcaaccagtgcagctatgttgttcttgatgaggccgatcgtatgattgacatggggtttgagccccaggtgatgggtgtcctcgatgccatgccttccagcaatctcaaaccggagaatgaggatgaggagcttgacgagaagaagatttaccgcaccacctatatgttcagcgccaccatgccacctgctgtggagaggcttgctaggaaatatttgaggaaccctgttgtggtcaccattggcactgctggaaaggcaactgatttgatcagccagcatgtgatcatgatgaaggaggccgagaagttttccaagcttcataggttgcttgatgagcttaacgacaagactgcgattgtgtttgttaacaccaagaagaatgcggatcatgttgccaagaatttggataaggatgggtatcgcgtgactactttgcacggagggaagtcgcaggagcagagggagatcagtcttgaagggtttaggaccaagagatataatgttcttgttgctactgatgttgctggacgtgggattgacatacctgatgtggctcatgtcatcaactatgatatgcctgggaatattgaaatgtacactcaccggattgggcgtactggtcgtgcaggaaagacgggtgtggctaccacattcttgactcttcacgactctgatgtcttctatgacctcaagcagatgcttattcaaagtaacagtcctgttccacctgaactggcaaggcacgaagcttcaaaattcaagccaggaactattccagacagaccacctagacgaaatgacactgtttttgcgcattagacagattttttttttgagctagccacttctttagaaggcatcaactattcaactttgcaggtcatatcaagttttctggtgtaatgaacattttgccagtgaggccctagcagcctaatctgctttttgtggttatatggtcctgtataaaatttaattacagcagctcttctattctggt

SEQ ID NO: 11206 - DNA, 1295 bp, Glycine max
atctgctaccccgcctggtactgcattgatgatgttagatgctgacaaaatggttgctgctgctagttctcgtaatcctactctagcaggtgccttgacaaggctccagaggtgtgcattcaatggcagctgggagattcgaattattgctgctcaagctcttacaacaatggcaattagatctggtgaacctttcaggttacagatttatgagtttctgcacactttggggcaaggtggtcttcagtcacagttctctgatatgcatcttagtaatggagatgatcaaggagcaagtggtacaggccttggagttttattaagtcctatgataaaggttctggatgagatgtatagagcacaagatgatttgatcaaggaaatacgcaatcatgacaatgctaagaaagaatggactgacgatgaactgaagaaactatatgaaacccatgaaaggctgctagaccttgtttcattgttttgttatgttccaagaacaaagtatctacctttgggcccaataagtgccaaactcattgacatctatcgtacacgccacaatattagtgcatctactggtttgagtgatccagctgttgccactggtatatctgaccttgtctatgaatcccaaccaccagctgctgagcctgatacacttgatgatgacctagtaaatgcttgggcagcaaaccttggtgatgatggcttatgggggaacaacgcaccagcaatgaatagggtaaatgaatttctggcaggtgctggaacagacgccccagaagttgatgaagagaatatgatctctaggccttcagttagctatgatgatatgtgggcaaaaacacttctagaatcgtctgagctagaggaagatgatgcaaagtcattgggatcatcatctccagattcaacaggatcagttgcaacttcgatatcatcccactttggaggaatgagctacccttcgctgtttagttcccggccacaaactacggataaggcaccagcaagccgaggctctacgtatgagggttatggttctccgataagagaagagcctccgtcatactcatcctctgtcatgcaaagacacgagtcatttgagaacccccttgcagggaatggatcgcacagttttgggtctcaagatgatgagcgcgcttcatctgcaaattcttaacatggaagtgcactttatgacttcacagcaggaggagacgatgaattgagtttaaccgcaggagaagaagtcgacattgagtacgaagtaaattgctggttttatgttaaaa

SEQ ID NO: 11207 - DNA, 692 bp, Glycine max
tctacgtcactgccggtgtgtacgaggaaaatgtgtccgttgataagaagaagacttatttgatgatggtcggggacggtataaacaagacaattatcacaggcaatcgtagtgtcgtcgatggctggacaaccttcagctccgcaacacttgctgtggttgggcaaggattcgtgggtgtgaatatgaccatccgcaacaccgccggggccgtgaagcaccaagcagttgcacttcgaagtggagcagatttgtccacgttctacagctgcagcttcgaggggtaccaagacacattatacgtacattccctgagacaattctacagcgaatgcgacatctatggcacggtcgatttcatcttcggaaacgccaaggttgtcttccaaaactgcaaaatgtacccacgtctccccatgagtggtcaattcaacgccatcaccgcacaaggaagaacagacccaaaccaagacacaggtatttcaatccattattgtaccataagagcagctgatgatttagctgctagcaacggtgttgcaacgtatttgggaaggccgtggaaggagtattctagaacggtttatatgcaaactgttatggacagtgtgatccacgctaaggggtggcgtgaatgggacggtgattttgcattaagcactttgtattacgcagagtacagcaacagtggg

SEQ ID NO: 11208 - DNA, 433 bp, Glycine max
gtttcgggcattagaggcagggaatattgggttggttcaatcttgagttggaatggcgtttgaagactttgatcctatcttcagtaaacccaaagtgaagtgggattctgaaagttgttcttcctcgtgtccctttttccttcatgcctatgcccctgattcttctcaccttgtaattcatgtcaccaatatctacgatgcctgggaaactcgtctttcgctctccatgcttgaggacattagggatattgttggtatagggggctcttggtcagactttgccgattattttctaacatccctcaagtcacaagatcttaagctggttctagagccagattcaaattctgatggtgttagtcatgtgaaattagtagctcagaaatcaaaagggatgcctttgatcaccattcctctcaccaaacttatggac

SEQ ID NO: 11209 - DNA, 649 bp, Glycine max
ttctcaggtcccaaccgcatcaagcgtcgctgatccatcttcttctgtcgttgcatctcttgctgtccccgaaaggacgtaccttatccaaatctctacatatcatatcttccccaaaagctacgccctctctctctctgatctgattcaattgaatgggccttaaccttttcgttctccctccatggcaatggctaactctttctctgccgtgatcctccaccgccctcccatcaccgccctcgatcttctcctcatcttcctccataccctcttatagctctcacccgacaaagcaaaaatagcaaacttttttttttctttctgttttcggttttttttttttaaggatacaaaaagcagaacgaaaatcgattttgattgtggttccggatacccttttggattccgatggcgtcggtgttcgtgtaccacgtggtgggcgatctgacggtggggaagccggagctggcggagtttcacgagagtgagacggtggagtctgcgattagggcgattggggagtcccctgaagggagcatacccatttggaagaagagatctcaattggggattgagaacagtgacatgagacagcagaggtttgttggtgttcttagttcctttgacatagtgcgtttttggctaa

SEQ ID NO: 11210 - DNA, 549 bp, Glycine max
gtggtgatcgtattgctcttatatcaggcacacctgaacaaaagcgtgctgctgaaaacttgatccaggcttttataatggcaacctgaattattgaaattctttcccggggtattgaaggtgaaaagtttaattcttgaagtatgttcttgttcctccttattctgttaggttggtcctggagagacaatgttctctagtgtttttcagcttgacacctgcttcttccacaacagtggctaacaagaccgtgcctgaggatccattgctggttttttatgtagaaattatagttcctttccttttgtttcctcttaatctactctcatctgggttttatcttagaaatctaggatctctctgtcctttcatgatgtttgtctttgactagtgtgtagtcatcactatctccataaattattctgtggaaccataaatcggaatttattatgtttctgatgactcactcttattctcctttcttgctgaaaatatcttccctattgatgcaaaatgagattctgggcctttagcaatctgtgctttctc

SEQ ID NO: 11211 - DNA, 620 bp, Glycine max
  unsure (1)..(620): unsure at all n locations
cttactcaaatcctctctcatctcttccttttcgctggcaattaactcacgagggctgcacagcaatgggtggggagcgcaacaaggttttcactttggccgaggtctctcagcacaacaatgccaaagactgttggcttgtcattcatggcaaggtttataatgtaacaaagtttttggaagatcaccctggtggggatgaggtcctgttgtcttccacagggaaagatgcaaccaatgattttgaggatattggtcacagcaccagtgccgtagccatgatggatgagttctatgttggagacattgatacatcaaccatccccagcaaggttaagtacactcctccaaaacaacctcactataaccaggacaagatgccggagttcatcatcaggatcctccagtttctaagttccgttgtttatcttgggtttggcagttggtattcgtttctacaccaaatcaacataatcatttaactgctagagcacatgaatataggcatttgccatattgtgttggtgttgaaagaccccccagtttgttttaacttttttgtgctgcgatgacgacgggttgctangatatgccatatgaattgtgcctgtttccccttt

SEQ ID NO: 11212 - DNA, 750 bp, Glycine max
gcatctcagagattagtcagcctttttgatatgctttcacgcaagtataacaaattagctgaacgcagagataataagctccatattgcaaaaggaaactcagttgaaggaaacaaccttgtagaagatatgtcaactgaattgcacatttatactgacttcttgaggcttgtactagaaataataaatgtaatcctgacttatgcactacctcggaatcctgaggtagtgtatgcaataatgcacaggcaggaagtctttcagccattcaagaatcatccacgcttcaatgaactgattgataacatttataccgtattagattttttcaatagtcgaatggatgctcaaagagaggatggtgactggtcagtccacgaagtgctccaagtcataattgtcaattgtcgttcttggaggggtgatggaatgaagatgtctactcaactgcgcttcacatatgaacaagagagtcatccagaggagttttttatcccatatgtctggcagctagttctatcccattgtggattctcattcaacacaggagccataaatttgtttccagttgatctacaaacagaaagacttgaaaatggggtggtgggaagcacactccaaaatggtgattttgacaagtctgagtatcagcttgatccataacagggggaagacaatatcgttctattggtcaatatttgtacatatgcaatacgtaaaatttctgaaaaaaaaaaaaaaagggcggcc

SEQ ID NO: 11213 - DNA, 1467 bp, Glycine max
ctcgagctgaacttgtctcgagaaccgttgtcttctcacttcgtcaaaaccaaccaaacccctccccaattctcaagccaaccatgtcttccttcaagagcaagtaccaagatgaactcattgccaatgctgcttacattggcaccccagggaagggtatccttgctgctgatgagtcaactggtacaattggcaagcgattggccagcattaatgtcgagaatgttgaagcaaataggcgtgctcttcgtgaactcctattcaccacacctggtgcttttgagtgcctcagtggtgtgatcttgtttgaggaaaccctataccaaaagacagcttcaggaaaacccttcgtagagttgatgaaggaaggaggagttctccctggtatcaaggttgacaagggcacagtagagcttgcaggaactaatggggagactactactcaaggtttggatggccttggcgcccgatgccagaagtactatgaagccggtgcccgttttgccaaatggcgtgctgtgctcaagatcggcccaaacgaaccatccgagctggctatccatgaaaatgcctacggtcttgcccgatatgccgtcatatgccaggagaatggtctggtacctattgtagagccagagatcctggtggatggacctcatgacatcaacaagtgtgctgaggtgaccgagcgcgttcttgcagcatgctacaaggctctaaatgatcaccatgttctgcttgagggcactctgttgaagcccaacatggtcacccctggttcagagtctaagaaggtcaccccagaggtgattgctcaatacactgttacagctttgcagcgaactgttcccgctgctgttccggccattgtcttcttgtctggtgggcagagcgaggaggaggcaaccctcaacctcaacgccatgaacaagtcccagggaaagaagccgtggtccctttctttctcttttggaagggcacttcagcaaagcactctcaaggcatggggtgggaaagatgaaaacattaagaaggctcaggatgctttatttgccaggtgcaatgcaaactcacatgcaactttgggaacttacaaaggtgatgctacccttgctgagggtgcctccgagtctctccatgtcaaggactacaaatactaactaaaggtgttgacttcttttaatttggagaatttttgcactattggctacaccattctcatgttctttccttcatagaagttagactcggccgatttgctttctgctctcggttataggatgtctacggattaaagaataatcgcatcaagctaaattggcttgctactgtactgttgctttacattttaatttctcttgtttttttctgaatgacttttactgtattattatggagaagttccattctatgtttcaatgctatttggatgtgaaagagcattttgataaaaaaaaaaaaaaaaaa

SEQ ID NO: 11214 - DNA, 401 bp, Glycine max
gaaggatctacatcaacttccatggctagagaggtttgtgtctgtgataagtgacaactactatgaggattacattcaatgaatgaaactgtgatagatcatagactacctaataagttcatcaactttcaatctcaactaagttttgaaaggaggatgcaggaagagtttgtgactctgtccacttttcatcaagaggtgtagcaacatttacatcatggaattccttgtttgttccccgcttggatatctttaaccaaaggtggaggatctgttcatgattattctctctaaggaaagaaaaaaagaaaaagtgatatttgggagtgaaaacattttacttgtggttgggaagaatacaattttaggcaattaaaagaattccggatttttaattttgc

SEQ ID NO: 11215 - DNA, 1002 bp, Glycine max
aaggaagtgagaagatagatgagattttagggacagacccgcttactcaaaagaggagtatgctggtggtgtctgagtttattggctgctcaccttcattaagtggggcaattcgagtgaatccatggaacattgattctgtcgctgaagctatggattctgcgttgatggtcccagaggctgaaaagcagatgcggcatgagaagcattataggtatgttagtacacatgatgttgcgtattgggcacgtagcttcttgcaggatctggaaagggcatgtagagatcatctgaggaggagatgctggggaattggttttggtttaggcttccgagtgattgctttggatccaaactttagaaagctatctgtggaacatattgtttcagcttataagaggaccaagcaccgagcaattcttttggattatgatggcactatggtgcagcctgggtcgatgagtttaacacctaatgctgaagccgttagcatcttgaacatcttgtgcagggacaccaagaattgtgttttcattgtaagtggaagggagagaaagactcttactgaatggttttcttcttgtgaaaggatgggaatcgctgcagagcatggttattttgtgaggacaaatcgaaatgcagaatgggatacttgtattccagtacctgattttgagtggaaacagattgctgagccggttatgcagttatatatggaaacaactgatggttcaaacatagaggccaaagaaagtgctctagtttggaattacgagtatgcagaccgagactttggttcatgccaagctaaggagctttttgatcatctggaaagtgttcttgccaatgagcctgtttctgttaagagtagtccaaacattgtggaagtaaaacctcagggtgtgagtaagggaatcgtagcagaacgtcttctcttaacaatgcaacaaaggggagtgattccagattttgttctatgcattggagatgacagatcagacg

SEQ ID NO: 11216 - DNA, 464 bp, Glycine max
tgtgattagtggtgacatcaaaaccacaccggcgagtgctgcattgccagtcccggcgcttgcaaccaccacaacaagaggaaataatcaggaacaggcagcggctgttaatggttcttctgctgctacagtcatatctgctgcttctgcaccaccaaagaaggaaggtggacaagcaaaagctcaggcggacaagaagaagatagatgccagaaagaaaagtttgaaaagattgtaataaaaatcttcaatcattgaagttttttatttgtgttttagttttacattttgatagagaaagaggggagggagtggggatgtggtctcctgggttcaacatttgctttataaaacgagtgaggtattttctttgggagtaaatggatgaaattgaacttcttgttgtctttgaacttgtgctatgctctttgctaaaatattgaacttgtccataatacaccctt

SEQ ID NO: 11217 - DNA, 1209 bp, Glycine max
gattgtttcaaaccattgacgaaaatcaagatgacaatcttactcataatgaattgagagcactggttattggaattcagtttgaggagattgacctggatcatgatgatgctgtaaaaagaatcatggacgactttgatacttctggtaatgaacgtgttgatcgagaagaatttgttaatggtgtcagtagatggcttcaaagggcccagcgtgctcgagttgcatctggtgatgctggtccacacacaatgaagtttttaagtgattttcacacggaaacaaagagggaacatgatctgctggatgtgggaggtcaggttaatgaagaggctgagggcattgagaatgctaaatggatttccatcaaagcagttctgcttctgctattgggtactattattgctgctgcgtttgctgatcctctggttgatgcagtggataacttttctgaggctacaagtattcctgctttcttcatttccttcatttttctgcccttagcaaccaattcaagtgaagcagtgtcagctataatttttgctagtcgtgataagaggcaaactgcctcattaactttctctgagctatatggagcagtgacaatgaataatgtgctttgcctatcagttttcttggcccttgtctatgcgaggggattgacatgggacttctcttcagaagtgttggtaattctcgtcgtttgcattgtcgttggcgtctttgccagcttgcgcactgtcttccctctatggacagctattctggccatcctactctatcccttctctttggcattggtgtacgttcttgattatgtatttggttggtcgtagaccaaaaaatgattcagatattcgtgctgtatggctcttacccttgttggggtgtatggtttttgtttgtagtctttgtgtgagactatgttgttggtgacttaaatttatggtggaattgacatcgattgagaacgtttcacgggttacagttttgagtcttttgactattccgctcattgtgagcggcaccgattaaaactatgttgcgaagctggtgattacaccaccgtatgtgattgttttctcatcattcagaaatcagaaacatgttattccattttataagttcccctaaaagcacgtttatctgaatcattttttggtctacgaccaaccaaatacataatcaagaacgtaccggacgcgtgag

SEQ ID NO: 11218 - DNA, 612 bp, Glycine max
ggaagaggattgtggatgatttgttgaagaaggggaagatgaagaattgtttggctgtttgtgacgtgtctgggagtatgagtggggtccccatggaggtttctgtcgcattggggttgttggtgtctgagttgtgtgaggagccttggaaggggaaggttgtaactttcagtgaaaaccctcagcttcatttgattgaaggggatgatctcgggtccaagactgaatttattaggaacatggagtgggggatgaacactgattttcagaaggtgtttgatctcttgttggaggtggctgtgagtgggaatctgaagcctgatcagatgatcaagaggttgtttgtgtttagtgacatggagtttgatcaagcatcagcaaacccttgggagacagattaccaagcaatcactagaaagtttggtgagaaagggtttggtgatgcagtgcctcagatagtcttttggaatctgagagactcaaaggctaccccagtgccagccactcagaaaaggaatggcactgccttattggttttcctaaaaattgccgaacacggtcctgggtaaaggaggggaacctaacccctgaaaaacccatggaaccaccaat

SEQ ID NO: 11219 - DNA, 779 bp, Glycine max
  unsure (1)..(779): unsure at all n locations
ctcgagccgaatcggctcgagcagttccactcacttgaatgacgggganattgctgcctatcgcagcagaagccgattagggtcccatctcgttgaagatacagaagatgacgggggagaggttgacaatggagtagaatgcgaggaggaatctgctgaaagtgatctgcattctatagagttaaatatggacaacaacaacaagagttataagtggacctaccctcctgaaagcagatttgatacaagaagatatccaattgaggaagaagtgaaaggtagtaggaggtctacctctgggaaagcttcaaggaaaagcacatctctgcaaaggagtatatcagatggaatggaatggggagtccaagctgataagcttcaaaattcaggagatgggatagattgggaaagcttttatgaactggaaaagcaagctcaaggaaaaggttacgcggatgaaatgcaaggctataaatcagtgaaaggtctaagggatcagatactggctggttctaggcttgcatcttccagaggttatgccagtccaactagacaattttcccagccatggccatcacgagatcttgcaaataacttccaggaaagacctgctacagcacagggcaatggtctaaaatcaaggttacgggaagccaggggtgagggccagaatgtaaggaagtccaaaaggtgagttaatgctcataacttttgagacaatgctttgtttgtgaaggtccatacccgtntgcttctgctaccatgatggctggtaaaaa

SEQ ID NO: 11220 - DNA, 381 bp, Glycine max
ggatcacacacaacataaaaacaaactcttaattaattgcttcacctccaaaaaatggccaccaccaccaccacctatgcttatggttcctcttctcaaagatcactgggcatggtgctggctctagtctcagcagtggtgttgtctcccttatatgccaattcaaagagtgataggaggtactatgagtcaaaatggagctctggtgggtttgttctgcctatggttcttgctggactcataattgccataagaacaacctcttcatcaccatcaccaagagcttgttcatttctaccatctcctgagccttcgtgggtgctcagaattggaagctcttcttggggtttggcggggattctcgttatacttatgcttgtt

SEQ ID NO: 11221 - DNA, 615 bp, Glycine max
acagggatggaaaaagaggatggaacatcttggagagcttggtgagagtgtggagagtgctagtagaagaagatttatgatccttcagagagccaatgtgtcttcatagtttcagccctagcaaggtttcgtacgtcctggactcctgggtgtaactaactgggaactgggtccatcctaggagaaattgttatatgggtctatgtggtctcggccaatctttacctgatatgctattaactctttttcataaattgaggaatgtggctatatgtcccctatagatgcatcgggaccccatagctccggaccatgtaacaatttctctctttctcagccaatgatgatggacaaagcaggcaaagttctctatggttgatgtatagaatggggaacactaactgcaatacattgctaatgatcttttgagtggccatatattttgtttgatttgaatgagagaaaaatattttagtggccttttcattgttaatatagaaactagaaagtgattctatggtatatagcttgtaaattctctttctttttcttttcaaaagtatttgatccatcacaacttgttctctgtatatcatcattcagttttattttgtc

SEQ ID NO: 11222 - DNA, 409 bp, Glycine max
agcgagaggaagagagttttgtgggggtaaggagaaggaagatggagagggagaagcattggatatcgaaatcgaattcaaaggtgtgtaaaagatgcaagcaaaactatgagccggcttctaacacttgaacctcttgccgtttccacacttccttcttcgtttgtcgccgtcacgacgatcaaaggaggtactatgaattgggcccggatgatccaccttatgctgccaagttctatgactgttgtggggctgaagaccctgaagcttctggctgcacaaccaattttcatgtctcttatggctaagactgatgatataatatctcatcttactacttagtattggacaattaccatcatcatacttgtctcatttttaccaatatatatgttttcagattcttcat

SEQ ID NO: 11223 - DNA, 1339 bp, Glycine max
gacttttcattcattttttttccaattattttatcattcctctgactgagttagagctgcacatctccgttacattactttcccatttcattattcgatccccaattcctctcccacgcagaagaatcatcaccccaaaacccaaattaaaaaaaaaacccaaataatacaactgaagttattttaattttcttagtaaaaaaaaaaaagagaagaaaaatgacttcgattcatttgataaacactctcgctgctccgcttcgttctttttctcctccgtcgctttttccgcaatgccattctcctctccgttcttccgctgccccgaaacggcgtcgtttcgctaactcctctgggttccgccttgcttcaagccaaaccgtgaattcggttccgcgtgggaatggaacttacaccgttgctgatttcatgacaaagaagcaagatttgcatgttgtcaaaaccaccaccaccgttgatgaagctttggaggctcttgtaaacaacagaatcagtggtcttccggtgatcgatgaggactggaatctggttggagttgtttctgattatgacttattggctattgattcgatatcaggaggtcctcaaagtgatgcaaacttgttccccgacgtcgatagtacttggaaaacgttcaatgagttacaaaagctgcttagtaagactaatggccaagttgttggtgacttgatgactccaactccacttgttgttcatgaatcgactagtcttgaggaagctgctaggctgttacttgaaacaaaatatcgtcgactacctgtggtagatgatgatggaaagctggttggacttattacacggggaaatattgttaaggcgggctctactatcaaaacgtgctggagagtggtgatagtgtttgtgaaaagttattcaaatagatttgcttgcaggttgtgctgatgatggtcagcgtaacctctatatttattagctacggataatgttaatgtatgtagttatacctagtagatatttagactattacaaatgtatatggcccaagccgaaggaggagctgaaggcaacttttgatggccttgtgagatcttagtggtgtataaaaaaccatagagggaagtgatttatcgatcacctgtattaagttatcaaccttgtgtcggtacattggattgtttgtttcaggctaggagatactacatcctgttctttatgcagtctctgataactgacatttatgaggtcagaatagatcatttggagccctttattatgaacttaatactgtaaagtgcttaggattttaattatatgcaattatgtcctggttttgttg

SEQ ID NO: 11224 - DNA, 406 bp, Glycine max
cccacgcgtccgctttatcattcctctgagatagagctacagcaccattatcattcatctccattactttcctattcgatcctcgatccctctcccacatagaagattcatcaccccaaaacccaattttttttaataatacaactgcaattatttttattttctcagtaaaaaaaaaaaaaagagaaatgagttcgattcatttgttaaacactcttgctgttccgcttcgttctttttctcctccgtcgctctttccgcaatgccattctcctctccgttcttcttccgctgttccaaaacggcgtcgtttctctaactcctctgggttccgtcttgcttcaagtcaaaccgtgaattcggttccgcgtgcgaatggaacttacaccgtttcggatttcatgac

SEQ ID NO: 11225 - DNA, 956 bp, Glycine max
cgctctgtctctaccctgcggctagggttttgtctttcactcactctctttctttctccgttcttcctttttctctcatttcccttctctttcgatctgaataataatctccctcggaaagacgtggttatggtggacctcgtgggccctaccgtggtggtggtggtggtcgcggtcgtcgtggaggttttaccaacggtgaagttggtgaagaaggacgcccaagaagagcatttgaacaccacagtgggactggacgaggaaatgaattcaaacgggatggctctggacgtgggaactggggtacacagaatgatgacattgctgtggttactgaggaagtggtgtatgaaactgaaaagaattttgctgatgagaagcctgcaggcgaggaagatgcacctgaaggaaacaaggactgtcctgccaatgaaaatgaagaaaaggagcctgaggacaaggagatgacactggaagagtatgagaaggtgctggaagagaaaagaaaggccctgcaggcacaaaaaactgaagtaagaaaggtggacatcaaggagtttgcatccatgcagccactgtctaacaagaaagaaaatgatgagatctttattaaattgggatctgacaaggataaacgcaaagatgctctagagaaggaggagaagtctaagaagtctgtccttttttgtcaattttgggttctctgatttggacttgagcaggaaaaaaactttggtagttggatttcctgaattagaaaggttattattttgacttctatgccttaaaatgtaaatttaggttgttcttcatacgttggagccttttcttgtctttttctgttactatggttcgacactctgggggggttatatggtggcggataagacataaatgttgttgagtttcgttttatttatagattgaattctcagttttgatttgaaaaagaaaaa

SEQ ID NO: 11226 - DNA, 757 bp, Glycine max
gaaaatgaagaaaaggagcctgaggacaaggagatgacactggaagagtatgagaaggtgctggaagagaaaagaaaggccctgcaggctcaaaaaactgaagcaagaaaggtggacatcaaggggttttgcatccatgcagccactgtctaacaagaaagaaaatgatgagatctttattaaattgggatctgacaaggataagcgcaaagatgctttggagaaggaggagaaatccaagaagtctgtcaacatcactgagtttctgaagccagctgaaggggaaaggtactaccctggtgggcgtggtcggggacgtggccgtggttctagaggaggttacagtggaaatgcatacagcaatgctccagctccatcaattgaggatcctgggcacttcccatccttgggtggcaagtgaggttttcctgaacccttctgacatttccctgtcctttttttgtcaattttgggttcttggatttggacttaaaagcaggaaaaaaactttggtaattggatttcctgaattagaagggttattattttgacttctatgccttaaaatgtaaatttaggttgttcttcatacgttgtagccttttccttgtgtttttctgttactatggttggacattccgggggggttatatggtggcggataagacaaatgttgttgagtttcgttttatttatagattgaattctcagttttgatttgaaaaggaccacttacactcatgctatggaccaaaaa

SEQ ID NO: 11227 - DNA, 828 bp, Glycine max
ctaagtcccaaaacacacataaattgagcacattagagattcggttagtgtcacactcgcctcaccctctctctgtctctcccctgcggctagggttttgtctttcactcactctcttctctttcttttcttctcatttcccttctctttcgatctgaacaataataattaaccatggaaccgtcgctgagttaacctttttcttctgcgcggtgctgttctcttttgttgtttgggtttttttttttctttctgagaagggcttgttgttgttgtgtttcgaaataatggcgactacgaatccctttgatttgttgggcgacgacgccgaggacccctcacagttgatcgcggcggagcaactgaaggccgcggcagccgcggccaccgcgccacccaagaaggaccaggccaagcccggagctcgcagcggcgcgccggcccagttgccgtcgaagccgcttcctccctctcaggctgtaagggaggctaaaaatgaaacttcttacggcggtcgtggtggtggccgaggaggtggaagaggatttggacgcggccgtggtggcggcggtggctttggccgtgatttttccaatgatgataactcatcggcccctgctaaccaaggatcttttgaaggagattctgggaatccctcagaaagacgcggttatggtggaccccgtgggccctaccgtggtggcggcagtggacgtggtcgtcgtggaggttttagcaatggtgaaactggtgatgaaggacgtccaagaagagcatttgaacgccacagtgggactggacgaggaaatgaatcaaacgggaagggtc

SEQ ID NO: 11228 - DNA, 1062 bp, Glycine max
gttagttcagctagtaaggggcagtctgttcagaccattcaacagagggtttgcattgtagtctctgagcttctctcccagctgcaagattggaacaataggcggcagtttacatcccccagtaacttccatgctgatggggtgaatgacttatttagctctcaggctgtaatagaaaacacacgagcaaatgacattttgaaacaggcccctttcttgataccatttacaagcagggttaaaatattctcttctcaactagctgctgttaggcaaaggcatggacctcaagctgtattttctagaaatcgattcaggatacaacgagatcatattttggaagatgcttacaatcaaatgagtcagttgacagaagatagtcttcgaggatcgattcgtgtgacttttgtcaatgaatttggagttgaagaggctggaattgatggtggtggaatattcaaagatttcatggagaacatcacacgtgctgcctttgatgtgcaatatggattatttaagcggatcacctgctttatcctaatcctggatctggaatgatacatgaacaacatttccaatttttccacttccttggtactcttcttgcaaaggctatgtttgaagggattctggttgatataccatttgctacattcttcttgagcaaattgaaacaaaagcacaactatgtgaatgacttgccttccttagacccagaattatatcgtcatctcatctgtcttaagcattataagggtgacatttcggagttggaactatactttgttatagtaaataatgaatatggagaacaaacagaggaggaactgcttcccggaggaaggaacctgcgtgtcaccaatgagaatgtcattacttttatccaccttgtagccaatcaccgcttgaattttcagatacgccaacaaagttcacatttcttgaggggatttcagcaacttatgcagaaggattggattgacatgtttaatgaacatgaacttcagcttctggtatcaggttcacttgacagcttggatattcatgatctgcggctgcata

SEQ ID NO: 11229 - DNA, 753 bp, Glycine max
cttgtagccaatcaccgcttgaattttcagatacgccaacaaagttcacatttcgtgaggggatttcagcaacttattcagaaggattggattgacatgtttaatgaacatgaacttcagcttggatattgatgatctgcggctgcataccaactatgcaggaggctatcatggtgagcattatgttatggagatgttttgggaagttctcaaaggcttttcactggaaaacaggaagaaatttctgaagtttgtgacaggttgctctcgtgggccattgcttggtttccgatatcttgaacctatgttttgcatacaaagggcttccggtaatgccgctgaggaatcacttgaccgattaccaacatcggctacttgtatgaatctactaaagcttccgccttatacaagcaaggagcaattggaaaccaaattactgtatgccataaatgccgatgctggctttgatttaagttaaaaggaggcagcggagtttacgatatctgtaggtttgaagccggtagaaaatgactcacagatgaccattgtcagtggaatgggaaacgacaaataatctggtggatagaattgaataaaaatatcctgtgtgcgagtgtatgtatatatattcttattcaatcttcattctcaatttgtctcttttctaaatgtacatatctaaattgtgaattattttgtaaagttcactctttggcagggtttttcctgattattttggatgattattataac

SEQ ID NO: 11230 - DNA, 1597 bp, Glycine max
cttctctgagactctctccctatcgtcaccgtcactgccatggaggatgccaatcttcagaggctccattgctccgtcaaaaactacgattggggtctcccaggtcgcgtctccgaggttgccagactccacgcgctcaattccgcgtctgaattccacgcggaggacccttacgccgagctttggatgggtacccatgattcaggcccttccttttttagcttcctccaatggaaatgagaatggtgtctccctcaaggcttggatttccgagaaccctgatgtgctcggtcacaaggttcttcacaaatggggttctgatctccctttcttgttcaaggtgctgtctgtggggaaggccttgtcaattcaagctcacccggataaggagttggcaaggactctgcataagttgcaccctgatttgtataaagatggcaatcacaaacctgagatggcccttgcactcactaattttgaggctctctgtggattcatcactctcaaggagctcaagggtgtgcttcatactgttcctgaaattgtggaactggttggtgctacaaatacaaacctggtcttacaaactaatgatcaggatggtgaagagaaggtcaaacctgttctgcaggcagtgttcaccgacctcatgtcagctagtaaagatagagtaacggatgcagtaaacagattgaaaagccgtctgcttaaggagagtgaggtgaggcagttgacagataaagagcagctggtgctgcggttggaaaaacaatacccagctgatgttggtgtcatagcagccttctttcttaaccatgtaaaactcaatcctggtgaagctttgttcctcggggcaaatgaaccacatgcatatttatctggggagtgtgttgaatgcatggcaacttctgacaatgttgtgcgagctggcctaactcccaaacacagagatgtccagaccctttgctccatgctcacatacaaacagggttctcctgaaatcttgcgtggagtatctgttaatccatatgtaaataaatatactccaccatttgaggaatttgagattgatcgttgcattcttcctcaaggggaaacagtggtgttcccagcagttccaggtccttcgatctttttggtcacagttggtgaaggaacaatgaatacaggattacccaaaggacatgtggtcaccgaaggtgatgttctttttgccgcagctaacactgagattagtgttactagtgcatccgagttgaatttgtacagaacaggggtaaatagcaagttttttcaagcttcataagtttcaacaggggatcacccaaatttttattttttttggtcatatgctgttgggagtcaaataatgcaactatctgttgcgtgtaatagaagcagtttaatgtacatgcaagagtaaaaaaaatcacttagtatattgagtcttagagaaatgttcattatagagaggtgggttggcaattgtcattcgtttgttgttcataataatgttcgttaaaagccttttcggatggtattcctattaatcattttatatcaataaatgaagggccgtcaattattttttatatag

SEQ ID NO: 11231 - DNA, 449 bp, Glycine max
tcggctcgagatcgaaaccctctcttcagacatcattaaaacaacctcactctcctcctaggaatccccggagaaactacgtgcgccaccgcagcatcggttcctccacccaccgcgatggcgcacgtgccggcgagcgaacgacggcgttctggacggacgagaagcacgtgcacttcctcaactccatggaagcctccttcgtccgcacaatgctccaaaaccaaggcaactcaaacgcctccaccacgcgccactctctgcccctcgaccgttatctccccgacacatccgaatccaccttggatttgaaaccaaaccctcgccgccgcaccataaaacaccatgcaccctcagattcaatgggtccaacaaccagaagaacaaggaggagatcatctcagccctacaattcgtcacaggaccaggcggtcccacaagtagaaaac

SEQ ID NO: 11232 - DNA, 411 bp, Glycine max
gactcgatcttttaacttaactcagtgaatcctcgcttctcatttcctaggaatcccctaagccaccgcagcatcggttcctccacccaccgcgatggcgcacgtgccggcgagcgaagcgacggcgttctggacggacgagaagcacgtgcacttcctaaactccatggaagcctccttcgtccgcacaatgctccaaaacgaaggcaactcaaactcctccaccacgcgctactctctgcgcctcgaccgttatctccccgacacatccgaatccaccttggatttgaaaccaaactctcgctgccaccgcaccgtaaagcaccatgcaccctcagattcaatgggtccaacaaccagaagaacaaggatcaggacgagatcatctcagccctgcaattcgtcagagga

SEQ ID NO: 11233 - DNA, 382 bp, Glycine max
gaacacagcagaaaccctgactactttgctgttgtggttctctatgttgatggggcagacgatgtcactgctgtggagttgtttcagcaagattgccaagaatggaagccaatgcgcagggcatttggggccatgtttgactatagcaacccaccaaacggtgagatctacttgaggttccaagtgagtggcagtgcagggctttattgggtacagtccaagaatgctatctctggtgattggaaggccggagcaacatatgacaccaatgttcagcttaattaggaaggaaagaagcactctgagatcccttgaacggattagaaatagataggcactagtattcaatttgtttctgtttagcttcactctaagaatgttt

SEQ ID NO: 11234 - DNA, 663 bp, Glycine max
acagtcagaaatgttgtacactatgaatatatgtcaccagaatatgcaatgcatgcacaattctcagtgcaatcagatgtcttcagttctggtgtactagttcttgagatcttcagcggccacaataccggtggctttcatcatggcgagaatgttgaggatctactaagtttcgcatggagaagttggaaggagcggccagctataaatattgtagatccatcattaaacaacaattcacgaaatgaaatgatgagatgtatccatattggtttactttgtgttcaagaaaatttagcggacagaccaaccatggctaccattatgctcatgcttgatagctattctctaagtctcccaattcccgccaaacctgcattttatatgaacaggtagaactcgaagttcttccagccatccagtcatgggagtacaactcaagggaaacaggatcaagtgaatcgataattaaatcagctcaagaatcagaaaatgaggcttcaataactaagcagtacgctcggtagattctagttaattaggaggatgatattcattcattatctatgcttccgctcttaaaccaaaatacaactattggaactcatgtaatttgatcgtgcaatgtcttgtttaaatacacaacacatcaaaaatttaaaa

SEQ ID NO: 11235 - DNA, 509 bp, Glycine max
accagttaacataaaaatggaatccatgacctaataacaaagttttgcaggcatggagaagttggaaggaggggacagctgtgaaaattgtagatccgtcattaaacaacaattcacgaaatgaaatgttgagatgtatccatatcggtttgctttgtgttcaagaaaatttagctgacagaccaaccatggcgaccattatgctcatgcttaatagctactctctcagtcttccaattccttctaaacctgcattttatgtgagcagtagaactggaagcatttcagccacgcagtcatgggggtatagttcaggggaatcaagatcaagagaattaacaattaaatcagctcaagaagcagaaaatgagtttactgatccataccctcgctagattttgctcatggaattgatattcattcaccatcgatgtcctggagttcatgtaatttgttcatgtaatgtctttttgtttgaataatccaaactatctctttgtttaatcttg

SEQ ID NO: 11236 - DNA, 1087 bp, Glycine max
gggcatcatatttcaaaggaggctcagaattcctggtcgacacgccagccagatccacaaatcggaagaatcagagcgccgtcggaaaccgccgtccacggcggtgaaactcgccttcgcatcctctcgtcttcgaacccgaagcctctctcggttcctcactcttctcacatcgccaaaaactcaaattcacgatggaagagttggagcagtggaaggaacaactttcgcacttcgctaacctagctttggatcgtcttcgcgaggttcccccgaatcagctctacgctgctgctgcaatcgcgattttcacaactctgcttcttctctcaattcggttgttcaagcgcgcgaagtccaacaccgttgtgttggccgggctcagcgggagtggaaaaactgttctcttctatcagcttagggatggctcaactcatcagggtacagttacatcgatggagcctaatgaaggcacttttattcttcacaacgagaaaacaaggaagggcaagataaaacctgttcatgttgttgatgttcctgggcattctcggcttcgacccaaactggatgagtacttgcctcaagcagctgggatagtttttgtggtagatgctttggactttttaccaaactgccgtgctgcttcagagtacctttatgatctattgactaaaggaagtgttgtgaggaagaagattccaatgcttattctctgcaacaaaacagacaaagtcactgctcatactaaagagtttatccgaaaacagatggagaaggaaatagacaaattacgggcatcaaggagtgcaatatcagcagctgacatcgcaaatgagttcaccctgggggtacccggtgagccgttttcttttacccagtgctctaacaaagtgacaactgcagacgcttctggtttaactggggaaatatctcagctggaagagtttatcagagaacatgtaaagcgatagctggatattgtgtttaaacttgcggatttttgttgaactgaatgaatatgtagcgttgctcttcttggttgttatttctttgatttcaaagaactgtctggataagaagaggc

SEQ ID NO: 11237 - DNA, 514 bp, Glycine max
ctcgagccctcgagccgaatcggctcgagatttcaaaggaggctcagaatagctggtcgaaccgccagccagatccacaaatcggaaagaatcagagcgccgtcaaaaaccgccgtccacggcggtgaaactcgccttcgaatccagagcctctctcggttcctcactcttctcacatcgagcgcaacgccaaaaaatcgaatttcacgatggaagagttggagcagtggaaggaacaactttctcacttcgctaacctagctttggatcgtcttctcgaggttcctccgaatcagctctacgcagctgctgcaatcgtgattttcacaacgctgcttcttctctcaattcggttgttcaagcgtgcgaagtcaaacactgttgtgttggccgggctcagcgggagtggaaaaactgttatcttctatcagcttagggatggctctactcatcagggtactgttacatcaatggagcctaatgaaggcacttttattcttcacaacgagaaaac

SEQ ID NO: 11238 - DNA, 509 bp, Glycine max
caacgactccaagtcccgccctccctcctccaccatccttttcatttgttctggctaggttatgcgctatgcaacacagtgccatggaagcctccaaactcagtagcagtgatcaaaacgttcgatgccatcactgcgcaggacccctttccaaagacatggaaaccagtcactggaccgtttcgcctctcattagggatagcttctccatgattggttctgccgttggcggcgttgcaagtgcattttatggattcaatcttgttatgccgattgtccaaagaaggatcaaaggacccatgtggttgcattttctcatggtgcaccacctgtgatagtattctcttcagcctgtgccggactggcgggtgggggtgtgcctgctgcagcacaacttgtttcctcttcttatcatgcagcttactcttctcctacctcacctccgccatcaaaggatgaaaatatttcaaggtcgagaaaatgatataatggacttctgagtctgacca

SEQ ID NO: 11239 - DNA, 402 bp, Glycine max
gaagaaaaaataaaaaaacacaacgtcacctgtgcgttcctggaatggtacatcagcagagggttctcttctgttctggttacgttatgctctatgcaaaacagtgccatggaagcctccaaactcagtagcagtgatcaaaacgttcgatgccatcactgcgcagggccccttttccaaagccttggaacccagtcactggcccgtttcgcctctcattagggatagcttctccatgattggttctgccgttggcggcgttgcaagtgcattttatggattcaatcttgttatgccgattgtccaaagaacgatcaaaggacccatgtggttgcattttctcatacgtgcaccacctgtgatagtattctcttcagcctgtgccggactggcgggtggggc

SEQ ID NO: 11240 - DNA, 559 bp, Glycine max
aaataacggagagtaataggactagatgatcatattgacctgtatattcataacctgttgattatttatttgtttgttttttattcatgccaggcccaggcatgtatagtcaagcattcagtttctgtgagaaagttaaggggaagttgagcagttcagatgattaccagacattcttgaagtgccttcatattttcagcaatggaataattaaaaggaatgatttgcaaaatttggtaactgatttacttggaaagcattcggatcttatggatgaattcaatgatttcttggagcgttgtgaaaatattgatggattccttgctggtgtcatgagtaaaaagtcgctgtctactgatgctcatttatcaagatcatcaaaattggaggacaaggacaaagagcacaagcgcgatatggatggagctaaagagaaggaaagatacagggagaaatacatgggaaaatcaattcaagaacttgaccttagtgactgtaaacgttgcactcccagctaccgacttctgcctgcagattatccaattcctacagctagtca

SEQ ID NO: 11241 - DNA, 1472 bp, Glycine max
ggaattcccggctggagcagagcaaagcaaagcagagccaacaacaagaagaacaaaaccaacatcaacaaccacaagaagaagaagcttgcaaattagaagaatcttcagttgaaagggaagaacacacaagaacaaagagaggaagaaacgcgaatgaagggagaattagagttgccaccagggttcagatttcaccccactgatgaagaattggtgaatcactacttgtgtaggaagtgcgcgggtcaaccaatcgcggttcccatcatcaaagaggtcgatttgtacaagtttgatccatggcagcttccagaaattggctactacggcgagaaagaatggtacttcttttctcctcgggatcggaaatacccgaacggttcacggccgaaccgtgccgccggaagcggctattggaaagccaccggcgccgataaggcgatcggaaaaccgaaagcgctagggatcaagaaagctctggttttttacgccggaaaagcccccaaaggtgtgaaaaccaattggatcatgcacgaatatcgcctcgccaatgttgaccgatctgcctccaagaaaaacaacaacaacttgaggcttgatgattgggtgttgtgtcgaatctacaacaagaaagggaagattgagaaatacaacacgaccgcaccgaagatgaatcttgaaatgattcatagttttgagcacgagaacgagacgaagcctgagattcataagcttggaaatgagcaattgttgtacacggagacttcagattcggtgccaaggttgcacacggactcgagcagctcggagcacgtggtttcgcccgatgtgaggtgcgagagggaagtgcagagcgaccccaagtggaataacgatgattatgatctgggcctacagctagaaaacgcgtttgattttcagtttaattacttggacgataataacctttccgtcgacgatgacccctttggcactgttcagtaccaaatgggtcagctctcgcccttgcaggacatgttcatgtacctacagaagatgtgaaaacgatacgttttttttggacaagatgatgggacccgcaaatatctttattatttttttgtagtaaaagtcagcatttgtgtgcaattgcattgcacctaacattttgtggactaggccaagcttagtaaactattcttattctttgttctagagagatcagggaatgtggaattcggttgaaatgagctagtatttggattggatcttggtgtaaagagaacaaaaaaaaaaaaggagaaaaggagttaggtgttgcagtaagtaaaaagtaagccgaatgatggatgataggatattggagggttaatgagtaggtgtaaggaaaattcttgttccattgctattccagtatgattttttcatatattttgtaatataccaacttctgcttttcaattcaaaggaaacaattgaatgacaaataa

SEQ ID NO: 11242 - DNA, 483 bp, Glycine max
gttctagatcgcgagcgaccccaagtggaacgatgatctggacctaaagctagaaaacgcgtttgattttcagtttaattacttggacgataataacctttccgtggatgattacctttttggcactgttcagtatcaaatgggccagctctcgcccttgcaggacatgttcatgtacctacagaagatgtgaaaactgaaaacgaaacgttttgagcaacatgggacccgcaaatatctttgttttattatttttttaaaaggaaaagtcagcatttgtatgcaattgcattgcacctaacatgtgatgtgggctaggccaagcttagcaactattcttattctttgttctagagagatgagggaatgttgaattcggctgaaatgggctatttggattggttcttggtgtaaagaaaaaatgagagaaggagattaggtgctgcagtaagtaaaaagtaagtgagcaaattgatgataggt

SEQ ID NO: 11243 - DNA, 508 bp, Glycine max
gcgagaagaccaccgtaaggggattgataaaggatacagaagagaggggaaagttaagatgaagaagatggtggttgcaatgatgcttatatttcttctaatttctacgcaaatggagagcgttgagcccgatgctgcagattgcttggatggttgcactactgcctgtgttcaaagcgactcgaggcttcaagcacggtgtgatcgcaagtgcagcattagatgcggtccagattccacaatcaaggaggacatgggttgagtatgtaaagtcacagcgcaagcaagcagtgtctgcttgaccaacaccgtgtcttttttagtccttgcttatatatgatataacattttaaagtcttcccgatgctgtagtagcatccaaataaacatggatgatagacagctttttaagatcaaatttgttagggtagatgctttgtaacttgaaggaatgtgatatgaatgaatgtttcattatgggcataaatacatcactgccaattgtgac

SEQ ID NO: 11244 - DNA, 465 bp, Glycine max
gcgattgtatcttgttattttttataaaagggaggccaatgccttatattgtaattatacgtgggaatgttgctccagcaaaatcaccccacaacaaatgtttacattcataaggtggttcatcaaaccaatgtattattccccaggataactgtcatcaacatttaatcagcagcataattgtcttaaaataaaatcttctttgtcttcaaagatacactccaggtttaaactattcatttaaagacaatccaaatggtgacattctcgtctgggtggtgtagttggttatcacgctagtctcacacactagaggtccccggttcgaacccgggctcagacatttcaatattttgtagcccatgtctgtaaattactttgagatatgtttttaggtttttttttaatgctttgtaataaaattttacagattccacaatcaaagaggacatgggttgagtatgt

SEQ ID NO: 11245 - DNA, 427 bp, Glycine max
agcaccgatacgacgacggagcgggtgggtggctgcaatgatgctattttcttctcatttctacgcctatgaagagcgttgagccggatgctgcggattgcttcgttggttgcagtactgcctgtgttcaaagcgactcgaggcttcaagcacggtgtgaacgcaaatgcagcattagatgcggtccagattccacaatcaaggaggacatgagttgatttgagtatgtaaagtcacagcgcaagcaagcagtgtttcatcaccatagtcttatttagtccttgcttatacatataataacattttaaggtttgtctgatgttgtagtaacatctaaataaacatggatggctttttaagatcaaattggttagggtagatgttgcgacttgaaggaatgctagctgatgtgaatgagtgttttatc

SEQ ID NO: 11246 - DNA, 598 bp, Glycine max
gtatctacaatttctcttctagcaatcaaccatctttggatcaaccctccaatttgtttacaatatggaacagaccctctcctttgaatttgagcatgaatttgttcaaaacacggcaagagtgaaatctgttgatatgcatccaactgagccatggattctactgggtttgtattcaggaactatttctatttggaactatcagacaaagactgaagagaagtctttaaaaatcagcgaatctccagtgagatcagcaaagttcattgctcgggaaaactggattgttgcagctacggatgacaaaaacattcacgtctacaattatgacaaaatggaaaagatagtagaatttgcggaacataaagattatatcaggagtttagctgttcatcctgtcctgccatatgtaatatcagcttcagatgatcaggttctaaaattgtggaattggaggaaaggttggtcttgttatgagaactttgaagggcactcacattatgtgatgcaagtggcattcaaccctaaggatccatctacctttgctagtgcatcccttgatggcaccttgaagatctggagccttgattcctctgct

SEQ ID NO: 11247 - DNA, 819 bp, Glycine max
gtaatggaagtggttctcttctagcacgcaatctggccattattcgatggaagacactttcaactcggaaagtaaatgcaacaagtggagcagcatcagtaccggatgaagttttccatagatccaaaggggttcaattgtgcaacactcaagcataccaatgcactccagccttttttgctgattcttattttctcaacaaattctcttctgatgtcattgcagaaagagctcaagtgcctgccactgcaagggtcatatgtgaaaggcatgcaatctcagttgtgccagtaactcgtgtcaccatggctcatcgtcgacaatccttcagtttctacattatagaatatggcagagaggtgtatttgaaggattattaccctgctagatattgttggggcctgtgtccttgtttggagtggttgaagttgtaatgttgaaactgttcttcctggcagcattgtgcagttgtaaaggtttcatctacacatttgcgagttctgtgcttgttcagctcgataataacacaagcagatttcacggtttgagggctgagcagatgaactttatgatatgaggaaatacgttatgcatcgataatataaaataattttacactgtcatccaattactaatcaccatgtattgtaagtttgttaacttttacgataactattttaaaagtcttatcaatggtgatttctaattggttgggtgtagtgtaaagattttataccaacagcgcataactattaaactgttatcatttaatccattggctttatggatcactgctgagaggttatatttatgaaataa

SEQ ID NO: 11248 - DNA, 681 bp, Glycine max
gacctacgtttttctttttctctttctctttctcttactctttctctttctcttacgctcttcaagactttcacaaatcccttccgtcttcgctcttgtcttctcgttcagaaatgcaaagtatcagagtcttgtttggacttgacgaggaaagcgatgctggcgtgatccgtttagaatttcagtgacttagatgcctttgacgggtgaccgagatggttgttttgcaacaaatgaagtctggtcgtatgacccagtagtacggcagtggtccccccgtgcggcaatgctcgtcccccggtctatgtttgcatgctgtgttatgattggaaaaatagttgtggctgggggcttcactagctgcagaaagtcaatatctcaagcagaaatgtatgaccctgagaaagatgtttggattccaatgcctgatcttcatcgcacccataattcagcctgttcaggagtggtgattggaggaaaggtgcatgtactgcacaaggatatgtcaacggtgcaagttttagacaatgcaggtcagtggacggttgaggaatatgggtggctccatggtcaaatggcagttatcagggatgccctttatgtaataagctatggattaatcatcaagcaagacaaaaaaatgaggaaggttgtaggttcagcttccgagtttcgaaggag

SEQ ID NO: 11249 - DNA, 577 bp, Glycine max
tggtgaataattaaaatgacgtgtcggtgagtgtgttttataagagagaaaggtgaggctgagctcataagtggtgaggtctggccgggttaaaaagaatagcagcggtgccacttgggcagaggaggaggaggaggaggaagaagatcaacaacacatcaccaaacaaccttatggagatttgggccaacatgttttttcccctcaggcgtgtctggctttctctctctgctcgcctcaagcctcgcaaaaacggagcagggctgctcaagcttcaggatgatgtacagacttgtggatatcaagatgtacaagtgatgtgggaaatgctacagagaaccgaaggtgaagttatagaaaaccaccataagcgcaagcagtttcccttctggaggatctttgtatggtccaaccatactcaatctgcaaatcacgcttcaagttaaaaccagacacaagtttcaagtttacaaataaaaccgcttctgcagctggcaagccaccctccttttatcttcccattgccagcatcatgattcttctcttcttcttcttggcttctaaaacttagtacatg

SEQ ID NO: 11250 - DNA, 287 bp, Glycine max
ctcggtgatctgaggaagggtgatgaatcataatagtaataggtctggccgggttaaaaagaatagcagcggggccacttgggcagaggaagaagatcaagaagacaacaacatcaccaccctcaccaaacaagcttatggagatttgccgcaacatcattttccccctcaggcgtctctgccttgctctctctgctcgcctcaagcctcgcaaaaacggagctggactgctcaagcttcaggatgatgtacagacatgcggatatcaagatgtacaagtgatgtgg

SEQ ID NO: 11251 - DNA, 455 bp, Glycine max
tccaatccatgataattattttggcaattgtgtgtgggggcatgtggtggatgctgaaccattggacttcataaaggaagaagcttctgctattgttgcaaagagtattcatagtaaaataaagatgatattagatgaggggatttttcatgggatggagagtgcgttttctagatatgagtctttgggaaaagacggagttgaaatcatgggaattgcagggtctaaccggtttggagtttatggaactgattttggttggggaaagcctgctaaggtggagatagcatcggtggatagagccttaaccattgggtttgcagagagcaaggatgggaatgatggtgttcaagttgggctcgtgctgaagaaacatgtcatggatctcttttgtactttgtttcgtcaaggaatgttagatgattgatcataaattcggaacatgcatattgacg

SEQ ID NO: 11252 - DNA, 541 bp, Glycine max
tgtgaagagtatgattctggagtggatagtttttcggggcctacaaagtacatcatttggagcaatcgcatgaacactcatgttttgcctgcgtatgttgtaagcttcagagtttcttccttcaaagggatggagaagagtgaagaagaacctttgagacctacttcgccttggatgccattcccaactctgatttctgcgctttccaaggttttgcctccatgtgatattgccctcatctccaagttctacaaagataaacaagacaagaagattttacgacatgaattgatacaaagagtgagagaaatagctggagataagttgctagttgcggccatcaaatcttatagagacaacaagaagaaaccaagctttctacaatcaaggtcaaagaatggcttagcaacgaggataaaataactttcttcacacgagttctttttcttgggttgacataatactaaatacccaaacttacaaggaggacacacaaaactgctttaaaagcagtgtggcatatttgactaggcctatttgt

SEQ ID NO: 11253 - DNA, 643 bp, Glycine max
taatgcaaagagttttattccgtctcaatcacatgctaggccccgctcccccatgtctgatggttccttctatttcccagctactgtatccaccataccaaatatgccagccatgtccatgggtattggagttgggactacttttgcagggccacaaccagtcgtatataatccacaagcggcacaaatgccatcccaaccatattttcatccaaatggaccacagtatggacaacttcttggtcatcctaggcaagttttatacatgccaagttacctccctgagatgccatataagggacgggatcattgaccacttatagttgaatgcattcttgacaacttctctctgcttgaaaagaatgaactgagtggatggcttgaagagtttcaaatgacaagaatatcttcggcttatgggaggatttcgataaaaaaaaaaaatgataatttctaggcaagctggcttattatgggatataagttaatttatcttatattcactcatacatcttttgggatttctcagttttcggttatgtaataacagtagcttaactcagattggcattcccccccttaggaggaggaggaggacggctactactattattattattattattattattattattattat

SEQ ID NO: 11254 - DNA, 1320 bp, Glycine max
  unsure (1)..(1320): unsure at all n locations
gccccataagaaaattgaatatacagttttttttatgaacaaatactaattgactagaatattagattttgttaatataaatctctttatttaactcttatttatccgacccatcttatgttttcactattatatatatatatattgaggaaagctaaatattattcatttgtttctgacatgctaccgtgagattaaacaccaaaaagatccagattctcctggtcttactatgaactatgaagggagcttgaagtgatgttcggataaaaggtttaggtagtggccaaccttaacaaatcaaaagaagttagcaattgataaaaaaaactcacagatgcatcatcaacttgctctacctaccaccttattttcggccttgtgaggaacaaagggtctaaataaatagccttgtataacgactctaattaactcaccctttttgtaaaaacctctctcagagtttgctcacccctactcttcttccagtctctatctcaatctccatcaaatttaactatggctactgaagaggttttggttgatgaaatcacttaccctaccaagatcactactaccaagcccctatctttgcttggccatggaatcaccgacatggagattcacttcatccatgtgaaattctattcaatcggggtttatttggagccagaagtagtaggccacttggaccagttcaaaggaaaatctgcaaaggagctggaagataatgaagagttcttcaatgctctcatttctgccccggtggagaagtttattagacttgtggtgatcaaagagatcaagggtgcacagtatggggttcagattgagactgcggtgagggataggttggcagctgaggacaaatatgaggaggaagaagaagaagctttggaaaaagttattgaatttttccagtccaagtacttcaagaaactttcagtgatcacataccatttcccagcaaattctgccactgctgagattgtggtatctttggaggggaaagaagactccaagtatgtgatagagaatgccaatgtggtagagggcatcaagaaatggtaccttggtggctcaagtgcggtttcttcctcaaccattcaatctctggctagcactttctcgcaggagttgtccaagtgaacataactttgtatggtgtaataatcttggggtctgtgttttgtgttgctaagttgcagtaattggaatttttctccacacaatgttttgcggatttctgcttttgaacttttcggaataatgttaatcttgtgacttgccaaattcttaaaaaaaannnnnnnnnnnnnn

SEQ ID NO: 11255 - DNA, 468 bp, Glycine max
atttacctctctcagagtttgctcacccctactcttcttccagtctctatctcaatctccatcaaatttaactatggctactgaagagggtttggttgatgaaatcacttaccctaccaagatcactactaccaagcccctatctttgcttggccatggtaagttgcttaaactaggttcctaccggctcttccaatttctttcttaatttttttttgaagatgggatgagggatggattttttagtggtcctggatgctaatgtttccatccaagttaaaaattgaagtaataaacttaaggcagctagggatctagatcatggacttgcaatttttgttccaacgaatattataactactgcggtatttgctatgatttgattcattaatgagtaacaagttgacacaacttgatttccttggttgaccaggaatcaccgacatggagattcacttcatccatgtg

SEQ ID NO: 11256 - DNA, 674 bp, Glycine max
gaaaaagtatggagtttatacttcagagttcttattccacaaatagtccaagcaaggggatgatggtaactctggatccagtgctgtttgtgatgtaatatgcttgcaggctctctcaaagagaattcattatggcaaatatgtagctgaggcaaaatatcaagctagtccagattcatataaagatgccattatagcacaggacaaggacaagttgatggaattgctaacatatcctgaagttgaagaggcaattaagaggagagttgacatgaagaccaagacttatgggcaagaactggttgtaactacgaaggaacatcgaactgaacctgtctacaaaataaatccaagcttggttgctgatctatacagtgattggatcatgccattgacaaaggaagttcaagttgcctatctgttgagaaggttggattgaacataacaaaaagtaccttttcaattacagtgtttatagggttatttatcttttctaggaaatgatacttgcaatgggtaatttctcttgaatcatgattcatgactataaacttgagcttttgtaactaacatatgaggaagctgatattgggttcttatataataattaatggcatcttttatgttgttccaaaaaaaagacatggactaatccaaaaaaaagcggccgctct

SEQ ID NO: 11257 - DNA, 809 bp, Glycine max
  unsure (1)..(809): unsure at all n locations
cccacgcgtccgcgaaataccaattctgtctcacatagttctataacaccacaaactgtccaattccaatggttgttttctcttgtgttaaaacaatggttgtgcttgtccttgcgtttctaatctctgtgccttctatggttgcttctgctgtcagcttgtaccaagatgttgatgtcacgtggggagatggcagaggtaagattctgaacaatggtcagcttcttactctgtctctcgacagagcctctggctctggctttcagtccaagaatcagtatctatatggcaaaattgacatgcaaatcaaacttgtccctggaaattccgctggcacggtcaccgctttttacttacgttcagaagggtcatcttgggatgagatagactttgagttcctgggaaatctgagtggtgatccttacatagttcatactaatgtgtacacacaaggcaagggtaatagggagcaacaattttatctttggtttgacccaactgcagattttcacacctattcctttctctggaatcctacacatgttgtattctatgttgatggaagaccaattagggagttcaagaacttggagggagtgggtgttgaatacccaaagaagcagcctatgaggttatatgccagtctatggaacgctgatgactgggcaacgagaggaaggctagtgaagacagattggagtcaagcaacattcactgcttctttcaggaacttcanagccaatggttgcgtttggtccaatggggtttcttcatgcaactccacctcctcttctgaaaaagcttggcta

SEQ ID NO: 11258 - DNA, 390 bp, Glycine max
cagttaaaaccaattaaagcgaagcgtaagttgtaagagagtgtcaccataacagaaatcagggatgaggatgtaatctgaaattctttattcataccattttcgttgggcttcagttttcatagagagagaaagagaggaagaggaaatgggagtgctgtccaatatgatcgatcgggaacaactgaagcccggtgatcacatttactcttggaggcaagcgtacatctatgcacaccacggaatatatgtcggtgatggaatggtgatccactttaccagaggagcaggtcaagaaattggaacaggaactgtgttggacaatctccttttcagttcatctccctctcattcttccgacactccgtgcccaagatgcggtgatcaaac

SEQ ID NO: 11259 - DNA, 387 bp, Glycine max
ctcgagccgcgtcccaagtatcgtttttccatatttgattactgcctcaactcaaccgtgtctgaagtcactttaatggcggatatggaaccaaagcctaaagactcgccttcagaaaaaaaagtgaaaactccaaacatttttgagcgagctaaggaggagattgaggcagtgtttcatcgcgacaaatcgccacaccatcacaaagaaactcatgggacaagtgatgacattgatgagggaacttcacctgatgaaatcaaagcgcctggtgtgtttgaacgggtgaaggaggagattgaagctgttgctgaggccattcatcccaagaaagaatctgaatctggcactcgtgatgtgtcgtcacaaagttatgtctaggatctg

SEQ ID NO: 11260 - DNA, 1019 bp, Glycine max
  unsure (1)..(1019): unsure at all n locations
acaaaaaataaaacaacacataataagcaagcaaaacacacacaaaaggaaataccatatattatacacaaaccaaaccatatatcttattctattttctccctctccaccactccccttctttctcctcctcctcaaccttaatcatggagaatattggagaagagtacaagcattactgggagaccaacatgttcctccaaacccaagaacttgacagttgggggttggatgaggccttatctgggtactacgattcgagttccccggacggcgctgcttcgtctgcggcatctaagaacattgtttccgagaggaatcggaggaagaaactcaatgaaaggctctttgcgcttagatcggtggtacctaacattagcaagatggacaaggcttcgattatcaaggatgctattgagtacatccagcacttgcacgagcaagagaagattatccaagctgagataatggaacttgaatctgggatgccaaggaagagtccaagttatgattttgagcaggagctgcttcctgtggttctcaggtccaagaagaagagaacagagcagctatatgattgtgttacttcaagacactccccaattgaagtccttgagctgagggttacacacatgggggagaaaattgttgtggtcagtttgacatgcagcaaaaggacagacacaatggtgaaactgtgtgaagtgttcgaatctttgaagctcaagatcatcactgctaacatcacttcgttttcagataggcttttgaagatagtcttcattgaggcaaatgaagatgagaaagatcatttgcagataaagatccagacagccattaaagctcttaatgaccctttaaaccccatgagcatttgaggaagaaaatatataaatttggggggttctcattttggggtcactagtatataaatagaaagtataggaactgtggctttcatangagtttctcgtatttggtttcgctancccccttttttcctcgcactcaatattccc

SEQ ID NO: 11261 - DNA, 431 bp, Glycine max
  unsure (1)..(431): unsure at all n locations
aagaggccctaactagctaactattttctttctttcctcttcgccgggaaaagatgggagtggctgtttatttggacaccattgtcgtccctttgagtcttttcatcacagtgggttaccatgcctatctttgccacaccatctagaacaaaccttcacgtacaacttatggaatcagtaagcagagaaggacagattggagtctcaacttaaatcagggtgatgtaattgcatagatcaattgtgcatgtaatatgtttatacatggaatttattctcagagtaattgtttggtttcatgttttcagatatgatttttcacgtgtcagaacagaacatgattttcagaaattaaaaataataattaactttcacatctcanacatatantaattttctatttccaacgagttttcaaacacacaatatca

SEQ ID NO: 11262 - DNA, 452 bp, Glycine max
cagctttccatggcattctctaatagaagagtccattataaaaagacatctcgtgttattcgttgttaccaaaccaaccccgcccgccctagctagctattttctttctttcctcttcgccgggaaaagatgggagtggctgtttatttggacaccattgtcgtccctttgagtcttttcatcacagtgggttaccatgcctatctttgccacaccatcaagaacaaaccttcacgtacaacttatggaatcagtaagcagagaaggacagattggagtctcaacttaaatcagggtgatgccagcaaagctatgttgacggtgcaaagcttgaggaacactcttatgtccacaatactcacagctactataaccattcttgttaacttgggtttggcagctttgaccaacaacacctacaatgctagccatctttttagcagtgggatttt

SEQ ID NO: 11263 - DNA, 1073 bp, Glycine max
ctcgagccgctcgagccgattcggctcgaggttctagatcgcgagcggacccttaatttttaccttcaacaaacagccacaatggccgtcacgaaaagcctctccatcttcctcttcatcgccataagctgcgtggccgtagctcaggcagcgaacttcaacatcacaaacaattgcacctacacggtgtgggccgctcgccgtgcccggcggcggctcaaggcttaaccctggcgaatcgtggaacatcagcgtgacgaacggcacaacaggaggacgcatctggggtcgaacaaactgcaccttcgacaacgcgggacgcgggaagtgcctcaccggcgactgcgagggtgttctggagtgcaacaaaacaggtacacccccgaacacggtcgttgatttcgcgttgaaccagtataacaacctcgacttctacgacatctccctcgtcgacggtttcaacgttcccctacagctgaccccgacctacaactgcagctccgtgaaatgcgccgccgacatcatcggagagtgccccactcagctccaggttcctggcggctgcaacaacccctgcacggttttcaatacgactcagtactgttgtagcaccggagctgctgggtgcggtcccacagattattccaagttcttcaaggagaggtgccctgatgcctacagttaccctatggacgatgcaaccagcatgttcacttgcatgggatccgattatagggttgtgttttgcccttaattaaatccaacatcatcactacttttttttttattttttatttttattttccttctctaatttcgtgattcctatttgtgttattgttgaatactttgatatgtgtattatttatcaccaaataaagacgttcttaattgggggctttgggcgcggatctctgcctgctgagatgtcccaaaataagtaataaacatttacataaattaattcacatgtcccaaaagagttcttgttattagagtcctagggagttgatttatgattcattacaaaaagttcgaataatgttcatttgttattatccaaaaaaaaaaaa

SEQ ID NO: 11264 - DNA, 353 bp, Glycine max
aatacgactcagtactgttgtagcaccggtgctgcgggttgcggtcccactgattattccaagttcttcaaggagaggtgtccagatgcctttagttaccctatggatgacgcaagcagcatgttcacttgcatgggaggatctgattataggcttgtgttttgcccttaattaattcatcatcaactgcttttaaatttcgtgattcctattcgtcttattgttgtatactttggtttgtgtgttattattttatcaccaaataaaacagttcttgggggctttgtgcgcgcatctctctggcgggatgtgctctctttctcctaaaataactaataaacttttacatcgtt

SEQ ID NO: 11265 - DNA, 560 bp, Glycine max
cccacgcgtccgcccacgcgtccgcccacgcgtccgattcattccttctttcatttcattagcaaaagtgatcaattaagtgttaattaaccatcgatcatgatgaggagcaagaagcagagccagaacaagtttgttcgaatcatggcatcaccaatcagagcactgggaaaagcacgtgacatgtacgtgcggagcataacgaactgcggccagcacgtgagctactacggcggcgaccccacagaaggcgcgggaaggttctcgaggagccacagcgtggccacgtcgacgaggtccgaggttgtcagcgaggattatgcggagcttctcagggccgcgtccgcgagaaccttggcgaatcgaatcgacatggatttggtcctcaaacaacaacaacaacaacatgcgaactcatcgaaaggtaataatttgcccaagtctagcagtgttgggatggcgaggattgaggaggataagccctatgactctgaaaagggtgtgacggattcgtatccgaggagtagaagctatgctgtggaggccaagagaagaccttc

SEQ ID NO: 11266 - DNA, 404 bp, Glycine max
ttattccaatcctgaatccttccttcatttcatcagtgaattatcaagtgtcaagtgttaactaaccgccatcgatcatgaggtgcaaaaagcagagccagaacaagttagttcgaatcatggcatcgccaatcagagcactgggaaaagcacgtgacatgtacgtgcggagcattacgaactgcggccagcacgtgagctactacggcggcggcgaccccacggaaggcgccggaaggttctcgaggagccacagcgtggccacctcgacaacaacgaggtacgatggttgtcagcgaggactacgcggagcttctcagagccgcgtccgcgagaaccttggcgaatcgaatcgaatggatttggttctcaaacagcaacagcatgcgaactctttgaaaggt

SEQ ID NO: 11267 - DNA, 870 bp, Glycine max
atcggtatgatcatcatcaaaagggatttgaagaagtttttgggcatggtttttccactaaattgagtagtgctggtcttgtttataagcattttggaaaggagattatagccaaagaacttgaggtagatgaggaacaccgagatgtgcatcacatatatttggctgtttacaagagcttcatggaggcaattgatgctatagacaatgggatcaatcagtatgatacagaccagcctccaagatatgtgaataatactcatttatcctcaagagtaggaaggctaaatttagattggacagatcctgatcagtcacctgagaaagaaaatgaggcctttcaacgtgcaatggctcttgctggcagtgagtttctggatagtgttcgatttcatgtcaattcatggttaccagcaaggtcaattgtaatggagaccctagaggctagacatactgttgatcctagtggagaaattctagttttgactaaattgtgtccttggaagcttcacttatttgagcttgagggagagttgaaaaatgacccttctgtcaaatatgttctgtatcaggatgaaagaagcaaacaatggcgagtgcaggcagttgcagtatctcctgacagttttcagagccgaaaggctctaccctcacagtggcgggggttaagggatgaagaattgtcgaaggagtctggcattcctggatgtgtttttgtgcatatcagcggatttattggtggaaaccaaaactttgacggtgccttggccatggcgaaggctgctttgacgatgtagacgaggatcatatgaaccaagggctatcactgattttgcgcactcattcacagtacactttactgattgcgtt

SEQ ID NO: 11268 - DNA, 694 bp, Glycine max
gaagacgacagaaggggataccagctcatgtgatacagtctgtcaaacatctatgtttctgcttttttgtgtggaaaactagttgttctgatcttcctaaaagttgaactggcttttcttcttttcctggagttgttgccaaccaaattattcctctcttcacttactactactttcttctttctttctccacctgaagtagttctccacaacttggaaggtgatcatctccaattttccatcatggctactgagacttctgcatctgatcatgcttctactactgatgagcattatgtgaagaagaaaagggacgagtccattgcacaaaagatggcttctttagcaaatgaagatgaagtcaaacatgacaagcctgaggatgaggatactccttcatcaaagacagaagaagatgaggttgctgcagttgagatcgaaaaatctgaagattctccggcattagaggcttctgctgaagatagtgtgaaacatgacaaggttgaggatgcacaaagtgcaacatcacccccaacagatcacaaggttgaacctgctattactatagaaaagactgaagattctgtgccatctgttgcagttgaagacaatgtaaaggaggagaaggaagtggttcctgactcacacagtatcagtgacattgaaccagttcataaggcaccattcacagaac

SEQ ID NO: 11269 - DNA, 362 bp, Glycine max
taaagacgacagaaggggacaacaattcaagcaaaaaaagcaacctctcttttcttcacaagctcaaatcaaatagtgagtagaacttcaaaaaaaaattaaacatgtctactacacatttttcccttctagccatttttctccttctttcactagattctcttggcacaaccatgggtggacgactcatccccccaagtgctccaagtacagttacaaggccactagtttcatcagaagttgaaaactacgtgaagccacagctgaatcacaagctgaaagccttacaaggaagagaagttaaggggtgcttgccaaaaggttcaaggcataactcggctcctagcagattcgtcaactac

SEQ ID NO: 11270 - DNA, 879 bp, Glycine max
aaccgagcattagttatattcccacgaacccagtccctgtttctctgtcttttttttctttatccatgcgcgttgtggaggacagacagaatgcaccaagtttagatctagcctgtgataccaatcgcatatatagagcaagctctataacactgcatagaacattgtacggatccgtgtccagaacagaatatactatataacatcgttgtggtgattgaatcatgtcgcggagaccggtgaatccgtctcggcgattcggagacagtggaggtggattgttttcatcttcgaaatcaaagtcgtcaccggttgtgtcggttgggctcataattgtgggatgcctgtttctcattgcgtatgtgtacaagggctcaggcgtttttggtagccgtttggagtctgtgagcagggttgaaggtgattatttgtgtgctggagaggtcctacgagcaattcccattttgcagaaagcatatggtgatagcttacataaagttttgcatgttggtcctgatacttgctatgtggtctctaaattttataaaggaggaggaaactgaagcctggggtatagaaccttatgatgtagaggatgctgacggtaattgcaaagcacttatcctcaaaggcattgtgcgtatggctgatatcaagtttcctcttccatacaggccaaaatctttctctctcgtaattgtttcggatgcccttgatttcttatctcccaaataccttaacaaaactcttccagatttggcaagggtatcagctgatggaatagtgatatttactggttttccagataatgcaaaggctaaggttgcagatgtttctaaaatgggcagagcggctaagatgaggagttcatcctggtgg

SEQ ID NO: 11271 - DNA, 423 bp, Glycine max
tttcctttcgatttcactattatttgagtggtttggagatgcccttgtattgtgttgggttcaacagttgcaaaaatttcaaggcataaaaagcaaaacattccttcttggtagctacaaggtcgatggacatgatgaagaatagcccttgtgatgtctcttcttcttcttacatgcttattgaggccagtggtgactctgaagctgattggaacccctttgctatgggtgaacatgcttatgaaattggcagagcagatgatgatgctcaatcttgcatctatgatgattctgagacttgtaatgctgctgatcaactcaatggatatgatgagtcctggaataatgatgatgatgctgaagacgagaagatcgatgatgttattcatcatggaacttcatattgtgatgatgatgagatgc

SEQ ID NO: 11272 - DNA, 627 bp, Glycine max
cattaatattaatatattatatatatttatgtctccgaaaactaagctttgagctttgagcagaggcagagcataaacgttgttgtgtgtttccttagaaaagagagaaagaaataatgagctccatgggtgagagccagcagcggagcttgtttgggagtacaaaggcatcgtctctgccagtgtcaacgtcgcgttcagactctgaaggaggccttcgcagacgtctttcttctctgtctctgaagatccaattagacagcccgaattcctcctcatggtcattttccagatccaagtccctctcatccatgggtgactatgcaaggacatggtgggactggagctgggcctggatcctctccaggaagctcatctttgccacagatctcgaaatgaacgaccagaaaactaagctccttggctcccacaacaggggcacttggagccatgttttctataagctgcgctctgagatcagaaggttcatctctacttctgatcacgccactcttcccaaaacctaccacaggtccacacctcaagtcttctcataattccctccacatttctcaatgcttccttcaaataatttacctctttatttcagatccaccgtggaaatca

SEQ ID NO: 11273 - DNA, 357 bp, Glycine max
ctgtcttgtgggcttcttctcattcgaagttttgtgtgcagagatatggcaaaaccgcgctttttgatttcgacgattcctctgtgtctgtcagtacaactcccgtgaagttagaattggagtgaatgctaagttgacctcactaacagggttgagtggatgtgcaatgtcataagggtagtctcaaggctctgtttggcttccagtttgaaatgcttacacatcatggctgtatctaatctttttgtttttatacaaacatcaatgtccattgaagcacaaccatttataatcatttctccacctgccaaatagtccacattttagaaattgtgcttgtccttttactagatgatg

SEQ ID NO: 11274 - DNA, 374 bp, Glycine max
tttcttctcattcgaagttttctgtgcagagatatggcaaaaccgcgctttttgatttcgacgattcctctgtgtctgtcagtacaactcccgtgaagttagaattggagtgaatgctaagttgacctcactaacaggtttaggttgcgctcattattggttgctattataactaacaattgctctgaccttggaaattggaatgaaataaccttcgtttttacttaaaacatctttcctcactctcaaaagcagggttgagtggatgtgcaatgtcataagggtagtctcaaggctctgtttggcttccagtttgaaatgcttacacatcatggctgtatctagtctttttgtttttatacaaacatcaatgt

SEQ ID NO: 11275 - DNA, 946 bp, Glycine max
cccacgcgtccgcccacgcgtccgcccacgcgtccgattcacttcaaagttcaattctttctctgtcgtcgctctttcttcaacttcaagcttaattcctcatgtctttcagaggcctcagccggccaaatgccacatcaggcatgggtgttgctgatcacagcaaaaacaccttcatggaattgaagcagaagaaggttcatcgttatgtgatctttaaggtcgatgagaagaaaagggaggttgtggttgagaagactggtggcccggctgagagctatgacgattttgctgcatctttgccggagaatgattgcagatatgctgtctttgactatgatttcgtcacttctgagaactgtcaaaagagcaaaatcttcttcattgcatggtccccttcaacatctcggatccgtgccaagatgctctatgccactactaaagacaggtttagacgtgagctagatggtgtccattatgaaattcaggctactgaccccacagaaatggatcttgaagtgctgagagaccgtgcacattgaaatgtttaagcactgaaattcattttcttatcagaatctactaggttttaaagttttacttttaatgaattacctcttcatgctttgtcatcaatagaacccatcttgccacaggaatataactcgtatccaataatatgaatctgaaggctgatgggtttaaagcttttggcagttattgttgtaaatcccagtgtgctggacttgtattgtgtatgagcgtgactctatggatcctgatagatttcttggatgaaaaagttccttgttctaactttggcaagtatctatagaaaatttcaaaacttgcatttatcaatatttaatttgcttcttgaaaaaaaaaaaagatataaaagaacaaaaattacatacccatacattcaacatcataactattatat

SEQ ID NO: 11276 - DNA, 585 bp, Glycine max
  unsure (1)..(585): unsure at all n locations
cggnccggaattcccgggtcgacccaagccttcctaccggttgcaaaaggacaacagagggggactggaatccttttttttttttccctctcgctctttcttcaattccaggctttattctcatgtctttcaaaagcctcaaccggcccaatgccccatcaggcatgggtgttgctgatcacagcaagaacaccttcatggaattgaagcagaagaaggttcaccgttatctgatctttaaggtcgatgagaagaaaagggaggttgtggttgagaagactggtggcccggctgagagctatgacgatttcgctgcatctttgccggagaatgattgcagatatgctgtctttgactatgatttcgtcacttctgagaactgtcaaaagagcaaaatcttcttcattgcatggttagttagtttctctcttttttatatgtaaaagaaaaaggatctatatcttggtctacataattaaaagcattgttgcaccaaccagcaagatgtttgtgaggcatgatacatgataggcattttcttgtgcaaaaagcaaaccctgtggcatatatgatcatatcatatgt

SEQ ID NO: 11277 - DNA, 886 bp, Glycine max
gagatagattccgccgaaagaaatagtcttgctaactacaaagacagtgttaaccagagactgaaggagactgaaggaaagagaagcatgagggtgttttctcggttcaaatttctgtcaagagcagtgcacgaggaacaagagggtgagcatgatggggagagaaacaggtaccctttaacagaagcaagtttgtgcacgtccctaacgctaacagtttggagaaaatcccttgtgattagttgtaaaggattcactgtgatagattcatatggaaaccttgtgtatcgggtggacaattacatcatgcaccctaacgaactcattcttatggacgcttcaggaaactctcttctcaccatgcgccgctccaggaagctagggttagtagatagatggtttgtgtatgaaggggaaatggggaagcagagtacgaggagtaagtcggttaagtcaaaagagagaccagtttgttgtgtacggaagcgtgtgaatattttagacggcaaagccaacaaggttcaggcctacgtgtaccgcgctgcctcggattcagataaacgacatccggcgtttacagttgaaggttcctatgcacataggacatgtaaagtgttggatgagtacaagaaagccgtagctgaaatcaagagaaaggaggccaataccaaagacgtctctttcgggatagagatttttcagttagttgttcaccctgggtttgatactagctttgctatggcactagttttactactggatcaaatgttttcataatactcttcatatagagtagtaacacatttctagtttctatatcacaatgacactgtaaatcagctggagagatctatataaaaagaataagaaaacaattgaaacagtc

SEQ ID NO: 11278 - DNA, 398 bp, Glycine max
gatcgtgtgagatcattcaaactacaaaggcacatatctatagcatcatatctatagcatcctagctatatctgggtgaagaagcaaaatgaaaatgaggcttgtggtaattgcactaacaatattgatgcttgcaagttcttctatggctatccatgtgaagactttggtggccaacaacatgctacaagagaaggagggagaacacagtaatggtaataataatgagcatcaaatccctctgaaccgctatagtgatatccatgaaattcctggaacgggtggacctggcgaacgtacagtcagtggccacatggaatataccataccagctagcccgaataggaatggttaattagtagacgaagggtatatatatataagtgtgtgtatatgtg

SEQ ID NO: 11279 - DNA, 1734 bp, Glycine max
cctcgagccgattccggttcattaaactcgttttttgctagaagcaggaagagaagagaaacaaacaaacaacaaaataatcaattgagccacttaccatcagatttagatctcccaacagagagtttctcaaaattgccaagtacccttttcaggatcaaggaagagaatcaagaaccaacaaaaggtgttgttcattgttgtagttgtttgtaactgtagcaacatgaagatggttagaaagttggttgtggtgaggcttgtgttggccatatctgtgttgagctctctccttctgacaacctcggcacagacagcatgcaagggccaggccttcaccgaaaacaaggttttcaccacatgccgtgatcttcctcacctatcctcgtacctccactggacctttgaccaggccacagggaagttggacatagccttcagacacacaggaatctctggaacagacaagtgggttgcatgggctatcaatcccagcaacaacctcaattcagctatgacgggagcacaagctctggtggctatcataccatctagcggtgccccaaatgcatatacttcttccattgcaaatcccggaaccacactggcagagggagccatctcttataatcactcaggattgacggctacccatcagagcactgaggtcaccatctatgctaccctcactcttcccagtggtaccaccactttggtccacctttggaacgatggtcctgtgtcttctggtacccctgcaatgcattctatgacttcttctaacacccaatccaaggaaagcttggatcttctttctggctccagtcaagcaggaagtgggaattcacttaggagaagaagaaatgtccatggagtcctgaatgcactgagctgggggattttgatgcccgttggtgccataatagcaaggtatttgaaggtgttcaaatctgcagaccctgcttggttttaccttcatgttacatgccaaacctctgcctacatagttggtgttgctgggtggggaactggtctcaaactcggaagtgactcggttggtattaagtataacacccatagagcactcgggatcaccctcttctgccttggaacccttcaggtttttgctctgcttttgaggcccaacaaagaccacaaaatcagaatctactggaacatttaccactacgccgttggatactccaccataatcatcagcatcatcaacgtctttaaagggtttgatgcattggagacttctgtaggggatcgctacaatgactggaagcatgcttacattggcatcattgcagctttgggtggcattgctgtgcttttggaggcctacacatggattgttgtgttgaagaggaggaactcagagaacaagacagcacatggtgtcaatggaacaaatgggtatggttctagaggacagcaggtgtaagggaaagtggcctcatagatactggatttttggcttctgaattctacttatatgagtttggttgttaaaacttaaacactttctgtttgtatatttgttcacttatatggagtgtatttaggacactcccagtagcttagagtctggttttgatataaaattctttcataggatagacagtgagttcctgggacatggttttcagaggataccttgtatcgatttttcttcatatttgtatttattgtttacttttgtcttactctttctccataccttccagtttc

SEQ ID NO: 11280 - DNA, 713 bp, Glycine max
cggctacccatcagaacactgaggtcaccatctatgctaccctcactcttcccagtggtaccaccactttggtccacctttggaacgatggtcctgtgtcttctggtacccctgcaatgcatgctatgacttcttctaacacccaatccaaggaaagcttggatctccttccggcctccagccaagcaggaagtgggaattcacttaggagaagaagaaatgtaagtacctgttattctcctgcctttttttttttcgccaaatgtggcgtttgttagacaggggattgacccccacccaccaacctttcccttccccttaaccatcccatccaaccttatacttccctgcatggtttccttgggcatcaaaaccataacggatgttttggaaattcgttttcttcttttttagggagaacaattgaagagtgtgtgttgatttgttcaggtccatggagtcctgaatgcactgagctgggggattttgatgcccgttggtgccataatagcaaggtatttgaaggtgttcaaatctgcagaccctgcttgggtctaccttcatgttacatgccaaacctctgcctacttggaatccagagttcgatccgtgaagtagaatttgactgcttaaaaaatcgagtggtattaagcataacacccatagagcactcgggatcaccctcttctgccttggaacccttcaggtttttg

SEQ ID NO: 11281 - DNA, 488 bp, Glycine max
cccacgcgtccgcccacgcgtccgcccacgcgtccgaagacgacagaagggggcagcaaattctgtgaagatgaagttcacggtgtcaaatctatcaagctctatgttcctcctcgtgttattcatagctcttgtctctcatacacacggaagcaagatcgaccaccatagaagcaacaaacatgttgccctcttcatttttggcgattctttcttagatgctggcaataacaactacatcaacgcaacaacccttggccaagcaaatttctggccctatggggaaacatacttcaagttcccaacggggagattctctgatggacggttgatatcagatttcatagctgaatacgcaaaccttccaattggttccaccatatttacaacctggcaatagcaattactacggtggagtgaattttgcatctggtggagctggtgctcttgttgaaacttttcaagggtcggtaatacccttcaaaaca

SEQ ID NO: 11282 - DNA, 527 bp, Glycine max
cggctcgaggtgaagaaacacattgcgccaccaaccaccaatccaatcttctccaacgcatcatttcacactccaatcatctaagttgttgatcccataacagaacaaaagaaaaacaccagttaataaatcccaaaacccaaaaccatttattttgccttgttccatttcgtctggtccaaaaaaatcaggaacaacaatgggtttgttggatctggagaagcacttcgcgttctacggcgcgtaccacagcaaccccatgaacgtggcgatccacacgctcttcgtgtggcctatcctcttcacgggccaaatgatcctatacttcaccccacccctcttgaccaccgtagggttccttcccacggtgttggtcctcaactggggcttcttctccaccctcttctacgccctcttctacgtcgccttggattacaaggccggctccctcgccgccttcctcaccttcttctgctggctcacttccagcttcatcgctaattccctcgcctggacgctcagctgga

SEQ ID NO: 11283 - DNA, 458 bp, Glycine max
gggggacacaatttaccgctgtatgtattctgcagacaagttctcacctgatcaccttcttgactgtctcaaaataagttctgaacatgaagcacttgagctggcagataaggttgagtcttcaatgttcacttggaggcgaaaagcttgtctgagccactcaaaaacatcttggaacaaagttaaggatctcatggctgacactgaccgaagtgacaaaaactacatcttagctgagagagctgagactttgttgttttgcttgaagcaacgatatcccgaactttcacaaacatcattggacacatgcaaaattcaatacaaccaggatgcaggaaaagcgatattagaaagctactcaagagtattagaaggcttagcattcaacattgtagcttggattgaagatgttcttcttgctgataaatcaatgacgaaccaaaattataggaatcgcg

SEQ ID NO: 11284 - DNA, 780 bp, Glycine max
caatgatgcagctgaactctcacctgatgatgcagatgtccacatagttctaggggtcatgtacaacttatccagagaatatgacaaagccattgcatcttttgaaagagcactgaaacttaagccacaggattactctctatggaacaagctgggtgcaacacaagcaaacagtgttcaaagtgctgatgcaataatggcttatcaacaggcgctggatttaaagcctaattatgtccgtgcttgggcaaatatgggcatcagttatgcaaaccagggtatgtatgacgagtccgttcgttattatgttcgagcacttgccatgaatccaaaagcagagaatgcatggcaatatttgagaatttcgttgagctgtgcttctaggaatgacatgttggaagcttgtgatagtcgtaatttggaccttctccagaaggagtttccactacagtaaggcttgcagtagatgcctgcttctatagaaatttcttggtgaaatgaaaggctgatcaagtgactaagcctgcaggtgaatacgatgcattattctagcaatctttgaacatatggtgtatatcatgaaagtacatcagcctgttacactgaatttaggcagttacagactccatttcttaatgttacaaaagctatttatcataaaacagctgcagtactaaagttaaggattgtggcttccattataaagttgagtttattgtgtatgtacatatatatatacaggtatacaagattaatcgcaaatcatgaatctaatttgtt

SEQ ID NO: 11285 - DNA, 477 bp, Glycine max
gcgagtcattcgatattatgttcgagcacttgccatgaatccaaaagcagagaatgcatggcaatatttgagaatttcattgagctgtgcttctaggaatgacatgttggaagcttgtgatagtcgtaatttggaccttctccagaaggagtttccactacagtaagggagggtcagttccactgtggaggtggttgcttgaacatgaatcctaattttccttaaaacttttggatgagtaaatggcacattttctgccattaaagctcgcagtagatgcctgcttctatagaaatttcttggtgaaatgaaaggctgatcaagtgactaagcctgcaggtgaatacgatgcattattctagcaatctttgaacatatggtgtatatcatgaaagtacatcaacctgttacactgaatttaggcacagttacagactccatttcttaatgttacaaaagctatttatcataaaacag

SEQ ID NO: 11286 - DNA, 257 bp, Glycine max
aatgaatccaaaagcagagaatgcatggcaatatttgagaatttcattgagctgtgcttctaggaatgacatgttggaagcttgtgatagtcgtaatttggaccttctccagaaggagtttccactacagtaagggcgcgtttgagtgaacagcttaatcaagcgcttagtgaataagtacttatcatataagcactattgtataagattttttttttctaataattgaagaggatatagggctaacttcttttcat

SEQ ID NO: 11287 - DNA, 440 bp, Glycine max
tgagctcattgtacacttcttccagctagatgaagcaggaaaaggaactataagtgtaagggatatacaaagggcagctacagctcatgattttttatggacagacaaagagttagttgatatgattcgctacttcgatagtgatggagatggaaagctaagccttgatgatttccagaagattgttgttcgttgcaacttgattaaagggtcttgaaaatcttgatagaatcatggttagacagagatgatagcacattggaagatattacaaggactgttatatatatatatatatatatttcatggagtgacacagatttagtattccttgtatcccattatcactatatataacttatattgtactgtgctgcttttccttttctgtatacttcgtaactttcatgagctatgtgttcatttataacgtaaaatgt

SEQ ID NO: 11288 - DNA, 492 bp, Glycine max
ctttttgtttccctataatcttaaaccctccgaaaaaactctacccaacaacgttaattgaccaaaacccatctttgttgttcttcaaaatttccatatgttgaaccattttatttgtggcagtttccatcaccaagaagaagatgtaccatgttcaagccccaagaagtactccaggagaaaagaaagtaggaatattaacaaaaacccatactccaatcgaggcttagacaagttttctgcacttttggctgatcttgacgagagaaggcaaaaggtttactcacagatgagtcctcaggacatatcttttgttcggtttgcgtattccagcaatgatgatttcgttcccatagtggtcaaagtgaaaaaaaataataaggatcagaagaagcacaagagtgaagaactcaaagcaagacacataacatctttctcggagcaattggagaaatcttctgaagaaacaccttgaaagaaaggaactaaaac

SEQ ID NO: 11289 - DNA, 867 bp, Glycine max
ttgtgatcttagtgagtgagtgaggaagcattgagagttggtggaaattaaggtcaagaatcaaactgaccaaggagtattcaggatatcatggacgagaatggtagctcaagcaatgcacccaagaacaagagaaaccttcctgtctccgttttcttcaaagatgcaagacatgttttcaagatggattccattgctaaggagattcttgggattgcattcccatctgcactggctgttgctgctgaccccattgcttctcttatagacacagcattcataggccatttggggcccgtggagcttgctgctgcaggagtgtccattgctttgttcaaccaagcttcaaggattaccatcttccctttggttagcatcacaacttccttcgtggctgaggaaagtaccattgaaaaaatcaatacagaaaagaagttaactgataaggccaagtccaaggaacaagtaatgctcgatgatcattcccttcaagacatagagaaagttgcatccaaagagaacaatgagactgagaatgtggaaatgaatgattgcaatacaagtatatgcaagtctacctctgatactagtagtagtagcagtaacaagagtgtgccaaaagatggaaggaagaagcgacacgttgcttcagcatccacagcattactttttggcacaatccttggtctccttcaagcaacaacccttatatttgctgcaaaacctctattagctgcaatgggtctaaaacctgattctcctatgctaaaccctgctattaaatacttgagattgagatcattaggtgctccagcagtgcttttgtccttggccatgcaaggaatctttcgaggattcaaggacact

SEQ ID NO: 11290 - DNA, 270 bp, Glycine max
tgcacgatgatcattcgcttcaagacatagagaaaggtgcatccaaagagaaaaatgagactccaacagaatcttctgctgtaaggggtaacacaacttgtgtacctgagaatgtggaaatggatgattgcacatacaagtatatgcaagtctaccactgaaactagtagtagtagcaacaagagtgtttcaaaagctggaaggaagagcgacacattgcttcagcatcaacagcattactttttggcacaatccttggtctccttcaag

SEQ ID NO: 11291 - DNA, 260 bp, Glycine max
caagcttatttttttattttgatggtacaaaacattgaatgttgttatcaaactcaaaaattggtactcttcatgattgagttgtcattttactatttaggatatcatggacgagaatggaagctcaagcaatgcaccaaagaacaagagaaaccttcctgtctccgttttcttcaaagatgcaagacatgttttcaagatggattccattgctaaggagatacttgggattgcatccccatctgcagtggctgttgctg

SEQ ID NO: 11292 - DNA, 739 bp, Glycine max
cacctcccctctcctcgcgctgctcccctctccgcgtgctgctctcctctctgcgcgctcctccgttcgggcgaagacgaatgatttatagcatagacttgaattacagaaggaacacaagagatcaacatccatggattcacagggctcagacaacttcactgcggagacttcagaatgtatgaagagagaattgtgaacgttttggagcttgcaggacgagtcatggatgagcttgcaagccctgttggtcctaggaaggatgtggtccataaccactgccttgagttcatgcaattaatcaaggacattcaggttgcattgcgtgatgaaatcaaaagtgcttgtgaatatcgtccatttgagaaatgtgattatggttcaagaatcgccaatgagatttgtcacatgaaagtggaatttattatgtcccagttagatgcaatgaaacaaactatagatgagtatcatgcagcagtttgaaaatgtagcttagttccctgtagaagcctgggttaccacccggtaattgacttatttgggattgcttattactagttagcgtgttgttttggatggggtaacaattacccttgtagcgataggaaatcagtgtatttatttggatgattatatagtagaatatccaatgagtgtggattattttgttccccctatcttattacgggtaacacatttggatgattatatagaagaataactcagtttcttgctaagg

SEQ ID NO: 11293 - DNA, 445 bp, Glycine max
ctcgagccgaatcggctcgagcgaggcggaccttcgggcgttgctcgctctcgacaccagcactctctctgtgttctcattggttctggctctcaagctctctctatctctctctctctctgagaaggaacacaaggaatcaacaaccatggattcacagggccagacaacttcattgcagagacttcagaatgtagaaaagagaattgtgaaggttttggagcttgcaggaggagtcatggatgagcttgcaagccctgttggtcctaggaaggatgtggtccaaaaccactgccttgagttcatgcaattaatcaaggacattcaggttgcattgcgggatgaaatcaaaagtgcttgtgaatatcgtccatttgagaaatgtgactatggttcaagaatcgccaatgagatttgtcacaagaaagtggaatttattatgtca

SEQ ID NO: 11294 - DNA, 526 bp, Glycine max
ggatcgaaaggcgaggcggaccttcgggcgttgctcgctctcgacaccagcactctctctgtgagaaggaacacaaggaatcaacaaccatggattcacagggccagacaacttcattgcagagacttcagaatgtagaaaagagaattgtgaaggttttggagcttgcaggaggagtcatggatgagcttgcaagccctgttggtcctaggaaggatgtggtccaaaaccactgccttgagttcatgcaattaatcaaggtccttgtctcccagaaatcaatttattcttttgtctattcatgtatataaaagaaggtggcattatgggtgcaagtcccaaaaagagcacacactaccaaaactgcactagtcttatttaagtggtctcatttaaataattaacgttatataaaattaacagcaggaattatgtaagaatattttatttactttacattaatcgtttgttaggtactggttcagaaattagcaaaataatgaaagaaaagataggattttattga

SEQ ID NO: 11295 - DNA, 793 bp, Glycine max
cccagttaagaagagtctttggttgaaggaagaagggtaaactaggagtaggagggaagaagggttgaaggaagaaaaaaagaaaaacacagaaatggagggtgggaacaacagcagcagtaacaacaaccctgatgagttggcggtggggtgcttgctttcgatcaggacaacgttgggcgacgaattcgaaggccaggtcgtcaccttcgatcgcccctccaacattctcgtactccaggagccttccaaacctagccctcgtcgaaatcttaggttgctcaaagccaattacatcaaagacttcacctttctcggccatgcccaagaccctcttgatcccaacacctgcttccttgacctcaccgctctccaacaaagggaagatgttgctgttagacaagcggaggctgatgctgagaggattggggttggtgttaccagcgaggcacagagcatctttgatgctttgtccaaaacgcttccagtccgctgggacaagacagtcatagttgtgatgaatgaggtgcgtgtcagcagtccttatcactctgaatctgttgttggaggtactcctgctgcaaatgaccgggtgaagaaagtgcttgactttgagaggaagaggttgcaacttcgcagttctggtggtcaataaagattcgtattcacatccttttatggtcaggaaaagcactttcaaggaggaaacatgatgggtattaacaaaatcctatacaagagggttttccaaggcatattcctgacttcagatatcttttgattatctgttgtc

SEQ ID NO: 11296 - DNA, 265 bp, Glycine max
gttaagaagagtctttggtggagggaagaagggttgaagcaccttgcactgcaaaagaaaaaaacaagaagaaaaacacagcaatggagggtgggaacaacagcagcatcaacagcaaccctgaggagttggcggtggggtgcttgctttcgatcaggacaacgttgggcgacgaattcgaaggccaggtcgtgaccttcgatcgcccctccaacatcctcgtactccaggagccttccaaacctagccctcgtcgaaaccttag

SEQ ID NO: 11297 - DNA, 3296 bp, Glycine max
gcgcccacgcgtccgtccatttcaaccgacacgccactacccttctctcacaaatctatttccattccattccctcagagagagcaagatcacccttctatagagagaaaacacacacacacacacacaaaacaaaactcttaaagagggtgaagattttttggaacagaataagagtatggcccttacaaaacaaatcttgggttcttcattgctagagaggtccatgtttgttccttcttcttccccttcatcacttctcaaccaaactcggttcttagttcctttggagaacaagagagttgtgagggtgaagagagctgcaaagtttcctgtggcagctataagtgaggatttgatgaagggttcttcttcttctccttcatcatcatcatcttcatcctcttcttcttcttcttcttctgtgtccacagaaaaaccagtgaaattcaaggttagagctgtgatcacagtgaggaacaagatcaaagaggatttcaaagagaccatcgtgaagcatattgatgctcttactgacaggattggaaggaatgttgtccttgaacttgttagcactgagattgatccaaagaccaaatctgcaaagaaaagtaatgaagcagtgctgaaggattggtcaaagaagtccaatcttaaggcagagagagttaattacacggctgaattcataattgactctagttttggggagccaggagctattactgtgacaaacaaacaccagaaagagttcttcttggatagcataaccattgaaggatttgcaagtggaccagttcatttcccctgcaattcatgggtacaatcaagaaaagatcttcctggaaagaggattttcttttccaataagccatatttacccggggatacacctgctgggcttagattattgagggagaaagagctgagaaatctcagaggtgatggcaaaggagttagaaacttatctgacagaatatatgactatgatatatacaatgatttgggaaatccagataaaggaattgaacttgccaggccaaatcttggaggatcagatatgtatccatacccaagacggtgtcgtactggccgcgaaccaagtgatacagatatgtacgcagagagtcgtgtggagaagccattgcctatgtatgtgccaagagatgaacgttttgaggagtctaagcagaacacattcactgtgaagaggctcaaggcagtgctgcataacttgatcccaggtcttaaggctagcctttcttctagcaaccaagacttcaatgaattctcagatgttgatggcctttacagtgaagggttgctcataaagttggggtgggggttgcaagatgacgtgttgaagaaaattccatttgtcagcaaaatccaagagtccagccagggtcttcttaagtatgacactcctaagatcatttccaaggacaaatttgcgtggttgcgagatgacgaatttgcccgccaagcaatagcaggagttaaccctgttaacattgagaagcttcaagttttcccaccagttagcaaactagacccagaaatttatggcccccaagagtctgctcttaaagaagaacatattttgaatcaactcaatggcatgactgtccaagaggcaataaacgaaaataagctgtttatgattgattatcatgatatatatctacctttcttagaagggatcaatgcccttgatggtaggaaatcatatgccacacgcaccatctttttcttgacaccacgtggcactctcaagcctgtggctatagaacttagcctccctcatgctggacctaattcccggtcaaagcgcgtggttacacctcctgttgatgctactactaattggatgtggcagcttgccaaggcccatgtttgctccaatgatgctggggtgcaccaacttgttaaccattggttacgtacacatgccaacttggaaccatttatattggcggctcataggcaattaagtgctatgcatccaattttcaagttgttggacccccacatgaggtacaccttggagatcaatgccttggctagacagagtttgatcaatgctgatggaatcattgaaaattgctttactcctggtcgctatgccatggagattagttctgctgcctacaagaacttttggcgctttgacatggatagcctccctgcagatctcatccgcaggggaatggccgtacctgacccaacacagccacatggtctaaagctcatattggaagactacccttatgcagctgatggaatactaatctggtctgcaatagaagactgggttcgaacctatgtgaaccattactaccctcactcaagccttatatgcaatgacaaagagttacaatcttggtactctgagtcaatcaatgtaggccatgctgatctcaggcatgaaagttggtggccaacattgaacaatagtgaggatcttgtgtccattctttccacattgatttggaatgcatctgcacaacatgctgctctcaactttggccagtacccttatggtggctatgtgcctaatcgtccaccactgatgagaaggttaataccagaagagggtgatccagaatatgcaagtttccatgctgaccctcagaagtattttctgaatgcattgcctagcttgctgcaagccacaaagttcatggctgtggttgacacactctccactcactcacctgatgaggagtacttgggggagaggcaacaaccttcaatttggtctggagacgccgagatcgtcgaggcgttctacgatttctccgccaaggttcgacagatagagaaggtcattgatagcaggaaccttgatcggactctaaggaaccgttgtggtgcaggggtgttgccatatgagttgcttgctcctagctctgaacctggcgttacatgcagaggggtgcccaatagtgtgtccacataactatactaaactaataaataagggagtcactcccacattttgatacgcattaatatatatgtaatggttggcttactatttactaccatggacagtgactctcagtggatgcccattttgtacctagatttaataagttgttatagtatatattggtaacctagggctgtatagactgtatatgaaaatgagtttggtggggttggaggatgtgtgactgtttataaagttattatcacaatttatagttttcttttgcactattatgtagttctttttttcatcgttgcaaatatttgcatattttagtatgaaataaagttatcaattagat

SEQ ID NO: 11298 - DNA, 438 bp, Glycine max
cccacgcgttcgcccacgcgtccggctaattccatttcaaccgacacgccactacccttccttctgatctctcaaatctatttccattccattccttcggtgagagcaaaatcacccttcttgaaacagattttagcaccaaacaaaaacactctatagagggtgaagattttttagaacagaataagaattaatatggcccttacaaaacaaataatgggttcttcattgctagagaggtccatgtttgttccttcttcttcttccccttcatcattttttaactcaactcggttcttagttcctttggagaacaagagagttgtgaggatgaagagagctgcaaagtttcctgtggcagctatcagtgaggatttgacgaagggttcttcttcttctccttcatcatcttcatcctcttcttctgtgtctacagaa

SEQ ID NO: 11299 - DNA, 443 bp, Glycine max
gccactttatttgtctctctctttcccttccaacctcatcccattccgttttctctgcagtactcaattgatccctttgtttttctattcgttctgagagctttgtgtgtatggccggcatagacttgggttcagcatcacattttgttcatcatcgccttcaacgccctgaccttgaagacgatgagaaccaacaagaccaagacaacaaccttaacgatcacgaagggcttgacctaattacaccaaatccaggtcctggtgatgttgttggtcgcaggccaagaggaagacccccaggttcaaagaacaagccaaaaccaccagttatcatcacaagagagagtgcaaacacccttagggctcacatccttgaagttagtactggttgtgacgtctttgaatcggtcgctacctatgcaaggaagcggcaaagagggata

SEQ ID NO: 11300 - DNA, 443 bp, Glycine max
gaatgttgagataaaaatgatgacgttcggcccagaacatcaaaataaggcagtgtttttagtggtgaatgcttgctccagcaaggattttacaaataatgtagttggagtgtgctttgttggtcaggatgttactggtcaaaaaattgtaatggacaaattcatcaacatacaaggcgactacaaggctattgtacataatccaaatcctttgatccctcccatttttgcatcggatgataacacgtgttgcttagagtggaacactgcaatggaaaagcttactggttggagccgcgcggatgtcattggaaaaatgttggtgggagaggttttcggcagttgctgtcagttgaagggttcagattcaataacaaagttcatgattgtcttacacaatgcgcttggtggacatgatacagatagattccctttttcatttc

SEQ ID NO: 11301 - DNA, 2249 bp, Glycine max
tgtgaacagggtctgtggttctgatagggccacagctctacattgtgcggttgccgggggctctgaatcctcacttgagattgtcaagctcttgcttgatgctggggctgatgccgagtgccttgatgccagtggcaacaagccggtcaatctgattgctcctgcctttgattctttgtcaaaatcgcgaaggaaggccatggagatgttcctcacgggtggtggcgaaagagacgatgaactcatgagccaggagattcaagagagaaaagaagcaattagtgataataagaaagaataccctgttgatatatcactgccagacataaacaacggtgtatatggaacagatgattttaggatgtacaacttcaaggtgaagccttgctcaagggcttactcccatgactggaccgagtgtccattcgttcacccaggggagaacgctaggaggagagacccacggaaatacccttacagctgtgttccttgcccagagttccgcaaagggacctgccagaagggtgattcctgcgagtatgctcatggtgtttttgagtcctggctacatcccgcccaataccggacaaggctttgcaaggatgagacgggctgtgctagaaaagtatgcttctttgctcacaaacctgaagagctacgccctgtgtatgcttccactgggtcggctatgccatcaccaaaatcctattcagctagtggacttgacatgacagcgatgagtccattggctcttagttccacatctttgccgatgccaactgtttcaaccccacccatgtctcccttggcagcagcttcatctcccaagagtggaagcttgtggcagaacaaaattaaccttactcctccatcgttgcagcttcctggtagccgactgaaggctgctctgagtgccagggatctggagatggagatggaactgctcggcctagaaagccctgcccgccaccaccaccaccaccaacaacaacaacaacaacaactgattgaagagattgctaggatctcttccccttctttccggagcaaggaattcaataggattggtgatttgaatcctactaaccttgatgacctgttattagcatctgccgacccttctgtattatctcaactacaaagtgggcttcagatgcggcaaagcatgaacaaccacctccgtgcgagttatccatccaacgtcccttcctctcctgtgaggaagccctcatcttttgggtttgactcatcagctgctgtggcaactgcaatgatgaattccaggtccgccgcgtttgcaaagcgaagccaaagtttcatcgatcgtggagctgctgcaacccaccaccatcttggggggatgtcttccccttccaacccttcctgcagggtgtcctctaccctttcaggttggagttcccctaccgggaaactggattggggcgtaaatggagatgagctgaacaagctgaggaaatctgcttcctttggtttcagaaacagtggggtaactgcatcatcatcatcatcccccatagcacagccagaatttggcaccgagcaggatgtctcgtgggttcattcattggttaaagatgttccctccgagaggtctgagaagcaacaatatgatcatctcagcaaagagatgcttctttcaccatgggtagaagcaacaatatgatcttcttcagtaaagagatgctgctttcaccatgggtggagcagctgtatatagagcagaagcaaatggtagcatgagcagcaagggctgctgccatgacaatgcttcttggttattctgacatagtttgtttatttatttatttaattattttattcattttgaactgcttctactatccacaacattacacaatattatagttagggataggatgagatatgatattgcaaagaacaaagttcaggttaatccagagatttgaacggagagttccaacttctaggtcagggaagacttggagaaacgttgaacgaagaaggatgctgaattttattttattttattgtataatagtataatttattccccccttttctctacgggtggatggatgtattttctctagcaagtggacctcaaagtatttgccattgattaagcagcacaattcttttttatataaaaattattatgccattttatcaatgcttatccatcattattagaagtactttcaaggaaatttctcgtgtgactgcttattggctattctttcttattt

SEQ ID NO: 11302 - DNA, 1156 bp, Glycine max
accaagccttcattacggttgcaaaaaaacaacagaaggggttcgaaaagattgccaggatctcttccccatctttccggagcaaggaattcaataggattgttgatttgaatcctactaaccttgatgacctgttagcatctgctgacccttctgtattttctcaactacatggactttctgtgcaaccttcaacacccacacaaagtgggcttcagatgcgccaaaacatgaaccacctccgtgcgagttatccatccaacatcccttcctctcctgtgaggaagccctcagcttttgggtttgactcatcagctgctgtggcaactgcagtgatgaattctaggtctgctgccttcgcaaagcgaagccaaagtttcattgatcgtggagctgcaacccaccatcttgggctgtcttcagcttccaactcttcttgcagggtatcctctaccctttcagattggagttcccctaccgggaaactggattggggtgtaaacggagacaagctgaacaagctgaggaaatctacttcctttggattcagaaacagtggggtaactgcatcccccatagcacagcctgaatttggtgctgagccggatgtctcatgggttcattcattggttaaagatgttccctccgagaggtctgagatatttggtgctgagaagcaacaatatgatctcagtaaagagatgcttccaccatggatggagcagctgtatatagagcaggagcagatggtagcatgagctagggctgccatggcaatgcttcttggttattctgacaaagtttatttatttatttaattattttattcatttgaaatgcttctactatccaatattacacaatattattagggataggatgacatatgttgcaaagaacaaagttcaggttaatccagagattcgaacggagagttccaacttctaggtcagggaagtcttggagaaacgttgaccgaagaaggatgctgaattttattttattttattgtataatagtataatttattccccccttttctctacgggtggatggatgtattttctctagcgagtggacctcaaagtgatttgccaattaattaccccagccccggttcttttttctgtcggggattataatgcaatttttatcg

SEQ ID NO: 11303 - DNA, 508 bp, Glycine max
ctcgagccgattcggctcgagctgctctccattgtgctgttgctggtggctccgaatcctcacttgagattgtcaagctcttgcttgatgctggggctgatgctgagtgccttgatgcgagtggcaacaagccggttaatctgattgctcctgcctttgattctttgtccaaatcgcgaaggaaggctttggagatgttcctcaggggtggtggggaaagagatgaactcatgagccaggagatggagctacagatgttttctgttccagagaaaaaagaaggaagtgataataagaaagaataccctgttgatatatcgctgcctgacatcaacaacggtgtatatggaacagatgagtttaggatgtacaacttcaaggtgaagccttgctcaagggcttactcccatgactggactgagtgtccattcgttcatccaggggagaatgcgaggaggagagacccacggaaatacccttacagctgtgttccttgccctgagtttcg

SEQ ID NO: 11304 - DNA, 495 bp, Glycine max
ggacttgacatgacagcgatgagtccattggctcgtagttccacatctttgccgatgccaactgtttcaaccccacccatgtctcccttggcagcagcttcatctcccaagagtggaagcatgtggcagaacaaaataaaccttactccaccatcgttgcagctccctggtagccgactgaaggctgctttgagtgccagggatctggagatggagatggaactgctcggtctagaaagccctgctcgccaacaacagcagcagcagcaacaattgatcgaagagattgccaggatctcttccccatctttccggagcaaggaattcaataggattgttgatttgaatcctactaaccttgatgacctgttagcatctgctgacccttctgtattttctcaactacatggactttctgtgcaaccttcaacacccacacaaagtgggcttcagatgcgccaaaacatgaaccacctccgtgcgagttatccatcc

SEQ ID NO: 11305 - DNA, 377 bp, Glycine max
gaactacaatcaaattcattttctggttttcgttttagatagagaaagaattagagacagcgagtgaggggggctaccatgataacacgatcgaatctggttgaacagctgcgagagtatcagattcgatccaagcatgactgggcctctgtctcgttcttctcctccacttcttcaaacatcaccacttccagggtggatgtggtgctttttgtaatatggggacttgttattttagctttcttggttttttctgtagtctctctgtacttcaagcacatccggcttgcttttatcttagtctgcatcacagtcctagttgcttttatgcatgagtaattacgaagctagtaaggcgttcatggaaaaagagacga

SEQ ID NO: 11306 - DNA, 1889 bp, Glycine max
atttcaagatgctctctctctcccccttgttttaaacttgtaaataatggtatggtagaagtagtagtagcccttcaaatttcaaactgaaatagcacaaacaataccaactctcctcataccaaaacacacaactccagttattgaaattgaaattacccttttccttttttcccccaaatttcacccgaggctgtttttttttcttttttttttttttctctcttttgaccttaccctttgagagtttcgtggctgtaatttcgttgtaaccgatgctggaaatctcaactttaccggaaaccgcgacggagaacgcggacggcggttccgcggcggtctccgacgggtcgaaagccgagcacggcgaggacgatgaccggaatcccgccgcgaaccggtggccgagagaggagacaatggctttgctcaatataaggtccgaaatggacgttgctttcaaagacgcaaaccccaaagcccctctctgggaacaagtctcaaggaagttagcggagctaggatataatagaagtgctaagaagtgcaaggagaaattcgagaacgtttacaagtaccataggagaaccaaagaaggtcgttttggaaaatcaaacggtgcaaaaacttatcgatttttcgagcagttggaagccttagacggaaaccactcacttcctcctccgacaacaaccgaccgacaacaacaacaacgttggtgatgatgatgttatcctgaacgcggttccgtgttcggttatgtgcggcggcgcacgagcactcgagttcgacgacgtcgtgttcggggaagaagaagaggaagctgacgcagtttctggaggggttgatgagggaagtgatagagaagcaagagacgctgcagaggaagttcgtggaagtgttggacaagtgtgaaaaagatcgaatggcgagggaggaagcgtggaagaaggaggaactcgaaaggatcaagaaagaacgcgagcttctggctcaggaaagatcaattgctgctgccaaagacgaagctgttcttgcttttcttagaaagtttgcagaagcagaagacacggtgcagttactcgagaaaattcaggttcaaaacgacaaacagaaaaacatgaaacaaaatggcggtaatgataatgctaatggaggtggtggtgtcgcagttgtcactgatatggataaacaagaatgtggaaatactaatgtcgtgttagtgttgggaattttgtgcacatgagtagttcgcggtggccgaaggatgaagtggaggctttgataaggttaaggactgagtttgatgtgcaggcacaagggaataataataatagtaataatgggtctaaagggcctctttgggaggagatatctttggctatgaagagcattggttatgatcgaagtgcaaagaggtgtaaagagaaatgggagaacataaacaagtacttcaagaggataaaggagaagaacaagaggaaacctcaggattccaagacgtgtccttattatcaccaccttgaggctttgtacagtaagaagcctaagaaggtggtggatcatgggaacgagttgaagcctgaggagctgttgatgcatatcatggtgagtcaaagtcaagaacagcaacagcaacaagagatgcagactcagactcagtcaccatctgaagatgctgagagagatcagaatcagggagataatgaagatcaaagtgagtatcagactcagatggttgataataatagtccttccattgcaattatgagttaaaaagcttggtttcaagagattctttctttagtatgctaaaattgaacatcttctctgatgacaaccaacgtgggttcctttgactttccaaccattcatcaacaagagcagga

SEQ ID NO: 11307 - DNA, 457 bp, Glycine max
tttgggaaaatcaaacggtgcaaaaactaccgatttttcgagcaattggaagctttagacggaaaccactcacttcttcctccgacaacaaccgttggtgatgatgttgtcctgaacgcggttccgtgttcggttagtgcggcggcgcacgagcattcgagttcgacgacgtcgtgttcggggaagaagaagaggaagctgacgcagtttctggaggggttgatgagggaagtgatagagaagcaagagacgctgcagaggaagtttgtggaagtgttggacaagtgtgaaaaagatcgaatggcgagggaggaagcgtggaagaaggaggagctcgaaaggatcaagaaagaacgcgagcttctggctcaggaaagatcaattgctgctgccaaagacgaagttgttcttgcttttcttagaaagtttgcagaagcagaaggcacggtgcagttac

SEQ ID NO: 11308 - DNA, 672 bp, Glycine max
acctggaatttggcttagcgggggagaccttgtgtttttctgatcccttatcttaattaatttaatcaccaatggctcgttctatcgctaacgccaagactttctccgctctcgtgctagacggattctccaacactctcaccagacgtggctactctcaaagcgcaacaaggggaggagttgcctccatagcacccaaatcaggggaagacaaaggtgtctcatcatacaaggtttcctgggtgccagatcccgtcaccggttactacaaaccggaaaacatcaaggaggttgatgttgccgatttgcgtgctacccttctccgcaaaaaattcaacaactaatttcaacaattttaattttttaccaaaccttgggtgattgattcgttatggaattaattttgatactcatatgctctgcccaccttcattatacgattgctatagttttacaagtcagtagaataactattagcagctaataagaattgtaatttcttttaatcttattcattacttcagtttttttttcttttcttttcaattgccttcaatgtgattggatgtgtttctagcttgcacaagcacaacaaaacatatttaatcatgtaattcatgtgaaatgttataaacaatacaatattttacatttgtttaaaaaaaaaaaaaa

SEQ ID NO: 11309 - DNA, 813 bp, Glycine max
  unsure (1)..(813): unsure at all n locations
cccacgcgtccggttcaaaacaaggtttccatcaactggctactcgaccaaggtcccagcttaggtattgtccgagtgcatggggttgggcttttacacaccgagctagtgtctggaatccctgtaattttcttccagtttgtagccaacctcccagccttccatcaggtcctagttttcctatgcatcaaacatgtgccggttccacatgttaaagctaaggaacggtttctagttggtcgtattggtccaaaagagttcagaatctaccggtgcatagtgcgatacggataccatgacgttcacagagatgattttgagtttgagaatgatcttatatgcagcatagctgagttcatacgcacagaaagaaccgaatcgaactctccaaatgatgagcccccaaaggatgacagaatggcagttgtagggacatgttctacacattcccttttgatgactgaggatacagtagataatgtggagaatgtagacttgccagggccatcagaactaaaggagataaagtcacccaaggtgacccagcagcagaagacaagggtaaggtttttggtaccagagagtccaaagattgacacaagtgtaatggaagagttggaggaggtgatggaagcctgngaggctggggtagcttacattgtaggacagacacacatgagagcaaaatcagggtctagcatgttgaagaaaataggcattaatttagtgtatgaattccttagaagaaatagcaaggcaccctcctttgttactggtgtgcctcatgcatcatctctggaagttgggatgatg

SEQ ID NO: 11310 - DNA, 621 bp, Glycine max
gaagacgacagaaggggatgccaaagctattttataagccaaattgccgaaactggactacctcctagaataaatttcatttttattttttttgttcaaggccaagaattcaatggcaggtattgcatctggaatcagcacccttgccattggctcaggtgatgctcgacggcgtccagcacaagcccaatccactcccaacactaacactaacacaaacactaacagcaacacttcttcttctacgccatcatctgaagggttcacttatttaaattctgccaagcaagatataaagggtcttaccaaccagactggatacgttaaaggcaacgctaatggggtcatcaactttgggaccctcacagcctctgcttctgtccaaaggcaatgaatcccttaacaacaaccagcaagaatgaagaacatatatacatatatatatagctgcaggcaactcaataattaactaaataacctctgctgtgttgccttaatttatatcattttgattttatgttttactcgccaaaaccatcatagtaggaataatcagatatggatctactactactaattgtctaagtttaaaattttatagatattgctcttcaattaggt

SEQ ID NO: 11311 - DNA, 271 bp, Glycine max
tgggggacatagcataattgaaattaaagttacaatattgaaccaggtatggcctctcactacagttgcatcatcttggcttttgtcattgctatttccttttcaagcattgacatggcattagcatcacgcaatctccttcagacaacattgccaactttgcctcagggaaatgtccctcctttgcctgttttcccaaatcttccactgccacctttttccttccccaatattcctactcctaagatccccaacattcctaacattccct

SEQ ID NO: 11312 - DNA, 667 bp, Glycine max
gaaaaattagaaggttgagtggtctagggcccaagtagcttaacccaaccaacccctcacaggttgaagggagggaccagccaagccaagggaagggaaagggttaggcatcattcatacactgaacgaacgctcagctcagtcaggtgccggcgttcctctttcacgttctcatggaaaacgacgacgtcgacatgcacgctgccgacaccagcgaagaattggatgacatgaagaagcgcttgaaggagatggaagatgaagctgctgctttgcgagagatgcaggccaaggtcgagaaggaaatgggatctgcgcaagatcctgcaaatgcttctgcaagtcaggccaataaagaggaaatagattctcgatcagtctttgtaggcaatgtggactattcatgcactcctgaagaagtgcaacagcattttcagtcttgtggaacagtaaacagagtcaccattcgaactgataagtttggccaacccaagggttatgcctatgttgagttccttgaggtggaggctgttcaggaggcccttttgctgaatgaatctgaacttcatgggcgccaattaaaggtaacggctaaaaggaccaacataccagggatgaaacagtatcgtccccgtcggaccatcaatccttacatgggggggtttcg

SEQ ID NO: 11313 - DNA, 402 bp, Glycine max
gaaagcagaagcaactaggtaattatatagcttcaatcatctgatcgagggcattgctagtatggcttcaggagtcaaattctcattcttcatagctcttttcattgttttggctgcagttggagctgctcacgaggggcatgatcacatggctccagcagaaccaccttctaatcatgcaagcagcctcaaaaaccatgcagtggttggtggactctttccccttctgcttacacttctcattgccagagagaggctttgaaaactctcagtttgccttaacagttccttgttctgtttgtgcatgttaactttactagtgatccatgccatttacacttttgtcttattacatgcgtcatagttgttagatcgatatttgtactaataagctgtgttctg

SEQ ID NO: 11314 - DNA, 627 bp, Glycine max
tggtgtaactggcagattgttaatgttacaactcctgcaaattttttccatgttttactgtggcttttttgtagttggtacagtgatttgatttaagtgatcatcttcttcctcctctaaccttacatttagcctttctttcttttctatgttctctctatctctcattctcatctcactttcttttctttttcttttcttttcccgaatctgaatttttccctacaaaatccactcactgtcctcaaagacagatccgaaagtggatgccaaatctatcacccctcgtcgcccgagattatcgtacccattagattcttcttccctcttccttctacactttcccaaattttcacactattcgcggctgtagagcacaatttagtttatctactcactgttactgcgatttttgtcctacccttttcactattttagctatttctccgatgaagaggaaaagtggtttctttgagtgaccccagaatcgcgattgtgcttcgattcgccgagcaatgggtgttttgtagattctagtttttgatcttattttcgctgatcaaatgttttctttgttgttggtttttgaagtattggggtctagtatagcctgaattttttagttgt

SEQ ID NO: 11315 - DNA, 431 bp, Glycine max
gtctgggatagtccgctaaaacatccaatcccaacccatctttctctttttctcactctctcccccccaaaccctagctttcaccatgcggttccaatcgctctaaccctaactccctctctccatcaccgatcttcgatccgcaccgccgttcctttgaatcgcttcagattctccgctgcttccaccaggaggaggagtttttcgcgattcgcgctcgaagcttccgttgccgccgatcgaagagattcgctccgaatcccaacgccctgccgtcaagtttttcgccgaagtaacaaatcctgttgttgttcttcttcgattcgattggattgctctgttttgccctaactgttgctgtggcttcttcggatttctgatttgagagggctttgctgcgcttgattcggattcgtcgcattttcatcatc

SEQ ID NO: 11316 - DNA, 852 bp, Glycine max
cttggatcttcgtatgctcgcttggctcggccttgcttagaaaaatttggatgctttaaacaaattttatatttgagtcgtattctaatgttatattttaagcttctcgcaaggagggttgggtttggggttaggtatgagagtgagaacgaggaagggtaagtgtattcacattttgtagagggcgatttcctagactctgtcttgggggcacaattcaattgtggctccgatcaagggcgtagtggtgaaggagccgaagtggatggtggcggctgcggcgacaacggaggagaagcataatgagaatttgagcagcgaggggagtttggaggacgatgattcgtggagagtcagaatcttcaatgggcgcaggggaaagtaggggaggatcgtgttcgtgttgtggtgtttgaggaacacgattgggttttcgtggggatctatgatggtttcagtggacctgatgcacctgattaccttctctccaatctctacaccgcggtgcataaggagcttaaagggttgttgtgggatgatgggtctgcacccgaaaattcgatgccgaaagaggacatgttgcgagaagtgccagctgttgctgcagatgttacggttgctgatgaagatgatgcttgttctcactgtgttgagcaagataataatgataataatagtaagagcggtaataagagaggtaggaattcgaggaacaagttccagggtgctgcgaagaaatgggaggagaatcaacggaggtggaagtgtgagtgggatagggaaagattggagcttgatcggagattgaaggagcaactgaatttaagtcgatctgggtcgggtggacagcga

SEQ ID NO: 11317 - DNA, 402 bp, Glycine max
gaggaagggtaagtggattcgcgttttgcagagggctatttccaagactctgtctcgggggcacaattcaattgtggctccgatcaagggcgtggtggtgaaggagccggagtggatggtggcagcggcggcggcagcggcggagaagcataacgagacatctgagcgtgaatttgagtagcgaggggactttggaggactatgattcgatggagagtcagaatcttcaatgggcgcaggggaaagcaggggaggatcgcgttcatgttgtggtgtctgaggaacacggctgggttatcgtggggatctatgatggtttcagtggacctgatgcacctgattaccttctctccaatctctacaccgcggtgcataaggagcttaaagggttgttgtgggatg

SEQ ID NO: 11318 - DNA, 2471 bp, Glycine max
  unsure (1)..(2471): unsure at all n locations
cggtcgcgtgggttccaaagcactttttattttcttctctctgcgatggccgtggatttctccaaagcggtcgacgacgggctgaagctctccaagcgcatatacttcgtgaaggacagggcggtgtccccgcccaagcctccgccgccgatggcgcgctgggccaccgcgttcctcccctcggcgccgatggtctacgcggtgatctccgatccagggatcgtggacaaccccgacatctcgagctaccaaccgcacgtgtacggaaggtgtgatcctccagcgctgattccgcttcagatgaacgcgattgagatggaagctgattgttaccacgaaaccgctttcgtcacagtctccggcacttggagactccactgcgtcatgggaagccgctcctgcgattgccgcatcgctgttcccgtgagccaccagggttcaattctaggtgttgaggtcagcgtttctagaaaatcatattctactcaactggttgtcatgggagatgagaatgggaaccaaaattccgcgccacctcaaaacggagggtttctcatcccgaatatatttactttaacaataccgcaggttgatggaggttccaatttgtcaattaaagttcggtggtctcagaaaatagtgtactccaaaggccagttctctttgaatgtgccgtttacctttccagattttgttaaccctgcggggaagagaatatctaaaagagaaaagatacaaattaatgtggatgctgttactggagttgagcttctgtgcaagacaataagccacccactgaaggaagtgaggcgtcatgctgggagtatgggcttcttatatgattccgatgttctctcatggtctaaagtcgattttagcttttcatatgctgtttcttcaagtcatataaatggtggtgttcttttggaatctgcatctgtgcaagattttgatgaaagagagatgttctacatgtatctttctcctggagatattcagagtcacaaggtattcaaaaaggacatcatattcattattgacatcagtggtagtatgcggggaaagctaattgaagacacaaagaatgcactattgactgctctctctaagcttaatcacgatgattcatttaatattttagcctttaatggagagacttatctattttccaaagcgatggatttggcttccggggatgctgttgaaagggccactgagtggattaacacgaactttattgctgggggtggtactaatatttctcatccgttaaacacggcaatagagatgctatccaatattcaaagttcagttccaatagttttcctagttacagatggaacagttgaagatgagagacaaatttgtgctatggtaaagaatcgaatgatcaatggagagtcaatatgccctcgaatttacacttttggcattggttcattctgcaatcattatttcttgcgaatgcttgcaatgattggtaggggccaatatgatgctgcattggatgtagatttgattgaacctcgaatgctgacattgtttgacaaagcttcatctctcattcttgcaaatatcaaaatggacacattggatgatcttgatgaccttgaggtataccctcctcatattcccgatctttcatcagagggtccattgattttatctggaagatacaggggaaattttcccaaaactcttaaagtcgaaggtatcttggctgatttcagtaattttgtagtagatatgaagatacaaaatgctaaggacattcctgtgcaaaagatttctgcaagagatcaaatagagcatcttactgcccaagcatggctcatggaaaataaacaactagaacagaaggttgcaaaactgagcctgcagactggctttacgtctgagtatacacgaatgatgatacatgagactgatcatctaaagaaagtcaaggaatcatctggaccgaaagaagcgtcaaaaaagagcaatcctctattcgaggcacccgtccaaggccagagaatgattttactaccacatttaggtatcggcttcggcaacttaactgcaactgctgaaaatactcctccaggatttgaatcgaaattgcctgaagtgcccgaaatcttcaaggcagccacaaattgttttgaaaccttgtgcagttactgctgttgcatgtgctgcatccagtgctgtacccggataaacagccaatgtgcaaccgcattggcacaactctgcattggtctaggatgcttcggctgcatctcatgttgttcagatatatgctgttctggaaacgaaggctgaaatatcaattttgttgtatgattgttgtattttactgcatatagaaatcactgcatgtagtgttgtcattttggaaatgtatattgtgtttaatggggtgatattccttagttaaaaaaaaaaaagggcggcnnnnnnnnnnnnnnnnnnnnnnnnnnnnn

SEQ ID NO: 11319 - DNA, 314 bp, Glycine max
tgttgttgcatgtgctgcatccagtgttgtacccggataaacaaccaatgtgcaactgcattgacacaactctgcattggtctaggatgcttcggctgcatcacatgttgttcagatatatgctgttctggaaacgaaggctgaaatatcaattttgttgtattttactgcatatagaaatcactgtttatataggtgttgtcattttgggaatgtatatgagcaagtcgtctattgtgttacggggtgatttccatagtaatattgtatagttttttctgatgataatcgtgcaagtttaaactttgcaatag

SEQ ID NO: 11320 - DNA, 731 bp, Glycine max
  unsure (1)..(731): unsure at all n locations
ataatgagagtgagggtggatcagatgttccagttctgggaattgagaacaatgttgagatggctgactcgctgccggaaagtgggagagttggaaatgttgaggctggtgctaagttggataatgatggcgtattggaggctgaaggtgtagatgatatttttatggaagggtctgttccaaatgaggctattgcgaagaaggatgagatcagaggtcatgaaatgggggatgattgtgtgtttgatgaagtgaaggagaaggatgagcagcaggatgaagtagtgacacaacagtgtttgacagattaattttttgcaaaagataatgatgttatggataacaaagagagtgatgattttgaaatgctgaacagaaatgaagaatcaacaagtcaaggagcaacagatgaaaacacaaatgacgtggtcttaaatgagaaggatggaagcaagaatcaagtagttgggacaagcttagagaccacttccggagatgataatttgtctgtcncatgttagcaacttaagttgttcatctgaatagacttttgangggaaggctagagtaaaattaattctacaactttttaatacataaatgctggtaatttgtagatcgtatgttagtggtttacttttattttgtggctatatatttttttaatttgtatgttttggtaatatgaaagattggggaagactagtggttttgttcttcgttgtcatatc

SEQ ID NO: 11321 - DNA, 890 bp, Glycine max
  unsure (1)..(890): unsure at all n locations
tgaccctcccttcccaagttccaagtcgcaaacaaagtaacactagaactcacaaaggacagaagaaacgcgaatgccaggagaactccaattaccacccgggttcagattccaccccactgacgatgagcttgtgaatcactacttgtgtagaaagtgtgctgcacaaaccattgctgttcccatcatcaaagaaatcgatttgtacaagtttgatccatggcagcttccagagatggctctttacggtgagaaagagtggtactttttctctcctcgagaccgaaaatacccaaacggttcgagaccgaaccgggctgccggaagcgggtactggaaggctaccggagctgacaaaccgatcggaaaaccgaaagcccttggaatcaagaaggccctcgtgttctacgcgggcaaagccccaaagggagtgaagaccaattggatcatgcacgaatatcgcttagccaacgtcgacagatccgcctcaaaaaaaaacaccaccaccaacaacttgaggcttgatgattgggttttgtgccgaatttacaacaagaaagggaagattgagaagtacaatggtgttgcggtggtggatcagaaagtggccaagttatcagaagaggaggttcagttccagcacgagaccaagcctcagatcaagatgtacggccacgatgatttcaggaacgaccaattgtacatggacacgtcggattcggggcccaggttgcacacggactccagctgctccgagcacgtggtttcgcccgatggcacgtgcgagaaggaggtgcagagcgagcccaagtggaatgatcttgagttgggccccgacccagccttgggcttcgattntaatttcatggacctgacctcagatgacgctt

SEQ ID NO: 11322 - DNA, 543 bp, Glycine max
ctcagttacttctctctctcccggtgactgggttattccctctccaccatctttcgggacgtggcagacttatattgtgaatgatgagaaagtttggcacaagatagagaagggtgtgcctatggaatatgctgctacaattacagttaatcccttgactgcacttctcatgcttgaacactgcgttactttgaactcaggagatgctattgtgcaaaatggggctaccagcatggttggccagtgtgtcattcagattgcaaaatcacgtggcattcacaatatcaatattataagggacaggcctggggtcgacgaagtaaaagaaaggcttaagaatttgggtgctgatgaagtttccactgagagcgaattggaagtgaagaatgtcaagagtctcctgagtggtatacctgaacctgttttgggatttaactgtgttggtggcaatgctgcttctctggtactcaaatttttgagacagggaggaactatggtgacttatggtggaatgtctaaaaaacctgtctctgtgtcaacatc

SEQ ID NO: 11323 - DNA, 1558 bp, Glycine max
tttttacttgaagggaagtatctggtacatgctagttgtcatgatttgataggtggagctgatgcacccattcagcatctaagcttctcttgtcaaataccaagtgtaactgggagggggtttattgaggtggaagatcatggtcttagcagctgttcctttccatttatagttgcagagcaagaagtttgttcggagatctgcaagctggaaaatgtgattgaggaagctgaaaccactgatgatatccagataaaaaaccaacatatggaagaaaagactcaagctttggatttcttgcaagaaatgggttggcttcttcatagaagtcatgtgaaatttaagctaggttccatggctcctttccatgatctcttccaattcaatcggttcgcttggcttgttgacttctccatggaccatggttggtgtgctgtgatgaagaaactcttggacattatatttgagggtggtgttgatgcaggagagcatgcctccattgagcttgcattgttgaacatgggtcttctacacagagctgtaaagagaaactgtaggcctatggtagaactactgttaagatttgttccagttaaaacctcagatggtgcagacagtgaaatgaagcaagttgccgaagcccctgacagattcttatttagacctgatactgtcgggccagctgggttgactcctcttcatgttgcagcaagtatgagtggctcagagaatgtgttggatgcattaaccaatgatccacgaatggtgggaattgaagcatggaaaagtgcccgggacagtacaggtttgacccctaacgaccatgcttgccttaggggctattactcttacattcaactagtccagaacaagaccaacaaaaaaggtgaaagacaacatttggttgatatccctggaactgttgtagatagtaacacaacgcagaagcaatcagatggaaataggacatgtagagttccaagcttaaagactgagaagattgaaaccacagcaatgccccgtcaatgtagggcatgccagcagaaggtggcttatggtggcatgaaaacagcaatggtttataggccagtcatgctctccatggtgaccatagcagttgtgtgtgtctgtgtagctttgctcttcaaaagctcacctagagtttattatgtcttccagcccttcaactgggaatcattagagtatggggcaatgtaatgttgtatatcaggtgttttctgctgtaagcttccaccttttcttaatatattattttagaaactgggtaagtcttagattttgggtttagagtatagacatgttatacatccatagtaatagtagctgtcatcaatgtatatggggaaaacccgaggttgacacttcacctgttcagaacagaatcttgattatgaaacctgtgaacctgttaaatatggggtcaatgctattaggccattatatatgtgataatagggataacgccataacagttttaagcaatttgaggaaattgccttgtattaattaatcaataaatacaagatatttacggttc

SEQ ID NO: 11324 - DNA, 539 bp, Glycine max
tgtctatatcttcaaaggaactttcgatggaagagctggggttgagtgctgtcccatcagaagtatgggaatcaggggaggtcataaaacttaatctatccagaaacctccatccaggagttgcctgttgagctttcttcttgtgtttccctccagacattgattttatctaagaatcaaattaaagattggccaggttcaattcttaaatcactttcgagcctttcatgtttgaagctggataacaatcccctcagacagataccttcagatggctttgaaatggtgcctaagcttcagatcctggatctaagtggtaatgcagcttcattactagatggtcctgcattttctagtttgccatacctgcaagagctttacctaaggagaatgaggctcagtgaagtcccatcagatatagtggggctgcatcagctacggatccttgacttgagtcagaattcccttcaatcaattccagtggggctaaaagctctcacttctctccaggaacttgacctatccaataacaacattgc

SEQ ID NO: 11325 - DNA, 1648 bp, Glycine max
tgacactccaaggaggcaagggaaaacaaaccagaaagtctgacctttccctttctccaaaggatcatcaaactaaactaaatcaaatcaaaatcaaactttgtcacggttatattagacccttttataaacctctttcaaggcttttcaatcacaccctttctctaatcacttcttcttgtgctggcataacttcaacaacttattctttgttctcgatctcacgatggctcatttggccctgtctcagatggctgtaactgttcctgttggcagcgatttgtctctcagaagatctgcggttaaggcacctaactttaacttttgggataaatcatgggcaccagtatttactttggacttgaagccaaacaacccaagtttaagaagtcgtcatgtggtatgcatgtccgtgcaacaagcaagtgtatccaaagttaatgtctcacctttagaattggaagatgctaaagaacctccattgaacttatacaagcctaaagaaccctatacagcaacaattgtttctgttgataggctagtggggccaaaggctcctggggaaacttgtcatattgtgattgatcacggtggaaatgttccctactgggaaggacagagttatggtgttattccaccaggtgaaaatcctaagaaacctggggctcctcataatgttcgactatattcaattgcttctacaaggtatggagacttttttgatggaaaaactgccagcttgtgtgtgcgtcgtgctgtttattatgatcctgagacaggaaaggaagatccttccaagaatggcatatgtagcaattttttgtgtaattcaaagcctggagacaaaattcagatcacaggcccttcagggaagataatgcttttacccgaggatgacccaaatgctacccatataatgattgccaccggtacaggtgttgctccattcagaggctatctacgccgaatgttcatggaatcagtccctacatacaagtttggtggactagcatggcttttccttggagttgccaacactgacagtcttctctatgatgatgaattcagcaaatacctcaaggattatccggacaatttccgctacaatcgagccctcagcagagaacaaaagaacaagagtgggggcaaaatgtatgttcaggataagattgaggagtccagtgatgaaatcttcaaactcctggataatggggcccacatatatttctgtggtctgaaagggatgatgccagggatccaagatacgctgaagaaggttgctgagcaaagaggagaaagttgggaagagaagctttctcaacttaagaagaacaaacaatggcatgttgaagtctattgagattctctagtgcagatttgcagagtagtccccctttgtctctgaaaggaaacaaaacaaaaaagaacattttgcgtttggtgcatttagtcaataaaattcattaagcagctgagtaatgtagctgttctgcattagtaaattgcaatgatatattgtgttcttgatggatacagaattgaaaaaccaagtcattgtgtgtagtgacaatcttggataatggggcataatggggcaatctttgcctaacatattttcttttgctaaattttgaataattattttaat

SEQ ID NO: 11326 - DNA, 438 bp, Glycine max
ggaacgggagggtgagtgagagagggagtgacactccaaggagccaagggaaaaacaaaaaacctgacctttccctttctccaaaggatcatcgaactaaaccaaatcaaaatcaaactttgtcacagttattggtgtgctacctccgttagttatataagacccttttataaactccttttaaggcttttcaatctccaatcacttcttcttgtgttgtcataacttcaacaacttctttcttctcgatctcacgatggctcatttggccctgtctcagatggctgtaactgttcctgttggcaacgatttgtctctcagaagatctgcagttaaggcccctaacttgaacttttgggataaatcatgggcaccagtatttactttggacttgaagccaaacaacccaagtttaagaagtcgacatgtggtatgcat

SEQ ID NO: 11327 - DNA, 478 bp, Glycine max
tggcatgttgaagtctattgagattctctagttcagatttgcagagtagtccccctttgtctctgaaaggaaacaaaacaaaaaaagaacatttttcgtttggtgcatttaatcaataaaattcattaagcagcttgagtattgtagctgttctgtattagtaaattgcaatcatatattgtgcacttgatggatactgaatcgaaaaaccaagccattggtggtggcaatctggtagagtacattttgttaagggcagcaacatattttcttttgccaaattttgaattattctgtcaataaggataatcatcctctgaaatatcagcaaggcctagagtaatttcaagaagtacaagttatttttttatttaatattgtgagaattctgtcatatttcacaataacatcaaagtcttatcccttcaagggaagttgtatttcacaacgattggcaataaacagtggtccacagttc

SEQ ID NO: 11328 - DNA, 803 bp, Glycine max
tagctttgacttggcagagtggggtgaggggctgaaaggtgtgccaatgcaggtggtgtggtctgctgggtggtccgaagaatggagccgggagggtcaccgggttgcaagtgcccttccacaggccggttttcttacgcattctggaggccggtgggctcaggaggacgcagccgttgagatagctgaaaaaatttctcagtttgtattgtcattaccaaagtctattaggaaagttgaacaggagtccaccccagagcacgtacagaagatgcttgatgaagcaaaaagcagtggtcatgatcaccatcaccatcacagtcctgatcatggtcacggacatgatcactatggtgatgcacacatccatggagctaattatatggatgcatatggacttggtcatggacatcatggttggtgaaagtgatcactggattttactggccaacattcacgcttgcagatagtatctctacttcatattgctcacacattgtattagtcaagacgctgaagctcgtaccatatgtagttctcgccagctaaagcccacatgttgtatgttatttatttttgctgttttacattttcaaaattgctgaagggtgtgagatgatacactaaggagcaactatgcatgagaagatacttgtaagggaaaaaaaaaaaccttgacatttttgagctgattgctcttgtatgctctagtttggagctactttttgtgtttggatttcggaattatttttttaaagtgtttggtaaaaaaaatttttaaccaatgtaaaaagaaaaaaaaa

SEQ ID NO: 11329 - DNA, 378 bp, Glycine max
gaagacagaggcagaagagaagagaaaagaaagcctctccctccgtaccaaacccttccaacactggataatgatctctcccgcaacctctgaagctgcgacgacgacgtttcccaatcgaacacaatcgcacaaaatttgagcaatgaagaagcgcaaggaacttggccatggctctccttcaatttctccccctccgaaatcaagaagactggagttggagcgcgacgtgatgatggaggaagaggaaaatgtaatggtgaagcaaccctgtgtggaccccacaccttcgcctgtgacggacatggaagagagagcgattgttctttatgagccaaccgctactacgccttttctcaagtcccaagctcgcctgag

SEQ ID NO: 11330 - DNA, 610 bp, Glycine max
ttcaagactgatggaccccctgcaacagctttgggatttaatcctccagataaggatataatgaaaaagcctcctcgtcacagtgatgactcattaattaatttgtggattttattccgctatctggttattgggatttatgttggattagctacagttggtatcttcatcatatggtatacacatggttccttctttggtattgaccttagtggggatggacatagtcttgtgacttacacccaacttgccaactggggtcaatgctcctcatggcagaacttcactgcttctccattcactgctggtgctaaaacaatcacgtttgacaacagctgtgattacttttcgactggtaaagtgaaagctatgacactgtctctttctgtgttggtagccattgaaatgttcaactctctcaatgccctgtctgaggatggaagccttttgacaatgcccccttgggtcaacccttggcttcttttggcaatgtcagtgtcatttggtctgcactttttgatcttgtacgtgccattcttagcacaagcacttggtactgtgcccctgagcttcaacgagtggcttttggttttggttgttgcacttccgg

SEQ ID NO: 11331 - DNA, 874 bp, Glycine max
tttcacttttctttttctcatttcgtccgccctcaaccgccgtgatggccctcgtccgccaccgccgccaccccaacctccgtctccccctcccggagccctccgagcgccgcctccgcttccccctccccctccctcccaccaccaccgccaaaccagcctccggcgacgccattgccgccgccgacctcgagaagctcgccatccttggccacggaaacggcggcaccgtctacaaagtccgccacaaggccacctccgccacctacgcgctcaagatcatccactccgacaccgacgccaccaggcgccgccgcgccctctcggaaacctccatcctccgccgcgttaccgactgcccccacgttgtccgcttccacagctccttcgaaaagccctccggtgacgtggcgatcctcatggagtacatggacggcggcaccctcgagaccgccctcgccgccagcggcacgttctcggaagagcgactcgccaaggtggcgcgtgacgtcctcgaggggctcgcgtacctccacgcgcgcaacatcgctcaccgcgacataaagcccgcgaacatcctagtaaactccgaaggggatgttaagattgcagacttcggagtcagcaaactcatgtgccgctcgctcgaagcgtgtaactcttatgtcggcacgtgcgcgtacatgagtcccgaccggttcgacccggaagcgtatggcgggaactataacggttttgctgcggatatttggagtttgggtttgaccctatttgaactctatgtgggtcacttcccatttcttcaagcgggtcagagacccgactgggctacccttatgtgtgcaatttgcttcggcgaaccgccgaaccttcc

SEQ ID NO: 11332 - DNA, 544 bp, Glycine max
ggaatggagatggaaccaacaatatctgagactccaaatgaaaattctcgaacttttgaatcgatgatcgtagagatggagaaaactcgagaataagttggagttgtatgcacatggtgggctgtcttcataaaataatatccatcagatatttttcagctgggctgtctcatactgagctaatggagctttagtttctgaaactaacaatatatagggaaggaagtaataatgtccatcagatatttttcagctgggctgtcttcacagattacttcaccactataattatattatagtattaagtcgcaattattttctctcccatcttccttcagcagttgttagatcctcttctagaatccatattttggcttcctgatacatggtgtcggagatcaggagttgtatggtagtgcacaagtgcggcgacctatatatatagcggatcaattatttcttttatggaaaattgtaagggaaaacggcaactttattttttgtgccacattaaacagtggcacttgccttcatatatattatg

SEQ ID NO: 11333 - DNA, 389 bp, Glycine max
gactttcacaacttggttcttatttaatttcaactattataacaagccttaatctaatatctctcacagcccttctttgagagacctcaagagagaaaataaggtatgtgttctttctcttcagaacagttaccttatctttttcttggttttgcccttcaccctccatggccatccaagagacagcgccagcaccttcggttgaacatccataaaagaaggagagcacaattgcaagaagcaagacggaggaagaggatgatcatcttgaagcttacagaaataaagatgagaaacttgaagttgtacatggagaaccaaagcatcatagaggagaatcagaagttgaggaagcaagcaatgcttcttcacaaagagaatgatgtcct

SEQ ID NO: 11334 - DNA, 440 bp, Glycine max
  unsure (1)..(440): unsure at all n locations
gtaattgcaactgtcaaagatgcttgtanagcacctgtggttaagaataaaccacggctggtggaagcaatgtatttttgtgaattgaatacacctactgaatatttgggtcccatgtatgctgtactttcccgaagacgggcccgagtattgaaggaagagatgcaagaaggttcccctttcttcactgtgcatgcgtatcttcctgtttctgagagctttggttttgcggatgagttaagaaggtggacttctggcgccgcaagtgcacttcttgtccttagccactgggaagcacttcctgaggatcctttctttgtacctaaaacggaagaggaaattgaagagtttggagatggttctagtgttcttacaaatacggcaagaaaattgattaatgcagtcagacggcgtaagggccttcctgtggaggaaaaggt

SEQ ID NO: 11335 - DNA, 635 bp, Glycine max
attcagcgattagcaaaaagcaagaagaagaaggagaaccccacagaaatggaagaggacgacgacgaaggcgaagaagaagaagaggaagaagacgaggacgaaggcgaagaagaagaggaacaattttgggacgattgggaaggagaagacgaagaaggagagcagcgagactctgaattcgtgtgtctcttctgtgaatcccggtacagctcgtgcggttccttgttcgaccactgcgcctcccttcaccgctttgatttccacgcgattagaacaactcttagcttggatttctatgcctccttcaagctcattaacttcatccgctctcgggtggcagagaacagatgttggagttgtggattaacatgccagtccaaccgtgaccttcagaatcatttgcatgatgtagttgactttaatgagataaagactttgtggaatgatgataggtatctgatacctttcatgcaagatgattcactgttgtacagttttggtgattgtgacgaagacggcgaagatgaacatattactcgaattgatgaagatcttataaaggatctaatgaacattgaagagagtatccatgacgatcaagatcttgtgaaaaaagtggtagttgatgatga

SEQ ID NO: 11336 - DNA, 397 bp, Glycine max
attgctctctcccaaattgctttctctcatttctctctcccgaattgttatctcccccttctttgttccttctttccatttttttcattcttcccgtttttctgtattttcttacatctaaagctgtgattttttacatcaaaattgtgatttttatctcagattccatgacaacgatatcatatttgcgttcctctccaagtttgtatttctatttgaccgtgactaactattgttcttcctttgcaacacaaaagcttcaatttttttgtgttttctgtttttttgtgttataatgacttttcgcaggacaagaggttaaattttttggtgtttctgagccttctccgacgtacccaaaggctggagcttttttgctgggtttgctagttctttg

SEQ ID NO: 11337 - DNA, 410 bp, Glycine max
agctcaatgagcttgatttggcgaataataggttaggtgggagtattcctaaggagttaggggacctgcctgtgcttaattatcttgatctttcagggaatcagttctctggtgagattccaattgagctgcagaagttgaagcctgatttgttgaatttgtcgaacaatcagctttctggggtgattcctcctctttatgctaatgagaattatagaaagagttttcttgggaatcctggtttatgcaaggctctctctggattgtgtccaagcttgggtggtgagagtgagggtaagagcagaaagtatgcgtggattttccggttcatatttgtgcttgctgggattgtgttaattgttggggtggcgtggttttacttcaaattcccggacttcaagaagatgaaa

SEQ ID NO: 11338 - DNA, 495 bp, Glycine max
agccctctcgcccctaatcctacgagcaagctgaatgtccttgggcataatggtaactctcttggcgtgaatggcgcagaggttggtgtcctcgaagagcacaacgaggtaggcctctgcgacttcttggagagtggagacggcgctgctgtggaagtagagattggtcttgaagtccagagcgatttcccttacaagtctttggaaaggaagcttccttatgagaagctcggtgctcttctggtattttcggatctccctcagcgccaccgtacccggcctgaaacggtgtggcttcttcacgccgccggtcgccggagcggacttgcgtgctgctttcgtggcgagttgcttcctcggagcttttcctccggtggacttccttgcggtttgcttcgtacgagccatttcgaacacagagattgcttcacgttggaagaagaagacgaatgatatgaacgtgtaagctgggattcaagaacagaacatcatgag

SEQ ID NO: 11339 - DNA, 420 bp, Glycine max
agctcaagtaccaatatttgtttttattataaaagcatgtaccttttgttcttcctaccaatacaaggttctccacaacaaacacgctgatgaatcaatactgggacttcttcaatggcagatgaagctatctctccacattgaatttgaaaaagccagttagtgctacagccagattgtgcaaaaccttggtgtaaaatctgtgttcaatcctctgttttgttgctgacattgaagactcttaaacaattaatcaagaattgttctagtgttttggttctggcaccagttgatctactattgggaattggtaacaaggatcactttctactacaacattcaactagatttcttgtactttcattttcatcaaaaattacattcttctatggatggtcttagttgggatgcctcacaact

SEQ ID NO: 11340 - DNA, 516 bp, Glycine max
caaacacgctgaatcagtactggggcttcttcaatgacagatgaagctatctccacattgaatttgaaaaatccagttagtgctacaacaagattatgcaaaaccttggtgtaaaatctatgttcaatcctctgttttgttgctgacattgaagactcttaaacaattaattaaggattactctatagtgttttggttctggcagcagttgatctacaactgggaattggtaaggccttaatgtcagtatttttttttttgtactcagataagtattggggtatgcttatttcatctcatatattataattgttattctcttcaacatattaggtaaccaggatcactttctcctacaagattcaactagatttctggtactttcattttcataaaaaattacattcatctatggatggtcttagttgggatgcctcacaactgtggggtactattcagcaaccaccagtctttggaggaggttactccatgcccctcaatgttctcaatcaaata

SEQ ID NO: 11341 - DNA, 465 bp, Glycine max
gtcggcattcggctcactcgagcgactcggctcgagatcagactgggtctcatccttggcacctgctcaggaggtggagttttcaggtggcggtgtaaatttgggttgatttgcgagttcttttcatgcccagcttgtcttggagggaatttaagtaaacaaggattgggattcaggcttggtggttaacattatgttctaatggttgtgatggcccacgacgtgaagcataactggtttctgatttcgaaaaatgttatcaatgattgcagtcatcaaaattggactgggtttgtagtattagattcagggtgctccgaataatttagagttttctatttttttaggattcttatatttgcacgttacaattttcctatattttttatcgggtttgatataaaggataatgatgtacaagaatttcccttgtatttatgaagcattagctattaaatttctttt

SEQ ID NO: 11342 - DNA, 411 bp, Glycine max
aggtttaatttactctcctcgccaaggcagaaaggtgggctagtccagtcgtctcaattctcttcaggtaattctgctggacaatcactgcaaggaatgcaagcaatgggtatgatggggtcgccaaatctcacctcgcaactacgagcaaatggagccatggcttatgcacagcagctgcgtatgagtcagggtcaaatcaggcagcaactatcccagcaaggttcacttaacactgcacaggttcaaggtttaccaaggtcatcatcccttgcttttatgagttctcagttgtctgggttgtctcagaatggacaacctgcaatgattaactctttaacacagcaacagtggcttaagcaaatgccagcaatgtctggccctgccgcaccattgcgtcttcaacaccag

SEQ ID NO: 11343 - DNA, 418 bp, Glycine max
acccacgcgtcagcccatctgatcatataacacaacacactgcaggcttgttgtgttgtgctgtgttcattctgaaactttgatctatgtgagacaagttgtggctaccctgcaaagccagaaaaaatggtgccagagaacttgaagaaacaacttgctttggctgtgagaagcatccattggagctatgcaatcttctggactgattcaactacccaacccggggtgttgagctggggggaagggtattacaatggagacattaagactaggaaaacaagtcaaggagtagaactcaattctgaccaaatagggttgcagaggagtgaacagctgagagaactattcaaatccctcaaaactgtagaagtcacccctcaaaccaaaaggccttcagcagcagcactgtccccagaag

SEQ ID NO: 11344 - DNA, 1200 bp, Glycine max
ctcatggtcaattgggggacgcttttaaaagttatgtccgtactcgggattattgcactacatcaaagcacattgttcatatgtgtatgagtgcaattctggtcagcattgaaatgggtcaatttcctcatgttacaagctatgttagcaaggcagaacagtcaccagatgcccttgaagcagtaacagttgcaaagctacgatgtgctgcaggattggctaatctagaagccaaaaagtacaagcttgctgcccgaaagtttctagaaacaggacctgaactgggaagtcactataatgacgtaattgcacctcaagatgttgcaacatatggaggactttgtgcacttgcaacatttgatcgggcagagttaaagagtaaagttatagacaattccaacttccgcaatttcttagagttagtaccctgaagtaagggaactgataaatgatttttactcaagtcactaagcatagtgacttgagtacctcgggaacctcaaagcaaacctattgcttgatatacatttgcatgaccatgttgagacactttatgatcaaattcgtcacaaagcccttatccagtacacacacccatttgtgtctgttgatttgaacatgatggctaatgcattcaagacaactgttgctggacttgagaaagaactagaagcactgattactgataatcagatacaggctcgaattgattcgcacaacaaaattttgtatgcgcggcatgcggatcaaaggaatgccacctttcaaagggttctggaaactggaagggaatttgatcgtgatgttcgttccatgttactgagatcaaatcttatcaagcatgagttcaatcttagagcattaaggaaactttgattatgaactgatgataatgggaccaagttgctattttatttatagcaggcattgatcaactataacgaagcaagtttctggagtgaatcaaggttgcaaacgtactttgtgcaaacatttaacggcatattatggtttcttttgtatatactctttcataatttctcaattaattcgtcacaagatcttcatttcctgtttttaacctgcacctcatttttggtgactccgttgcgcaagacttgagtgttgatggtccgaaaacattctcatgatctgtcttaagaattctctgttctggtaattataatgagctctcagaag

SEQ ID NO: 11345 - DNA, 558 bp, Glycine max
ctccgacgaatctatatataccgtcaggcatgcatattggcttccatagtttccaatttcacatcctcttattgttaattaaaccctttgtttgcacaagaaaagagttacttcatcatcatcatcaacatgagtcgcttcaacaatcagcaagaatcccctgtatcatatcctccagcactgtatgttagtgccccaccacctatgggttatccttccaaaggtgatcctacagctgtagggtacccccaacaaagagttccagaagaaaccacaagcaggggtgatggattttggaagggatgttgtgctgctttatgctgctgctgggtcctggattgttgcttctgattgaatcatagcacagatttgtgtttgtcaccatgttttctttttcacattgccagtttcctatttgtattctttgtagtttagaagaataaggatctttgtcctcttggacagcttgtattttatccatttggttgatgctgttctttttccttgtactttgaatttttttatgatgtatttagttattattataagatttttttt

SEQ ID NO: 11346 - DNA, 1238 bp, Glycine max
cacatatatacctctcctcctaatttatatcccaagtttccacctatccaatttcaccgttgctagctcctgtttctttcttttttgtcggagaaaatagtgatagtaatgtcgggtgaggagacacagaggaatgtgtttggcgcggaaacggcgtcgtccttggtgaaggagctgagggacaacttcggtaaaggaaccacgcgaagttacgaatggagagtgtcgcaagtgaaggctctattgaaggcggtggttgaaaacgaggaccagatcgtcggtgctctttgttccgacctagccaagcctccgctcgaaaccgtcgtctacgagattggtatgtttaaaaactcatgtgaagtcatactgaaggaattgaaacattggatgacgccagaaaaggttaaaacgtcaatcagaacttttccttcttcagctgaaatagtacctgaaccgctgggtgtcgtgttagtcatctctgcatggaactatccaatcttgttgtcccttgatccagtagttggagctatagctgctgggaatgctgtggttctaaaaccatcagaaattgctcctgcctcatcatcattattattaaaattgatagagaagtattgtgataactcatttataagagttgtggagggggcagttgatgaaacaaccgcactattgcagcaaaagtgggacaagattttctacacaggcaatggaaaagtgggaagaatagtgatgactgctgctgcaaaacaccttacaccagttgtgctggagcttggaggaaaatctcctgttgttgttgattccaatgtcgatttgcagatagcagctaggcgaataatttctggcaagtggggattgaataatggacaagcctgcatttctccagattatgttataacaacaaaagattgtgctcccaagttggtggatgccctaaagactgaattggagaaatgttatggaaagaacccgctggaatcagaagatttgtctcggattgtgacttccaaccactttgctcgattgtcaaagctattggatgatgataaggttgctggcaagattgtttatggaggtgaaaaggatgaaaagaaattaaggattgctcccactcttttattggatgttccgcgagattctctgataatgggtgaggagatatttggtccattacttcctattatcacggtgaataaagtggaagaaagtattgatttgatcaactcaggaacaaa

SEQ ID NO: 11347 - DNA, 414 bp, Glycine max
cctacgctttcgttttgaaacccaacccaatttcaccgttgctagctcttgtttcttttttgtcggagaaaataataataacaatatataatgtcggttgaggagatgcagtcacagaagaggaatgtgtttgacgcagaaacggcgtcgtccttggtgaaggagctgagggacaacttcggttcgggaaggactcggagttatgaatggagagtgtcacaagtgaaggctctgttgaaggcggtggttgataacgaggaacagatcgtcgacgctcttcgttccgacctagccaagcctccactcgaaaccatcgtctacgaggttggtatgtttaaaaactcatgtgaagtcatactgaaggaattgaaacaatggatgaagccagaaaaggtcaaaacatcaatcagaact

SEQ ID NO: 11348 - DNA, 416 bp, Glycine max
aagcgacgcatccgctgcacatcatctctggtctctggcatccgtggtagcggaagaactcaatcctgtccaattccctttagcttttccattctgcaatctcatcgaattcctttctaccactctcattaacattgctgcattttcttagctagatgcctctccgttgagggtttctctaggtatggtttgaattacaatgtctgaagctgaagagatatcaaagcttgagagcttgtgcccctcagtatgataaatgtgtggcaagtggagcgaaagtctcactattaatagatctcaacaaatcataattcaactactatgatttctctcaaagcttttaccataaacgtgattatggtaccaatatgtcaattgacagtgttggaagcttacacacaagttaccgcagatga

SEQ ID NO: 11349 - DNA, 478 bp, Glycine max
cccacgcgtccggtgagtcttagacacatatatggctcgacttgtattgttcttctcagcattttctcttttccttctaaattctactatcacggcacaagtcccagcaccaccatctccttctacaattccatccccaatgtctcctttggcaccttctacaccaccaccgtcccgttctcttcctgctcctccaacgtctcttacgccaccacttccatctacagattccgctcccactcctccaccacctattggatttggaggaggtggtggaagtggaattggaaaaggtggtggtggctcaggcgttggaataggctcaggaagtggtagtggtggcgttcaaggtggtggtggacaaggacgtggtgttgggataggaagtggcgttggcagtggtaccggctatggtggcggtggaactggcattggcagtggtgacagtagtagaggaggtggatgacgctttctggtg

SEQ ID NO: 11350 - DNA, 387 bp, Glycine max
aggccctttttttttttttttcccttcatctttcccatcatcttctttccccttgactttctctgcatcaattttgtcatactttttcttctttgtccttcttctcttcatcatccttcccatcatcttctttcttcttgatcttctctgcatcagttttgccatccttgtctttcttctcctttttcttcttttccttcttctcttcatcatctcggcacaagtcccagcaccaccatctccttctacaattccatccccactgtctcctttggcaccttctacaccaccaccgtcccgttctcttcctgcgcctccaacgtctcttacgccaccacttccatctacagattccgctcccagtcctccaccacctattgggtttgg

SEQ ID NO: 11351 - DNA, 481 bp, Glycine max
gaatagtgatcttataagcttggcagcatcgcagttacagagaaaaagagagagagagagagagagaaagtgtaatggcaatggcaacgatggaagagattccacaaagcccagaagcgaagttggggatgcgagtggaggatctttgggacgttcaggaggcacagttgagtcccaccgagaagctcaacgcttgttttgaaagcatccctgtctctgcttttcctttggatccttcaaacacagaaattgagattaaatcagacgccaccctagcagatgctgttaagatattggccgaccacaacgttttcagcgcgcctgtggtggatgttgaggcgcctgaagacgctagttggatggatagatacatcggaattgttgagtttgctggaattgttgtatggattttgcatcagtctgaacctacgtctccgaggactccgtccactccatccagtgcaagggctattgcagctgc

SEQ ID NO: 11352 - DNA, 413 bp, Glycine max
agcagactttctctctctctctctagtttccatagcacacacacacgctaatcattcgacgaggccgcaagtgagtgagagagaagaatcactcactgatccacacacaaaccagaacaaaaccaagcacagacagcgtgcgctcttcttgtgatttgtgttacaagcaaccaaccacactcacacacacccctccataataaaaatcacttccatgctctcttcttcaccccaaccaaaacaaacaggtttgcatttgcttaactggagccagattctgtagctgatttcatcccaataaatctaatgatgcttaagtaactaacactcttcgattggtttctgggttctcttgaagatttggtctttaatcgagtcgaattggatcttgtgatttacttagccgacttcac

SEQ ID NO: 11353 - DNA, 397 bp, Glycine max
agatttcattcaacaaaaccatttttttctctctcactcactcacttcacacaatgaagcacccaaggggctgaccctgtcgtccgcaacgcttgccgcgacaccgtgggtgccctcgctgcacagtatttgaagggctgactctgccgtccgcaacgcttgccgcgacatcgtgggtgccctcgccgcaatttttgaagggaaacgatagagggggtggcgggggaggtgtagggacggtggtggggctgttcgtgaagccactgattgaggcaatgggggagcagaataagggggtgcaggcgggggcggcggtgtgcatggccaagatggtggagtgtggcggtggcggtggaggaagggaagcggtgtcggtggcaacgtttcagaagctatg

SEQ ID NO: 11354 - DNA, 539 bp, Glycine max
gagaaacccaccctggagaagatccgtatgcggcttggaagcgacctcggttcgcaccacccacccttcagaaaacataaacctaattagcctcggcaaaacgaaacacccgtcaccctctcatctcagagcttccatatagaaaccctaaacctaccgaaccctttcaccgcttgttctctgctctttgtcgttcttgtgtgattcgcaatataagggtttggcatggcgagaagacacagcagcagcagcagcgagtcaagtgaggatgacgtgagaaaacgccgtggtagtgaatctgaggatggggagagggatacgtatcgacacggtggtgggagtagtaagaagagttccggtcacttcagtcacagggcgaacggtgatgacagtgattcgggagaagaaagaaatggtgctaagacggatgggaagagtaagagtacggagagaaaggaggagcctgagagctctgaggaggagggtcagattgtgagcaaagagagggttagggaggagaatgaggaagatgggagatt

SEQ ID NO: 11355 - DNA, 1192 bp, Glycine max
aaagatatggcgacgcgggagcagccaaacagaccctgaagcaaccccacgttgcgcatatgtgccctcacaacaaccacaaattacaaatccttggcattcattcaccctttttgtcccctcaactcgatctacgccgacatccatgatcgaccaccgataacttcgccatccctcgccttgcgcagtgttgacgtcgttgttgcgtttctaggaatacgacgacgacgacggtgaaacgctgcgtttcgagaaacgatgaggtcttcttcttcttcggacaggaacaggatcaacatcgctgccagtgctcagaaagtcgatgtcgataaccgaatctccctccgattctactaccgcatcgctgacaacatcctccgacaggctgatatctttcgtgcagagaagaatattattgacctatatgtcatgcttttaagattttctagtttggtgtctgagacaataccacgccaccgagactatagatcatctccacaaaggcagaaagaatcattgacaaagaaattgttaatttcgttgaatgaactggagaacttgaaaccagtggtccaacagaagatcaatgagcttaacagcaaacttgcataccaacaaaatggacagggaaaatttagttcaaataattcactggatttttctcccgtgaaaaagcaaacttcggctagttatggcctaataaaggctgtcaggcctactgctggggagtttgtttaccaaggatcaaggagccaacctttctcttatgtcaggcctgtggaagagcatgcacgaagactatctctaactcttccacctccaaaggaagaaactctctctagacattctatccttggtcccaacgggctaaaagggcagtggagaccacctatcattgataaagggatcaagtatccaagcaacatagatctgtctcctgttgaattaccaagcctacaacattccttggaagatgaatctctgaaaaagaaggataacagcattgcagaacaccataaatcagagttagattcaattctaacccaaagtgaggactgccagccccatccccaacctcagcctcagcatgatcaggagcctccttctcttatttcttttgagacaactgaaacctctgctcgaatagaagttatcagacaaccttctcctccacctgtacttgctgaagtac

SEQ ID NO: 11356 - DNA, 495 bp, Glycine max
aaaaaatgaaaacatatagcatttggttgggcaactaaagcgtggactttttgccagtttttcttcgtcaagatccaccaaacccatcacagaaaatcacgtaagattgtacctccaactcaaaagcttcaaactttttccagtttccaaattaagacacagagagaaaaagcaaaaagaagctgcaaaattttcttcttttgtcacttttttctgttttttcatcacaaaagtttgaaccttttctttccttccattgaatttggatggctggcggcggacgtggggaccggccgccgtggaaggaggcggcgccgccacgacccaccatcactctgccgccgcggtcgggttccatggagaccctttttcaatggagggttcacccctggtcccatgactctgctttctggctttttgggtgatggggatgatggaaagtccttctctcagctcctcgccggagctatggcttctccggtggccggagctgtc

SEQ ID NO: 11357 - DNA, 2086 bp, Glycine max
ggaaaagaaagcatagtgttaaaaagaaaaggaagggcgaagttgaaaaaccaaaacccttggcgagtgaagccctagactcactagactacacacttcgcaatggcggttgttgctcaaacccctgacatcgccggcgagcggcagtccggccaagacgttcgcacccaaaacgttgtggcatgccaagccgttgccaacatcgtcaaaagctctttaggccccgttggcctcgacaagatgctcgtcgacgacattggcgacgtcaccatcaccaacgacggcgccacgattctcaagatgctggaagtggagcatcctgctgccaaggttttggttgaactcgccgagcttcaggatcgagaagtcggagacggcactacttcggtcgtcattgtagctgctgagcttctcaaaagggcaaatgaccttgtcaggaacaagattcatcctacctcgattatcagtggatatagacttgctatgcgtgaggcttgtaaatatgtagaagaaaaactagctgtcaaggttgaaaagctgggaaaggattcactaattaactgtgccaagaccagtatgtcctcaaagttgatagctggtgatagtgacttctttgccattttggttgtagatgcagtgcaagctgtaaagatgaccaatgctcgaggtgaagttaaatacccaatcaagggaatcaatatcttgaaagctcatggaaaaagtgctagagacagctttctgatgaatggttatgctctaaatactggccgtgctgctcaaggaatgcctcttagggttgcccctgcaagaattgcctgtcttgatttcaatcttcagaagacaaaaatgcagttgggtgttcaagttttagttactgatcctagggagctagagaaaattcgtcaaagagaggctgatatgactaaggaacgtattgaaaaactgctgaaggctggagctaatgttattctgacaactaaaggaattgatgacatggctcttaagtactttgttgaggctggggcaattgctgtaagacgtgtgcggaaagaggacatgcgccatgttgccaaggctactggtgcaacattggtctcaacatttgctgatatggaaggggaggaaacatttgaaccatcttttcttggatatgctgatgaggttgttgaggagcgaatttctgatgatgctgtagttatgatcaaagggaccaaaactacaagcgcagtcactttgattctaagaggtgcaaatgaccatatgcttgatgagatggacagagctctgcatgatgcattgtcaattgtcaagagaactcttgaatcaaatacggtggtagctggtggaggtgctgttgaggcagcattatcagtttatttagagtaccttgctacaactttaggatctcgggagcagttggctatagcagaatttgctgagtctctgttaattattccaaaggtgctttctgttaatgctgctaaggatgccactgagctggtcgcaaaattacgggcctaccaccattcagcacaaactaaagccgataagaaacatttatcaagtatgggtttggacctttctgaagggaaaatcagaaacaacttggaggctggagtcattgagcctgcaatgagcaaagtaaaaattattcagtttgcaactgaagctgccattactatccttcgaattgatgacatgatcaagcttatcaaggatgaaagtcaaaatgaggattaaagtataactgaatctaggaggcatctactccccagtgcttacaaaagggagggttgtgctagtgtgcatttgaagagggtatctgcatttaatcttcaatgcccttgttcttgaaggaaaactgctctaattatttttctgaaagtagctttattatatttacatctttgcattttatattccaacaatttttaggcaaacatttttggtcatgcattggctggttgcatgtttgtacatttctttgaggcagtgtttgatttgtgaaattttgatgtttcgttggtagtaagtagtttttaatacgtgtgcgaatgggattatgatgccattttattcttcttcc

SEQ ID NO: 11358 - DNA, 1393 bp, Glycine max
tgacaggattgtcctctgcattagattgttgtgcaatactggtgatgaaataaggaagatatggctgcaatcttgcagacagagctttgtgaaaatgcttgcagataagcagcgtcgtgagactgaggagattaaagctaagccgcaaatttctaatgcacagcctgatgatcttattgatttttaccatctgaagagcaggaagggtatgagccaacttgagctggaagatgaggttcaagacgatctcaaacgtgctactggggagtttacaaaggatgcagatgatgcaaataagctcaatcgcattcttcagctcactggattcagtgatcctgtttatgctgaagcatatgtcacagtgcatcactatgacattgtccttgatgttactgtcatcaaccgaaccaaggaaactcttcagaatttatgtttggagttagcaaccatgggtgatctcaaacttgttgagcgtccacaaaactatacgcttgctccagaatcaagcaaacaaattaaagccaacattaaggtttcatcaactgaaacaggagttatatttggtaacatagtctatgagacatcttctaatgttcttgagagaacagttattgttctaaatgatatccatattgacatcatggactacatttctcctgcatcttgtgccgatgtggcattcagaactatgtgggctgagtttgagtgggaaaacaaggttgccgtaaatacagtattacaagatgagagggacttcctgaaccacattatcaagtctacaaatatgaagtgcctgactccaccatcggcattggaaggggattgtggattccttgctgcaaacctttatgctaagagtgtttttggggaagatgctttggtgaatgtgagcattgaaaagcaatcagatggtaagttgagtggatacatcagaataagaagtaaaactcagggaattgccctcagtcttggggataagataactttgaaacagaagggagccgcttaataggagtaaatgccctgttttctctgatgtttcttcgcttgtatgtcttatcaactttgtgtagcttccggtggcggctaacttcaagcttggttattgcttcaaattctgaggcttttggtggcagcccgcttgttagtatttattttttttttccttttgaattttcaattttgtctgtattctttccttggatattgcttaagaaaaatccttattacccatcttttatttttctacacatggggacggacaccgtatattgatatgagaatcaatctagtgactattgttctggttggccttgcatacatatgttcggataataatcattaatgataaatgatacctccagtttcgattataagtaaaaaaaaaaaaaaa

SEQ ID NO: 11359 - DNA, 577 bp, Glycine max
  unsure (1)..(577): unsure at all n locations
aggagaatatcattgtccagtgctaaacaaagttttcactgaatttactcatattgtggcagtgaagaccacaggaaatgtgttctgctatgaggctgttaaagagttaaatattaagacaaaaaactggaaggagctcctcaccgatganccattcactaaggatgaccttataaccattcaaaatcctaatgcacttgacagcaaggttcttctggattttgatcatgttaaaaatagtttgaaagttgatgatgaagaactacagaaaatgagttcagatccaacctataacataaacatgtcgggtgatataaagcaaatgcttaaggagcttggaactgagaaaggaaaggaaactgcattgcatgggggaggcggtggcaaggcacaaaaagaaagagctgctgcacttgctgccatcttagctgcaaggtcacgtgttgaagaagattccaaatcaaatccaaataaagaggtcaaagtttctcaggcatttagtattgtagatgctgcgtctgcctcagtacatggaagaagtgcagctgctgctaaagcctcagcagatgataaaact

SEQ ID NO: 11360 - DNA, 382 bp, Glycine max
acccacgcgtcaggaagaatttgatggagtaaaaaaaagcagaaatgagcagcgattccctgtctctggggaacctgtttgtcttatatgtggaagatatggcgaatatatatgcaacgagacagatgatgatgtctgtagcatggaatgcaaaagtgaacttctggaaattcgtaaactcaatgagggatcctcccacaaccaagttagagatatctcctcatctggaattagtgctgctgtaccagttccagtttttggtgatgatacctgggattataatcaacatcactggtccaaaaagacatgtagtctttctacttatgaatgttgggaatgtcaaagacctggccacctagctgaagattgtatggtcactgat

SEQ ID NO: 11361 - DNA, 427 bp, Glycine max
gccacgcgtcaggtggagtgtgagtgagtgagtccttggtccgaagcaatgcaagaagaagaagcatagcagagaagcagcaatgacaagagcaatgctcctggtgttattccctcaagacaacaaagccaagttcaacttcccttctccttctaagtctcttgtctccaaagcacaatccactatctcaatctgcctccttctctttttcacaactctcctcctttttactctctccaccctcccaaacacccctcacacccctcccactcagcctcctaaacccaccccccaccacctggctctccagcgcatgggcactctccaccgcagaggcaccaaatccatgtccgacctcctcatctgccacgtgcctgacgaaacccccctccaagacttccgcatcttcctccgccttctccaacgt

SEQ ID NO: 11362 - DNA, 375 bp, Glycine max
gcgtcagcagaaaatacaatccaaatgatgaaatagatgttcatgatttgagaacaataaaatcaagtaaatggggtgcaactgaacaatttcaagatgcatatgaatgtgaagagtgggtagatgaccgagatatggatatgttgtattcatctggtaatgttgaattgaaccctaagatatacacgaagtataaccatgcatatgacgaggtggccaatgaaggagattttccagctgatgagtgggttatacctcaagggtctatgggacatgttcaaaggcagtcatttcaatttcggcagttttccaatccatatataaagcagcactcaaagtctagttcttcaaactggtataaatcccagcattttt

SEQ ID NO: 11363 - DNA, 430 bp, Glycine max
gacgcacgcgtcaacccacgacgtccgtgttagaccattattttcaaaattcactatgagagcacacaaactcttgttgttttttatacaattctgcttaataaactatagtgccaacatctttccagcaaatggttattttcttggccatcagtgttccattgtcctccatttgaaaaataacctaatattcaactctacaaaatccaaaaagcttaccctttggaaccaaactgaagattgttgccaatggcatggggtgacatgcaacgaggggcgtgttatagcccttgatctcagtgaggagtctatctcgggaggactcgttaattcaagctctcttttcagccttcaatatctacagagcttgaatttggctttcaataacttaagttcggtgattccttcggagttgtacaagctgaataat

SEQ ID NO: 11364 - DNA, 1315 bp, Glycine max
tccaaatctttccccttagtctccgctcttcttcctcctctccttcatcatcaaacctttctctttctttctctcttgtttctctctcctcctgcggcaatggaggacctgtggaagcgcgcgaagaccttcgccgaagaggccgcgaagaaatcccaatccctgaccccttcctcctcccggatcgccgatctcgtctccgaaaccgcctagaaatcgaaggagctcgccgccgaagcctgcaagaaggccgacatcctcaaatccgccgcgctccgccaccgccccgccctctgcgacgccgcaggagctcgagaagttcggcgtcaccgacgacctcagatctttcgtcaagggcctcacttgcaccaccttgcagaactttcctctcagttccgatgaatcggaggtttctgatgtgactactgtgggatccaatgttcggaaggatctaaacgagtttcaggaaaagcatgccactctcgttttaactactgttaaggaaatttcaagattgagatatgaactatgtccacgtgctatgaaagaaagacacttttggaagatatatttcacacttgtcaacactcatgttgctccgtatgagaaagaatatatggaggaggttcagcttagagcggcggcagagcagaatgtggatactaaggtagagcaacctgctgttactggaggaactggaaaggcagaagcaacagggaacaatttgaagggtagaccttctaattcatcctctactgaacaagacttagatacatttcttcttggagatcttgaagacagtgatgaagctccagatgacggtgagggcagttttgatgatgattttgacaagattggcaattcagatgttgaagatgagaagcatgtgaagaaaactgctgcaacagtttaggattcccccaattacttttggttgagagactgaagtcaaaatgaactttgctgcttgcaactatccctgagatatcagtgaatccataaaggcaaacggttgtagcagcctggaattaaagaatggtggctgtagcactgtgtagatttggcgaattggtcggaaaaaactgaagtaactcgtcattgtttatttgtttaccttaataccctatatagtggcagattgattttggataaaatggtggtgctgagccctgttgccttgtacagttgaccttggtcgttgatgttgctttcaatttgtaaactgctttagaactcttcgaacgtattgtcgcttcttcttcattcagtcccaatgtataatcacatttttgtttaatgtcaaaatgatcatatc

SEQ ID NO: 11365 - DNA, 551 bp, Glycine max
agagctatgacggcgcatggccgcggacgcaaggttggaatttcggttgaggcggttggggttctttcccaataattttaaaaccttgggggttctcttttttctctctcctccggtggcaatggaggacctgtggaagcgcgcgaagaccttcgccgaagaggccgcgaagaaatcccaatccctgaccccttcctcctcccggatcgccgatctcgtctccgaaaccgccaagaaatcgaaggagctcgccgccgaagcctccaagaaggccgacatcctcaaatccgccgcgcttcgccaggcagaccagatcaagtccttctccgacacaatcgcaattcctccccaattcgccgccattgcctccgccgccacttccgccgccacctccccgccctccgcacgccgcaggagctcgagaagttcggcgtcactgatgacctccgatccttcgtcaagggcctcacttccaccaccttccagaactttcctcttagttccgacgaatcggagggctctgatgtgactactgtgggatccaatgttcg

SEQ ID NO: 11366 - DNA, 477 bp, Glycine max
tgaagatgccttctgatgctgaattgatgagaatcgcaataagtgacttgaataacgtgtctacatccttggaagataggcaccgtgctttacaggagcttcttgagcttgttgagtcgattgataatgcaaatgatttaagcaaacttggaggacttctcgcggttagagaagaactttattgctctgatcctggtataaggacaattgctgcatgggttcttggaaaagctagtcaaaataatgcaattgttcagcagcagatcttggtacttggagtgctctcaaggctgatgaaaatggtaaactctaattcgatggaagaagccaataaagcattatatgctgtttcagctttgattaggaatgatttggctagtcaggggttgttctatgctgaagctggaggttggatgcttcaggatattttgagtaatacaagtcttgatgtcagactacggaggaaagctgtacgtc

SEQ ID NO: 11367 - DNA, 424 bp, Glycine max
acgcgtcaaggtgactctcgggttttacaacgcagcttttcatcgttcagtctaaggcacacgcacaccatcaagtcatcttctggtctgctgatatctatggcatattacagagatgatcgatttgcaacatttgaacagttttatcgttgttaccctgtctccttcattgagaaggtacgatcactgatttagccttatgtcaataataacttcctttgctagtttctttcagaggaaataaaagaagaggtgagaaaattttgaaatttgaattgaggagaaaaattttctcttctatcctcctattttctttcctctcatccaaacatgtcataaactatttctattcacaaagtcaacatattccttgggatttatatttgggccctgtgattgatcaaaggggtctgatctgtgatca

SEQ ID NO: 11368 - DNA, 891 bp, Glycine max
gggtcggccacgcgtccgatcaaccacgccaccgtcttggctccacccccgccaaaatcaccctcccaattccatttccacttttgcccctccccggcgctcccaattcccaattattcgccccaatctcagttcgatttcgcagaacactggattccagaagctcggttcttgatcgccaagaaacggagccctaaaaataattcttttagggtttctctgtctctgtgtggttttggcactaaaacttttgatccgtttgagaatgggggatcgaggagaagacgaggatttgcaaatggcgattcggatgagcatgcagcgtgggacgccggagccgaagcgcagcaagccgcttgacgccgtcgccggggcggtttcggggtcgccagaggagtctccggagtacaagacccggcgacgggagctcatggcggcggcggccgagaagcgtatggcggcagcggcgagggtttcgcctccgccgtcaccgtcgccatcaccggtgaaaaagggcggtgaattggggaggagtgaggaagattcgcgtttgaagagtgtgaatttgagtaaggagctttctgcggaagaagctaatcaattgtttggtatggtgtttgggaatgaagtttctaagggcattcttgcacagtggagcaaccagggaattcggtttagctctgatcctgtaacatcaatgggcctagtgcagcatgaaggcggtccctgtggcgttttggcagctatacaagcatttgtgcttaaatacattcttttcttcagtgatgagttgaaagatgtgtcatgcatgtcaccggagggtctgggtgcgtcatttaaaagtcagtctattccatcatataatttttcttcactcactgaaggtgaaaa

SEQ ID NO: 11369 - DNA, 346 bp, Glycine max
caaagattcatcctcacacgccaccgttttcacccactccacgccaccgtcgtggctccacccccgccaaaaccaccctcccaattccatttccatttttaccccttcccagcgctccgaattccaattcgccccaatcgcagttcggttctcgatctccaagaaacggagtcctaaaaatagttcttttagggtttctctgtctcggtggttttgggattgaaacttttgttccgtttaagaatgggggatcgaggtgaagacgaggatttgcaaatggcgattcggatgagcatgcagcgcgggacgccggagccgaagcgcagcaagccgcgtgacgcccgtc

SEQ ID NO: 11370 - DNA, 1621 bp, Glycine max
aactgctcacaaactcatggtagcaatgttggatggagatgagcggtttattgagcctacaccaaaatcactggaaaatttaaccctgcaatctgttaaggatgcagtgatgaatcaattttttggtgataacatggaggtatgcattgtaggtgacttcactgaggaggacattgaatcttgcattcttgattaccttggcacagctcaggccgcaagaaatcacgaaagagagcaagaattcaacccacccttatttcgaccatctccatctgatttgcagtttcaagaagtatttttgaaggacaccgatgagagggcatccgcttatatagccggaccagcgccaaaccgttggggttttacctgtgggggagtagacttgttagagtcaattaataatgcatcaataatcaatgatgatcagtcaaaatctaatgcacaacagacacaaggtttgcagaagagcctttgtggtcatcctcttttctttggtataacaatgggactgctttctgagatcataaattctaggctcttcacatctgtcagagattctctggggttaacatatgacgtgtcatttgaattaaacttgtttgataggcttaaactaggatggtatgtgatctctgtgacatcaactccaagcaaggtccacaaagctgttgatgcatgcaagaatgttcttagaggcctgcatagcaataaaattactgagagggaattggacagggctaaacggacccttcttatgagacatgaagctgaaattaagtcaaatgcctactggttaggattattagctcatttacaagcttcttctgttccaaggaaggacatatcatgtatcaaggatctaacatttctatatgaagttgccactattgaggatatataccgtgcatatgaacagttgaaagtggatgagaattctttatattcatgcattggaattgctggtgctcaggctgcacaagaaatagcagctccgttagaagaggaagtagcagatgatgtttatccaggtgttattccggtgggacgaggtttatctacaatgacacggccaactacctgatatttttggactatgttttggcctgcttgctttaagatcgggaggagtgtctggaagtttgatgacaagttatcgttcgaaggattagctgcatgtgtgacaacacaagaagttgctgcattcatttaaacattcaacccattcggaatacaagctgttcgatcaaacctgggaagcggttattgacttgcgtgtgattgatttcctcaattatccttatctccagttgaatcactaataaaatgctgttactacctatactttgtagaattagaataaagaaaaaatgtagaatcaatcactaagatgtagatgtatgtataggtgccattttttgtccctcggccgtaaatttttttcgggggaactccgaccgtatcttagcgtaggaagttagttatataaattgtacatcattgtttccgcgtatgtaaaccaagtttcttcatcccatcgaaacgggaacttgaatgataaattttcatgtttccccaaacctttcatttgaaggagtactggaggcagggtgatggttttcaa

SEQ ID NO: 11371 - DNA, 617 bp, Glycine max
attgtgctcttcacctttcactccacgaaatcaaaaacaagtgctaagaagctccgtgtctctattctcaaacatgtagcaccaaacccaagttggcatccaagttttataacactaatactgcatataatattattataatatacataacaacagttattgatattgttgtgattgtgtgtgattttggtgtcgtccctttttcttatgtttaaggttgtacggagtttatgtgttgattcaattcgtcgataagaaaccttagtttgatattttgattggttctgtggagagtttttttttctttggtgtggtttttggtttgtgctgtttttggttgggaataacaatggccgatgaaggaaacaaaagcaataacttctattcgatcttgggcttgagcaaggagtgcactgaattggagctaaagaatgcttataggaaacttgcaaagaaatggcacccagatcgttgttcagccaccgggaattcagagttagtggaagaagctaagaaaaaatttcaggaaattcgggaagcctattcagttttatctgacgccaactaaaggttatatgtacgacgtgggagtctacgacagggatgacgactagaac

SEQ ID NO: 11372 - DNA, 666 bp, Glycine max
ccgggtcgacccaagcgtcagccaatactgagcggggcagcattgagaccagaggtggctttgtctcaaacatgccaggagatgttgcaagagtgaatgggcagctagcagtttctcgagctttcggagacaaaaacctcaaaacgcacttgcgatctgatcctgacattcagtatactgacattaccccagatgttgagcttttgatacttgctagtgatggtctatggaaggtaatggcaaaccaagaagctgttgatgttgcaagaaggataaaggatccacaaaaggcagcgaaacaactagccactgaggcattgaacagagacagtaaggatgatatttcctgcattgtagttcgtttcaagggttgaaaaaggggaacatacatactctctaaattcagggtatatatattctacatatcaagatgcaattccatgctcatgaaatccattatcaatttggaatttcctgcaaaaataggttttgccccatcccttcatatgtaaaaatataaaatttaagttctcgaatttaggtcgtgctgtttagctgtttagtatttcttgattcttcgttgtgtagaatcacaccataatttttctttgtaatatgcattgttatgttgtggagcagtgtgaagaagatggcagcagtttatac

SEQ ID NO: 11373 - DNA, 463 bp, Glycine max
ctcacgggtcgacacacgcgtcaactcaggttatggttaccttggggtacatgcacagtcaaggtgttcataccctttttatataacattctcaagaaagcaaacttatggtacttttttttttggtctacttacatgatataattattgtaggtgataatgggttaatgaccttaaaaaacaaattataagggagaagttagctacttagtttgagaagaatgatcttcggaagctgaagtacattcttgggatagaagttgcctactctaagtaaggtatctttaattctcaaaggaaatatgtgcttgatctccttaaatagactggtaagttgggttgtaagatgtgcttgaccatgtgtacagggcccttaaccagctaaaatactcctaaagaaagacacatcagataaatctggattctaccatattttggaggaggaaactccaatacatgaagt

SEQ ID NO: 11374 - DNA, 568 bp, Glycine max
ggtatcggtcaggaattcacgggtcgaccacgcgtcaggacaattcgggcttctcgggcccgcgccgcagccccagtttcaacaacacgtggggccgtggcgggagccgtggtggcggtggtgccggtgccggtgccggtagaggggtggtggtgaaggcggagaaagtctgtaattattggattcaggggaattgtagttatggagagaggtgcaagttccttcacacttggagtgtgggggatgggttttctttgctgacccagcttgaagggcatcagaaggctgtgagtgcaattgcctttccctctggttcagataagctgtataccggaagcactgatgagactgcaaggatttgggactgccaatctggaaagtgtgtaggtgtgatcaatcttggtggtgaagtaggttgtatgatcagtgaaagcccttgggtctttgttgggatacccaattttggcaaggcctggaacacacaaaatttatcggagctaagtctaaatggtcctgttggacaagtttatgcacttgttgtgaataatgatatgctctttgctggtac

SEQ ID NO: 11375 - DNA, 1499 bp, Glycine max
cctgcttatccttgtatgaactccacttacaatgtgacatcaagtacattgcgtgtgatgtcagatgagtttcgaaggggaagtgaaatatgtgaggctatggaggctagcaaggctgattgggatactctttttgagccttatcccttttttgaatcatacaagaattatctacagatagatataacagcagagaatgcagatgaccttagacaatggaaaggttgggttgagtctcgtctccgccagttgacattgaagattgagaggcacacttatggtatgcttcaatgtcatccacatcctggtgaattctcagacaattctagaccctttcaccactgttactttatgggtctgcagcgtaagcaaggagttccagtgaatgaaggtgaacagtttgatataaggctaactgttgaagaatttaaacattctgtcaatgcttacactctatggaaacctggaatgaatatccatgtgtcccatgtgaaacgccgtaacattcctaactacatatttcctggtggtgtccgacctaccttcccatcaaaagtaactgccgagaataaacaaagttccaaatcaagggttcctggccatggtcaagctgaaaagcctcaaggaggtaaaacagttgtagttggagcagatgatgtaaggaagagaaagagatcagaggacataatggataataacccaaggaattccaagtcccctgtatctttagctccccccagcagggaagttaatgaggatatatctcctattagtgcttcaagttcttgttctatgaaatttgatgaatcagaagtcaatagtattggtggacaaaagagcgagaaaccttgtctgaattctccaggggagattccttctggggatagtgggaccaatggatcagtgacaaacaaccaacaagtgaaccccgtacttgcagctgctgatacatctaattctaaagaagaagaaaagctagccattgaaaagattatgtccggtccgtatgatgcacatcaagcctttccagaagaacctgaagagcttgaagacgatactcagtataaaaatcaagacaaagattctggtgggaacatgaaaaacaacatggaatctttactctcaaagcctgcagtggcagaagagccagttatttctaaggaaattacttgttcaactcatttattctccaatgagatcttggaggagcttgagcctgctgagctatcagcaccattgttaagtgggcctcctgcacctttaccaatgaagaagccgcttatcaggttgaacttcacctccttaggcaaagctgctgacaaaagtgcttaagctgcaactagctgatttatgtaaaattgacatttctagttccttgtttatttatgtaataattatgatgcagtaaataaacctgagctagaaaagccatcaattttcattgatatgtacatgagaatatgttgccccggcaaaataaaacagattttgatgggttt

SEQ ID NO: 11376 - DNA, 430 bp, Glycine max
  unsure (1)..(430): unsure at all n locations
ttgtaaaatgacacccaaatataacgtcattgggggttttgagggcaaagaggaagagataaaggaaggaagggaaagctctcttggagtctgcaaggttgtggaagcctccctgctggagaatccacaagtttatgcttaattattcatttgtttttgtcaagtatacagatactgtttcaggattaaattcgaacttattcaatttttgaatgatatatatagtgtgcaagcaaatataggcacaattagaatgtttgcaatgtattgaactccttaatatgtccttacccttcaagggctgctttgtggtttggcaaagtatttgtacttttgtagtaacaaagagtactctgatggtaataattcctcctaattaatcattctgccnnnnnnnnnnnnnnnnnnnnnnnnnnnnnnnnnnnnnnnn

SEQ ID NO: 11377 - DNA, 756 bp, Glycine max
  unsure (1)..(756): unsure at all n locations
nnggggggcgctaggagaagggaaaggagaagagaattattgaatagtgaataataataataataataataataataataatagtagtgtggaattggatcagatctgtttgttagagagagatgtcacgggggagatctgattcgggagggtggttgaggggctgtctggtggttttcgcagtggtctcagcgttgggcgtgtgtggccctgctctttactggcgattcaagaacgccatcactctccgcaacaacaacaacaaactctcttgcccttcctgcctctgtgactgccctccccctctctcgctcttccaacttgctcctgggctggcgaatctctctgtctcagattgtggaagtaatgacccggatctaaaggaggagatggagaagcagtttgtggaccttctcagcgaggagttgaagttgcaagagtctgttactgaagcaaacactcggcacatgaacataactttggctgaagcaaaaagagtggcgtctcagtaccagagagaggcagataaatgcataactgcaactgaaacatgcgagcaggcaagagaacgtgctcaggccatacttaccaaggagaaaaagatgactttggtgtgggagaaacgagctcgtcaaatgggttgggaaggagaataactgcataagttgtgttatttatattctttatggctataatcatgatcgtggttttatacaagtatacaagcaaaatgcttgagttgtcaaacttacgtta

SEQ ID NO: 11378 - DNA, 663 bp, Glycine max
aaactcgtccccttttcaatcaccaacaccgtcctcttctaacaaccccccacaaacatctcaccctgctttaacatctgccaatcacacaagtacgacactctcaccagctaatatttccatgcaacaacagcagtcatctatttctggtgaacctgaccctagtgatgctcatagctcagtccagaaaatcatccatgagatgatgatgtcctcccagattaatggcaatggtggaatggtcggtgttggatctcttggaaatgatgtgaagaatgtaagtggtattcttccagtgagtgccaatacagggctaaatggtggcaatggcttggtgggtaacggcccaatgaacagtaattcaggcgttggggttggtaattatggcacaatgggtctcggtcaatccgctatgcctaatggaatcagaactctatgaattctagacaaccaaattcaatgaacaatgcaagcagtccatatggaggtagttctgttcagattccttccccaggttcctccagtacagtgccacaagcccagccaaactcgtccccttttcaatcaccaacaccgtcctcttctaacaaccccccacaaacatctcaccctgctttaacatctgccaatcacatgagtacaacaaactctccagctaatatt

SEQ ID NO: 11379 - DNA, 725 bp, Glycine max
  unsure (1)..(725): unsure at all n locations
tctggtgaacctgcacgtagttatgatcaagctcagatacagagagtgatgctagagatgatgatgtcatatcagattagtggcgatggtgccatgctggtagtcggatctcttgagaatgatgtgaagaatgtacatggtattctgccagtgagtgcagatcagggcatctatggtggcaatgacttggtgggtaatggcacaatgaacagtaattcaggcgctggggttggtaattatggcacaatgggtctcggtcaatctgctatgcataatgcaatcagatctgctatggtaaataattcaatcatgaatggaaggggaggaatggcgtctcttgcccgggatcaagctatgaatcatcaacaggatatgtcaaaccaactacttagtggactaggggccgttggtggttttagtaatcttcaatttgattggaaaccttctccttgagagccctttgtagatttatgaatgttgtggttcttgacagttgctcatgcaacatgagcaatggtatttgccttcggcccctgatgctatggctgaaagtatttgggttgggtagtcacagggcgtaggccactgtgctaatatatgaatttatatataagaaatgaaaatttgttggctggttgtgtggctgatggggctgatttttcttgtgaattcaagtgtaactttttatattaatttttcttatgagctttcgcaaaaaaaanaaa

SEQ ID NO: 11380 - DNA, 427 bp, Glycine max
attgcagttaaaaccccaacagacacactccatctattcgattttatttaattttcgtgaatgaattaattttggaatcccgcgcaatctgtcggaagcaagcaagcaagcaattccttttgttttgttatgtttcttctctctcgcgcgccctaattctcgaatctctgtatcggtgttccgatggcggaggagaagagggcgccgtcgtcgttcgtgaagaaaggcgaccggcaaatgttcacggtggagctctggccaggtgagaccaccatagtttcctggaaaaaactgtttaaaggacgctaacaagcacaacggattcacttcggcgccacaacacgtcgcaatcgctccgggtcaacctgtggaggttgaagaaacagatccttctcagccaaaccgtttcagtgctgtaatagagaag

SEQ ID NO: 11381 - DNA, 816 bp, Glycine max
cggctcgaggtttccagttccttccattcctttgttccttccattcctttcttccggatcacagggaaaataaaaaacaatggagttggacttgacaccaaagacagcagaagtgttgtttgagggagatggtggaggttactacacttggtggagttctaaagtgccactgctggccaagaccaatgttggtgctggtcggttagtgcttcagcctcagggctttgctattcctcattattcagatatatccaaagtaggttatgtgcttcaagggaacgatggcgtagctgggatggccctccgcaacagtactactagagaagaggtggttgtgaagcttaagaagggagatgttataccagtacctattggaagtgtctcgtggtggttcaacgatggggactcagatcttgtcattgtttttcttggagaaacttcaaaggctcttattcctggcgaaattagttatttctttctaaccgggcttcaaggagttataggaggcttctctaatgagctcacaagcaaaatatatggtttggacaaagatggggtggaaaagctcacaaaaagccaaagtggggttgtgatcatcaaattagacaaaagccaatctttgcctaagccccaaatggaaataaccaaaaagctagtctataatatagatgttgcacacccccggaaaatgttgtggaaaatgcttgggatagtcaaaaccttaacggagcaagattttcctcttattgggggggaggtggggggggataagtgtgaattaagactgaaccggtgctattaaggaccatcataccc

SEQ ID NO: 11382 - DNA, 769 bp, Glycine max
aatgaacatgaccaaaaagctagtctataatatagatgctgcacgcccagaaaatgttgtggaaaatgctggattagtcaaaaccttaacggagaaagattttccttttattggggatgttgggttaagtgtgattagagtgaaacttgaaccgggtgctattaaggcaccatcatacccaaccaaccctacggttcagttgatttacattgccagaggaagtggcaagattgaaattgtggactttagtgggaagtgtgcattagagactcaagttgaggctggtcatttgcttgttgtgccacaattctttgtggttgcacaaattgctggggaagaaggaattgagagttactctatcgtgacaactacaaagcctttatttgaagagttgggtggaagggcatcaatttggagcgccttgtcaccatctgtgcaacaagcatctcttcacgtggattcagaatttcaaagcctcttcatatccaagatcaaggaaaccacaaatctcattcctcccactactaattagtcactttgtttatgcatatatttatgtattttcaatgtatgatgttgagtgtttacttacccttgagttgcttttggagaaaaagtctgtgttgcgatcaaccagaaatgttaaaataaaccaagtgtgacaacctatttccaataatttcataaaatatgagttttatgtgctaataaagttgtatatggattggatatacttttggcccaaataatttatctccatttgatatca

SEQ ID NO: 11383 - DNA, 792 bp, Glycine max
cccacgcgtccgatggagcagaaaaattggaaccttctcgatgaagctttagggcttaacaacaacaatgcgaagccatggcctctgtgtggtcgcttcgtgcttgtggaagattgtgttgacacaagcgccgctttcgttcttcaccaaatcctcaaacgctccttctcttctcacccttcttccgccgtcgtcttcctcgctttctctcaccctttttcccactatgatcgcgtcctcagaaagcttggttgcaacttagctgctcaaagagataatggaagattgtttttccttgacatgcttatgttgcagtgtccagatgaaggaaaagccaatcatgatgggcttgcttctgtatttgagcaaattgaaagagtgatcactgcattacatcaagacaagaaattcatctctatcatgatagatgatatatcctttcttgaagttgctgctagtggctcttccaatgatgtttgaaacttggtgcattattgccatacgttaacatctgattcagaatatggttgtgcatttattgcactcgaccataaggacatttatttgaacggagacaggactgctgttatgttagagatggagttccttgctgacattttggtcaaggctgaaccattggccactggtttggcaaaagatgtgcatgggcagttgatggtgttagataaggaaacactgcttcgacatggagtttcaacccttaagactcacatttttcactttcatatcaatgaaaatggcattttatgctttaattctgaaacaaaaatt

SEQ ID NO: 11384 - DNA, 415 bp, Glycine max
tgaaggttggaaattttaatcctgccaaactttataggattccaattccctccctttgagggatagaaagaacgcagcattcaaactttagtagtactaattttgatctttctcttagcatctagttctacttgctcttgttcttcttctttcattcaagctttgtgagtgattcttagaaatcgatctctagctacaatgaacgattgggctcctcctctcatagctgcggctttgttttggctcttgagcccgggaatgatctttcagttgccggggaagaatgcaccctttcagtttatgaacatgaagaccactgttgcatccatgtttgtgcacactgttatttatggtctgtttctgatgttgttcttcgttgttcttagtatccatctttatatttaagcagcaacat

SEQ ID NO: 11385 - DNA, 841 bp, Glycine max
gtaataattggtccacctatgtgggctgcaatcatgtaaatagtacagaagggaggatccatacttggccatctatcttggggtttttacgttgggtctttctattgtgatgatgaccctttatccagtactaatagctccactcttcaataagttcactccacttccagaatggtcaactcagggagaaaatcgagaaacttgcttcctccctcaactatccgttaaagaaactatttgttgtcgatggatccacaagatcaagtcacagcaatgcctatatgtatggattcttcaagaacaagaggattgtcctttatgacacattaattcaacagtgcaaagacgatgaggaaattgttgctgttattgcccatgagttgggacactggaagctcaaccatactgtgtacacatttgttgctatgcagattcttacacttctacaatttggaggatatacactagtgcgaaattcagctgatctgtatcgaagctttgggtttgatacgcagccagtcctcattgggctcatcatatttcagcatactgtaatcccacttcagcaattggtcagctttggtctgaacctagtcagccgatcatttgaatttcaggctgatggctttgccaagaagcttggatatgcatctggattacgcggtggtcttgtgaaactacaggaggagaatctgtcagctatgaatacagatccttggtactctgcttatcactattctcatcctccccttgttgaaagattggccgcgctggacgaagcggataagaaagaagactaagcaagcaacttaaagatgaagagcagctaaaattggttgta

SEQ ID NO: 11386 - DNA, 1381 bp, Glycine max
actcgaccgctcgagccgctcgagccggctagccaacctcaaataacccttgttatctctctttcattctcacttgtactcatctctttttcacaactttttttgtaccttctgatctaatggcagttccagtgattgatttttcaaagctgaatggtgaagaaagaaccaaaactatggcacagattgctaatgggtgtgaagagtggggattttttcagttgatcaaccatggtattccagaggaactccttgagagggtgaagaaggttgcctctgagttctataagctggaaagagaggagaatttcaagaactccacatcagtgaagctactaagcgattcagtcgaaaagaagagcagcgaaaagctggagcatgcggattgggaggatgttatcactctccttgatgataacgaatggccagaaaaaacaccaggcttcagggaaaccatggcgaaatatcgggccgagctaaagaaattggcagagaaagtgatggaggtgatggatgagaatcttggcttaaccaaagggtacatcaagaaggcactgaatggtggagatggagacaatgccttctttggcaccaaggtgagccactaccctccatgtccccatccagagctcgtgaagggtctgcgagctcacaccgatgcaggaggcgtaatcctactcttccaagatgacaaggttggtggccttcagatgctgaaagaagggcaatggattgatgtgcagcctttgccaaatgccattgtcatcaacactggtgaccagattgaggtcctgagcaatggtagatacaagagttgctggcacagggttctggccacaccagatgggaacagaagatcaattgcctccttctataatccttcattcaaggccaccatatgtcctgcaccacaacttgtggagaaagaagaccaacaagtagatgaaacttatcctaagtttgtttttggtgactacatgtctgtctatgctgagcagaagttccttcccaaggaaccaagattccaagctgttagggccatgtgagaaaagcaacttgctttcgtgtagaaaatgcttttgcgcttcccccccccccacactttttttatttttgaaaaaaaataacttcatctttaagggtcttgctactataagacatgcttgatagtagcaaaggatataccatttggttatcattctctgtatggatttctccagaatcgaaaacccccatgggtattaattagtcttcctttctctacaattttgctttatctttcagtgttatggggggagctagtgtgcatccatctgtgcttgcattgtgcaatagttctttcaaatatattctactctaaagttgtccaccataaatttct

SEQ ID NO: 11387 - DNA, 596 bp, Glycine max
gatcagattgaggtcttgagcaatggtagatacaagagttgctggcacagggttctggccacaccagatgggaacagaagatcaattgcctccttctataatccttcattcaaggccaccatatgtcctgcaccacaacttgtggagaaagaagaccaacaagtagatgaaacttatcctaagtttgtttttggtgactacatgtctgtctatgctgagcagaagttccttcccaaggaaccaagattccaagctgttagggccatgtgagaaaagcaacttgctttcgtatagaaaatgcttttgcgcttccccccactttttttttttgaaaaaaaaaaaaacttcatcttttactttgttttaagggtattggtactataagacatgcttgatagtagaaaagtataccatttggttatcattctctgcacggatttctccagaatagaaaaccaccatgggtattaattagtcttcctttttctagaattttgctttatctttcaatgttatggggggagctagtgtgaatccatctgtgcttgcattgtacaatagttctttcaaatatattctactctaaagttgtcccc

SEQ ID NO: 11388 - DNA, 644 bp, Glycine max
gacacaaacacacggtcattggcattttatcgtacccacatagaccttttctataggtctaaaacaatattcccctccaaaggtgccatggtgtcctcaaggtggaaataaggattaaggaaaggtctcctgtaaagaagaagaagctgttcactccccaactattgtcacactcaggtaatctaggttgtgttttgcttaagaaggaccactatatctcaccaaacataaaagatggatgatccaaagggtagttcctcatggttaaaaattctaaatataagtgacatatttggctggaaagatcatggagagtatggagctcttgcagctatagtcataagcattcttgttcctgtcttgttttcagctttgttctttggagaaaaaaaaaggaaaaatacgaggtgttgccggtagaagttggtggtgaggaatgttttgcagtacgtaatgctagaaaaactgagttggttgaagttccttggaaaggagccccaaccatggctcatctatttgagcaatcctgtaataaatatacctgcaatcgatttcttggaactagaaaactaatacaaaaggagttggttacatctagtgatggcaggaagtttgagaaacttcatttaggagactatgaatgg

SEQ ID NO: 11389 - DNA, 1706 bp, Glycine max
actgatttgcctcttcttctagttggatatggatttggtgcctcctttgttgcactatttgcccagttgggtggtggaatatacacaaaggccgctgatgttggagcagaccttgtcggaaaagtagaacagggaatacctgaagacgaccctaggaatcctgctgttattgctgatctggttggtgacaatgtgggagattgtgctgctcgaggtgctgatctttttgaaagtattgcagctgaaataattagtgccatgatacttggtggaacaatggcacaacgctgtaaaattgcagatccatctggcttcatcttgtttcctcttgttgttcactcattcgatctgatagtttcatcagctggaatattttctatcaggggtacacgtgaaactggagttatagttcctgtggaggatccaatgacaattcttcagaaaggatattcttttacgattgttttagctgttctggcattcggtttgtctacccggtggttactttacactgagcaagcaccttcagcatggttcaattttgctttgtgtgggttgattggtattatcactgcttacatatttgtctggattgccaagtattataccgactacaagcatgagcctgtgcgcatattagctctttccagttctactggccatgggactaatataattgcaggagtcagtttgggtctggaatctactgctcttcctgtccttgtcatcagtgtgtcaattatctcagctttctggctgggccacacctgtggactagtagatgaaacaggaaacccaactggtggcctgtttggcacagctgtggcaacaatgggaatgcttagcactgctgcctatattcttaccatggatatgtttggcccaatagctgataatgctggaggaattgtagagatgagtcagcagcctgaaagtgtccgagagataactgatgtccttgatgccgtaggaaacacaaccaaagctaccaccaaagggtttgctattggttctgctgctcttgcatctttccttttgtttagtgcttatatggacgaggtttctgcatttgctcatgaaccttttaaacaggttgatattgctattcccgaagttttcgttggtgggctgctaggttccatgcttatatttgtttttagtgcttgggcctgtgctgctgttggcagaactgcacaagaagttgttaacgaagtgagaaggcagttcattgagaggcctggtataatggattacaaggagaaaccagattatggtcgctgtgttgctattgtagcatctgcgtcgttaagagagatgataaaacctggtgctttggcaatcatttcacctattgtagtgggtattctgttccgtattttgggctactatacagggcaacctttactcggggccaaagttgtggctgctttgctcatgtttgcaacagtgactggtattcttatggcactttttctgaacacagctggtggtgcctgggataatgcaaagaagtacattgagactggagctcttggaggcaagggaagtgaggctcacaaagcagccataactggagatacagtgggagacccattcaaagacacagctgggccttcaatccatgtcctcataaagatgcttgcaacgattacactggtaatggctccagtcttcctgtgagtgagggttgtgttgatatctctatt

SEQ ID NO: 11390 - DNA, 556 bp, Glycine max
ggaagttgagagggttcgtggtgaaagaaatgcagtggctaacaagatgaaagggaaactagaacagtctgagcgtcaaagattgattgaggaaggtaagaatttgaaggagggacttgctgctttggaagaagacttggcgaacttaatgatgagcttcaacaggaagcgcagtgtataccaaacatgactcatccagatgttccaataggaggggaggattgttccaccataaggaagatggttggtagctctcccaaatttagctttcctgtcaaggatcatctccaactaggaaaggagcttgatctatttgattttgatgcagctgcagaggtcagtgggtcaaagttctactacctgaaaaatgaagcagttttgttagagatggctcttgtaaattggacactctctgaagtgatgaagagaggctttactccattaacaacacctgaacttgtgcgatcctctgtggttgaaaaatgtggattccaacctcgtgcaaataatacccagatttattccatcgctgacagtgaccaatgcctcattggca

SEQ ID NO: 11391 - DNA, 479 bp, Glycine max
ataccgtgccgctgatgtgttgaccgttgaccagattaagcagtgtgaggagcttgggattcttgttgacagagatgatcagggcactctgcttcagattttcaccaagcctgttggggacaggccaacgatattcatagagataattcagaggatcgggtgcatggtggaggatgaggaagggaaggtgtaccagaagggtgcatgtgggggttttgggaaaggcaatttttctgagcttttcaaatccattgaagaatatgagaagactttggaagctaaaagaaccgcgtaagcacattggaagaacacaaatactcctttgttgaaatgattaatgaggaatcaatgtggcatagggtgtttatactctataatacatagaattacaatgatagtgtcctcccttgtatgaaaatgaaatcacagaaacttttatggagagtattttcctattaaatactttgagagattacttt

SEQ ID NO: 11392 - DNA, 1114 bp, Glycine max
agacgcaatgcccatgtacactccatcactctccacccttctccaatcatattcaaccaattgtcacactccccttatatatcacaaccaccaagctcaatctcaagcagcagcatcacaccacaccaatgccaatacccatgtgcaacgaaattcaagcccaagcccaagcccaagcccaagcccaacctgggtttaagctcgtcggtttcaaaaacttcgtccgaaccaatcctaagtcggaccgctttcaagtcaaccgcttccaccacatcgagttctggtgcaccgatgccaccaacgcctctcgccgattctcttggggacttggaatgcctattgtggcaaaatctgatctctccaccggaaaccaaatccacgcctcctacctcctccgctccggcgacctctccttcctcttctccgctccttactctccctctctctccgccggctcctccgctgcctcctccgcctccattcccagtttcgacgccgccacctgccttgccttcgctgccaaacacggcttcggcgtccgcgccatcgccttggaagtcgccgacgcggaagccgctttcagcgccagcgtcgcgaaaggagccgagccggcgtcgccgccggttctcgtcgacgatcgcaccggcttcgcggaggtgcgcctctacggcgacgtggtgctccgctacgtcagctacaaggacgccgcgccgcatgcgccacacgcagatccgtcgcggtggttcctgccgggattcgaggccgcggcgtcgtcgtcttcgtttccggagctggactacgggatccggcggctggaccacgccgtcgggaacgttccggagctggcgccggcggtgaggtacctgaaaggcttcagcggattccacgagttcgcggagttcaccgtggaggacgtgggaacgagcgagagcgggttgaactcggtggttctggcgaacaactcggagacggtgttgctgccgctgaacgagccggtttacggaacgaagaggaagagccagattgagacgtatttggaacacagcgaatgtgctggtgtgcagcaccttgcgcttgttactcacgacatcttcaccacactgagagagatgag

SEQ ID NO: 11393 - DNA, 1446 bp, Glycine max
cccacgcgtccgcccacgcgtttttccagttcccgcccacgcaaatcaatttctctctctctctctctctcgctctctgatctgttttgtttcaggagccacccgctcctgcagttttcttttgcggttggagtggaaggccattctcgcaacgtttgagttcagcagatccagaatttttcagaaaacaggtttaggagaatgaagaatacggaacgaattgccaatttggctttagcaggtttaaccttagcgcctcttgttgtgaaagtagatccgaatttaaatgttattttgactgcttccctcactgtgtttgtgggctgttaccgctccgttaaaccaaccccaccaactgagacaatgtccaatgaacatgccatgcgtttttccctttgtttggggagaaatgcaatgttattgtcactcttcttactcttcaagtttctatccaaggacttggtgaacactgtattgacaggctacttctttgtacttgggattgttgccctttcggcaacattattaccatttattaaacgttttctgccaaagcattggaatgaggacctcatagtctggcgttttccatatttccgttctttggagattgagtttacaaagtcacaggtcgttgctggaatccctgggacatttttttgtgcctggtatgctttgcggaagcattggctagcaaataatatattgggtcttgctttctgtattcagggaattgaaatgctttctcttgggtctttcaagactggtgctattctcttggctggtctatttgtgtatgacattttctgggttttcttcaccccagtgatggtcagcgttgcaaaatcatttgatgctccaataaagcttttattccccacagcagattcagcaaggccattttcaatgcttggccttggtgatattgttatccctggtatttttgtagcattggctttgcgatttgatgtgtccagaggaaaacagccccagtatttcaagagtgcatttgtaggatacactgttggcttggtccttacaattgttgtgatgaactggtttcaggctgcacagcctgctcttttgtatattgtaccttctgtaattggatttttggctgctcattgcttatggaatggtgatgtcaaacagttgttggagttcgatgagtcaaagactgccaattcacctcaagagagtgctgacgacaagtctagcaaaaaggttgaataagttgaagcatgcccaataccaatacttccgagtcacagaacaaatactgcttttttctgagaaaaccgtttcttttaaagctaacttatttcagcagcacacctctgtaactgattgtgattaaaaaaaaatgtattacttatttttcaaattggcgttttgcttttactggctgactgccccagtctgggtttccataacaaacattctaag

SEQ ID NO: 11394 - DNA, 412 bp, Glycine max
  unsure (1)..(412): unsure at all n locations
gaccgtttgccacgttcgcaaccaaacaccttctctctctctctctctttgactctttaggggaaggccattctcgcaacgtttgagttcagcagatccagaatttttcagaaaacaagtttaggagaatgaagaatacggaacgaattgccaatttggctttagcaggtttaaccttagcgcctcttgttgtgaaagtagatccgaatttaaatgttattttgactgcttccctcactgtgtttgtgggctgttaccgctccgttaaaccaaccccaccaactgagacaatgtccaatgaacatgccatgcgttttccctttgttgggagtgcaatggtattgtcactcttcttactcttcaagnttctatccaagggacttgtgaacactgtattgacaggctacttctt

SEQ ID NO: 11395 - DNA, 838 bp, Glycine max
ggacctattcatctggttcaagttctcttcaaaactctggttctgagggagacagagacatcatggaagagaggaagaggaagagaatgctatccaatagggaatcggcacgtagatcgaggatgaggaaacagcagcacctggaaggtctcagtgcccaattggatcagctaaaaaaggagaacacccaaatgaacacaaacataggcatcagcacgcagctgtacctcaacgtggaagctgagaacgcgattctgagggctcaaatggaagaactgagcaagagattgaactctctgaacgaaatgataagtttgattaactccaccaccaccaccaacaactgcttgatgttcgatgaggcacaggagactacgactcagttgttcaatgattgtggcttcatggatgcttggaattacggaataccactcaatcaacaaatcatggcttacgctgacaatgacatgttgatgatgtattgattggtgaaattaattttgagttggagtttttgtgaatcctggtgctaatcctttgtaacacaactacaacacgtgtttgttgtctcttgttttaatttgtttttttgtttttgtttttcttgtaataagtaatgtctattgttttcagtttatgttatgtttagggttgtctttgtgtattttaagaggggttattttttcttctcgaaaatgtaaaaaatcgagcttttattttccatgtagtagtatatgtgattttcgtgaatttccactcatatcaattaaatctccagcttatgcatagtataatattccatatttgttatgatatttaaaaacggacgcgtgggcgt

SEQ ID NO: 11396 - DNA, 1018 bp, Glycine max
acgaggtcacgccagagcttggagcaagtatttgaagactatggcttgaaagagtatacaaagcttgaggatagggttccttcctcttcttctctgtcagtgcaaatggattggattatggaactgttagaaagcaatttggaagcaaagtccaggatttacaaggaccctgctttgcgctatgttttcttgatgaataatgggaggtacattgttcagaagaccaaagatagtgaattgggaacccttttgggagatgattggatcagaaaacacgctgcaaaagttaggcaattccatgtgcactatcaaagatgctcgtggactaagctattagggattctgaagctggatagtaatgggtcaatgccccatattaacttggcaaagtcaatgaaggagacgctcaagttgtttaacacagtttttgaggagacttgcagggagcattcttcctggtttgtctttgatgaacagctcagggaagaaataagaatttcccttgaaaaaatcctgcttcctgcgtatgggaactttgttgcgaggtttgagagtgttccggagcttggaaagcatgctgacaagtatattaagtatggaacggaggaaattcaagcaacactcaatggtttgtttcagggaagcagtggatcaactggtagccgaaagtgaaggtgaagctgctactagttcttcttgtgtatttgtggtgtaattaaaattaaaatacactgttttgtttctcacaaaattgtagtcttgtagtcgtgtactataaatactactgtatgttattcttcttagcatcatagtggaggattgaaaaaggattttcaagtaagagctacgagttacaaaattaacctttgtgttgtaacatttgaggtggttcttatattggtcattggtttcatcaactcttttcttgtgcagggcttagaatagtatagtatcagtatgtattttactgaatcaagcaattttgtatgttatatcatttatgtacgttttttgggtt

SEQ ID NO: 11397 - DNA, 429 bp, Glycine max
tgcttatactaactaactcttcttgagatactctttctcacacgccaagagtaacatgggatttccagtggggtacacagagttgatgctgccgaaggtgtttctgcaggtgctatccgtattgggcttgataagaaaactcatcaccgtcctcttgtgctacatgggcttccacgatttcttcgaatccgacattgcgtggccggagagggcgccggaattccagtcggtgtgggcggtgctcataagggaaatcctaccggtggtgaagttctcggagatggagatggagatggcggaggcgccggagagctgcgcggtgtgtctgtacgagttcgagggagaggacgagatcagacggctgacgaactgccgtcacatattccacagagggtgtctggaccgttggatgggatacgatcaaagaac

SEQ ID NO: 11398 - DNA, 1134 bp, Glycine max
  unsure (1)..(1134): unsure at all n locations
ataacagataacagatatgaggaaatcgtggtcgttttgctgagaaaataaggaaatgaaggaagaatccgcatttccgaaaggatatatctgatctagtagggtttttgtgactgtgctccacaaccgagtcgccatggcgtcgcaggagagtatcgaaaagatgcaggcacggcagaattaccggaatttatggcacaccgatctcatgagatccattcaggccgatactccttattgttgcctcgcgttgtggtgtgcaccatgtgtgtcttaccttcttcgcaaacgagctctctatgatgatatgtcaaggtacacatgttgtgctggctacatgccttgcagtggtaggtgtggagaaagtaaatgtcctgaattttgcctttgcactgaggttttcctctgctttggaaattcagtcgcctcaactcgctttctattgcaagatgaatttaacattcaaactacgcaatgtgataattgcattattggtttcatgttttgccttcaacaaattgcatgtatattctctattgttgccatgattgtgggaagcgatgaaattcaagaggcttctcagttgctgtcttgtttggctgactttgtgtactgcacggtctgtgcatgcatgcagactcagcacaagattgagatggacaagcgagacgggaaatttggaccccaaccagcaatggcagtgcctcctatgcagcagatgtcacgcattgatcaacaagttcctccttcggttgggtatgcaccacaaccagcttatggacagcctgctcaaggatatcctgctccgggttatcctcctactggttacccccctgctgcttatcctccaccaggatatcccccttctggctaccctaagtgattggtctacagcgcaccaattgatcgtgcttcatagaacaagggaacatgtttgtggtgaaatacaacagttcgattgattaattaatttccattagtcttataattcgtgaattaaccttataatccctatcgtgatgtccattctgatacttcgacttctgtttgtatattgttcccgttggtgttcatacatagttcacatgtttcgcttgttatgtccaaatnnnnnnnnnnnnnnnnnnnnnnnnn

SEQ ID NO: 11399 - DNA, 433 bp, Glycine max
ccttcgcgtccgcccacgcgtccgcccacgcgtgcgcccacgcgtccattcagttcatttccttattttctcaacaaaacaaccgagagttcgtcatatctgtatctgtatatatacctatacctatacctatatcgtatccgcatttccgaaaggatatatcttatttagggtttttgtgactgtgctccacaaccgagtcgccatggcgtcgcaggagagtatcgaaaagatgcaggcacggcagaattaccggaatttatggcacaccgatctcatgagatccattcaggccgatactccttattgttgcctcgcgttgtggtgtgcaccatgtgtgtcttaccttcttcgcaaacgagctctctatgatgatatgtcaaggtacacatgttgtgctggctacatgccttgcagtggtaggtgcggagaa

SEQ ID NO: 11400 - DNA, 445 bp, Glycine max
cccacgcgtccgaaacgaccacgatttcctcatatctgttatctgttatatatatacctatatcgtatccgcatttccgaaaggatatatctgatctagtagggttttgtgactgctcaacaacccaatcgccatggcgtcgcaggagagtatcgaaaagatgctgtcacggcagaattaccggaatttatggcacaccgatctcttgagatccattcaggccgatacacctttgcgccatgtgtgtcttaccttcttcgcaaaagagccctttatgatgatatgtcaagatacacatgttgtgctggctacatgccttgcagtggtaggtgtggagaaagtaaatgtccagaattttgcctttgcactgaggttttcctctgctttggaaattcagtcgcctcaacccgctttctattgcaagatgaatttaacattcaaacca

SEQ ID NO: 11401 - DNA, 276 bp, Glycine max
  unsure (1)..(276): unsure at all n locations
agtagagttcaacgcctanaacccanaagcaggggaattcttcttttacacattcagttcatttccttattttctcaacaaaacaaccgagagttcgtcatatctgtatctgtatatatacctatacctatacctatatcgtatccgcatttccgaaaggatatatcttatttagggttttgtgactgtgctccaaacgagtcgcatggcgcagaatatcacaatgcagcaggcaatacgcatttgcaacgctctagtcatcagcgatatctatgt

SEQ ID NO: 11402 - DNA, 1039 bp, Glycine max
actcgagccgaatcggctcgactcatattgaaaagccgcgagggaggtttcgtttcgtttcgttcagttcacacattctattctctatcgattcctcttccctttttctcaatccactacaccacagttatgaggagccaacttgtgtgtaatgggtgtaggagcatcttggtttaccctagaggagcaaccaatgtttgctgtgcattgtgcaacaccattacctctgttcctcctcctgggatggaaatgtctcaactttattgtggaggctgtaggacattgctaatgtacacacgtggagctacaagtgtgagatgttcctgctgtcacactgtaaaccttgttccaccagcatctaatcaagtagctcatgtccattgtgggaactgccggacaacactcatgtatccttatggagctccatcagtcaaatgtgctctttgtcactttattactaatacgaacaatggaaggcttccaatccctgtccatagacccaatgggacaaccaatgctggaacattacctactacttcaacatcaatgccccaatctcaaagtcaaacagtagtggtagaaaatccaatgtctgttgattcaagtgggaaattggtgagcaatgttgttgttggcgttacaacggataagaaataacatcatcacatataaaaggtacagttcacgtcatgacgcatcaccacagttgctgtcacaggaagatattgtttgtgtatatgaatatatatatgatattgcagcctgcaatggtttaattgaaatcaatatttttccaatataagagttggacgaatatcatgtatgtatgaatgtatatgaggcggacaagtcgtgaaaaggccataaaacctgttttgtgtgattgccagagcctactttgttttttgcttggtacccatacccaagtcaattggttcattcggataaaatatgttgacttccaagtcctagactagtaaatgctactatttctttcatggcttgtgaagcttgtgcttttcttggtgatctgttagtt

SEQ ID NO: 11403 - DNA, 505 bp, Glycine max
  unsure (1)..(505): unsure at all n locations
ggtgtgtgggatgagaagatgatgaggaaacattggtagaagaaattggagagagagagagagagagagggttggattggttttcttcttcctcttcctaaagagaatctaatctcaatcctcattacacacatatctacagatttcttcattcctctctcaatcttttctgttttcttttcccctctttgacatcctcgttttcgccgaaacaaaaacaactaagattttgttttttgttgtatttttcttcctgttgttatttgactcggttgtctgaatcagttgttgcagcagggtcgggagccacagctatgcagagccaagttgtgtgcaatggttgtaggagccttctgctttacccaagaggagcaaccaatgtctgttgtgcattgtgcaacacaattacctctgttcctccacctgngatggaaatgtctcaactttattgtggaggttgtaggacattgctaatgtacacacgtggagctacaagtgtgagatg

SEQ ID NO: 11404 - DNA, 865 bp, Glycine max
acgcgtccgaaaatattgaaaagccgcgagggaggtttcgtttcgtttcgttcagttcacacattctattctctatcgattcctcttccctttttctcaatccactacaccacagttatgaggagccaacttgtgtgtaatgggtgtaggagcatcttggtttaccctagaggagcaaccaatgtttgctgtgcgttgtgcaacaccattacctctgttcctcctcctggaatggacatgtcacaactctattgtggaggctgtacgacattgctaatgtacacacgtggtgctacaagtgtgagatgttcctgctgtcacactattaaccttgtaccagaatctaatcaagtcattcattgtgcgaactgccggacaacactcatgtatccttatggagcttcctcagtcaaatgtgcaatttgttgctatattactaatgtcagtatgacgaatggaaggcttccaattcctgtacagagaccaaatggaacagccaactctggaacagtatcttctacttcatcggtatgcctttctccttttcttttggtgattctgttagagcaattgttgcattcttgttatgatacctgatacgtcattttattagctgcagtcaatgcctcattctcagagccaaactgtcgtagtagaaaatcccatgtctgttgattcgagtgggaaattggtgagcaatgttgttgcgggcgttacaacagagaagaaatgatacttgtcacattatcatgttatacaagtgtaaagagaacattatttgattcatcagctgctggtgctcaaagatattgctcgtatatgtgactttgcagcatagaagttaaaaatattttcgttctaaacg

SEQ ID NO: 11405 - DNA, 438 bp, Glycine max
ggatgatgaggaaacattcggtagaagaaattgaagagagagagagagagagagagagagagagagagggttggattggttttcttcttccttttctctaaagagaatctaatctcaatcctcattacagatttcttcattcctctctcagtcttttctgttttccccctttgacatcctcgttttcgccgaaacaaaaacaactaagattttttgtgtttgttttgtttttcttctccttgttgttatttgactcggttgtctgaatcggttgttgcagcagggtcgggagccacagctatgcagagccaagttgtgtgcaatggttgtaaggagccttctgctttacccaaagaggggcaaccaatgtttgttgtgcattgtgcaacacaattacctctgttcctccccctgggatggaaatgtctcaactttatt

SEQ ID NO: 11406 - DNA, 534 bp, Glycine max
ggcaaggaggagtataatgcatttttttattcccttgtttcaattgatacccaggagatgtattactcaactaagagacagcaatttttaattgatcagggttacagctttaaggtaattactagcttgcctcctcctgatgaagggcctaatttgagctatcatcgtcttgaggatcaattggcacttcttggaaaggtgttgagtgctggtgatgatcaagttggattagagcaactagatgaagatgcagatgaaattgcccttcagagtgcccgtcgctctcaaggatccatgagtgcaatgtcaggtgcaaaagggatggtttatatggagtacagtactgtgcgtaaaggccaacaaggacagatcaagagcaagccgaaagatccagcgaagagacatttcttgtttaaaagaagatatggggcaacctaaatgtgccgtctttgtaatggtaccatacgaaaagttatcaagtatgcaggattgatggcttacttgacataacgcttggtgcctttttcttaaaaa

SEQ ID NO: 11407 - DNA, 592 bp, Glycine max
gaaattaattgatttcttactttcaaacgaagaaaaggaagaaaccaaacgcggccttggagttccgagttgcgagttgcagagagagcaatgagtcaggaatcgtttatatatagcttcgtggctcgggggacgatggtgttagccgagtacaccgagttcactgggaacttccctgcaattgcagctcagtgcctccagaaactaccctcttccaataacaagttcacctacaattgcgaccaccacaccttcaattttctcgtcgaagacggttacgcttactgtgttgttgccaaggaatctgttagcaaacaaatctctattgctttccttgaacgtgtaaaagcggactttaagaaaagatatggtggtggaaaggcagacacggctgttgccaaaagtctcaacaaggagtttggaccagttatgaaagagcacatgaagtatatcatagaccatgctgaagagattgaaaagctaataaaagtgaaggctcaagtttcagaagttaaaagtattatgttagagaacattgataaggccattgatagaggagaaaatctaactattctggcggacaagacagaga

SEQ ID NO: 11408 - DNA, 710 bp, Glycine max
ggatgcagagcagaagaagcagcgcaagcacgcacgcattctgtgtgttgtggtttctctgagttccgagtggactcagttacggagcaataatgagtcaggaatcgtttatatatagcttcgtggctcgtgggacgatggtgttggctgagtacacggagttcactggaaacttccctgccattgcagctcagtgtcttcagaagcttccatcttccaacaacaagttcacttacaactgtgaccaccacaccttcaatttcctagttgaagatggttatgcttactgtgttgttgccaaggaatctgttagcaagcagatctctattgctttccttgaacgtgtcaaagctgacttcaagaaaagatatggtggtggaaaggcagatacagctattgcccagagtctgaacaaggagtttggaccaggtatgaaagagcacatgaagtatatcatagaccatgctgaagagattgaaaagcacataaaagtgaaggctcaagtttcagaagttaaaagtattatgttagagaacattgataaggtatgttcatgttttagagtaagacatgggatatttttcagatcttcagtcatttccccaagggcaagccttcgcgcaatgggtaaagttctgcctttgtgatcagttggtcataggctgagggagagttttggagcaacaataaggttgtgcctttgtgaccgg

SEQ ID NO: 11409 - DNA, 1496 bp, Glycine max
atctgcgaaagccaagggtcaccaaaaccatcatcataacccaaacccaacccaacccaacacaacacaacaccacctcctatcacataataacaaccttaaccttaaccttaaaccccccaattttcatgtctcggatcccgtgattcggatccccaacaaaaaaagaaacctcgtatttgttattttcgtcggatccggttgggaacgctcatgacgcggcgttgctcgcattgcagccacaatgggcacaactccagaacctgccctaaccgcggggttaagctcttcggggtccgattaaccgacgggtcgatccggaagagcgccagcatgggcaacctaacccactacgctggttccgggtcggccccgctccatgtcgggttgaataacccgggttcacccggggagacgcccgatcacgccgccgccgccgccgacggctacgcctccgaggacttcgttcccgggtcttcttctagctcccgtgaaagaaagaagggtgttccatggactgaggaggaacatagaatgtttttgctcggattgcagaagctgggcaaaggtgattggcgtggaattgcaaggaactatgttatatcaaggacgcctactcaagtggccagccatgctcagaaatatttcatcaggcaaagcaatgtgtccaggcgaaaaagacggtccagcttgtttgatattgttgcagatgaagcagctgacactgcaatggtacagcaagacttcttgtctgctaatgagttaccaactgaaacagaaggcaataaccccttgcctgctcctcctcccctcgatgaagagtgtgaatcaatggattccacaaactcaaatgatggagagcctgccccatcaaagccagaaaacacacatccatcttatcctatgttatatcctgcgtattattctccagtgttcccgtttcctctgccctattggtcaggatacagtccagagcccaccaagaaggaggaaacacatgaagtgctgaaaccaactgcagtacattctaaaagccctatcaatgttgatgaactggttggcatatcaaaactgagtttaggggagtctattggtgactcgggtccctccaccctgtctcgaaaacttattgaagaaggaccctctagacaatcagcttttcatgcaacaccaacatgtggtgatatgaatggcagtgccatccatgcagtttaagcgtgtgcctcgtgttccgaggaagggattgttatgtgagcattatggatcaacttggggcctgcatgaatgtggtcttgtgttcatcatacatctgtttgtggggtaacctaaataatttttttctttgcccattcacagtgattaacctagtttgtttatttgctggtagcagtagcgtctaggagttactttgggtctctaaactaaaactttatgtttgtccagtgattttatttgtcagggttatgtaaagttaatgttgattgtgcagtttgaca

SEQ ID NO: 11410 - DNA, 295 bp, Glycine max
atatgcgaaagccgagggagaccaaaaaacaaaccaaaaaccatcatcataacccagacccaacacaccatagcacagcaccacctcgtatcacataataaccaccttaaacccccaaactttcatgtctcggatcccgtgattcggatccccaacaacaacaacgccaaaaacaaaaaacaacctagtattatttggatccggttcccatgacgcggcgttgctcgcattgcagccacaatgggcacaactcaagaacttgccctaaccgcggggtgaagctcttcggggtccg

SEQ ID NO: 11411 - DNA, 816 bp, Glycine max
agtagagccgtagaggaacctggaaacttccacgaggttttcggtgaaaaccaaatttggggctttgcatcgcaagatttaccctttccaatcaaaattcttctgccttccccaaccaattgtctttctcactatcgatttggtttggttggcattgtaattgattttgtttgtgaagatctgagtgaggggttaggcaaatgacgagtggttttggtgaatcaacgagagcatctgcaccgagcccatcatgctcggggaacagttcaaacgatgctggcgatttcgaatgcaacatatgcttcgatttggcgcaagatcctgtgatcacactctgtggtcacctattctgttggccatgcctttataggtggctccaccatcactcccattctcaggaatgccctgtttgcaaggcccttgtgcaggaagagaaattggttcctctttatggaaggggcaaaacacagactgatcccaggaccaagtcatatcctggaatggagatcccccaccgtccttccgggcagaggccgcaaaccgcgccacccccgccacctcctgaggctaaccctttcgggagttatgggtttggactaatgggagggttcattcctatggcaactgctcgatttggaaacttcacgctttccactgcctttggcgggtttatcccgtccctactcaacattcatttccatgggtttcaggatgccactgtctatgggacaacgtctggttatccctttgggtttaatggctttcatggagggaacacgcggggttttacgcaagcaactggtcatgtgcagcggc

SEQ ID NO: 11412 - DNA, 458 bp, Glycine max
caaaatactactagtaccttaataaacaaataaataaataaggtgagagaaaaaaaaaaatgtagaggaacctggaaacttccacgaggttttcggtgaaaaccaaatttggggctttgcatcgcaagatttaccctttccaatcaaaattcttctgccttcccctaccaattctttctctcaaccgatttatctgagtgaggggtttggccaatgacgagtggttttggtgaatcaacgagagcgtctgcaccgagcccatcatgctcggggaacagttcaaacgatgccggtgattttgaatgcaacatatgcttcgatttggcgcaagaccctgtgatcacactctgtggtcacctattctgttggccatgcctttataggtggctccaccatcactcccattctcaggaatgccctgtttgcaaggccctttgtcatgaaagagaaattgggtt

SEQ ID NO: 11413 - DNA, 506 bp, Glycine max
cggctcgagccgctgggccagcgaggtcttctcgatttccttctctataacacaacgctctcttctcttgcaaccaaagtacttgttccagtgtctactctactcaaaaaggatttgggacatcatgtgcagtgattcgaaaagtaaactttcttccccaaccctcgtcgtcatggagaatagtaacattcagaagcagaatctggatggtctctacaactcggttttgcttgaattgtctgcatctgatgattatgaagctttcaaaagagaggtggaggaaaaaggcttagatgtgaacgaggcaggcttttggtacggtagaagaattgggtcaaagaagatgggatctgaaacgaggacccctctgatgattgcttctttgtttggaagcgctaaggtgctcaattatattcttcttcagaaaggaggaggtgttgatgtgaacagggtctgtgggtcttgaagggccactgctcttcattgtgctgttgctggtggcttcc

SEQ ID NO: 11414 - DNA, 490 bp, Glycine max
gaggtgagttcgggtcttctcgatttccttctctacaacacaacacaacacaacgctctcttctcttctcttgcaaccaaattacaacttgttccactctctactactctataaggatttgatttgggacatgtgcagtgattcaaaaagtaaactactttcttccccaaccctcgtcatggaggatggtctctacaacaactcggttttgcttgaattgtctgcatctgatgattttgaagctttcaaaagagaggtggatgaaaagggcttagatgtgaacgaggcaggcttatggtatggtagaagaattgggtcaaagaagatgggatctgaaaccaggacccctctcatgattgcttctttgtttggaagcgctaaggtgctcaattgtattcttcttgagaagaaaggaggaggtgttgatgtgaacagggtctgtggttctgatagggccacagctctacattgtgcggctgccgggggctct

SEQ ID NO: 11415 - DNA, 894 bp, Glycine max
atcggaaagtctctgttcttctcggtatctcttttgcctttatgctgcatgtgataagcatttactggtggtatcgaaatgatgatcttttatacccactggccatgcttccaccaaaaacaccgccacctttctggcatacaatattcatcattttggtgaatgatacattggtgcggcaagcagcaatggctttcaaatgtttgttgcttatttactacaaaaatggaagaggccataacttccgtcggcagggtcaaatgttaactctggtcgagtatactctgctgctgtatcgtgccttgttgccaacaccagtttggtaccgatttttcttgaacaaggattatggaagtctcttttcctcactgaccacaggattgtatctaactttcaagctaacatcagtagttgagaaggtccagtgcttcgtttctgccttaaaagcattatcaaaaaaggaagttcattatggggttcatgccacaacggaacaggtgaatgctgctggtgacatgtgtgctatatgccaggagaagatgcaggctcccatattgttgagctgtaaacacatgttctgtgaggagtgtgtatctgaatggtttgagagagaacgaacttgtccattatgcagggcattggtaaaaccagctgatctgcggaccttcggagatggatcaacaagtctattttttcagttgttttaagttcattttctttgacttgttgggtcatgtttttgagccaaaatcttcctggaaaatgtcaccatctatggtttggtaaaattttccattaatgaaattgagattgaaaaaagaataaagagatatttatatgtatggttaaagtatataagttcattctagagtaatgaggtcagatgtacaaagg

SEQ ID NO: 11416 - DNA, 432 bp, Glycine max
ctagaaatgatttcccgtaatacaaatcaacaagttgcatgaccgatgaagaacaacacatataagcaagcaaagtcaatgacgattgaaatgataatcccgagagaatggccaaaaaatttgaggagccctaacctccatgaaattcaaatgagcctcgagaaggtgcatgtagaccaaccaatcaccattcccagtagaagaaggcattggcatgacatagccagaatctccaccccaaggaaaatggtacgatgcaaacacgggctttccccacccaaaatcaacctttgactccggaaacctttgaccagaagaaaccacaaaacttggtccttcttccttgccatgcccacaataaatcctagacaaaccaggagctggtcgatgtacctcaacccaatcaacaagtcccaaaaaatgctcttctgt

SEQ ID NO: 11417 - DNA, 431 bp, Glycine max
gaaatatggggagagtgaagcttccgatcaaaaagattgagaacacaaccaataggcaagtcactttctccaagaggaggaatggactcatcaagaaagcttacgaactttctgttctttgtgatgttgatgtggctctcatcatgttttccccatcaggaagagccactttcttctctggcaacaaaagcattgaagaaattctagaacgatatgttaatctttcggagggtgaacacggaaggatgcataataaagagcacattcaaaagttgcttagtaagttgaaagatgaagctggtcaaatatgtcaagcccctagctcaatgacttcagattcccaaattgaggatcttcgaagagaaattttcacttgcaagtctcaattggaagagatggagaagcgactaaggatatttgaaggtgatcct

SEQ ID NO: 11418 - DNA, 683 bp, Glycine max
taaaattttaatgcataatatctacaagtcatagacattgaagccaaacaaaaaaaacaatgacgcattgaaaacattctatttcatctggtgttaattaaggaaatgaaaatacatgttcaagttttgccttctttctctgttcaacaactttctagttttccagagaccatatatcatgatcgatgttgatcttgattgttcaggtattaagatgtttgaccgggtaaattgagaaaaacactgttcaagagttgcacttcccttgtctctgcaatcgataaagttctactccctaaaggattaagatgctgccaagaggacgaattggtgtgaatagcttgtccaaactggggatgtaatgtattactaatgccagcgtctaaactactcctcggattcatttggccattcagatccatgtttgcggaatgcagaagggtcgaagttggtgttaacatatcaacaaccgtgcaatgatgtgattgttgatctctgacaagagcagtgtcataaacattcgcaaagttcagagtctggacatgtagtggatctccctgtggagaccaatctactgggttctttgaggctctggaaataaatccatttacatctccagttttcacttgccagtctcaattggaagagatggagaagcgactaaggatatttgaaggtgatcc

SEQ ID NO: 11419 - DNA, 643 bp, Glycine max
  unsure (1)..(643): unsure at all n locations
tagactcccaccacctcaacaacgccatccttctctttcttatcatcagntgcaacaacaccagcaccggctccattttcatcaacaaattcatcaccatcatcaaatttcttttggaatgatgcaatcctcttcttcattttcctctatccccggaaactaccttagaagcaaggattccggagcttatgacttgggtgaattggatcaagcctttttcctctaccttgatggacaagcagacccttctagtgttcaagaccaaagacaaaactcatcatcaggaatgaggcctccaactctcaacattttcccctctaagcctgggcatgtagagccatcatcatccaaggccaaggctaacatagagctagtttctccacaaacaagtggatcaaagaggccatcagagccgtcgatggagttggccaacccccgaaacgaaactgcttctgcccctcagccacccaaacctgtcaagcgagagggcaaccgcaaaggtccaacgtcaagttctgaacatgaaggacctaaaacaccagatcctaagacactcagaagacttgctcagaatagagaggcagctaggaaaagcaggcttaggaaaaaggcctatgttcaacaactagagtcgagtaggatt

SEQ ID NO: 11420 - DNA, 1473 bp, Glycine max
gttaaattagaatcggagatttaagctggaggaggatattctgaaatcccatccaatcgaaggctgtgaagtgtgtgatgcactctatccttctttctcttgaacccataattccatgactcggcgttgctcccactgcagcaacaacggccacaattcccggacatgcccttcgcgtgggggcggaggtgtgaagcttttcggggtcaggctgacggatggatcaatcattaagaagagcgccagcatgggcaacctaaacctctcctccgccgccgcacatcaccaattccattcatctccttcttcttccaacctcgccgccgccccctcatcccccaatccaagctccccatgctccgaccctccccaaggttacttgtccgatgaccccgcccatgtctccaccttcgctaaccgccgcggtgatagaaaaaaaggtgttccatggactgaagaagaacatcggctgttcttaattggtctccagaagctaggcaaaggagactggcgtgggatagcacgcaattttgttgtatcaaggacccctactcaagtagcaagtcatgcccagaagtattttatccggcagagtcatgctaccaggagaaagagacgttccagtctttttgacatggttccagatatgtcttcagatcaaccttctgtgccagaagaacaagtgttggtgccaccttcccagaactcacaaccttgcaatggaatatcacagacttcattaaatctgtccctcaaatcagaatttgaacccatggagactacttctcaagataatgcgcagcagaccaatgaaactatgatgggatcaatcggactgacaccaatggctcctcatggatgctttcccgcatatttacctgttccatttcccgtgtggccatcaacttgggttcacccctttgaagaagttaagggaggagagacatgccaccatcagatccacaagccaatcccagtcattccaaaggaacctgttaatgttgacgaacttgtgggaatgtctcatctaagcattggggaagcacaggtacgtgatagagagccttcccctctttccataaagttgttaggagagccctcaaggcagtcagcattccatgcaaatgtcccggttggtagttcggatttaaacaatggcaaggacaacgcaattcaagctgtctgagcttgtaaggtctggtgaagacagcagcagtaattaagccttcttttgctcatcttttcatttgtaccattatatatcattttttttattcctgatccctagcatttaatcttccaattagtagcaagttatatggtggtatgtagatcaggttagatcaattcttggaaaatatttattctttctaactgtaaacaaatgaagcttaaataatcaaatagcaccaagaggttctgttctgttcctcttggtttggctaaaaaaaaaaaaaaaaaaaaaaggacgaa

SEQ ID NO: 11421 - DNA, 574 bp, Glycine max
gatagaaaggaaaggagcgatagagcgcgttccgctaagcattaaattagaattccagatttaacctcgaagaggcaggagcaccctgtgttgtattacaaacacatactacatgcacttttctttcttttctcttcttcttctatccataatttcaattccatttgctctctggaccgagtcaggcggcggcgaatcggcatgactcggcgctgctcccactgcaccaacaacggccacaactcccggacatgcccgtcgcggggagggggcggcgtcaagctgttcggggtgaggctgacggatggatcaatcataaagaagagcgctagcatggggaaccttaacctctcctcctcctcctcctccgccgccgccgcacatctgcaattccgttcatctccttcttcttccaacctccccgcggcctcatcgcccaatccaagctccccgtgctccgacccgccccaaggctacttgtccgatgaccccgcccacgtctccaccttcgctaaccgccgcggtgatagaaaaaaaggtgtgccatggactgaagaagaacatccggctgtct

SEQ ID NO: 11422 - DNA, 424 bp, Glycine max
gtgggaatgtctcatctaagcattggggaagcaaaggtacgtgatagagagccttcccctctttccttaaagttgttaggagagccctcaaggcagtcagcattccatgcaaatgctccagttggtacctcggattttaaacaatggcaaggacaacgcaattcaagctgtctgagcttgtaaggtccggtgaagacagcagcagaattaagccttcttttggtcatttttcatttggactatcatatataattttggtttcctgatccctagcattttaatcttcccattagtagccaggtatatatgggggcacgtagatcaggtatagctcaattcttggaaaatcacttattctaactgtacacaagtgacgcttatataaagaggttctgtccctataggttgggatatttttagagcc

SEQ ID NO: 11423 - DNA, 470 bp, Glycine max
attagaaccctatcaagtaaagagggttagagaaataaaaagagaaagccgacagcacatagatagagagaggaaaacgacttaatattctttttccttgagacctgaaggggctaaggaaaattagaaggacacacaagtataaaggcggtgaaataaaagagaaagacaagaagaagacatgggaagaccaccttgttgtgacaaagaaggggtcaagaaagggccttggactcctgaagaagacatcatattggtgtcttatattcaggaacatggtcctggaaattggagggcagttcctgccaaaacaggttaattaattagccctacactcaatttgatgattattttgcataatattggttcttgttctttgttgtgtttattagatcattatttaaagaagtttctgattgaaatattggccatttgggtttcattgttttatctttggatctgaattgatt

SEQ ID NO: 11424 - DNA, 1023 bp, Glycine max
cccacgcgtccgtagagaaataaaaagagaaagccgacagcacatagatagagagaggaaaacgacttaatattctttttccttgagacctgaaggggctaaggaaaattagaaggacacacaagtataaaggcggtgaaataaaagagaaagacaagaagaagacatgggaagaccaccttgttgtgacaaagaaggggtcaagaaagggccttggactcctgaagaagacatcatattggtgtcttatattcaggaacatggtcctggaaattggagggcagttcctgccaaaacagggttgtcaagatgcagcaagagttgcagacttagatggacgaattacctgaggccaggaatcaaacggggcaacttcacagaacaagaggagaagatgataatccatcttcaagatcttttaggaaacagatacaagtcaatcttccaagcacctacttacttggagttttgtgttcaattcaagcaattaagttactaatgaaatcttttagcttataaaaaagaaaaaaactttgttttgaagatttattttttataactgtttttgagtattttgatttgggaagttctatcttttggatccacatgcttaacttaactggatcacattggctatggttacagatgggctgcaatagcttcataccttccacagagaacagacaatgacataaagaactattggaacacccatttgagaaagaagctgaagaagatgcaagtaggttgtgaaggtggtagctttggagaagggttttcagcctcaaggcaaatccctagaggccagtgggaaagaaggctccaaactgatatccaaatggcaaagagagccctcagtgaagctctttcaccagagaagccatcttgtaatttatctgcctcaaactcaaacccttcagatagttgcagctccttctcttccacaaaaccaacaacaacacaaactgtgtgctatgcctcaagtgctgacaacatagctagaatgctaaagggttggatgaa

SEQ ID NO: 11425 - DNA, 614 bp, Glycine max
gaaagggccttggactcctgaagaagacatcatattggtgtcttatattcaggaacatggtcctggaaattggagggcagttcctgccaaaacagggttgtcaagatgcagcaagagttgcagacttagatggactaattacctgaggccaggaatcaaacggggcaacttcacagaacaagaggagaagatgataatccatcttcaagatcttttaggaaacagatgggctgcaatagcttgagtcccttccacagagaacagccaatgccataaagaactatgggaacacccattttggagaaagaggctgaagaaaatgcaagtaggttgtgaaggtggtggctttgggagaaaggttttcagcctcaaggcaaatccctagaggccagtgggaaagaaggctccaaactgatatccaaatggcaaagagagccctcagtgaagctctttcaccagagaagccatcttggaatttatctgcctcaaactcaaacccttcagatagtagcagctccttctcttccacaaaaccaacaacaacacaaactgtgtgctatgccccaagtgctgacaacataactagaatgctaaagggttggatgaaaaaccca

SEQ ID NO: 11426 - DNA, 512 bp, Glycine max
gtggataactcaatgtataacattcccactggacctagtgactacccgtctgctggaaatgaacctggtgaaaataatgagataaaaggtggaaggcctggtccatacatgcaacctcctccctggacgagccagaaccagaaccagagggctccacttgacgtcaatgttgcttatgtggaagggcgggatgctgcggaaagaggagcctctaatcaacctctgacacaggacttcttcatgtcctcggggaagcggaaacgtgatgaaattgcttctcaatataatgctggtggatatatacctcagcaagatggagctggagatgctgcttctcaaatttttgaaattgaagtgtatggagggggcatctccattgatgcaggtcactctacttctaatggaaaaatgccagcacattcagacaggccagcttctcagattcctcaatttgatggaccaattccttacgatgatgatgtggtttctactccaaatatgtacaattatgg

SEQ ID NO: 11427 - DNA, 623 bp, Glycine max
ggagcatcagtgagagaaactgtttaggcacaatcaggaatgctgctaatgtctgctgtgttcagttctctgctcattcctcccatttgctggcctttggatctgcggattactcaacatattgttatgatcttcgcaatcttagaagtccctggtgtgtactggctggccatcgtaaagctgtgagctatgtcaaattcttggactctgaaacacttgtttctgcttctactgataatacattgaagatctgggatctcaataaaacctctcctgtgggtgcatccattaatgcttgcagcctaactctgtcgggacatactaatgagaagaattttgtgggtctatcggtggctgatggatatattgcatgtggttcagaaacaaatgaggtttacacctactatagatcgcttcccatgccagtcacttcacacaaatttgggtccattgatcccatttctggtaaagacactgatgatgacaatggtcagtttgtttcaagtgtgtgctggagagggaaatcgggcatgcttattgcggccaattcaagtgggtgtgtaaaagtgttacagatggtttaaagaaaaggttccatgtgacggcgactttcttacatttgc

SEQ ID NO: 11428 - DNA, 595 bp, Glycine max
cagacataccctttttcgaaacaacgccacacgccccaaaccgagtctgagagagaggagggtcaacattgcacaactcaatttgacaatttccccttcccttttgcactgcccctcctctctctcgttgaaaatcttccattattatagggttagggttctcctgaatccgcaatggccgtttcaaccactttctccggtgccaaattggaggctctattgctcaaatgttcttcctcctcttcctcaccaccgccttcaaggtcatcattcaccacttttcccggccaaaacagaagaaccctcattcagagaggggttattcgctgcgacgctcagccctctgatgcatcatctgttgctccaaataatgccaccgctctctccgctcttgagcagctcaagacttctgcagctgatagatatacaaaggaaagaagcagcattatcgccattgggctcagtgtgcacactgcacctgtggaaatgcgtgaaaaacttgccattccagaagcagaatggcctagagctattgcagagctgtgtagtctgaatcatatttgagaagcagctgttctgagtaccctgcatcgaa

SEQ ID NO: 11429 - DNA, 445 bp, Glycine max
acgcgaacgcaggcattcggctcgagaatttaacagttttagggcacaaattggcaatgcttcctgtggagcccaaacttggcaagatgctcattttgggagctatcttcaagtgtttggatcccataatgactgttgctgctggtcttagtgtaagagatccatttgtaatgccgtctgacaagaaggatcttgcatagtctgccaaagcccaatttgctgctcgtgactatagtgatcatcttgcactcatccgggcttatgatggttggagagatgctgaagcgcaccatgctggttacgagtactgccggcgaaattttcgtccttctcaaacacttagggccattgactctcttctaaagcaattctcttatttgctcaaagatatttgtctggctaataacaattctgaaacctacaatacatggagtcatgaagagca

SEQ ID NO: 11430 - DNA, 487 bp, Glycine max
ctttattggcctcaagctcgccagccatactctccagagatcattgactatataaagtcactggatgctgatgaagatattgcccttttgaagtttcatggatggaatctgccagttgaatgcgcgcgcactcttcaaatctcaaccatgcttctgaagaaaggagtgaagagagggatgaccccctttgccattggaagccttatgtgcagggaatccttgaacaaggagtctgtgattgagggaattgtaaaggcagctctggattctgttcttccttgcacaagtgaagccacatttctggatactgtttccgaaatcatggaccagcaccttgatgagatcacgggttccatttcttaatttatgtcatagaagatggtatataaatgtctgtataatcgtgttcccagtacatatttatagctcaaatggttgtttttacattatttcacagtaatgacttcctaagtcctgaactcagtgt

SEQ ID NO: 11431 - DNA, 438 bp, Glycine max
  unsure (1)..(438): unsure at all n locations
cccacgcgtccgtaaaaaacagagcaactactcaattcttcactctgtttccccttaccttacacactctaacacatggattcaccttcctccttcttcaactcaccctcttccggtttctgctccgaatcttcctctccggaagccttctcgtgggaagggtacctacccttcaacgagaacgacccggaggagatgcttctatacggcatgatcgccggcgcgacaaccgaggagcactccggcgagagggcgagctcggaggagagtgctgcagcacggaaggagaagtcgtaccgcggcgtacggcggcggccgcgggggaagttcgcggcggagataagggactccacgcgccacgggatgagggtgtggctggggacattcgacagcgccgaagccgcggctctggcttacgaccaagccgngttctccatg

SEQ ID NO: 11432 - DNA, 1256 bp, Glycine max
gtctccgccctccctcccccgccgcgcctcgcctacctcgtctccggctccaagggcgacggcgccgccgtcacccgcgtcctcctcgctctctaccaccccaacaatcgctacgtggtccacctcgacctcgagtcctcggcggaggagcgctccgatttggtgaggttcgtggagggccacgcgctgttcaagcggttcgggaatgtgagggttatcaagaaggcgaacctcgtcacgtacaggggacccaccatggtcgccaacacgctccacgccgccgcgatcctgcttagggagctcggggattgggactggttcatcaatctcagcgcctccgattacccacttgtcacacaggatgatctgctgcacacgttttcctacttgccgcgggatctgaatttcattgatcatacgagtgacattggatggaaagatcatcatcgtgccaggccgatcatcgttgatccggggttgtatatgaataagaagcaagatgtgttttgggttacgcagaggaggagtaggccaacggctttcaagcttttcacaggctcggcttggatggcactgtcaaagtctttcattgattactgcatatggggatgggacaacctacctcgaaccgtactcatgtactattcaaatttcatatcttcccctgaaggatacttccacacaggtatttgcaatgcacaagagttcaggaacacaactgtgaacagtgatttacatttcatttcttgggacaatcctcccaagcagcatcctcactaccttacagttgatgacatgaaagggatggttggcagcaatgctccgtttgcaaggaaattccacagagaagatccagttttggataaaattgatgctgaactattatccagaggtcctggaatgactgttcccggaggttggtgcatagggaaaagggagaatggcaccgatccctgctctgaagtcggtgatactaacgttctgaggcctggcccaggttccaagagacttgaaacattaatcaactcattgttgtcgaatgaaaagttccggccaagacagtgcatgtgaggtgaaaaacaagaatcaactggctaaggccaaagacagttctggaggattattttccactggctttagtttacatgtgcacatttagttagcatgatcagtaaattagtttttcttttcagtaggagaagaaatagtgaaagcatacacactcttcaatattgagaagaaaaaagtgtgagaca

SEQ ID NO: 11433 - DNA, 808 bp, Glycine max
gaaaaacatcaaagctcaacagctagcgttgaaaatggagaagttgcagctgcatgtcccgagagttaagcttggaagtcaaggcttagagatatcaaggttgggctttggatgtgtaggactatctggactttataatgctcccctctcgcacgaagctggatgttcaattattaaagaagcattcaatatgggtgttaccttctttgacacatcagatttttatggacttaatcatgataatgaaattatgattggaaaggctttaaaagaacttcctcgggaaaaagtccagttggctacaaaatttggtcttgttagatctgatggggtgtttgctggggtaaaaggtactcctgaatatgtgcggcagtgctgtgaagctagtcttaagcgccttgatgttgagtacattgacctatactatcaacatcgagttgacacttcagtgccaattgaagacaccatgggggagctcaaaaagctggtaaacgaaggaaagataaagtatattggcttgtctcaagctagtcctgacactataaagagagcacatgctgttcatcctatttctgctttgcaaatggaatattctttatggacccgtgacattgaagaagaaataattccactctgcagacaacttgggattggaatagtggcatatagtcctcttggtcgtggcttttttgcaggaaaggcagaggtagagactttgcctagtcagagcttgctgagtatgcatcccaggctcacgggagaaaatttggagaagaacaagcttttctataaacgacttgatgacttg

SEQ ID NO: 11434 - DNA, 657 bp, Glycine max
gttcaatccaaataaaccacgtcgtctaaagtccagtccatatcgcgttatcaaagttgtttttttttctttttctgagagcgacagaaagtggagaagaaaaagatggagaaaatagagcacaaaacggtgaggacgaatggaataaacatgcacgtggcatccattgggtcaggcccagttgtactgttcctccacggcttcccggagctttggtacacgtggcgccaccagcttctgtccctctccgccgtgggctaccgggccatcgcccccgacctccgcggctacggcgacaccgacgccccgcccgacgcttcctcgtactccgccctccacatcgtcgccgacctcgtcgggcttctcgacgctttgggaatcgagcgagtttttctggtgggccatgactggggagcctccatagcctggcatttctgcttgctgaggcccgatcgtgtgaaggccctcgtcaacatgagcgtcgtgttccgccccagaaaccctaatcgaaagcccattcagagcctcagggccatcatgggcgacgattactatatctgcaggttccagaaacctggggaggttgaagaggagtttgcacgtgctggtgctgccagaattataaggacatttattgcatctcgcgatccacgacca

SEQ ID NO: 11435 - DNA, 746 bp, Glycine max
tcggacgcgtgggccactctcaccggcatctcgctggtggcgctgcaattcaaggccttgctgaagaaaaatctcttgctgtcatggcggaacaagagagccagcctcttacagttactctcccctctcatattcattttcctcatcttcgcaatcgacaaggccatcaaggcacagacctcgacctcctcctcctacaagagcgtcactgaccctcccatggaaccttctccccccatcactccctgcgaggacaagttcttcatcaaactcccctgctacgacttcgtctggagcggccacgccagccccacgttccagaccatcgtcgcccgcatcatgaacaacaaccccggccgccccatccctccctccaaggtgaagtcttttaaggaaaagagtgaagtggatgcgtggcttctcagcaaccctatgcggtgccctggagcgcttcatttttcggagaggaacgacaccgttataagctacggtcttcagaccaattccaccagtcttcagcggcgagggaagtacgaggatcccacggcttcgtttcagctccctcttcagcttgctgccgagagggaaattgccagataccttattggagatgcggatttcagttggaatgtgtttctgagggaattcgcgcacccttccatgaatcctttctctgctgtggcttcaatgggtcctgcatttttcctcgcgatcgcctggtttaattctgttcttcagattagctc

SEQ ID NO: 11436 - DNA, 509 bp, Glycine max
cccacgcgtccgaaaaaaacaaaagcaaaacacaataaaaaaaaaaaaaaaaaaaaaaaaaggaaaagagttgtttcattcgagcaacgcaataattaagttaattatacaaaatttgactgaattatatattctgcagtaatgtatgaaaattctgatatcattaaaaaattgtttcaattcttgttttcttctaatgggatttataattttgtgtttaaaggtaccaaattttaacatatggtattgcctcagttaatgtgtgaatgatttaacttctttggcttaatgctttattgatgagattgttctccttcattgatcaccacgaggagcaatttcaatgaggggcaagaatttatagtctttgcaattgagagaaatcatattatgttattctttattcaacttacaatccaatatttgcagatggattctcgttgcattgatgacaaaaaagaagacaatgaaatgaaatctgccgaagaatttgaagatatatttggaga

SEQ ID NO: 11437 - DNA, 501 bp, Glycine max
ctcttctaagttctaactactaacgctccttctctcactctgtgctgtgtgtgagaaagagaaaccaaacacaaggaattagaatggcaaaggtaagagatcagaagctatacgtcaccgttccgagtctctttcggtgcccaatctccatggacgtgatgcgctctcccgtaagcctctgcaccggcgtcacatacgatcgcgccagcattcagcactggctcgactcaggacacgacacgtgtcccgccaccatgcaggttcttccctccaaagacttcatccccaatctcacgctccaccgcctcatccgcctctggctcctctcctccccctcctcctcctccgccgccgaacctccctccccctcctcctccgccgaccacctccgccctctcctccgccaaatccaaacctccgacgacaacgtccccggtattctctccaaaatcgccgaattcgccaagaaatccggtgagaatcgccggtctctcgccgcct

SEQ ID NO: 11438 - DNA, 348 bp, Glycine max
gctccctctctctctctctctctcgcttgtggtgtgtgaattagaatggcaaaggtaagggatcagaagctatacgtgaccgttccgagtctctttcggtgtccaatctccatggacgtcatgcgctctcccgtaagcctctgcaccggcgtcacatacgatcgcgccagcattcagcgctggctcgactcaggccacgacacgtgtcccgccaccttgcaggttcttccctccaaagacttcatccccaatctcacgctccaccgcctcatccgcctctggctcctctcctcctccgccgccgaacgcttctccccctcctccgccgaccatctccgtcctctcctc

SEQ ID NO: 11439 - DNA, 631 bp, Glycine max
tttcattctaatattctttccataaatataataattaattcagtcagttttgttattttgggttacaagattgttcaattttgcacctcacctgcttttaaatcaaatccccccaattatatataaaaccaaaaacccacccaccttgatgcatgcttgcgttgcttgttcctatattacaattacaattttcaaagacaaacatgtccgagaatattgactccaactctccttcgctttccctctttatctgaaaggtatggagtgttttgacttctggaagagataatggtgcagtgcctagacggattaaagcatttgtgtgctgctctggtaaattgttgtgatgccgattcgtcaaagcaacctacaggtttagaaaatccagaagttcttgcaagagaaacagtgtttagtgtaagtgagattgaagcgctatatgaattgttcaagaagatcagcagtgcagtgattgatgacggactaattaatacggaagaatttcagttggcattgttcaagacgaacaagaaagagagcttatttgcagatagggtgtttgacttgtttgatacaaagcacaacgggcaacttgattttgaagagtttgcacgagctctctctgtctttc

SEQ ID NO: 11440 - DNA, 372 bp, Glycine max
cgtacaatcacaggattgttcatttttgcagccatttcagcgtatataaaaccaaaaacccacccaccttgcatgtttgcttcttcctaaattacaattttcaaagccagacagacaaacatgtccgagaatattgagtccaattctccttcgctttccctctttatctgaaaggtatggagtgttttgacttctggaagagataatggtgcagtgcctagacggattaaagcatttgtgtgctgctctggtaaattgttgtgatgccgattcgtcaaagcaacctacaggtttagaaaatccagaagttcttgcaagagaaacagtgtttagtgtaagtgagattgaagcgctatatgaattgttcaagaa

SEQ ID NO: 11441 - DNA, 897 bp, Glycine max
tttccttccacgcgtccgcccacgcgtccggaaaataaaggaaagcttttgcgcttaaagccaacatctgctgatgtagtttatagtgaggtcaaggaaggtgagttaattgatgacaaatcaactcaactcaaagatgttggttctgtgtcacccatatctctggcccgaaagaagtttagtggtagatatgctgtctcatctgaagaattcactggtgaaatggttggagctaaatctcgtaatatctcttatttaaaagggaaagtagcttcttggattggaattcctacctcggttgccataccatttggagttttcgaacatgttctttctgataaaccaaaccaggcagtggctgagagggtcaataatttgaaaaagaagttaattgagggagacttcagtgttctcaaggagattcgtgaaacagttctacaattgaatgcaccatcccatttggtagaggagttgaaaactaaaatgaagagttctggaatgccgtggccgggtgatgaaggtgaacaacgatgggagcaagcttggatagctataaaaaaggtgtggggctctaagtggaatgaaagagcatacttcagcacaagaaaagtgaaactcgaccacgaatatctttccatggcagtccttgttcaagaagtgataaatgctgactatgcttttgtcatccacacaactaaccctgcctctggagattcatcggaaatatatgctgaggtggtaaagggacttggagaaacactggttggagcttatccaggtcgtgctttgagttttatctgcaagaaacgtgatttgaactctcctcaggtcttagggtatcctagcaaacctgtcggcctatttataagacggtcaattatttttttgatctgattt

SEQ ID NO: 11442 - DNA, 736 bp, Glycine max
ggcacagtctgttgatgagcagcttgttgttgtttctcaggttcttgtgtctgacatcaatattggatatgaggagatagttaacactcaggttcttgctttcaacgataaacctgtgaagaatctgaagagcttggccaacatagttgagagctgtgatgatgattatctaaagtttgatctggaataccaacagaaggtagtgttgaagactagcactgctaaggccgcaaccttagacatcctcaccacacattgtataccttctgcgatgtctgatgacctgaagacataaaaagttttggtgaaagttatttaaattactcccattggcctcatcttaatttttttttaagtgttattacacctagttcactataagattgcggtactattggatctgcactagtcaatgagataaaaaggcttcacatacagatgattagagaatcagaggatggggaaggaattagcataatacaacttacgcttcattaaattatcattaagtttatctctttcgagttggggtgttctgtactctatttatatcaattattgtgtcccccccttcccccctttttgatacaaaattgacattcatatgtatttttcttaagatgggagaggcatgtaaaatcttatgttgaggatattaatgctgttattttgaagtaccctacttacatggagcagatgattctactgctcacaatgataaaagtgtttttctttg

SEQ ID NO: 11443 - DNA, 448 bp, Glycine max
gcggcacaacaagtacggcgctttgccttcggcagctgagacttacaactatcgcacaaaaaggacccgttgctgccaaaccacgctcactttcaccaattcattattcccattttctccagaaccacaagaagaagaagtttgtaacaataatgggaatgaagggtgctcccgccactctctccgacgacgacgtcgttctcaagtccccaaacgaccgtcgtttgtaccgcctcatccacctccccaacggccttcgcgccctgctcgttcacgatcccgagatttaccctgaggggcctccgaagcatgtttcaaacgaggacgaagttgaagaagaagatgatgatgatgaagaagaagacgaggatgaagaagaagaagaagaagatgaagatgatgatgatgatgatgaggaagaagaagaaggaaatgaaatggatggggt

SEQ ID NO: 11444 - DNA, 338 bp, Glycine max
cttcctacttccaccacatcccttcccaatcaaaatccgcaaaacattaagtacggcgctttccctttgcgagctgagacttacaaataaatcctttgctgccaaaccacgctcactctcatcacccccgcctccccactctccccagaagaagaagaagtgtcttataataatgggaatgaagggtgcccccgtctgtctctccgtcgacgacaacgtcgttctcaagtccccaaacgaccgtcgtttgtatcgcctcatccacctccccaacggccttcgcgccttgctcgttcacgatcctgagatttaccctgaggggcctcccaagcatgctc

SEQ ID NO: 11445 - DNA, 446 bp, Glycine max
agcaaagcttattccatcatacatgactcatgtcagcacacgtgtggcatgaacaataggttatttggcaccagagtatgcaataagggggcagctgacacgtacagcagatatttacagctttggtgtccttctcgtggagatagttagtggaagatgccacacaaattcacgattaccaataggagagcaatatcttttggaaatgacatgggaacgttatcagaatagagaattggtagggcttgtagacatatcactagatggccatttcgatgccgaggaggcatgtaagtttctgaaaattggacttctttgcactcaggacacgtcgaagctccggccgaccatgtcatctgtggtcaagatgctcacaagagaaatggatattgatgaaagtaagataacaaagccaggcttgattccagattttaacgaccttaaaa

SEQ ID NO: 11446 - DNA, 417 bp, Glycine max
caagaggtctttcctggggtggttgtgcctgatgttagagccttttctgctgcttcaagagatgggttggttcctggggatgtgatccttgaggtcaatggaagtgagttttcaaaaccaggtccaagtgcggtttctgaagttgttgatgttatcaagaggaaccccatgagatatgttttgctcaagattaaaaggggggagcagaattttgatataagggtcaccccagatgagaattttgatggaactgggaaaattggagttcagctagcccctaatgtgaagatagctaaggttaggccaaaaaatttggtgcaggctgtggagtttactgggcaagagttttggggtctggcctctaatgttttacatgggttaaagcagacttttttgaacttctcccagtcagctagt

SEQ ID NO: 11447 - DNA, 421 bp, Glycine max
ggattctggttcatttttctttgtctgaatcgaacacacgtgagtatgtctgatcacgaagaccatgcagactacgcagacaatgaatcctttgcaaagcgtaggttcagggataggtccaaggaggcattgtccaaacaagccgttaagttagccaaacaagctgaagagcatgaaaggttcatcaacaaggtgactcatcttttgggggttcttggctttggttggttttgcttcatctttggggcaaggccacaagccgttcccttggtatattgtttgttctatgtggtatttgttcctctccgttggatatattacaggttcaagaaatggcattactatctcctggatttttgctattatgccaatacaatcttcttggtttacctccttttctacccaagcaatgaaaagcttt

SEQ ID NO: 11448 - DNA, 2147 bp, Glycine max
tgaatacttcaaatctgtaggaagtagagctccagatactttaatgaactctgctccatatgaatctcccaggctgaataggatgcaaagtaatttagaggcttcctttgggcctcaaaggagttcttcctcactgcaggcaaatcctgtccagtttatggatgaatatgttcagacctccagccgcaatctccttgatgctggtgaaaggcgctattttagtgtgcacaatctacctacatctgcagcctgggattatcagccagctaccatacatggttatcaggtttcatcatatattaatcaagttggtaaagacacaaattctgataaattaaatggtctgagggaatccccttccatgggtaatacaaacaactacaggaattctattgcatttgctttgggtcaaaagttgcaaaacggttctggtttaagccaacccccaggattcccgaacattgctgtctctaagaatagccaattgccatctgagaggtcctattatgattctcgcccttccggacctgtggatagtacagtcagttcagtctatgctaagaagttccacagcttgccagacatttcaggatatgccatccctcacagggatgtttacctgtctgataaaagtgctccatgggatgattctgttggtggatatagatcttctgcaagtaggactcattatgaaccgtcattatattcaaattctggatcaagtacaggagctcctttagcctttgatgtactctctccatcaaaagtctacggtggcgtactttcttctcagttgagttctggttttggcactggatccctctggtccagacagccttttgagcaggtcggcgtggatgataaaattcataatgctgcaacagaagatgttggaaataggcctagtgcaactactcatgaaattacttcagttgtggatattgatggcaaagcttcttcaatcttttagacaatgtattttgaaactcttaaaattggaagggtctgattggttgtttaaacagaatgatggggctgatgaagatctgattgaccgtgttgctgcaagggagaaatttgtttatgaaattgaaaccacagagatgaaccgcaatcatatgggagaaactcgatatctttcttctgatgggaaggcttgttcttcaatgaagaataatgaggcaaattggtctagtttttctgtaacctcaatccctaactgtggggaaggatgtgtttggagagcagatataataataagctttggggtgtggtgtatcaaacgtgttctggacctctccctaatggagagccgaccagagctgtgggggaagtacacttatgtactcaatcgcctccagggcatcattgatctggctttctccaagcctcgtagtcccatgaccccatgcttttgccttcaagttcccatgacttaccagcagaagtcaggctcgcctccttccaatgggatgctgccccctgcatcaaaaccaggccgtggaaaatgcacaactgcgtcagtggtgtttgagatggtcaaggatgtggagatagcaatctctagccggaaaggtcgcacaggaactgctgctggtgatgtagctttcccaaagggaaaggagaatttggcatctgttctcaaacggtataagcgtagattatccaataaaccagttggcactactcaagaagggattcgcaagattcccacatcagcaccatacaacttgtagcattttgcattttgtcttcactacgcattaacataagctgtgttccttgggctgttttgatttgtgaagcagttcatgctgtagatcaaaggattaccaatttcctcgccacaagactgctgtctccatgtaccaatcctcgccgcagattttatttccttgtaatgttatatacacgtagggttagaattactatatgtaattgcaaaaaaatcaaaggaaaacaaatggttagatggaaactgacttttaccattttggcttatttttcattacttcactcgcaactgcatgctaggtggggaaaccaaatgggaataaaattgtcaaccccctgtcactcttaacaagggaaaataattttcgatgtgtttttattgagtgttattaaaggcacttggtatggttgcc

SEQ ID NO: 11449 - DNA, 513 bp, Glycine max
ccatgacttaccagcagaagtcaagctcgcttccttccaatgggatgctgccccctgcgtcaaaaccggtaattgtgaaaatgaagtggtgactgaatagtgtttaagatagtatcgaatgtggagatatcaatctcaaacagagaagtttgtacaggaacatctgctggtgacgtagccttcccaaagggaaagtagaatttggcatctgttctcaaacggtataagcgtagattatccaacaaaccagttggcactactcaagaagggattcgcaagatatacttgtagcattttgcctttccactatgcattaacataagcagtgttccttgggctgttttgatttgtgaagcagttcatgctgtagatcaaaggattaccataggaagttcctcgccacaagactgctgtctccgtgtcccaatcctcgctgcagattttatttccttgtaatgttatatacacatagggttagagttcctatatgtaattcccccccccaatccaagg

SEQ ID NO: 11450 - DNA, 424 bp, Glycine max
catccttctcttcagatgatgaaggtttctatgcatttgaatcagaggatgacgtagatccttcgattagatatgttggaaccaattaccctcatgttaagcggcgtaagaaattgcctgaccctgtagaaaaagagaaaggtgtcagtctttggtcaatgattaaggataatatagggaaggatctaacaaaagtttgccttcctgtttattttaacgaacctctttcctccctgcaaaaatgttttgaagaaatggagtattcatatcttctggaccaagcatatgaatggggaaaaaggggtaatagcctcatgaggattctctatgttgcggcttttgctgtatctggctatgcttcaactgaaggaagagtttgcaaaccatttaatccggtacttggggaaacatatgaagctcacta

SEQ ID NO: 11451 - DNA, 1274 bp, Glycine max
gcttgaagcccatgtggccagctcatatcacctggatcagcattttcaacttctggcacctgaaccgcattccctgatggaccccctacacttgaattccccaaaggggaaacaccaaggatcttgggtgttgaacacttctccacccgaagatggggttctagactgggatctgggtcgttgacgccagacggtgcatggcaaggttcaagactaggctcgggatccttgactcctgatggtattgggcttgcttcacgattaggctctgggtgtgtgacacctgatggtctggggctggaatccaggttaggttctggctgtttgacacctgacagtgctgggccaatcaatcaaaacaacatctctgtgcaaaaccagatatctaaggaagcaactcttgcagattcagacaatggacatccaagcaatgcaacattggttgatcacagagtttcatttgaattaaccggggaagatgttgcccggtgtcttgcaaataaaactggggtattgcttcgaaacatgtcagggtcttcacaaggtatactgaccaaagaccctgttgacagagaaagggtgcaaatagacaccaatagtagctgtaacgcgtgtacagagaaaactgacgataagcctgacaatcctgtatgaaaaggagagcaatgccttcacaagcaaaattctgtaaattcttccaaagaattcaattttgccaaccggaaaggtgatgtttctgttactgctgccagtggctctgagtggtggactaacaggaaggttgctgggaaggaaggtagatcacccaccagttgggctttcttcccaatgttacagtcagaaatgaactgaggttttagtttatcgcaacatgacttaacctgtatggtataaaagcataaaggattttcagaacctttagtatactgaattgtatatttgaagaccttatcttgaatgctgttcatcatatacctttgaggggaaattgtagtaaatggatgattaagactcggatgaaccaacagttgttatattcctttaggacctaaagtagaatgcaaggggagcatagtggtagtaggtagggaccaatagttggttatattatatttatataattatgtgaaacattacttcttgcatttcatcctttcaaatatacagaaatagcaaagtataggtatttcgtgttgtggattattgtatcctttcatatgcaataatgaaaaaaaatattatattatttatcctttttagtattattattcgag

SEQ ID NO: 11452 - DNA, 451 bp, Glycine max
acttcacgctgacacacactacacaaacccctaaccttccttccttccattcactactactccttcactttacttcaaaatttcacccttccaaatccccaacttttacaattttactattagaatttaccatctctctttctcttcctcaatccattccatccaatcccctctcagtcgaagcaagaaaaccatgtatttatcggagaagcctcgtcccatcgatttctacaaggaggaaggcgcgcgcgacatgatgatcgaggtcgtctccaacggcgacctccctcctccgcctccgccgccgccgccgatgattctcggcgagagcagcggcgaggaccccgaggtcgagatcaaggccccgaagaagcgcgccgagacctgggtccaggacgagacgcgctctctcattggccttcgccgcgagatggacgcgctcttcaacacc

SEQ ID NO: 11453 - DNA, 525 bp, Glycine max
cagacacgtccccctcttcctcatcacccctctctcttttgtttccaccgcatccaaaccaaacgctgacataaacacactgcacaaacccctaaccttccttcctccattcactactcctccttcacttaaaaaatttcagccttccagggcctcaacttttacaattattacaatttagcatcactctttctcttcctcaatccaatcccctctcgcgcgcgaaccaagagaatttaagaacccaaaccatgtatttatcggagaagcctcgccccatcgatttctacaaggaggaaggcgcgcgtgacatgatgatcgaggtcgtctccaacggcgacctccctcctccgcctcctccgccgcctccgccgatgatcctcggcgagagcagcggcgaggaccccgaggtcgagataaaggccccgaagaagcgcgccgaaacctgggttcaggacgagacgcgctccctcattggccttcgccgcgagatggactcgctcttcaacacctccaagtccaaca

SEQ ID NO: 11454 - DNA, 778 bp, Glycine max
ggaaattaataatactaaatctctaagcctatctctgcatcatgattacccctgtcgttcgacgcatttcagaatgcttcgtcaaaccacatggtttaacccaaatgtcaaaccaaacatgtcatttaacccaatgggatattgctatgttgtctatgcactatatccagaagggtctactcttcaagaaacccacccctcttgttgatcaacatgatttcattgggaatctcttggggaagctcaaacactctctttctctcaccctctcccatttctatccattagccggtcgccttgtcacccaccaaacccaaaaccctccctcttacactgtttccgttgattgcaaaaatagtgatggagccagattcatctatgcaactctggatatgaccatatctgatatcctctccccagttgacatcccactcgttgttcagtcattgtttgaccaccacaaagcactcaaccatgatggccacaccatgcccctgttgtccatccaagtcactgagctagttgatggtgtgctcttaggttgttccatgaaccacgctgtcggtgatggcacctcttattggaacttcttcaatacatggtctcacatctttcaagctcaagctcaaggccacgaaactgatcttcccatttcacaccgacccattctcagccgctggtttccgaatgattgtgctccaccaatcaatcttcctttcaaacaccatgacgagtttatcagcagatttgaagcacccttgatgagggagagagtttt

SEQ ID NO: 11455 - DNA, 1560 bp, Glycine max
gcgtacgtaagctcggaattcggctcgagcttcctctctctctctgtctctctgtctcctccatggccatctccttcagtcccaaacaccctccttacgatgagatgatatacacagcaatcggagctctgaaggagagggatggttcgagcaagcgagccataggaaagtacatagaacaagtctacaaggaccttccacccactcaccctgctttgttgactcaccatctcaaccgattgaaatcctctgccctcctcgtcctcgtcaagaaatcctacaagcttcctggatctcatcatctgcctgcgctccagccccaaaagacccgtggtcgtcctcccaagcccaagccccaccccgtctggcctgctgcagccctcaccgacagccctgctcttctatccgccaaaagaggccccggtcgtcctaaaaagattggtgtcagcccgccaggcccaaggggtcgtccacccgggactgggagatctaagctgcccaagaggcctggccgtccccccaagcccaaatccgtctcggcgatctccagtggtctcaaacgacgtcctggacgcccacccaaagcccaatccaacgtaaacgtcatccccttcgcagccccagttgctcccggcctgcctactgtgcagcccatccttcctactgcttccgtgcccaatggatctcccaggccccgaggaaggcctaaaaagagttttactgctgcgggggctccggcgctatctgccgttgccggtgcagcgcgtggtcgtggccgcggacgtccacgtggggtcttcccggtggttaggcccggccggcctcagaagctcgccgtaggaaggtccaagaatcctgtaagaaggcccgtgggccgccccaagggatcgacagctgctgcaatcacagcacataaggctgctaatgaagatctaaggaagaagcttgaacactttcaatcaaaagtgaaggagtcccttggcacgcttaagccttattttaaccatgaaagcccagtcactgcaattgcggcaattcaagagttggaagtactgtcaactttggaccttaaagcgccattgagggatgagacccagcaacagccaccgccactgccacagacacagacacaggtgtatgaacagcaatatccccagccacagtcacagcagctgccgcaattttttcaaccacatacatcagccccgagctaggcctgaacatgatgaaggacaacttgtacaagtgttattaacaaggcacaagaggtaaaagatctgtaaagcggttaggaagtagtggtactgatttttctgagggtgaaatgactctgtctattttagtttgttgttgtgcaacatttagtttgacccctgaagtgattagcgggtactcatgattctgttgttctttaagtaatatttatttgacttttacagtttactttagtcacattaatgtgtatgtttgtatcagcctcttttgttgtttaatatttttaattaatggttactgcttgctatttctcattaaaaaaaaaaaaaaataaaataaaatata

SEQ ID NO: 11456 - DNA, 802 bp, Glycine max
ctctctctttttcccaattttcgaatctctctcctccatggacccaacttcgatccctccccctccggccaccaccgtccccttcactgtcgaacccagcaatcacgtgacccccgccgacaacaccaacaccaaccaccctccttacgatgagatgatatacacagcaatcggggctctgaaggagaaagatggttcgagcaagcgagccataggaaagtacatggaacaagtgtacaaggaccttccacccacccactctgctttgttgactcaccatctcaaccgattgaaatccgctggtcttctcatcctcgtcaaaaaatcctacaagctccccggatctgatcctcttcccgtgctccaggcccaaaagccccgcggtcgccccccaaagctcaaatcccagcccaacactgagctcacatggcctgcgctagccctcaacgacaaccctgctcttcaatccgcaaaaagaggcccgggtcgtcccaaaaagattgcaggacccgtaggtgtgagcccgggcccgatggtgccgggcagaaggggtcgtccacctgggaccgggagatctaagctgcccaagaggcctggccgtcctcccaagcccaaatccgtgtcggcgatctccagtgggctcaaacgacgtccgggccgcccacccaaagccgaatccaacgtaaacgtcatccccttcgcagcccctgttgctcccggcctgcccacagtgcagcccatcgttcctactgcttccgtgcccaatggatctcccaggcccagaggaaggcccaaaaagatt

SEQ ID NO: 11457 - DNA, 467 bp, Glycine max
ccattgtttgctaccgttggagctctttagttgctgtgatgattcaagcattggcacatcgtgtgagttacgtgtgggttgtggaagaggatggaaccttgacggggattgttactttccaaggaatgttgaaggttttcagagaccacctcaaatccatgtgctaacagttactttaaaactactacattacatgatgatgatgatgatgcagataacgactactatatgctaccacttcagctaatttgttgtaataaaaatccgcttgcaaatgatctcttttggctttgtcgaagaatcgagatatgaagtagatagcacggatttgtgcctaggcacaaatcaattttgctttttgtttacctacccgtgattttcttttgcttaaatttggcctcccaagatgttccatcatgtaatttagttttcaaaggaaaaaatcttaaagagtttaatttccatat

SEQ ID NO: 11458 - DNA, 283 bp, Glycine max
cggctcgagcagccacagccacaggtgtatgaacagcaatatccccagccacagccactgctgctttaaggtccaaagttggaagtactgtcaactttggaccttaaagcaccattgagggatgagacccatcaacagccacagccacagccacaggtgtatgaacagcaatatccccagctgcagcagtggctgtggctggcaggcattgtcacatcgtgtgagttacgtgtgggttgtggaagaggatggaaccttgacggggattgttactttccaagga

SEQ ID NO: 11459 - DNA, 1027 bp, Glycine max
gctacaagatggtacagaactccagaactatgtggctccttcttttcaaagggaggactattgatctctcctggaagttgattttatctgtccttcagtatacaccagcaattgatatatggagcattggatgcatttttgcagaggtgttgacaggaaaaccactgtttcctggtaaaagtgtcgtgcatcaattagatttgattactgatcttctcgggacaccatcacctgaaactattgcaggagttcgaaatgacaaggcaaggaagtacttgatggaaatgcggaagaaatctcctgtgccatttgaacagaaatttcagaatgcagatccattggcacttcgcctattacaaaggcttttagcatttgatccaaaggatcgaccaactgctcaagaggcactggctgatcccttctttaagggtttgtccaaagttgagagagaaccttcttgtcagccaatttcaaaattagaatttgagtttgagaggagacgagtgacaaaagatgatgttagggaactaatatatcgggaaatactggaatatcatccccagttgcttaaagattacatgaatggaactgaaggcactcacttcctttaccctagtgcagtagatcaattcagaaagcactttgcttatcttgaggaaaatcatggtaaaagtggcccagtgattcctccagaaaggaagcatgtctcccttccaaggtccactgttcactctagtacaattcctcctagttcacaaccatcttttacttcatacgagaacaagcaaatggcattagaggcatcaaaggtttcgagatcagtagaatcaaattccagaagtcaattaaggagctcgtgacctccgccaagagtgccagcagccaaaccaggtcgaatcgcagggccagttttgcactatgacaatgggagaaccttaaaagacacttatgaccaaaggatcttctaccgaaacacgcttcctcaagccgtctctccacactgtttccatagggtgcagcaacctac

SEQ ID NO: 11460 - DNA, 527 bp, Glycine max
ggaatatcatccccagttgcttaaagattacatgaatggaactgaaggcactcacttcctttaccctaggttgaaccgtaattcctgtttctttttttactgatgtaacataaatacccatattatgtatacattatatgcaatgcttatctttacggaaatatgtctcttgcagtgcagtagatcaattcagaaagcactttgcttatcttgaggaaaatcatggtaaaagtggcccagtgattcctccagaaaggaagcatgtctcccttccaaggtccactgttcactctagtacaattcctcctagtacacaaccatcttttacttcatacgagaacaagcatatggcagaagaggcatcaaaggttacgagatcagtagaatcaaattccggaagtcaattaaggagttcgcgacctccgccaagagtgccagcaggtataaactatatatttaatgtgatgctagcctaactctttcaataaagttattagaatttaaaatcaagaatagcgtggaacaac

SEQ ID NO: 11461 - DNA, 675 bp, Glycine max
ctatatgctaatgagcctgctaatgcggaaaatccagttagcatgcctgttggtacagctgagccagaacgaacaagagatgctggtagtggtggcaatactaatcatgccagacctgctagcaatattgtaaacattgtaaagccagtaggctattcagcttcagtagccagtggaatgcaggatgttttagtaacctttgtggcttcaaagtctgatggaacagaagtgatggttgacaacaagtatctaaaagcatttaatccacttcttctgatcaatttctatgagcagcatcttcgctacagccctacattgtgaccaaacagagaatagaaggtgcttttgagtttgtagttaggttcacacgattgtgcttagttagtagttttgttgaagaatgtcttacttttatagatgcagaagatagtaaagggtaagaaatgcattgtttgttagttacccgtaggtatgattttaacaagtggttgtcagtgtggctatatactgactgatgcatgctgatggcataaataactatatatttgaatgcctcaaacacacgaggatagacaatagtttcttaggagttagtcaagaatgaaaaactattttggattattgtaaatttttatggaagttcttggctatttctgagcgatttgtttgcctatt

SEQ ID NO: 11462 - DNA, 556 bp, Glycine max
ggcacacccaacccttcaccagatctcactttgttccgttcagtgcagagaagaaaatggcggtgatggccgttcaccaattcgcgcaatgcatcacttgccacgcttggagccccgatcaatccatggtggctttatgtccaaacaataatgaagtgcacatctataggttggttgaagacaaatgggaaaaggtgcatgttcttcaaaagcatgaccaggtaatttctgggatagactggagcacaagatcaaatagaatagttactgcatcccatgatcggaattcatatgtctggaaccttgaaggatcagaatgggtgcctactcttgttatccttagactaaaccgtgctgctctttgtgttcaatggagtccaaaagaaaacaaatttgcagtgggaagtggagccaaaactgtttgtatatgctactatgagcaggagaacaactggtgggtcagcaaacttatcaggaaaagacatgattcttccgtgacaagtgtttcttggcatcccgataatattcttcttgctacaacatccacagatgggaa

SEQ ID NO: 11463 - DNA, 427 bp, Glycine max
ctcgagccgcttcaccagatctcactctcactctcactctgttttgctcagtgcggagaggacaagaaaatatggcggtgatggcggttcaccaattcgcgcaatgcatcacttgccacgcttggagccccgatcaatccatggttgctttatgtccaaacaataatgaagtgcacatctataggttggttgaagacaaatgggaaaagttgtatgttcttcaaaagcatgcaaatttgcagtgggaagtggagccaaaactgtttgtatatgctactatgagcaggagaacaactggtgggtcatcaaacttatcatgaaaagacatgattcttctgtgacaagtgtttcttggcatcccgataatattcttcttgctctacctccacaaattggaaatgcttaatattcatcacctttattaaaa

SEQ ID NO: 11464 - DNA, 596 bp, Glycine max
cccacgcgtccgcaaacttccttcgcttgtagtactgccctaattccccaaattcgggtcttttttttttcttttttttttttttgttctttcttctcagatcccggtggccttttccctctctttctctggaaaattcccccgattttctcgagaaagtgaaacggaattatgagctttcaggacatcgaggctgggcggcccttcagttcgaggcgcgggttgatgaacgggaagcaagacccgacgcaagcggtggctgccggaatattccagatcaacaccgccgtctccaccttccagagactcgtcaacaccctcggaacccccaaagacacccccgacctccgcgaaaaactccacaagacaagactacatattgggcaattggtgaaagatacatcagctaaacttaagcaagccagtgacattgatcaccatgctgaagttaatgcaagcaagaagattgcagatgctaaacttgcgaaagattttcaggcagtgttgaaagagtttcagaaggcacaacgtcttgcagctgagagggaaacagcgtacactccttttgttccacaagcagtccttccttcgagcta

SEQ ID NO: 11465 - DNA, 557 bp, Glycine max
agtagtttcccttctcctcaccgcactcacacgcgtccgcccacgcgtgcgtacagccatagatattaacaggaaaacttatgaggttggtttaccagtcatcaaaaaggctggagttgagcacaagattgatttcatagagtctccagctctaccaattttggataagctacttgaagatcctgcaaatgaaggatcttttgactttgccttcattgatgctgacaaggagaactatgtgaactaccatgagaggcttataaagctggtcaagattggggggttgcttgtgtatgacaacacactgtggggtggacgtgtttgctggcctgaagacaaagttccaccacacgctagatcagggagggacgctgcaattgaatttaacaaaacaatcacaaacgattctcgtgttgaatttgctcttacttccgtaggggatgggctcaatatttgtaggcgcgttgcttgacttttgtgttaatgctctgctatcgtataatttgtatttctagtagccacctgaataaacattgcattttgtgttcctgttagag

SEQ ID NO: 11466 - DNA, 513 bp, Glycine max
aaaaatgtcgtcgttgataacagatttgctccgtcaaaccggcggcaccgccgtcatcgacggcggtctggcgacggagctggagcgccatggcgccgacctcaatgatcctctttggagcgccaagtgcctcttttccttccctcacctcattcgccaagtgcaccttgattacctggaaaatggtgcagacattataatcacagcatcttaccaagccaccattcaagggtttaaagccaaaggctattctgatgaagagagtgaagccttgctcagaagcagtgttgaaattgcacgggaggcacgcgaagtttactataaaaattgtgctggatgtcgttcgggtgatggggatgatgatggtagaatcctcaaacaacggcctatcttggttgctgcatcagtagggagctatggggcttatttggccgacgggtcagagtacagtggggattatggtgatgctatcacggtggaaactcttaaagattttcatcggagaagagttca

SEQ ID NO: 11467 - DNA, 1062 bp, Glycine max
gaggccgacggagaaaagaagagaatagagaatggtcaaagtaaaaataaaatgaaggaattaaaaatggaaggcgtgcttctcccacaactccgcgtacgcgcagccttttcaccaaattgtcgaccaaccatcttcgttatttgcaaatttcgtttcctttgaattacaatttacaagacaaggaaggcagcctcggatgttgttgttgtcgtcgtcgtgttcttaggttttgttctgagacgcagtttttcattcttctaatggcccagtccttcggtcagaccgagatcaactgggacaagctagataaaactagattctatgtcgtaggagctggactctttacaggtgtttcggtggcactttatcccgtttctgttgtgaaaactaggctgcaggttgccacaaaggatgctgtagagagaaatgtgttttctgttgcaaaaggactacttaaaacagacggcatccctggtttgtatagagggtttggcacagttatcactggtgcaattcctgccagaatcatattcctctccactctagagaccacaaaggtgactgccttcagaatgcttgagccatttagactatctgaaacttctcaggctgccattgcaaatggagttgcaggcatgacatcatcgctttttgctcaatctgtgtttgtaccaattgatgtggtcagccaaaagttgatggtgcaaggatactcaggccattcccaatatagtgggggtctggatgttgttcgcaaggtcttaaggactgacggcatccggggattgtatcgagggtttggtctgtctgttattacttatgcacctgccagtgcagtatggtgggcaagttatggttcaagccaacgcttcatttggagattcctggatcatggtgccaaatatgatgaagtcgcacctagtatgcagaaaattatgttagttcaggctactggagggattattgctggtgcaacttcatcctgcattacaaccccattggataccatcaagacacgattacaggtaatgggacatgaaaatagaagttctataaaac

SEQ ID NO: 11468 - DNA, 486 bp, Glycine max
gaaaaaacaattggaaaatggaattaattgtttgtttgatgcaaagcactttgcagttaccatactgtcatcatttcattcccccctaacaatttgccaactaagaaaccccacctttccagctttttgctctctcaaaacttgctcctattgttgttgttgttaccaaaaggttgttccaaatctggatttcaaaaacaatatagattcgccgcaacccatttgaatctctgagagaaggagcatatcaaaatcatttttctttttcctgaagagcaaatgggggcgtatagagctgatgaggattacgattatctgttcaaggtggtgctgattggggactctggtgtgggaaaatcgaaccttttgtcgaggttcaccaagaacggattcagccttgagtccaagtccaccattggggttgagtttgccaccagaagcattatggttgatgaaaaggtactcaaagctcatatttgggacact

SEQ ID NO: 11469 - DNA, 480 bp, Glycine max
atttgccaactaagaaaccccaaaagttgttccaaatctggatttcaaaacaaaatataggttcgccgcaacccatttgaatctctgagagaaggggcatatcaaaatcaattttttttttttctttcttcttttccctgaagagcaaatgggggcgtatagagctgatgaggattacgattatttgttcaaggtggtactgattggggactctggtgtgggaaaatcgaaccttttgtcgaggttcaccaagaacgaattcagccttgaatcaaagtccaccattggggttgagtttgccaccagaagcattagggttgatgataaagttctcaaggctcagatttgggacactgctggccaggaaaggtaccgagcaatcactagtgcatattatcgcggagccgttggtgctttattagtctatgatgttacccgccatgttacatttgaaaatgtggagagatggttgaaggagct

SEQ ID NO: 11470 - DNA, 559 bp, Glycine max
cattattaagattcaccttagcaatatcatcctgaaagtttattattcacttgtgcaggttttttgagcctttggatttgtgcataagattactactttcgagaagacagcaggatttcaggcactggtgcaattctcagatgcagagactgccacctctgcgaaggatgctttggatggaagaagcatacctaggtatctgctgcctgagcatgtgggaccatgtacccttaggatcacttattccggacattcagatttaagtgtaaagtttcaaagccacaggagcagagactatactaatccttaccttcctgttgctccatcagctgtcgagggaagtggacaggctatggttggtttggatgggaaaagattggagactgagagtaatgttctccttgcatctattgagaacatgcaatatgctgtaacattggatgtcttacacatggttttctctgcttttggccctgtccaaaaaattgcaatgttcgataagaatggtggtttgcaggctctgattcagtatccagatactcagacagctgttgtggcc

SEQ ID NO: 11471 - DNA, 704 bp, Glycine max
gagcccttctcgtcctctcaattctctcagtccaaggggctgcaaattttctggttcttttcgacagattttgagtcattgtttgaaatggcatcggtatctagtcagccacagttccgttacactcagccgccgtcaaaggtgcttcatttgaggaacttgccgtgggagtgcacagaggaggaactgattgagcttgggaagccgtttggcaaagttgttaacacaaaatgcaatgttggggcaaatagaaatcaagcttttattgaatttgcagatttgaatcaagccattgcaatgatatcgtactatgcctcatcatcagagcctgctcaagtacgtgggaaaactgtatacctacaatattcaaataggcaagaaatagtgaataacaaaactactgcagatgttcccgggaatgtattgttggtaacgattgagggtgcagatgcacgtcttgtcagcattgatgtcttgcacttggttttttcagcctttggatttgtgcataagattactactttcgagaagacagcaggatttcaggcactggtgcaattctcagatgcagagactgccacctctgcgaaggatgctttggatggaagaagcatacctaggtatctgctgcctgagcatgtgggaccatgtacccttaggatcacttattccggacattcagatttaagtgtaaagtttcaaag

SEQ ID NO: 11472 - DNA, 386 bp, Glycine max
cttgtgttgtgctggtgcattcttctacttcaattctcagccatgtcggtggttccttgcaattgcaaccacaccacagagaaagataaccttagtggtgaaagtgagagctttcacaagttttttgagtgctggatttctgagcaaaaacaacatctgaaggaccttttagctgctgaatcaacccagctaattagtgatgaggagcttcaggcactgaatgataaggtggttgagcattatgagtactactacaaggccaagtcaaggtgtgcaaagcaagatgtattggccatgctgtccccaacatggatgagttccttggaagaggcttttctttggattggtggatggagaccaagtatggcatttcacttgatatattc

SEQ ID NO: 11473 - DNA, 524 bp, Glycine max
  unsure (1)..(524): unsure at all n locations
atttttcaagcaaaacttttcaaacccaaaaaaaatccaaaaaaagaaaaacaaaacgcttaacgcaatacaaaaaccacagtttcaatcacatctctctctctctttctcgcaaatttctactttctgggttttctatttgagattcgttgttccaatgagcgatcacttggtggtgttcgttgaccgtctcgcgcgccctgtccccgttgacccggtggcgcagccgccttccgagccgtctcctcctccggcccccgtggatgccgacgccgccgggagctccggcacctcaccgtcggaggattgtgacggagagggcggcggcgaggaggagccgctgatccagatggcggagtgccgcatctgccaggaggaggacggcgtttccaacttggagaccccctgcgcctgtagcggcagtcttaagtatgctcacagaaagtgtgtccagcattggtgtgatgagaaaggagacataacttgtgagatatgtcatcagccatatcaacctgngtatactg

SEQ ID NO: 11474 - DNA, 492 bp, Glycine max
gcaaacttttcaaacaaaaaaaataaataataaagaaaacaaaacaagaagaaggaaacgcgcaacgcaacacaaaaaaccacactttcaattgcatttctctctctttctcacaatttccactttccgggttttcgattcgatattcgttgttccaatgagcgatcacttggtggtgttcgttgaccgtctcgcgcgccctgtccccgttgatccggtggcgcagacggcgcaggtgccttccgaaccatctccacctccggccgccgtggatgccgacgccgccgggagctccggcacctcaccgtcggaggattgcgacggcgagggcggcgacgaggtggagccgctgatccagatggcagagtgccgcttctgccaggaggaggatggcgtttccaacttggagaccccctgcgcctgtagcggcagtcttaagtatgctcacagaaagtgtgtccagcattggtgtgatgagaaaggagacataac

SEQ ID NO: 11475 - DNA, 1326 bp, Glycine max
  unsure (1)..(1326): unsure at all n locations
cccaaagaagaagcaccagaggtncctcntagccgccttgcttccctcaacaagccagggattccagttcttgtgattggatctgtacccgccatagcaaatggggttatatttccaatatttggcgtgctgatttccagtgtcatcaagacattttatgaaccatttgatgagatgaaaaaggactccaagttttgggcactgatgtttatgatccttcgtctgtgcatcatttcttataattcctccacgaggatacttttttgcggtggcagggtgtaagttaatccaacgtatcaggcaaatgtgttttgagaaggttgtcaacatggaggttagttggtttgatgagcctgaaaactcaagtggtgccattggtgcaaggctctcagcagatgctgcttctgttcgtgcccttgtcggcgatgcgctgggactattggttcacaatttcgcaactgtactggcaggtttgattattgctttcgttgcatcttggcagctggcattaattattcttgtcttgattcctctgattggagtaaatggatatgttcaaatgaaattcatgaagggattcagtgcagatgcaaagatgatgtacgaggaagcaagccaagttgctaatgatgcagttggaagcataagaacagttgcttctttctgtgctgaagacaaggttatggaactatacaagaataaatgtgagggccccatgaaaacagggatacggcaagggttgatcagcggatcaggatttggggtttcatttttcttactgttttgtgtttatgcaaccagtttctacgcaggagctagacttgtggatgctgggaaggcaacattctcagatgttttccgggttttctttgcattaactatggcagctattggagtttcccaatcaagctcctttgctcctgactcaagcaaagccaagtcagctactgcttccatatttggaattattgataagaagtcaaagatagatcctggtgatgaatctggtagcacactggacagcgttaagggagaaattgagcttcgtcatgtgagcttcaagtatccttctaggcctgatatacagatttttcgagacctcagcttgactatccattctggcaagacagtggctcttgttggtgaaagtggaagtggaaaatcgacagtgattgccttgttgccaagattttataatcctgattcaggcccaatcacacttgatgggatagaaattcgtgagttacagctcaagtggttaaggccgcagatgggtcttgtaagccaagagccagttttgttcaatgaaactatacgtgccaatat

SEQ ID NO: 11476 - DNA, 829 bp, Glycine max
gaaggtaagggggtgtggtcggtcatagactgcagaaaacctattaaaatttcatttggaaaagaatctgccaattttgcggtgtgatatttaggttggagagaagaaaagatgccgttgaaggtgttagaggcgacagtgtcgagtttcgatgtggtttttgagaagttccgatcagaggctccacaaaacaaggccaatctcatcctcttcttggcggacaatgacccggctacctctctcagctggtgccctgattgtgtgagagcagaacctgtgatatacaagaagctggaggcttcacctgatgacattgcactattgagagcttatgttggagatagaccaacatggaggaatccccagcatccatggagggtggatcctaggttcaagctcactggggtgccaacgttgatccgttgggagaacaacaccgtcaaaggtcgcttggaggatcatgaagctcaccttgaaaacaaaatcgaagctcttgttgctgacaagtgacaaatgattgccagtgcaatgtcatagttggtatacatatagtttaaataatgtatgctgtactcttatcagcaatttgtccctctcatgcttataattttgctgctgaaacataaaataaatgatgagtaccaatggtgacaagggaagtctataaatcaatggttggtcttacattgtgcttttttgtttgtttgtggttttggacatcatatttactctctaatccttgataatgttcagcttgctgtgtatgtaaccgaagtcaacttgaattttgcaccagataccaatgtggttgtggtgtttctgcagactg

SEQ ID NO: 11477 - DNA, 412 bp, Glycine max
cccacgcgtccgcccacgcatcgagagagatggcagcttctggttcgtggaagagtgggagtggttcttcgatgggtctggagaggatgagcgtggagcagctgaaggcggtgaaagagcaagccgatctggaagttaatcttctccaagacagcctctccaacattcgcaccgccaccacccgcctcgagatcgcctcctccgccctcaacgatctctccctccgcccccagggcaaccacatcctcgtccccctcaccgcctccctctacgtccccgccacccttcacgactcccaacacgtcctcgtcgacgtcggcaccggctacttcatcgagaaaaccatgcccgaaggaaaagattactgcgaccgcaaaatcaacttgctcaaatctaactttgatcaactcgt

SEQ ID NO: 11478 - DNA, 425 bp, Glycine max
tctcagaactcaccctccaccggaaagcttcgcacccttctccctccatcgaagggagatggcaacatcagctggttcgtggaagggtctggagaggatgagcgtggagcagctgaaggcggtgaaagagcaaggcgatctggaagttaatcttctccaagaaagcctctccaacattcgcaccgccaccacccgcctggagatcgcctcctccgccctcaacgatctctctctccgcccccaaggcaaccaaatcctcgtccccctcaccgcctccctctacgtccccgccactctccacgactcccaacacgtcctcgtcgacgtcggcaccggctacttcatccagaagaccatgccccaaggcaaacattactgcgaccgcaaaatcaacttgctcaaatctaactttgatcaactcctcg

SEQ ID NO: 11479 - DNA, 614 bp, Glycine max
gagaagggtcagcattgccttggaaatcttgatgaggccaaggttgcttttccttgatgagccaaccagtggacttgacagtgcttcagctttctttgtgacgcagacactacgtgccttggcaagggatggaagaaccgtgatagcctctattcatcaaccaagcagtgaagtgtttgagctatttgaccaattatacttgctctctagtggcaaaactgtttattttgggcaagcttcagaggcatatgagttctttgcacaagctggctttccatgtcctgctttgaggaacccttctgatcacttcctcaggtgcatcaattctgactttgacaaagtcaaggccacccttaaagggtccatgaaactcaggtttgagggaagtgatgatcctttggacaggatcactacagcggaagctatcagaactcttattgacttctaccgcacttctcagcactcttatgctgcaagacaaaaagtggacgagatatccagagttaaaggaactgtgcttgaagctggaggaagtgaggctagttttctgatgcagtcgtacaccttaaccaaacgttccttcatcaacatgtcaagggactttggctactact

SEQ ID NO: 11480 - DNA, 1013 bp, Glycine max
agccgaacgctgacgagtgtgtgttggtcctgttggatggatgttcattttccaacttgataccgcgttcgctcactctctactcaacttcaattaatcaaatccctcactttctctctcttgtcttcaaatctcaattctattttggaaaatcagaatcaaagacagttaaaaatacagaacaaacatctcactcaacatcaacacttcagatctacgtttccactctccgaacatcaaaaaaggaaagaaaaaccgatttacagcgacaacaaggaacgaaagaacgatcgatttctcgaagcgccctcaaaatggcgcgtgcacccttcacttctttccccttcgtcctcattatccttctgtcaatcgtccacctttcgcactgcaagaccctcaaacgtgacgttaaggctttgaacgagatcaaggcttcgcttgggtggagagtggtgtatgcgtgggtcggtgatgatccatgtggagatggggatcttcctccttggtctggtgtcacgtgttccactgtcggtgattatcgtgctgttaccgagcttgaggtgtatgcggtgtcgattgttggaccttttcccactgctgttaccagcttgttggatcttacacggcttgatcttcacaataacaagttgacagggcctattcctcctcaaattggacggttgaagcgtcttaaaatactaaatttgaggtggaacaaactacaggatgcaattcctccagaaattggtgagcttaaaagtttgacgcatctgtacctaagcttcaacaatttcaagggagaaattcccaaggagctagcaaatcttccagaccttcgctatctatatctccatgaaaaccgtttagctggaagaataccaccggaattgggcacactgcaaaatcttcggcacttggatgctggtaacaatcatttagtgggtaccataagggaactcattcgtattgaaggttgctttcctgcactacgcaatctgtatctaaacaataat

SEQ ID NO: 11481 - DNA, 548 bp, Glycine max
gagagacagcattgcttgaagttggaagaggggagaaagatttggcaatggctgctaaagtagatgctaatggtggtggtggtaagggtggggtttctgcagtttctgccaaggttccagcagtggcacatccattggctgaaaagcctgatgaggttgcatccaatattagttaccatgctcagttcagtcctcatttttcccctttcaagtttgagctggaacaagcttactatgccactgcatgagagtgttcgtgaccgtctgattcggcaatggaatgaaacgtaccttcattttcacaaagttgatcccaagcaaacttactacttatcgatggagctccttcaaggtcgagctttgaccaatgccattggaaatctgaatatccaagatgcatatgctaatgctttgcgcaaatttggacttgaacttgaagaaatagcagagcaggagaaggatgcagcactaagaaatggtggtcttggtaggcttgcttcttgctttctggattccatggcaacacttaatttgccttcttgggggta

SEQ ID NO: 11482 - DNA, 585 bp, Glycine max
ctccaacccggggtgttgatccaagtgttcgaaggagaacgagctagaacaaaggacaacaatcttcttgggaagtttgagcttactgggatccctccagcaccaagaggagtgcctcagatcaatgtctgcttcgacatcgacgctaacgggattctgaatgtctccgcagaggacaagactgctggtgtgaagaacaagatcacgatcaccaacgacaagggtaggctgagcaaggaggagattgagaagatgttgaaggatgcagagaggtacaaggcagaggatgaagaggtgaagaaaaaagtggaggctaaaaattcgcttgagaattacgcgtataacatgaggaacacgataaaggatgagaagataggagggaagctgagcccggatgagaagcagaagattgagaaggctgtggaggatgcgatacagtggttggagggaaaccagatggcggaagtggacgagtttgaggacaagcagaaggagttggaagggatctgcaaccccatcattgctaagatgtaccagggtgctgctggacctggtggagatgttcctatgggtgctgacatgcct

SEQ ID NO: 11483 - DNA, 437 bp, Glycine max
tggtgcagcagcgaaaatgtcagggaaaggacctggtttcttctctgagatcggcaagagaggcagagatatcctcacgaaggattacaattccgatcaaagattcaccatctcctcctccaccaactccggtctcgacctgaagtcaacactggtgaagagtagaggactttcctctggtgatgtggctgcagaatttaagtataagaacaaggcggttaatgtcaaagttgatactgaatcaaatgtgttgacgacattcactgtctctgatgttgtgccatccgcgaaaaccattgcttctattcgtctgcctgattacagttctggcaaggttgaggttcagtatcttcatgagcatgttgcttttactcttggtgttggtttagaccgctcccctgttattgatttttctgggacgatgggtactcctagca

SEQ ID NO: 11484 - DNA, 700 bp, Glycine max
tcgcccacgcgttcgatcagaacatcgaggaaatagcagcattggatgccattgatgcagggaagttgtaccattggtgcaaggctgttgacattcctgctgcagcaaatactattcgttactatgccggtgctgccgattaaattcatggggagggcttaaaagcgtctagggagttccatgcatatactttgttagaaccaattggtgttgtaggacacattattccgtggaatttccccagcaccatgtttgttgccaaggtgagtccttccttggctgctggttgcacaatggtcctcaagcctgctgggcaaacacctccctcggccttggtttatgctcatctttgctaacctggctggaattccagatggagtgcttaatgtagtacccggatttggccaaactgcaggtgctgcaataagctcacacatggacattgataaggtaagctttacgggttcaacagaagtggggcgtgaagtaatgcgtgctgcagctaatagtaatttgaaaccagtttcacttgagctaggaggcaagtcacccgtcatagtttttgatgatgctgatgtagataaagctgctggacttgctctcaatgggcatcctatttaataagggagaaatttgtgtcgcaggctcccgtgtgttggttcacgaagggatctatgatgaatccgagaagaaattggtg

SEQ ID NO: 11485 - DNA, 1150 bp, Glycine max
catacgtaagcacggtcttaattccgaacgaggacagagtaagggtggtgaaaaacgatgaagccaggtgaaatgtttgctcacataggatccatagttgcttccttgatgtttgtttgggccatgtttaagcaatttttcccttatcaactaagcaaccaaattgagaaacactcccaaagattggtgaccttagtctacccttacatccaaatcacattccatgagttcactggtgagagactcatgagaagtgaggcctattctgccatagagaactacctcagctccaaggcatcaacacaagcgaagaggctcaaagctgacatagggaagaacaaccagtctcttgttctcagcatggatgaccatgaagaagtagctgatgagttcaatggtgtaaagctttggtgggcctatgggaagcacatttccaagtcacaatccacaatttccttccaccaccctatgtcagatgagaaaaggcaaaggaagctttataccaatagtggtgcttattggagccatgtagtgtttgagcaccctgcaacatttcaaacactagctatggatccaaaggagaaggaaatgatcattgatgatctcataacattcagcaaggcaggggagttctatgcaaggattggaagggcatggaagagagggtatctgctttatggtcccccagggaccggtaagtccacgatgattgcggccatggcgaatttcttaggctatgatttgtatgatcttgagttgactgctgtgaaggacaacactgagttgaggaagctcctcattgagacatctagcaagtctataattgtgattgaggatattgattgttcacttgatttaaccggtcaacgaaggaagaaaaaggaagaggtggaggagaaggatcaaaggcaaaaacaacaaggaatgcaagaaagagaggttaagagtagccaggtaactctttctggtcttttgaatttcattgatgggttatggtctgcttgtggaggagaaagactaatagttttcaccacaaactatgtggagaaattggaccctgcattggttaggaaagggagaatggataagcacattgagttgtcatattgtggctatgaggcattcaagttgttggctaggaatatctcaa

SEQ ID NO: 11486 - DNA, 313 bp, Glycine max
gtgtatttgtactataaactcacttctcataaaagcaatagagatttgatcttagggcgataccttagtcatgtgctgaaagagggtcaagcaattaaggttaaaaacaggcaaaggaagcttcattccaatagtggtgcttattggagccatgtagtgtttgagcaccctgcaacatttcaaacactagctatggatcacaaaggagaaggaattgatcattgatgatctcataacattcagcaaggcaggggagttctatgcaaggattggaagggcaatggaagagagggtatctgctttatggtccccc

SEQ ID NO: 11487 - DNA, 824 bp, Glycine max
  unsure (1)..(824): unsure at all n locations
gtttgtgtaaatgtgttctgttcaagagtaagacggttttgcagccgtctgaaccgagccccaacatttctccgtggtaaaataaagcataatgcttgtgctaggaggtttattcttgccataatatttgctgtgggagttggattgatgtgcataggagtgaaaaatatttatggtggtaatggctcggaagagccttacccgttgaaagggcaatattcccagttcaccttactaacaatgacctacgatgctcgactttggaatttgaagatgtatgtgaaacattactcaagatgctcttctgtgcgggagatagtggtggcgtggaacaagggagtccctccaaaattgagtgatctagattctgcagtaccagtaaggatcagggaagagaaaaataactctctgaataatcggttcagggccgatccattgataaagacacgagcagtccttgagcttgacgacgacattatgatgccatgcgatgatgtcgagcgaggttttaacgtgtggcgtcagcacccagatcggattgttggattctatcctcggctcattgatgggagcccgttaaaatataggggagaaaaatacgcccggtcgcataaggggtacaacatgattcttactggtgcagcttttattgattctcaagtggctttcaagaggtacgggagcaaggaagccgagaaaggtanggaactggtggacaagatatttaactgtgaagacgtgctcttaaactatttgtatgcaaatgcaagctcatcgtcaaggactgttgattatgtgaaaccagcttgggcaattgacacttc

SEQ ID NO: 11488 - DNA, 820 bp, Glycine max
  unsure (1)..(820): unsure at all n locations
ccggaactgaatggccgggccgagccgtccngggaacgcttgggttgccggggagaacctctggggggaagtggagagcggcaaagtgaagagctttgcgaaaattaaggtagaaaacgggtcggattcgtgtccgaattcggtgtcggtcgccgggacggagttccgggacaaaggggtgttggtgctgccgtgtgggctgacgctctggtcgcacgtgacggtggtggggacgccgcggtgggcccacgccgagagtgacccgaagatagcggtggtgagggacgggggagaggcggtgatggtgtcgcagttcatgatggagttgcaagggttgaaggcagtggacaaggaggagccgccgaggattctgcatttcaatccgaggctgagaggggattggagtgggaagccagtgattgagcagaacacttgttataggatgcagtggggttctgctctcaggtgtgaggggtggaagtctcgtgcggatgaagaaactgttgatggacatgtgaaatgtgaaaagtggattcgtgatgacaataatcgttctgaagagtggaaggcgacatggtggttaaacagattgatagggcgaaaaaagaaggtgacggtagactggccatatccttttgctgagggcaagttatttgttctcaccataagtgctggcttggaaggttaccatgttagtgtggatgggaggcatgtgacatcctttccctatcgcacgggatttgctcttgaggatgctactggactatctattaatggggatgttgatgtgcactctatattctttgcttccttacctaca

SEQ ID NO: 11489 - DNA, 640 bp, Glycine max
cccacgcgtccgcccacgcgtccgcccacgcgtccgtttagacttactcatataaatagctcagtggcggtggctatgtcaaactgagaactaagatcccgctggcggttggcgcaacctttcgatcttcatccaacggggcaacgttggatctgctgaactgaacttctttttatatgcactctgtgatttcactctgcttcgccatcctatgggggacaacaacagcaacaacgatgccttcatgcgcaaccaaaacgccgccgttcaggcccgcaccaaagcgcagaaccgctccaacgtccttcagctcaaactgattggacagagtcacccaaccggtctcacagcgaacctgttgaagctcttcgagcctaggcctccgttggagtacaagccgcctccggagaaacgaaaatgtccaccgttatcagggatggctcaatttgtgagcaagtttgcccagcctggcgatccagaatatgctccacctgtcccagaaactgagactcctgcacaaaaaagagccagaatacacaagctaaggctagagaaaggagctgcaaaggctgctgaggagcttgagaaatatgatccacataatgacccaaatgtgtcgggagatccatacaagacattg

SEQ ID NO: 11490 - DNA, 284 bp, Glycine max
ggcagttgcggcaaccctcgttcttaatcccacggggcaacgtcggatctgttgcacttcttctatcgagatgcactctgtgatttcgctacaccctcactccgcttcgccaccctatccgggacaacagcacctacaacgatgcctccatgcgcacccagaacgccgccgttcaggcccgcaccaaagtggagaaccgttccaacgtccttcagctcatactgattggacagagtcacccaaccggtctatcagcgaacctgttgaagctcttcgagcctagg

SEQ ID NO: 11491 - DNA, 482 bp, Glycine max
acgactctcacgcgtcacaaggaggagacaacacaaagtgcaaaaaaaacagaaattaaacactactagtagctagctagggtgagaaaatgggtgaagctaaggaaatatggtctgcaccaataacccctagaacagcttcagtagtaggaacacctgttgtggcatctccacctgtgtcatgtccaccctctcagcttcactcaccatctctaacaaggtcacctctacttcaccctgaggatggagatgcaccacgtcgtaaaacatctaagactccaaagactccaagaacccctagaacccctagaaccccacttagaatctctaatttgactccaaagttcatcacccctttgggaagccctatgagaaaagctctgaggttcaccaagcttgatcctcaggatgcttggcttccaatcactgagtcaaggaatggtaacaagtactatgctgcttttcacaccctttgttctggt

SEQ ID NO: 11492 - DNA, 731 bp, Glycine max
cccaagcgtccgctggaggtcaaattgacaaacatcatcatacaacaacttgatgatgcagccggtgatgtttccggacttgctgtcaaatgtcctgctccgttagtgaggaaggtgagtgaggtaagggttgtggaaatgaccagtaaactatgtgacaaattgctaaatgggaaggatcagcatcgcgacattgctagcatagctttgaagacagttgttgcagaagtttctactcagtctcttgcacaatctattctccagactctcacgccgcaattgataagagggattactggtcctggaatgggttccgagattaaatgtgaatctctggatattttatgtgatgtccttcataaatttgggaatctaatggcagcggatcatgaactattattaagttccttgctttctcagttgagttctaatcaagctagcgtgcgcaagaagactgtggcatgcattgcatctctctcttcaagcctgtcacatgatatgttggcaaatgcaactgttgaagttgttactaacttcaaaaataaagttgccacgtccgaaatgatccgtacaaatatacagatgatcggcgctttgagtcgagctgttggctaccgatttgggccccatcttggagacactgttccagtgctaattaattattgtactaacgcctcagaaaatgatgaagagcttcctgagtacagcatgcaggcactggaaagctttct

SEQ ID NO: 11493 - DNA, 1063 bp, Glycine max
ccaaagaaggactttgatgcagagagagaaaaagaattagaagattataaaaaatctcgtccacctgtgggttcaaatcaccagaatagctcaaatgtagaagaagactaccctaaaggcttaattattgccttcaaattaaagagcatttcagaagaaattccgtctgaacaaaatggtgttgatcaacaagccaaggacaatagtgttgtctccaaaacagatgaaaacccccgctctgaaattacttctggggaaaatgatcaaaaggtaacagaaaatgttggtgttgatgaagaaaaaaatgagatgaaagaagcaaaggaaactgtaaatgaagaggacaatgagatgaaagaagcagaagaaactgaaagtgaagacaacactgacatgaaagaagcaaagggaactgaaagtgaagacaacaatgggatgaaagaaggaaaggtaaccaaagatgaagaaaagaaacaacaagctggtgaaaaattttctgccgctgcttacaaggacaacatggatgttgtctcacgtgaggatttcaagagtgtctttgagaaatttggtaccgtgaagtacattgatttcgacattggagcacagtcagggtacatccgctttgaagaaactgaagctgctcagaaagctcgtgctgctgcagttatttcagaaaaggatggcttggttgtaaagaattatattgctattctagatccagtgactggtgaggccgaaaaagaatactggagcctgcttcgtggtaatcaaggcaaacaccgagaattcaagaataagcaaggaaggggaggatggcatgggagagggggcaaacatgcacgctctagagataatgggtctagagatcgccgaaataaggctcagaaagttggtggtgcataatgttgggttggttagatacagcagttttgagatcaacttgcctgatgtattctccgctaatatatactcaagttttgattttatggttcggctgtaacatggcacattatcattacttgcaatatttctttataatttatcgcttccatatatttctctc

SEQ ID NO: 11494 - DNA, 434 bp, Glycine max
cagatgaaattccttcagaacaaaatggtgttgaccaacaagccaaggacaatagtgttgtctccaaaacagatgaaaacccccactctgaaattacttcaggagaaaatgaccaaatggtaacagaaaatgttggcgatgatgaagaaaactctgagacgaaagaagcaaaggaaactgaaagtgaagaaaacaatgggatgaaagaaggaaaggtaaccgaaggtgaagacaagaaacgacaagctggtggaaaattttctgccgctgcttacaaggacaacatggatgttgtctcacgtgaggatttgaagagtgtctttgagaaatttggtacagtgaagtacattgatttcaagattggagcagagtcaggatacattcgctttgaagaaactgaagctgctcagaaagcacgtgctgctgcagttatt

SEQ ID NO: 11495 - DNA, 1482 bp, Glycine max
acgagctgtctagaacaaccctcttcatacatgcaaccacttctatatagtttctctcacttagtgcaaagaaaaacacaccacacgacaaacaaatattattattcaatagaaaagaaagaagatgagtccaacatgggtttttgtgttaggtgtttgcagcaatgttggtggttgtgagtggacaatcatcagtgaagcctttggtgaagacagtgaaggggaagaaggtgtgtgacaaagggtgggagtgcaaaggttggtctgcatattgctgcaatgagactatctccgactacttccagacataccagtttgagaacctcttcgcgaagcgcaattcgccggtggcacatgctgttggtttctgggactaccgttctttcatcaccgctgctgcactgtaccagcctcacggctttggcaccactgggggaaagaccagtggccagaaggaacttgctgctttctttggccatgttggcagcaagacctcttgtggttatggggtggctacagggggacccttagcctggggcttatgctacagcaaggaattgagtcctgataaattctactgcgatgactactataaattaacctacccttgcactcctggcgcagcatactatggccgtggtgccatcccactttactggaactacaactatggaaaagccggggaagccttgaaggtggatctgttgaaccatccagaatacatagaacaaaacgccactctagccttccaggctgcactctggcagtggatgaccccaccagagaagcacctaccatcaccccatgatgtctttgttggcaactggaaacccacaaaaaatgacacattgtccaaaagggtgcccggatttggtgccacaataaacttgctctatggggatcaaacttgtggtcagggatcagataatgaggccatgaacaacatcatttcacactatctttattatcttgatctcttgggtgttggcagagaagaggcagggcctaatgaagttctctcctgtgctgaacaagctgcttttaagccctctggctcaccatcttctgccacaaattgagcattccttggctgagattcttggccggtccattcttgaatctttcaaaaaattcttaataaagaaagcaacaagtagacaagatatttcaactactttggccttcaaatgagagtgaaatgagtttggagtggacactcattgttaatttgtgtatagattatattactttgccatatattttggcttttgatgttttctttctcttgtataattcgaatatattttggtatataatgtatgtatacaattgagtatttgatcattaaggattgcctgaacaattttgttgatgtttgcatgttgtgcatttcacttatcaaatgatacaatgtttcatttggataaaaaaaaacttaaaaaaagctggcttccacacatgggaaaaattaattatcaagga

SEQ ID NO: 11496 - DNA, 1010 bp, Glycine max
ccacaataatttcaactgcaaatatgattaatagctgacccattttctctgtttttatatatagtctgcgttttcttccggttccctctcatccctctctctctctcttccattttctctctctagataggtaaaaatggctactccgccggtggtaaggtttccgatcttcacggcggtgagggcggtcggcgttgccgttactgttcttctgctgacgtgggccgtccatttcagaggaggcctcgctctcgtctctgataacaaagatctcatctttaatgtccatccagtgttgatggtgattgggcttgttctaatcaatggtgaagggatgcttgcatacaagactctatctggaactaaaaacttcaaaaaatcagttcatcttgcgttacagtttgccgctctcattttgagcttgattggtgtctgggctgcttggaagtttcacattgacaagggcattgacaatttctacagcctgcattcatggctaggccttgcatgccttttcctattcaccatccagtggggtgctggctttgcaacattttggtacccaggagggtcaagaaatagtagagctgccttattgccatggcatgtgttctttggtatctatatctattgcttggctatagccacaactgctactggtattctagaaaaagctacattccttcaggtcaacaacatcatatcacgctattccaatgaggcacttctggtcaattccttaggcattctgatagtcattttaggtggctttgtgattcttggaattgttactccagtttatggtaaagctgatgtcataaggggaaacgagtgaccatcatctatatgattcaaaattgaggaacattaacatttgtatcatctttaatacaaggttacatggatgtatgaaaacaaattcattaaacgtgtatccaggtttaattttatgttctattttatttactatgtgtattttccttctattagtgaatataaatgttttgtgc

SEQ ID NO: 11497 - DNA, 379 bp, Glycine max
cggctcgagcaacaacactctccaaactcacctcaaaaaaatttcaacttctcaccatggctgatggtagtagtagcaacaccaagagaaattccctcatcctccatcaccccacaaacttaaagggtggttggaatgctgccatcttcatcatatttgtggaatttgctgagagatttgcttatcaagggttggcaagtaatctcatccaatatctcactaatgttttgaatgaaccaatcacacaagcagccaaagatgtgaacacatgggttggtgcctcctctctcttccctttgcttggtggcttcatagctgattcctatctgggtcgcttcaacaccatactcttgtcctcagtcatttattttgcgggcat

SEQ ID NO: 11498 - DNA, 493 bp, Glycine max
ctttgttagttggtggagatagtatggagagtcagtttgaagaattagctcagagtcctgacatcataattgccactcctggtaggctcatgcaccatttgtctgaggttgatgacatgtcattgcgcatcccgagtatgttgttttcgacgaggctgattgtttatttggcatgggtttcgccgagcagttgcatcagattcttgctcagctcggggagaaccgtcagaccttgcttttcagtgccacactgcccagtgctcttgctgaatttgccaaggctggcttgagagaccctcagcttctccgcctcgacttggaaactcgaattagccctgacttgaagcttgccttcttcactttgaggcaggaagagaagtactccgcgttgctgtatttgattagggagcacattggttctgatcagcagacattgatttttgggtccaccaaacctcatgtggaagttctcaaccttttggttcctgaaaaa

SEQ ID NO: 11499 - DNA, 1135 bp, Glycine max
ggattggctgttgtggattaaagagtaatcttctcttgagcggacgcgtgggcggacgcgtgggcagggaactactcaattgcagtggtgcaagctaattcatccttggaagaccaagcacaagtatttacctctccctccgcaacctttgttggtgtatacgacggtcacggtggtcctgaagcttcccgtttcatcaccaaccacctcttctccttccttcgcaaggagggtggtttgtcggaggaagttataaagaaggcgttcgaggcaacggaagatgagtttttgcgtgtagtgagggaatcatggattgcgcggccacagatagcttccgtgggttcgtgttgtcttctgggagcgatttcaaagggagttctttatgtggctaatctcggggattcgagggcggttttgggtaggaaagcgttggaaggagaggtgaattgtggtgctgtggtggcagagcgtttgtccactgatcataatgttggggtggaggaggttagaaaggaggttgaagctcttcaccctgatgatgcacacattgtggtttgcattggtggagtttggcgaatcaagggcattattcagagacctgtaatgacagctgaaccatcgatattgaagcggaaattgaaggcagatgatctgttcttgatctgtgcaacagatggactttgggagcatttaactgatgaagtggctgttgaaatcatctccagaagtcccagaataggaatagcaaaacgattggcgagagctgcactagaagaggttgcaaagaaaagagaaatgaggtatggggatctaaggaaaacagataaaggtctaaggcgccattttcatgatgatattacagtgatcgttctatatctcgatcattcaaaagaatcacaaaatggtagatcaacacgtaaaggagtttatgattgcattaatactcctattgatatcttctctgtgagctcagatgaagctgatctttaaattgaattagctattagcagtgactctccacgtactgctttttacacaagaaatttgtcacatacagaagtagtagttacggtggccaaaggaaaaggattgtaaaaggagtaataccccttatcttaatcatcatatttttttc

SEQ ID NO: 11500 - DNA, 501 bp, Glycine max
tttcgactttgtataccacacgaacaacacagtagagagacagagcattaaggatgttggagctgtgccgcaagccactgaagatgtgcttcggtggtggaggcaacgatgatgacctcctctggcacacggaccttaagccccacgcttcagggaactactcaattgcagtggtacaagctaattcatccttggaagaccaagctcaagttttcacctctccctccgcaacctttgttggcgtatacgacggacacggtggtcctgaagcttcccgtttcatcaccaaccacctcttctccttccttcgcaaattcactacagaggagggtggtttgtcggaggaagttataaagaaggcgttcgaggcaacggaagatgagtttttgcgtgtagtgagggaatcatggattgcgcggccacagatagcttccgtgggttcgtgttgtcttctgggagcgatttcaaagggagttctttatgttgctaatctcggggatt

SEQ ID NO: 11501 - DNA, 588 bp, Glycine max
  unsure (1)..(588): unsure at all n locations
cttgggcgcttaggataaccggaagggtgttggaagatggtaatggaaaggattctgtggcggaaggaatttcgacgaaggaatatccaaaattctcggctttctttaagaagattaccatatacttggatcagggtttgtaccaggataaccatgttgttgtgtgggatagtgctcattcggcggctgcgcagcagcgtgatggttttgaggtgaagaggaaaggagataaggaattcactgcggtggttaggatggcgatgaattattcgcctgacaagtttgtggtttcaccgcaactggctagagttttaggggttgagtttgactcgcgctgcaggatcatagctgctctttggcactatgtgaaggctaagaagctgcagagtcccaatgacccttcgttcttcatgtgtgatgcttctctccagagggtgtttggggaaggagaagatgaaattctctgtggcttcgcagaagatatcgcagcatttgtcacacccgcggcctatacacctggagcataaaataaagctttctgggaaatggtccaaccggaagtacttgctatgatgtgcangttgatgt

SEQ ID NO: 11502 - DNA, 1497 bp, Glycine max
tgtcgagcgaatcggctcgagccacaccaccccttcttccttttcatcaggtttattccttttcttttggttcaattttgctgaatggagagtgcaagaatcagcaaatggttaaatcttctagtttgtgtactgctattgcttaaggcagaaggatctcttgttccattgactttggtgaagaatgcagaatcaaaaggagctgtttgtttggatggaagccccccagcataccactttgacaacggatttgaagaagggattaagaactggattgttcacattgagggaggaggatggtgcaacaatgtagagagttgcctttaccgtaaggatagtcgcttaggttcatctaagcaaatggaggatctttacttttctgcaattttaagcaacgaacaagagtataatccagatttctacaattggaatagagtcaaggttaggtactgtgatgggtcatcgtttactggtgatgtggaagaagttgatcaaacaaccaatttgcacttcagaggagcaaggattttttcagctgtaatggaagaattactagcaaaaggattggaaaaggctgaaaatgctattctctctggctgttcagctggaggactgactacaatattacactgtgatcgctttaaaaatctgttgccttctgaagctaatgtgaaatgtgttccagatgctggttattttgtcaatgtagaggatatctcaggaacacatttcatcgaaaagttctacagtgaagttgtttcaactcatggctcagcaaagaatttgccctcatcctgcacttcaaaattcagcccagaactatgctttttcccacaatatgtggcatcacatatcagtactccaatcttcgttgtaaatgcagcctatgactcatggcagattcagaacatctttgtacctggctctgctgatcccagtgacagttggcatagctgcaagcttgatataagcaactgctcacctgatcaactaagtaaaatgcaagacttcaagtcggaattcgaaaaggctgtgagtgtggtaggcgactcttcatctaaaggaatgttcatagactcttgctatgctcactgccaaacagaatcacaggagacatggtataagagtgactctccacagcttgccaatacgactattgccaaggcagtgggagactggttttatggtcgaagttctttccgtcacgtggattgcaattatccttgcaacccttcttgccagaaccgtgtttttgatctaaaagaccaccctggaatatagacttgtttgatcaaatatatatcattcctataaaccagacttattggttaactggttattgaatatgaaaataaggtttataagttacaaagctagcaaaataagaaaaggcaaccattacactgagcttgtgttctgggagccctcaatcaatgttgtaattgcagtagtcattgtaaagtggtatattatgtgcttttactaaaaaaaaaaaaa

SEQ ID NO: 11503 - DNA, 289 bp, Glycine max
gttcctctctatttaaggttctccacagtagttaacgtagctcttgtttttctatttggtcggccacagtaaggcaccctgtgttctttgttttctacgcacaggcttatcatttgcttttggttggactttgctgaatggagagtgcaagaatcagccaatggttaaatcttcttgtttgtgtactgctattgctcaaggcagaaggatctttagttccattgattttggtcgagaatgcagaatcaaaaggagctgtttgtttggatggtagtcccccagcttacca

SEQ ID NO: 11504 - DNA, 777 bp, Glycine max
cccacgcgtccggacacagacacggtgcattccagatatgcatggagtctctctctctgtatgaacacgcaaaagaccattgattgtccgagagaacgcaagcactgacatcagtactccatatatttgctactctgcatgaacataacattcatacttaagttttgctggttgtgtgtgtgttttttgttcttggtcgagccttgtactgattaacgagaatggacaaggaagtggagcttggttcccttgaaggtgaaatggccacccagcacatttcacaaccacagaagcgcaagggtggtcttgttaccatgcctttcatcattgcaaatgaggcacttgcgagggtggcaagtttgggccttttgcccaacatgatactgtatttgatggggacctacaggcttcaccttgcccaagcaacccagatacttctctggtcccatgctaccagcaatttcacacctgtggtgggtgctttcattgctgattcttatctgggtcgattcctcgctgttgggttgggttcggccatcacttttctgggaatgacactgctgtggttaacagctatgatcccacaggcacggcctcccacttgcagtagcaataaagctggaggctgtaaatcggcaacaggagggcaaatggcaatcttaatctctgcccttgctctcatgtctgttggaaatggtggtctttcatgctccttagcatttggtgcagaccaggtgaacagaaaagataaccccaacaacagaagggtcttggaaa

SEQ ID NO: 11505 - DNA, 515 bp, Glycine max
cctcgagccgaatcggctcgaggagcaagttaagttagtataagaccatctcctcaagcgcgttgctccctcctttctctctcactctcaccatggaggcgcaaccgccaaccccctcgactgccccgccgcctctgccgcaacacctcagctaccccgactccgtggaatcctcgcctcgctcccgcaacaccgactcctgggacgagcccttcgcgccggcgtccaccaagctccgtctcatgtgcagctacggcgggcacatcgtcccccgcccccacgacaagtccctctgctacgtgggtggcgacacgcgcatcatcgtgtccgaacgcgccacctcactcgcggacctctccacgcgcctctcgaaaacattcctgaatggaagacccttcacgctcaagtaccagctccccaacgaggacctcgattccctcatctccgtcaccaccgacgaggacctcgagaacctgatcgacgagtatgaaccgaacgccggcggcggcaacttc

SEQ ID NO: 11506 - DNA, 821 bp, Glycine max
ctgagtttgccctgtatgaaagctaaaatcatgtagttctgtttatgactgcagttgcttcactttcttccctggttcacaagcctagtttaaaggtacttccagataagggcctagaagttggattgtctgggtctgctgccaaagggaagcctcctacaacgttgtcaccctcaatgttgattgttgattggagatgtgaggtggcccgtaataccccatatgaagttaatatcacaatccctgttgagggttatgagccaattgaatttgtgcttacaaaaacatgtgactataaacaggatccagggggaggtcgcacaagaggatgggcaatatttggagtgctatcttgcatattttgtgtctcttcaccacgcctttgtggtggagggttcatttacaagacataagtggtacgccagcgtggaattgatgcattgcctggcatgacaattctttctgcgtgcttagagacagttagtggagctgggcaaggctactcacggccagaagacatcaatagtgcatttggcagtgaaacctcttgggaacgtcctcctggtccttctcaaggtgcaggtgctgcatggagaccaacggaaagaaaatatggtgccatttgaatgtgtgccgctactcattttgctttgttttctgacagtccgacaccatgttatatctaatttttgggaatttcttctgccaaaatatgttatttggatcaactcatttagggtggttttgaagcctcagtccgatgtatttatttgtaatcccaaattcacatctagaagtaaataaagggtagttatagcatg

SEQ ID NO: 11507 - DNA, 643 bp, Glycine max
ctggctctgtgttttcccatcagtacacatttttgtactaagaagcatttgttacatttatgtaaccaaaggaaaatcaaaagtacgcaggaggtgaagctcggtggcgaaatcaacatgcaacgcagtgaaagcatgcgactaaaggagaagaaggtgaaggatttgatggttgacaagaagaggctagtggaggtgccgtacatggcgtccctggcccacacaatgactacactggtggcgaacaaggttgtggcggtgccggtggctgcgccgccggggaaatggatcggagccggagggtccatgatcgttgagtctgataagcaaaccggaaccgtacggaagcactacatagggatggtgactatgcttgacattgtggtccacattgctggtgataaccacttgagtggtgacgatgatgatatcaccaaagaccttgatcaaaggatgtctggccctgtctcctccatcattggccactcctttgaaggccttagcttgtggactctcaatcctaataccagcctgttggtttgtagtgttttgtcttttatattacttttcattgagagaatcaaacatgggaaatttattggtatgtgtgaaaataccagggattctttacatgacacaaata

SEQ ID NO: 11508 - DNA, 1060 bp, Glycine max
  unsure (1)..(1060): unsure at all n locations
ctaaggctgtgtttggtggacctttcccttttctcttttgaaacagagaatggctggtggaggagtagagattggaggaccaggaaaaagggctcatctttacgagcacaagttcagttggtatttcgtctatacatgcttcgttggggcccttggcggttctctctttggctatgatctcggtgtttcaggtggggtgacttcaatggatgatttcctgaaggaattcttcccaaaggtttacagaaggaagcagatgcatctgcatgaaacagactattgtaaatatgacgaccaagtgctgacactgtttacatcatctctttatttctcagcacttgtcatgacattctttgcttccttcttgacaagaaagaagggaagaaaggccagtatcattgtgggagcccttagcttcctggctggggctatcctcaatgccgcagccaagaacattgcaatgctaattattggcagagtccttcttggtggaggcattggatttggcaaccatgctgttccattgtatctttcggaaatggctccagctaagaaccgaggagcagtgaaccaactgtttcagttcacaacttgtgctggaatcttaattgcaaacctagtgaattactttactgaaaaaatccatccctatggatggaggatatctctgggtttggcaggtcttccagcatttgcaatgcttgttggaggtatttgttgtgctgagacaccaaacagccttgtggagcaaggaaggttggataaagcaaaacaagtattgcagagaattagaggtaccgagaacgttgaagccgaatttgaggatcttaaagaagccagtgaagaagcacaagctgttaagagcccgtttaggacactcctcaagaggaagtacaggccacaactgatcataggtgcattggggattccagcgttccagcagctaactggcaataactccatcctcttctatgcccctgtcatttttcagagcttgggctttggtgccaatgcttcactgttntcatcttttattaccaatggngctcttctgttgcca

SEQ ID NO: 11509 - DNA, 670 bp, Glycine max
accaggccttggagaagattgtgtgctttaccagcattttgggtagggttattgtacgatgaagtttctctacaaagtgttttggatatgacagctgattggactccagaagaaagacaaatgctaaggaataaggttcctgtaactggtttgaagacaccattccgagacggtttgctgaagcatgttgctgaagatgttctaaagttggcaaaggatggcttggaaagaagaggcttcaaggaatcaggatttttgaatgaggttgccgaggtggttagaacaggtgtcactccagctgagaggcttttggaattgtatcatggaaagtgggagcaatccgtagatcatgtgtttgaggaattgctttattaaggtagtattgtctttcaaatgtctgtggaagattaattgtgtaatcctttggttatagttctggttatctctcatttgagcttcatttagatataggaaataatataaatgtaatttttgccttgaggcttctcatatacctttcttggaaaacatgatctgatcaagctgacattcaatgtcacaaatttgaaaatccatcaatataatcattttaataagagtgtcaatagattaaatgtttgtggtaggccctaggcgcaaatgttgcttgaataaacacaaatttttcttt

SEQ ID NO: 11510 - DNA, 1772 bp, Glycine max
aacatgttaagtatagtaatgttaatgtcttgtctctaacacacactcatgtgaccctctcgaagcatgtcctttctcgtggttatcaagttgaggacgaggttgatgcagcagactgttacaattacaaagacatggattatgacaaatgggggctcaaaaaaattcctcgagagttgggacttgtctgatgtgttattcatcgttggtaaagaggaaaaacccgttcccgctcacaaggcaattttagctgcatctggaaagttttctctgtgctcctcctcctttgtcatcaacctacccactgtatcttatctacttttccgtgcactgcttcactacatctatgttggctggacccagattccccaggaacaactcggttctttgagggatttaagtctacagtttgaagtgacaccactggtgaagcagtgtgaagagactatggaacggtttaagctagataagaagttgtttgacacgggcaagaatgtggagttaacatatccatctatccgacctcattgttcaactttgccctcacttcctgtcagcactcagcaactgaaacaattgaacttaacaggccagtacagtgatgtaaacatctacattgagggttatgggctcattgcacgagctcataaaattgttcttagctcctggagtatcccctctgctcggatgttcacaaatggaatgagtgaaagcatgtcctcggaggttactttaagggatgtcccaccggaagctttcaaggctatgcttaactttttatatgatgggcaattgaatgacaaagttatagattctggtgctttgttgctccaactccttctattagctgatcaatttggagtgacttttcttcaacaagaatgctgcaaaatgcttttagaatgtctctcagaggactcagtatgtccactcctccaagtggtttcttcaatgccatcatgtagacttattaaagaatcattgcagaggagaatttccatgaactttgactattatatcagtgcgagtactgactttgtgttattagatgagacaactttaatcaatatcattaagcatccagatctgacagtaacgtctgaagagaaagtccttaatgcaattctaatgtttggcatgaatgcaaaacagttgtttgggtgggaagtggtggatcagttaatggaaaattcaaaaccagaactcctttttggtgagaggcttcagttaatctatgacttgttgccatttgtgcgatttccactactacaatattccttacttgagaagttgcagcatagcagcattggccggcatattcctgttttccaaaatcttgttaacgaggctatcaattttgttaaatgtgggctggcggagtcagaaaatgaagagaatgttagattccaacatagacggtccagttacagggaactccagtacatctgtgatggggatgaccatggagttctgtactttgctggaacatcctatggtgaacacccgtgggttaatcctcttttggcagagccaaggaaaattaccatcacagctagcagcccccactcaagatacactgatcccaaggttttggtctcaagaacctaccagggaacatgttttgctgggcctcgattggaaaatggacagaactgtagctggtggatggtggatcttcgccaagatcatcagcttatgtgcaactactataccctgaggcaggacggttctaaggccttcccgagatgttggaaatgtcagggctcacttga

SEQ ID NO: 11511 - DNA, 892 bp, Glycine max
cccacgcgtccgaaaagagaaggctaaatcagagacaagggattggttaaacaatgtggttggagagttagaatcccaaattgataactttgaagcggagcttgaagggctttccgttaagaaaggaaagagcaggccacccagattgacacatttagagacatcaattactcggcacaaggctcatataaaaaaatgtgaattcattttgaggctactagataatgatgaattaagtcctgaggaggttaatgatgtcaaagatttcttagatgactatgttgagcgtaatcaggatgattttgatgaatttgatgatgttgacgaactatacagttcattacctttagataaggtggagactctagaagatcttgttacaattccccctggtctttctaaggtggcacctagtcttagcttgaagaatactttgacagtatcagcatcacaatcagcatctgcatcgcaaacatctgatacttctgtccaggagcaagctgatgacacaacgtcccaggatagcaattctgacattgttgccaaaactccaccttgtaaaagtgggggaattagttctgctacctcaactcctgttgaccatgctactcctgtttctgtgaatgtttctggtcataacttgtctagtgcacctgttgcagtcctacctggttcaaattctgtgcggaatgtcttagagaatactaatgttatcaattcattatctgtaaatcagtctacctctacaaatgaagaagagattaatagcttccctagccggagaccatctccatcgctttctgatgcaacacttttgaagggcagaagcagcctgtcaaatcaagcaacagccagcattcctcttggttctggaaacatggtttctagcaat

SEQ ID NO: 11512 - DNA, 1139 bp, Glycine max
ttcggctcgagctcaaacaagaagaggatcaggatctggacgaaggtgcatggaatattgcaatggcaggtggtacatgccttggtttagttgcccgtactgttggagatgatattgtgccgctggtaatgcccttcattgaggagaatatcacaaaaccagattggaggcaaagggaggcagcctcttatgcttttggatctatcttggaggggccttcacctgacaaattagctcctcttgttaaccatgccttaccatttatgcttagtgctttagtgaaggacccaaacaaccatgtgaaagacaccactgcttggactttgggacgaatgttcgaatttcttcacagttcaattgttggtacaccaatcattaatgagggaaattgccaacagattattacagttctccttcaaagcatgaaggatgttcccaatgttgctgagaaggcctgtggtgctctgtattttcttgcccagggttatgaggatgttggaccaacatctccgctaactcccttgtttcaggaaattgttcaatcccttctaactgttacccacagagaggatgctacagaatctcgattgagaactgcggcatatgaaacattgaatgaagtagtaaggtgttcaacagatgaaacagctactttggtggtacaactagtttctgtcatcatgatggagctgcacaaatgtcttgaagcacaaaatctttcatcggatgagagagaaaagcggagtgaattgataggccttctttgtgggtgcatgcaagtaattattcagaaactagggtctttggattctaccaaatatgtgttggtgcagtattctgatcagataatgagactattcttcagggtctttgcttgtagaaatgccactgcacacgaggaggcaatgctagccattggagcccttgcctactcaataggccaggagtttgccaagtacatgccagaattttacaagtttctcgagatggaccttcagaactttgaggagtaccaagtttgtgctgtcactgttggtgtcgtaggggacatatgcagggcattggaggtaaaaatactgccctattgtgatgggattatgacacaactcctcaagaatttgtcaagtgataatttgcac

SEQ ID NO: 11513 - DNA, 431 bp, Glycine max
atgcaaactgtttttctctcttagcttaaaagttctctcttgctatccctcctccattaaccccattaataataagcaccatcaatttccttaattgcttcatatataggagaatacaatgaccaagatctttgtgctgttatgtctgctcttcttagcttcttctgggtttgtccatggctcttctaagaaggatcatattaggttatttgagctcaagagaggtgatttttctataaaggtcaccaattggggtgcaacacttgtgtccgtaatacttcccgataagaaggggaagttgggtgatattgttcttggatgaggattctcccagggcatacacaggtgatacatcatactttggagctactgtgggccgggttgctaacagaattggaggagctcagttcactctaaatggaatccattac

SEQ ID NO: 11514 - DNA, 1654 bp, Glycine max
tctcacgcgtccgcggacgcgtgggcttggaccttcaggctggaagcgtgggggtcttggttggcggttatgcccaagaacatcagatcagcaatggcaacctcttctttcttcttcaccttgctattactgcttctcactgtttcagatttgtttgtgcaaagccgtggccttaattttggaatcaactacgggcaaatagccaacaaccttccatctccatctcgtgtggctgttctaataaaatctctgaatgtatccagaatcaaactctatgatgctgatccaaatgttctatctgcattctccaattcagatgtggaattcatcataggactagggaacgagtatctgcagagcatgagagacccttctaaggctcagagctgggttcaacagcatgttcagccttacatttcacaaaccagaatcacttgcatcactgtaggaaatgaggtattcaactacaatgatacacagctcacagcaaatcttctcccagcaatgcaaagtgtgtataatgcccttgttaatctaggactagcacaacaagttactgttacgactgctcattctttcaacattttagccaattcttttcctccttcatctggggcattcaggcaagatctgatacaatacattcaacccctccttagctttcatgctcaaatcaaatcacccttcctcattaatgcatatcccttttttgcatacaaggacaatccaaaccaaatctccttgaactatgtgctatttcagccaaatcaaggggccactgatccaaacaccaatttacattatgataacatgttgtatgctcagattgatgctgtctacgccgccatcaaagcgctgggacataccgatgttgaagtcaggatttcagaaactggttggccttctaagggtgaccctgatgaggttggagccacaccccagaatgcagaaatatataatagtaatttattgaagaggatagagcagaagcaaggcactcctgctaatccatctgttccaattgatatttttgtctttgcacttttcaatgagaatttgaagcctggtcctgtttctgagagaaactatggcctttattatcctgatggtaccccagtttataacattggattagaaggttatctcccagaaatggttatagagtccaaatctaacgctttgtccaccaattttctcatctacatatttacatgtttgttgttcatttgggagctttcaagaccgtgacaaaacaaataactttctacaaatcattcttttgcaagagttggtgaagggagacaaaggcaaggcaaattctacactttttgtacacagccatgggagcagttgttcaaggactagttcgtattcttaaatctagtttttagctaaatccattcatataattttttatttcacagtttagaaataatcgtaatatggagtacagtgattttttttgacagaaagttgatatagaaaaaaaaacgttttcttttttagacagaaagaaaggagaattatatattatgctgtacatgtagaagaaagtgttcagttatgactctcgtttgtgcgtagtctcagttggcaatttttttgtgaaaaacttcattgagttaaactaatgatgctgatttaatttgttttt

SEQ ID NO: 11515 - DNA, 462 bp, Glycine max
cgcactccactccgatgaagcccacgcacaatcagatagaaaaaagataatcaaaattttacttccaaacccaaccaaatcaaagaaatgaaggataaggagacattccctattgcgaaaaaggaagcctctgattcaggtttattcggaagaggaagctacaaattctgggcactagctgccatgctgctcttggcattctggtccatgttcaccggcacagtctctctccgctggtccggcaccctcaacactttctcccacgcgtcccttcacgaccacctcgacgtcctcgaaatcgaggagcgggagaagctggtgaggcacatgtgggacgtgtacacgaataaccgtaggatcaggttgccgcggttctgggaaaaggccttcgaggctgcctacgaggatttgaccagcgacgccgccgatgttagagacgttgccgtcgccgagatcgttaac

SEQ ID NO: 11516 - DNA, 815 bp, Glycine max
aaatctccattccggctcgaccaaaaaaagcttcatcatcatcttcttcttctctgcatcatcacaatggctgaagtacgttcacaacaacaacaaccccagcatgtgcaagtccacgcaaccacaacacacaccccacaacaccatggcggggaaggtggcagcggcattctgaacctcatcccggagatgtccctcacgggttcccaactcctagctctcctcgccggcgttccccttggtgcaatgctgctcctcctctccggcatctcgctcatcgccagcctcttggggctggcggtggcgacgccgctcttcatcttcttcagcccgctgctggtccccgccgccttcgccataggaatggcggtgaccgcggtgctggcggcgggggcgtgcgggctggcggggctcgtgttgttctcgtgggtggtgaactatctccggcagatgccacgggggacgacgatgatgacggtgctgccggagcaagcgaacggcacgtggcggacatggcggagtacgtggggcagaagacgaaggaggttgggcaagacattcagacaagggcacatcatgcccagggaacaacaaggatgacagtgcattgagttatcatgagacaagaaaatggtttcaatttatatcgcttatgtatgacttgtgagatatactagtatgtaattaacctttggtacgtgtgttttggactttggaggagttccattttcagtgttccatgttgtgtcactttctgtatttgctcatgtacgtgtaatcagtaatattaatgcatttttcttttgggttcaaaa

SEQ ID NO: 11517 - DNA, 411 bp, Glycine max
aaaattcttccaccaagttatgggcctccttgtgttgcatcttttctccggcttaggtatgttcactacaacaacaaccccagcatgtgcaagtccacgcaaccacaacacgcacaccacaacaccatggcggggaaggtggcagcggcattctgaacctcatcccggagatgtccctcacgggttcccaactcctagctctcctcgccggcgttccccttggtgcaatgctgctcctcctatcacggatcgatgtcatcgacagcctcttgaagatgtcggagtgcacgtcactgttcatatactgtagcccggtgctggtgcacgccgacttatccataagaatgacggagaccgacgtggcttccggcgtagcatgcagactgtcagaactcgagtggttctcatggg

SEQ ID NO: 11518 - DNA, 1198 bp, Glycine max
  unsure (1)..(1198): unsure at all n locations
ttttgattcatccctcattcataatcttcccataactcatgggattaaatgcaatgatctgtatgcatttatcattggaagctatgtgatctggactgctgttgctggagttagatactcaattgagcaaataagaaaaaggagatcttcggttttgtttggccaattatggaagtggtgtggcattcttgtgaagagttctgcacttctgtctatatggatatttgttatcccagtgcttattgggcttctctttgagcttttggtcattgtgccaatgagagttccagtggatgaaagtccagtattcctcctttatcaagactgggcattaggccttatatttctcaagatatggactagattggttatgttggaccacatgatgccgctggtggatgaaagttggcgagtcaaatttgagcgagtgagagaggatggtttctccaggctgcaaggtctttgggtccttcgggaaattgtacttccgatcataatgaagctgttgacagcattgtgtgtaccctacgttttggccaaaggtgtatttccagtgcttgggtatcccttggtaataaattctgccgtctatcggtttgcatggttgggatgcctctctttcagttttgtgtgcttctgtgccaagagattccatgtctggttcacaaatctccataattcaatacgcgatgaccggtatctgattggccggaggttgcataactttggagaacatgctgagaaagcaaatgtagcagaaacttctacaggggagcaggaagctattttactaggtacaggtttaaaccaacaagatcacgaagcagatgttggactacggttgaggcacgtaaatcaacaggtgggctgaattgtattttcaggtaggaaggccactttgtaggttgtgatgcctcgtgctgacatggttcatgaatcactgatgtatactctacacttgtgttgggttagttataatacctcgtcatgacacacctgtgcttatagttaacgttaaacattttgtgcgtgtcgtttaaaatttagctaataggaggaaaataaaattgttgatagcgcatttttttttcaaagaaattctttgtgaaatagggaagctggtcttgatcgtctgtctgagatatacttaaataacatagttatagtagttaattgttatggtaattatttattnatc

SEQ ID NO: 11519 - DNA, 524 bp, Glycine max
cccacgcgtccgaagagaactccaagaagaggcaggcactttacgtaatgaatcctaataagttcagagcgtgtgagtttctcataaatttccatgaagggacacgtggtgataaaattatagtctttgctgataatctgtttgctctcactgagtatgccatgaaactccgcaaaccaatgatatatggtgctacaagccatgttgagagaacaaaaattttgcaagcattcaaaactagcaaagatataaatactatatttctttccaaggtgggcgacaactcaattgatattcctgaagcaaacgtaataattcagatctcttcacatgctggttcaaggcgacaagaagcccagcgtctgggtcgtattcttagggccaagggaaagcttgaggataggatggcagggggcaaggacgagtataatgcatttttttattcccttgtttcaattgatacccaggagatgtattactccactaagaggcagcaatttttaattgatcagggttacagcttt

SEQ ID NO: 11520 - DNA, 551 bp, Glycine max
cttgacataacataacacctttctatcccttgttgttccattccattccttcattgctatgcccacataacaacaccaaaaaaaatggcacttgtgagccacgtttgtgtgagatgtgtagccacacccacttccccagagtccccaaattcggcacccttgccagacccaaggcaaaccaaggttctccttccgaagaagaagcctcagaaatggtccaccggggtggctcccggggagtacggtggccctcccaccaccaccaaactccgcaaatactggggcggcgatgacgaagaccctttggcctctgatgactatatgtggaacaaggagtttatgggtcgcttccaaaagttgattgaggaacccaatgctcaaccccctcctgcaaaggaagagccttcagggtttctaagcttaaatagagtcatgagcctggacagtttggaagttgatttgagcaaagaactcgcagctcctgtaaatcataatgcacacctgcaaattgatgcagaaactaatgtgacaggaagcatagggtaagatat

SEQ ID NO: 11521 - DNA, 434 bp, Glycine max
agtgtttcgttcaggtcgttacagtcggaaccgggaggttctagaagctggttgagttcgttcggaggcgagcgcgagcggccggggtaggagcgcaagggatggtccataacggttcacgatctttccggttcaccggtggccgcagcttccatggtcacgcctttcgtcgcttcgcccggttcggaccgggtgagctgctccaaccccggctcgtggctcattcttcgcccgagcgacggcacgtggaagccctgggggaggctcgaggcgtggcgcgagcgcggcggctccgacggcctcggctaccgcttcgagctcataccggacaccaacggcggcatgagcgccgccggtatagtgcttgcggaatccacgctgagctccaacaaaggagggaagttcgtcatcgatttgagttgccgcaacgccgt

SEQ ID NO: 11522 - DNA, 421 bp, Glycine max
aacttattgaaaatgatctcattttaattggtagcacagccattgaagacaagcttcaagagggagtaccagcttgcatagagactctgcaaagagctggtattaaaatttgggttcttacaggggacaagattgaaacagcgataaacatagcctatgcatgcaacttgataaacaatgagatgaagcaatttgttattagttcagaaactgatgcaattagagaagttgaagacaggggtgaccaagtggaaattgcacggtttattaaagaagtggtgaaaagagagctgaagaaatgcctcgaggaagcacagagctcctttcagtccctaccttggaccataattagcacctgtagttgatggaaaatgtctgatgtatgcgttggatccaagtttaagagtgatgctgctgaatc

SEQ ID NO: 11523 - DNA, 443 bp, Glycine max
cccacgcgtccgcccacgcgtccgcccacgcgtccgcccacgcgtccgagcgttttgggtcacttgtcaagatgccactattgaaatctgataggaatccccttcctgagccagtgcagtctgttttggaggaaggaattgatctatataaacttcacactaagagacatggaagattagagtctaccaaaggatcctacgcaaaagaatggataaaatgggaaaaacagttacgggatattctttgtggaaatgctgagtattttaattctattcaggttccatttgagtttgctgtcaagcaagtgttggaacaattgagaagcattgctaagggagagtacacaccaccagatactgaaaggaggaaatttggtaccattgtttttgctgctctcagcatgccagttactgaaattcatggcgtcctcaataaattggcg

SEQ ID NO: 11524 - DNA, 642 bp, Glycine max
  unsure (1)..(642): unsure at all n locations
ccccaaactcactataaactctcccaaagtacactcctccacacacacactcacaagtcacaccgccgtatagttcagaccgaaccgcactctttatctctttctccgccgcaaactatccttctccggcggcgccaccgtacaaccctcgatttaagcaaaggagcaacagaaggaggtgcttggttgcaaatggcggccaccgcaagcaacaacgacgtcgccgccgccgccgacggccccgtgatgagcctaatcaacaagcgcctccgcgccctccgcaagaagctgaaccgcatcctcgccatggaagaggccgtcacccagggcaagcctctgaacaaggagcaggaagaggttctccgctccaaaccctccgtccttgctctcatcgacgagctcgagaagctccggcagcctctcgccaccgccctctccgaagagctccaaaacaacggcacctcctctcaaaactctcgcgagaccgagaccgagaccgaaaacgaaaccctagctgagagctccggttcggctgagccgaactcgaactcgaggaacgacgtcgttgtggaggaccttgctaatttgctctatnttggttcacttttcgatgtgaagagtgactttgcgtccacgatgctt

SEQ ID NO: 11525 - DNA, 421 bp, Glycine max
cgccacgcgtccgaaactacactctccacacacacacacacactcaccgccgtatcgttcacactgaaccaatccaaaccccactctctctctctccgccgcaaacgacccttctccggggcggcgccaccgtacaacccccgatttaactaaaggagcaacagaaggagctgcttggttacaaatggcggccaccgcaagcaacaatgacgtcgccgccgccaacgacggtcccgtgatgagccttatcaacaagcgcctccgcgctctccgcaagaagctgaaccgcatcctcgccatggaagaggccgtcaccttgggcaagcccttgaacaaggagcaggaagaggttctacgctccaaaccctccgtcctcgccctcatcgatgagctcgataagctccggcaacctttcgccacc

SEQ ID NO: 11526 - DNA, 466 bp, Glycine max
gtaagtcttctcccttttcaagtgtggccactctctctttctccgattcattgccgctccaccagcaatggccacgcacgtgagtcacgtgatagtagcggcagcatttcttctacttcttctccctttctctttctccttctccatctcccattctcaccgatccgctgcaatcaacctcttcgctgccactcccacaagcttagaagacgcgtacgaggcgcttagagtttttcagattctcggaatcgaagagaagaatactcctgtgaacgaggacacgtgtcagaaagtagttgaaagtctagcctcgtcttctcctctcaaggatttgttctatgccttgaaagttaacgccattttaaaatgcaatgtcaatgggaacgtttttaaggatattgcttcaagacttaaagccgctggtcatgatgcgagtgctttgcttgacatctactattcaattgga

SEQ ID NO: 11527 - DNA, 581 bp, Glycine max
cttcagtctcttacaattagacttgaggaaatgagagtcaaaagacgtgattcagaacagtggatgcatcatcgcttgctcccacaagagcttagagagcgtgtgagacgatatgatcaatacaagtggttggcaacacgtggtgtagatgaagaaagtttggttcagagtttcccaaaggatcttcgaagagacattaagcgtcacctttgtctggctctagtgagaagggttccactatttgagagtatggatgagagattgcttgatgccatatgtgagagactgaaaccgtgtttatttacagagaatacttacattgttcgggaaggagatccagttgatgagatgctgttcatcatacgtggtcgccttgagagtgttaccacagatggtgggaggagtggatttttcaaccgcggttttctaaaagaggctgacttctgtggggaggagcttttaacctgggccctggatcctaaatactggttctaatcttcccatcttctactcgaacagttaaagctttaacagaagttgaagcttttgccttaactgctgaagagttaaagtttgttgcc

SEQ ID NO: 11528 - DNA, 786 bp, Glycine max
gttgttgttagatcgtggggagagaaaagagtggagcctaagctgaagaatcatgtggatctagttgagcttctcggtattgcagatacaaagaaaggagctgatgtagctggaggtagaggtttctatctcaaaggagatggtgttcgccttaatcaagctctaataggctttgggcttgattttttggataaaagggagtatactttattgcatactcctttcttcatgagaaaagatataatgtcaaagtgtgctcaactagcccaatttgatgaagaactttataaggtaactggtgaaggagatgacaaatatctgattgcaacagctgagcagccactctgtgcatatcatttagatgattggatccaccctacccagctaccattaagatatgctggatattcatcatgctttcgtaaagaagctggatctcatggtcgagacactctaggaatattccgagtccaccaatttgagaaagtggagcagttttgcctcactagcccaaatgacaatgattcatgggacatgcatgaggaaatgctgaagaactctgaagatttctacaaagcgttaaatcttccctatcaagttgtttccattgtatctggtgctttgaatgatgctgcagcaaagaagtatgatctagaagcatggtttccagcctctcaagcttacaagagctagtgtccggtccaaactgtacagattatacggccagaagattagaaatccgatatggtcaaaaaaagagcaatgagcaaatgaagcaatatgttc

SEQ ID NO: 11529 - DNA, 732 bp, Glycine max
ggagaaaccaacttggcttattgcaatggctaacttgtttgttgttattcatgtaattggaagctatcagatttatgcaatgccagtgtttgacatgattgaaacggtgatggtcaagaaattgaatttcgaaccaagcagaatgcttcgttttgttgtacgtaatgtatatgtggcattcactatgttcattgctattaccttcccatttttcgatggtctcctaggattttttggagggtttgcttttgctccaacaacatactttctcccctgcatcatgtggcttgcaatccacaaaccaaagagatacagcttgtcttggttcattaactggatctgcattgtgcttggcctatgtttaatgattttatcacctattggaggattgaggacaatcataattaaagccaagacctacgaattttactcttgaactctttctcctcttgactcagtcattggaaagttacctatatgggaaatgtgtgtgatttatcataggtcgctctttaatttactattgcaaaagattgcttgtatagtattgcgtgttggtggaaggggaaattattcccacggaatctcatgaaagaggaatttctagatgtttttttcctttggcattttcattataggaatgtaccattttctctttgctctacattattctcgtaatgatacctattttgtaaagcacatatagcatgtttggctttgattaatttttgg

SEQ ID NO: 11530 - DNA, 557 bp, Glycine max
  unsure (1)..(557): unsure at all n locations
ggcccaacatcctcccatggaaacatcaagtcatcgaatatccttctcaccaaaacttttgaagctcgtgtctctgactttggccttgcttaccttgctctcccaacctctacaccaaaccgtgtgtctggttaccgtgcgccagaggtcactgatgcacgcaagatatcccaaaaggccgatgtctatagctttggtatcatgcttttggagctgcttacagggaaggctcctactcattcttcactaactgaggaaggggtggacctcccaagatgggtccaatctgtggttcaagatgagtggaacactgaggtatttgacatggagcttctaaggtaccaaaatgttgaggaggaaatggtcaagcttttgcagcttgcccttgaatgtaccgctcaatatcctgacaagagaccttcaatggatgtggtggcaagcaagattgaggaaatttgtcatcctagtttagagaaagaggaagagaagaatcatgattntaaagatgctgataatggattttcccaacagtaccattctgttgactcgggtgtgtc

SEQ ID NO: 11531 - DNA, 1310 bp, Glycine max
aggcctcttcttcctctagctagatagcgcgtggaacaaaacaaaaacctcatcatccatataaactcacactcctatcaccacctctatcacaatctctctgatcactactctctgttctcaagaacaaaacaaaagaagaaagaaatggcaggaggatcatacgaggaagccattgcagcgttgaccaagcttatcagcgagaaagccgacctgagtggcgtcgccgccgcaaagatcaagcagttgacggcggagctagaaaccgccaccgcaaacgggtcgacgccgtttaacccagacgagaggatccgaaccgggttcgcccacttcaagaacgagaaataccagaagaacccggaattatatggcgaacttgccaaaggccagagtccaaagtttatggtgtttgcttgctcagactctcgagtttgcccatcccacattctggatttcaatccgggtgaagcctttgtggtccgaaatatcgccaacatggttccaccatatgacaagaccaagtattcaggaacaggggcggccattgaatatgcagtcttacatttaaaggtggagaatattgtggtcattggacacagctgctgtggaggtataaagggcctaatgtctatcccagatgatgggaccactgcaagtgaattcatagagcactgggtccaaatttgcactccagcaaagtccaaggttaaaacagaagcaaacacattagaattctctgagcaatgtaccagctgcgagaaggaagctgtgaatgtatcacttgggaacctattgacatatcgatttgtgagagatgcagttgtgaagaaaactcttgccttgaaaggtgcacattacaatttcgttaagggcacatttgagctgtgggatctggacttgaaaatctctaactctgtatccgtttaagaaagtgttcttaaccctgcgctggtgtgcgtgatgatgtacatgacctagcttccctttgcaagtgtgtcacaattgtataagacccccccttcccctagttgtttcccttaaatcccaagaaaaataaacgaacactaagctaaaataatggtcttagtcttgtaccaactcaatgagttatgtttttgtatcgttttctgttacatagtggttttctttcggcaaactttaatagtactgatctagtcatcgaacttgagcaatgcatttagtacaagatgttttaaatcgtttttcctaaatgctcctaaaatttcttggagctggaatgcactgtgaataaatttattaatatatgacttaaatgtgttttttgtctc

SEQ ID NO: 11532 - DNA, 564 bp, Glycine max
tttccggtttccccatatgacaagacgaagtattcaggagcaggggctgccatagaatatgcagtgttgcatttaaaggtggagaatattgtagttattggacacagttgctgtggaggtataaaggggctcatgtctatcccagatgacgggaccactgcaagtgaattcatagagcaatgggtccaaatttgtactccagcaaagtccaaggttaaagcaggaccaagtgacttaagtttctcagagcaatgtactaactgtgagaaggaagctgtgaacgtatcacttggtaacctattaacatatccatttgttagagatggagttgttaacaaaactctggctttgaaaggagcacattatgatttcgttaatggtacttttgagctatgggatttgaacttcaaactttttcccactgtatccgtttaagattctctccagcaacatagtaaacctgaagtaaatcatgtacactttggaaaagtcaaaagggtttccatagaaaagaagcagacatattcagaaaatccataaataaataaataatggtctgtgagc

SEQ ID NO: 11533 - DNA, 796 bp, Glycine max
gatacattcacagcttccttctcgcagctggtacattgctcagagaattctattgtagtcacggggctcagctgctgtggaggtataaagggcctcatgtctatcccagatgatgggaccactgcaagtgaacgcatagagcactgggtccaaatttgcactccagcaaagtccaaggtttaaacagaagcaagcacattagaattctctgagcagtgtaccagcggcgagaaggagggtgtcaatgtatcacgtgggaacctattgacttatccctttgtcagggatgcggttgtgcagaagaaaacacttgccttgcaaaggtgcacattacaatttcgttaagggcacatttgagctttgggatctggacttcaaaatctctaactctgtatccgtttaagaccactgaagaagcaataaacgaaagtgttcttgaccctgctgtgggatgtacatgacctagcttccccttgcaagtgtttcaaattgtataagatacccccttcccctagttgttttccccaaatccccagaagaaggaacgaacactcagctaaaataatggtcttggaccaactcaataagttctgttttattaccgttttatgttacaaagtggtttttctttcggcaaactttaattctgatcttgccattaaacttgagcaatgcatttaatttagtatgagatgttttagatcctttttcttgaatgcccccaagaatcttggagcatgaaagccccttgaataaattaccgttaatattaataaagaagtgaatgcttaccatt

SEQ ID NO: 11534 - DNA, 429 bp, Glycine max
acgaacgcgtctattgaagggtgtcagtggagctttcaggccaggtgttctcactgctctgagtgggtgtcgcaggtgcaggcagaacaactctgatggatgtactcgctggtagaaaaactgggggatatattggggggaatatcacaatctctggttatccaaagaagcaagaaacatttgcacggatttctggatactgcgagcaaaatgatatccactctcctcatgttactgtatatgaatctttgctttactcagcatggcttcgactgtccccagaaatcaatgctgacaccaggaagatgttcatcgaggaagttatggaacttgtggaactgaaagcactaaggaacgcattagttggattgcctggtattaatggtctctcaacagagcaacgcataaggttgactattgcagttgaac

SEQ ID NO: 11535 - DNA, 555 bp, Glycine max
cccacgcgtccgcccacgcgtcctgtagtacctcggatctcgcactgacctgcagtgtctgctataccaacctgatcatgctctcagcctcattcaccttgctctcataattcacttggtacgcctccagcattggaaatcttctcctcatttgctgaatccacgactcgtcttcttccaggaatatcgtccttcccccgtgattcagcgcattccacatcaggctgtcgtgccccaacccgaacaccaggaaattgcacggcgacttcttctccagaactcttgctgtcactgatatctctttcaccgtttgctgtggggttatgcttgatgttgagtagtggatcagtgcttccgacaccgatcccggtatcttcatcttgttgcaactcccatcactctttactaataatgcctcttgctgcttcactcctttcgtgtttgatgatctaattagcacaaataggagggtaatggcaaccaagaccgctacaatgaggagcttcaagttgaggccgggttgatgagctttagtcctcatgcttgatcgtcgcg

SEQ ID NO: 11536 - DNA, 729 bp, Glycine max
ctcgagccgtttctccaccgagagagaaatggaagcagcatcatggccgacaataattctactactgatcattatgatatgggcatggaagatgctgaactggttatggctgaggccaaagaggcttgaaaggcttctgagagaacaaggccttcaaggcaactcatacacgctttttgttggggacttgaaggagtttggcaagatgcgaaatgaagccttatccaaacccatgaatctcttctctcatgacatagcgccgcgcgtgttatcctttatccaacacactgtcaacaagcatggcaaaaattcttttatctggtttgggccaataccaagggtgaccctcacagatcctgagcaaatcaaagatgtactcaacaagatttatgactttggaaagcctgatatgaatccgcatgttaggttactagctcctggtcttgcaagccatgacggagaaaagtggagcatgcacagaaagataatcaaccccgcattcaatttagaaacgttgaagaatatgttaccactattcatccaatgttgcgatgatctgattagcaaatgggaggaaatgctgccttcagatggatcaagtgagattgacgtatggccttatgctaagaatttgactgctgatgttatttctcgaacagcatttggaagtcgttatttacaagggagaagaatctttcaacttctaaaagagaaaattgaacttacact

SEQ ID NO: 11537 - DNA, 1708 bp, Glycine max
tgtttctttccctcttccgtttattaacactcataccgcaccctcttcttcttcctctctttctctcttcttcgtcgctgggcgttgcctttcaagatccaaacctcttcccaatgaggaacctctctttcttcttcttcttcatcctattcaccttcttcgccgccgtcagatctgatccctcagatcaccgctacaaagaaggcgaccccgtccctctctacgccaacaaagttggccccttccacaaccctagcgaaacctaccgttacttcgaccttcccttttgtgaaccaggtgatttgaaagagaagaaggaggcgctcggggaggtgctgaatggggaccgtttggttagcgcgccatacaagctggagttccagcgcgacaaggagtcgatttccgtgtgcaataggaagctctccaaacaggacgtggcgcggttcagatccgcggtgaggaaggactactacttccagatgtactacgacgaccttccgatttggggtttcatagggaaggtggacaaggaagggaaggaccccagtgattataggtacttcctgtataagcacattcacttcgacgtgttctacaacaaggacagggtcatcgagatcaacgtgcgcaccgatcccaatgcgctcgtggatctcaccaaggattctgaggttgatgccgagtttttgtacacggtgaagtggaaggagacgaacacgccgttcgagaagaggatggacaggtactctcagtcctcgtcgctgccgcatcatttggaaatccactggttctcgattatcaactcctgtgtgacggtgttgctcttgaccgggttcctcgccaccattttgatgcgggtgctcaagaacgattttgtcaagtatgcacatgatgaggagtctgcggaggatcaggaagagactgggtggaaatatatccatggggatgtgtttaggttccccaagtttaagtctctgtttgcggctgcgcttggatctggcactcagttgtttacccttacggtgttcatattcatattggctcttgttggtgtgttttatccgtacaatcgaggggcactgtttactgcactggttgtcatatatgcacttacttcggggattgctggatacaccgcaacttcattctattgtcagttggaaggaacaaactgggttaggaatctgctgttgactggatgccttttctgtggacctctgtttctgactttctgctttctaaacactgttgcaattgcttacaaagctactgctgccctcccatttgggacgattgtggttatagttctcatatggacacttgcttacgtctcctttgcttgtattgggagggattgctgggaagaatagcaaggctgaatttcaagctcctgttcggacaactaaatatccaagggagattccacctctgccttggtatcgtggaacaattcctcagatggcgatggcaggatttttgcctttcagtgctatatacattgaactttactatatatttgccagtgtttggggccacagaatttacaccatctacagcatcctgttcattgtcttcatcattctcttgattgttactgctttcatcactgtggcattgacatacttccagcttgctgctgaggatcatgagtggtggtggagagtcatgcccgtgaaatgaatcattctatcaatccaccgggatggag

SEQ ID NO: 11538 - DNA, 676 bp, Glycine max
catacattgaactttactatatattcgccagtgtttggggccacagaatttacaccatctacagcatcctgttcattgtcttcatcattctcttgattgttactgctttcatcactgtggcattgacatacttccagcttgctgctgaggatcatgagtggtggtggagatcattcctatgtggtggttcaactgggttatttatctatgcctactgtctgtattactactatgcacgctccgacatgtctggattcatgcagacctcatttttcttcggatacatggcctgtatatgctacggtttcttcttaatgcttggaaccgttggattccgtgctgctttgctctttgtccgccacatttatcgatccattaagtgtgagtaggcattttgtcctctcaagtccactagagcaattgtcttcatttcatagggaattctgtagaaaaattatagtaattttgcagttcttttgtgtactataagggaagctgggttgggtgggtttctggcttccagagcaacttgttagatggcaaagggtgcttttggggataacgtctgtgtactaccatctctttaaccaaactcttgcaatactttttggtccttatgaacattcttcaacatgtcaaaaagaataaagaaaagaatgattcaacaaaaagaccc

SEQ ID NO: 11539 - DNA, 505 bp, Glycine max
agctaattcacttttgcaacctcaatttcctggaacccttgtattggaacttgattggttgcccttgcgaactgttaagaatgatccactggtactgtgcattgctggagcagatagtagttttcgtcttgttgaagttaatgcaaatgataaacgatttggttatgcaccccatatcagaaatacaaaggagagattccggtcaatgcctatatgttgtcccatacttcttcctttaccacatgccttggcattgcgcatgattttacaattgggtgttaaaccttcttggtttaacacttgcagtacaaccatagaaaagagacctcacttaattccaggaactccttcatctaaaggggatcttcgcacctacatgatcgacataccacctcttggcgactcagtggtgcctgagatgctcttaaaagtattggaaccatatagaaaagaaggttgcatgcttgatgatgagagagcaaagctgtatgctagtattgtggat

SEQ ID NO: 11540 - DNA, 465 bp, Glycine max
cccacgctgaaagcgaagaagtagagaacaaagaaagagagagagaattgaatgtgaatggggaatcagaagcagaagtggacgcaggacgaagaagatgctctcatcgccggcgttgaaaagcacggccccggaaagtggaagaacattctcaaggatccccaattcgcccctttcctcacttcccgttccaacatcgacctcaaggataaatggcgcaatttgagcgtcagcaacggtgctcagggctccaaagaaaaatctagggttcccaagcttaaagccctccctgctcctcctgctcctaccgccactcctcagaacgccgctcctgctctgcaaaacgcagcatctgatgtcactcccccagatgcttctcagaatgaccaagatgccaaaaaccctccaaggtataatgcaatgatttttgaagctctatcagcgctgaaagatagtaatggatct

SEQ ID NO: 11541 - DNA, 701 bp, Glycine max
  unsure (1)..(701): unsure at all n locations
ctgaaagcgaagaaagaaacagagttagagaattgaatgtgaatggggaatcagaagcagaagtggacgcaggacgaagaagacgctctcatagccggcgttgaaaagcacggccccggaaaggggaagaacattctcaaggatccccaattcgcccctttcctcacttcccgttccaacatcgacctcaaggataaatggcgcaatttgagcgtcagcaacggtgctcaaggctccaaagaaaaatctagggttcccaagcctaaagccttctctgctcctcctgctactaccgccaccaccgccactcctcagaacgcttctcctgctcctcaaagcgcatcgtctgatgctgctgttgcccctgacgcttctcagaatgaccaagatgccaaaaaccctccaaggtataatgcattgatttttgaagctctatcagcactgaaagatagtgatggatccgacatgaatgccattattaaattcatggagcaaaaaaatcatcaggtaaaccaaaattttaaaagggcattaagtacacggttgaggaggcttgttagtcaagggaaacttgaaaaggtaccaaatggttacaaggtgaaaaaggaagcctncttcgggacaaagtcaccttcaccaaaagcaaaggatgtccggccttcacaaccacaacggcaatcttcagcttctctctttatgac

SEQ ID NO: 11542 - DNA, 323 bp, Glycine max
gtcattcacaacacaaacacattcaacaacatggtagcaattctcaagagacagggagaaaacgaatccgaagaaaccatcataggcttggcaaaaagtctcatgcaactctcgcgtgtccaacaacaaagcaataagcctcttctcaaaaccttttctccaacggagttcgagtgcaaaacctgtaaccgcaagttttcatcttttcaagctcttggtggccacagggctagccacaagaagcccaagttcgaagctgaagaactcaaagaagaagccaggaagactaaacccaggatgcacgagtgttcaatttgtggcat

SEQ ID NO: 11543 - DNA, 804 bp, Glycine max
gtaacctggcttcgtgcctatcctccaccctcaacacagccttcctttcctcttctccttttctttaccaattttataataatatatttatatcttttcttttcctttttaccatttcgatcccaattcttcctcacaccattttcagttcacagggttaggtttaggtcccttgtctggtctggtgtgcaattctccccatacaataacaatacacccactttatcaaccaatcaatcaatatacctagtagtgattagatttagtgatcgatcctctcctttcgttctcaaaccgtagatttagattttagggtttctctcttaatataatcttttgacacttccgtaacaaacaaaaaaattacataaattttcccttataattattattatttggcttttatctttggattaactaggcttgagctatcacaaataattgtttcggagaatggaaaagaaaaaggtggcagttcccctcgtgtgccacggtcattctcgccctgtggttgatctcttctacagtcccgttacgcctgatgggtttttcctcatcagtgccagcaaggattcgagtcctatgctcagaaatggagagactggagattggattggaacatttgaagggcacaaaggtgctgtgtggagttgctgcttggataccagtgccttacgtgccgcaactgcttctgctgatttctcaacgaaagtttgggatgctttaacaggagatgaattgcactcttttgagcataagcacattgttcgagcatgtgctttttctgaggatactcaccttttg

SEQ ID NO: 11544 - DNA, 1399 bp, Glycine max
ttgtggtatttgtggagatggaggggatttaatctgttgtgatggctgtccatcaacatttcatcagagctgcttggatatacagatgcttcctcctggtgaatggcattgtccaaattgcacctgtaaattttgtggcatagccagtggaacttctgataaagatgatgcatctgtgtatgtcctacagacttgcaacttatgtgagaaaaaatatcatgactcttgcactaaggagatggataaccttcctaataacatcaatacatcaagcctttctttttgtgggaaagagtgcaaagagctttctgaacacttgaagaaataccttggtaccaagcatgagctggaagccggtttttcatggtctctcattcataggatagatgaagactcagaggcagcttgcaggggtattagccagagggtagaatgcaattccaagttggctattgcactgactgtgatggatgaatgttttttacctgttattgatcgaaggagtgggatcaatttaatccgtaacgttttatataatagtggatcaaactttagtcggttgagctatagtggcttttacactgctactttggagagaggggatgaaatcattgctccagcatctatcaggttccatggaactcagatagcagagatgccattcattggaactcgccatatatataggcgccaggggatgtgccgccggcttttttccgccattgaatcgaccctttgctctctgaaggttgaaaaactagttattcctgccattgctgaagtcacaaatacatggacgacagtttttggcttcacacatctggacgaatcactcaggcaagaaatgaagtcactgaatatgatggccgtccctggtatagatatgttacagaagctgtgagtggaacaaggaaaccgtgagggttctgagagaatggaaaatggaaacgacgattttatcaagaccaaaatgggaaataggtcagatatgggtttttcaactccacaaggtcctcgtggaagtgatgatgttagttcaaatcctgctaatgagacaaatgatgaatgcagcgatgcttctcaggaactatacaaccaagttttggttgatgggattatctgttcccaatctcattctgaggaaatgatgtctgatccaatttcagataaatgtgattctccttctagaactagtaacagtgaactagaaatgaagaataaagtagcggctgctcctcctgttgatagattagattcttctaccaaatgtcaatccatttctccaattgacacttctggtagtagtcacccagtagatattttgaaagttcaagctttggttcaggaaactacttattctgatccatgttcagaagaagaaaaccttgacaagaagtgt

SEQ ID NO: 11545 - DNA, 506 bp, Glycine max
cattgccatccaaattctcagccgcggcttcttccctctctgggctggagttctaatcactgcttcagattgctttttctttctatttcttgagaactatggagtgaggaagttggaagctgcttttgcggttctcatcgctgttatgggtctttcttttgcctggatgttcggcgatgctcaacctaatagaaaagagcttttaatgggtattttggttccaagactaagctcgaaaacaattcgtcaggctgtgggtgttgtgggttgtgtcattatgcctcacaatgtattcctgcattctgctttggtgcaatcaaggaaggttgatcctaaaaagataggtcgggtgcaggaggctctcaactactattcaattgaatcggcggcggcacttgcagtctccttcatgatcaatctatttgtcacaacagtttttgctaagggtttttatggaaccaagcaggcagatagcataggattggtcaatgcagggcagtatcttg

SEQ ID NO: 11546 - DNA, 817 bp, Glycine max
atgaaaaagacaatacaagagaaaataatgttgctaagattaaagttgtggtacgcaaaagacctttaaataagaaggagcttgctaagaaggaagatgatattgtaactgtatatgacaatgcatatttgacggtccatgaacccaaactaaaggttgatttgacagcttatgtggagaaacatgagttttgttttgatgctgttcttgacgagaatgttaccaatgatgaagtatatcgagttaccgtagaaccaattattcccacaatttttgagattaccaaagctacttgttttgcttatggtcagacaggaagtggcaaaacatacacaatgcaaccgttgccgctcagagctgcagaagaccttgttagacaattgcatcgaccagtatatcgaaatcagagatttaaattgtggcttagttactttgagatatatggtggaaaactttttgatcttcttagtgatagaaagtaggtatttcttaggtatttctttcatgtgttggtgtatttgtccttcaggcattactttacctttggtatgaatgcttttgtattgtgatatggaccttaactagaagattgtgtttttaggtagagttggtttcaagatatgtaattactttccagtaatgctgttccttggtaaactaaaagcatgtttggtgacaatttaatattccaagtaatgttttccaaaatttgaatgatagaaaaaataaaagctggaatggaaatcattagttggaatatatgataacttccagcattcctatgggaatgcttcattcccacctttcatcacgggaa

SEQ ID NO: 11547 - DNA, 609 bp, Glycine max
gaatgttaccaatgatgaagtatatcgagttaccgtagaaccaattattcccacaatttttgagaaacccaaagctacttgttttgcttatggtcagacaggaagtggcaaaacatacacaatgcaaccgttgccgctcagagctgcagaagaccttgttagacaattgcatcgaccagtatatcgaaatcagagatttaaattgtggcttagttactttgagatatatggtggaaaactttttgatcttcttagtgatagaaagaaactctgcatgagagaagatggacggcagcaagtgtgtattgtaggactgcaagaatttgaagtttctgatgtacaaattgtcaaagaattcattgaaaaggggaatgcagcaagaagtacagggtcaaccggtgctaatgaggagtcctccaggtcacatgctatcttgcaactggctgtaaagaagcacagtgaagtgaaagcgagcaagcgaaacaatgatgggaatgaggcaagaagtgggaaggttgtgggaaaaatttcttttattgatcttgctggaagtgaacgaggtgctgacactactgataacgatcgtcagacacggattgaaggagcaga

SEQ ID NO: 11548 - DNA, 355 bp, Glycine max
ttcgtctcgcgtccgcccacgcgtgcgcccacgcgtgcgccctcgcgtccgcccacgcgtccgtccacgcgtccgcccacgcgtccggaaaactttttgatcttcttagtgatagaaagaaactctgcatgagagaagatggacggcagcaagtgtgtattggaggactgcaagaatttgaagcttctgatgtacaaattgtcaaagaattcattgaaaaggggaatgcagcaagaagtacagggtcaaccggtgcaaatgaggagtcctccagatcacatgctatcttacaactggttgtaaagaggcacaatgaggtaaaagagagcaggcggaacaataatgatgtaaatga

SEQ ID NO: 11549 - DNA, 1361 bp, Glycine max
ggaggatgcagtcgcgaggctgcgaattttgattctgagcttagagagaaggggaggattccggatgaagcgaatgaggttatgaagaagcaggaggctgagcttgaggagctaaagagggtggttcgagagaaagaggaggagattgaggttttgttggttcagagggaggttgagagggagaagctgagggtggctgaggcgaatttggagaagcaggcaatggactggatgttggcgcaggaggagctgaagaggctgggtgaggatgctgcgaggcatgctgaggagagtagtgagaccttggaggatttcaggagggtgaagaagcttctcaatgatgtgaggtctgaattagtttcgtctcagcaagcgttggcatcttccagaagcaaaatggaggagcaggagcggttgttggaactgcagctgagtgagcttggggagcagagggcaagtgtgatgtcctacatggaaaatttgaaggatgcacagattgaagtggagagtgagagaacgaaactcagggttgcagagtctcggaacagagagcttgaacgggatctgaagatggaaaaggagcttattagtgcagttggaggaggagctgaagaaagagagaacttctttggagcaggcagtcaaagaagtggctttgcttcaagaggaattggagaagaaaactgccgagtttagagaaacaagtgccgttcttcaggttaaagagtcagagcttgttgatgctaagctagaaatccagcgtttgaaatctgaaaaggcttctcttcagggtatcttggaggagaaagacttggagctttccagtgctaggaaaatgctgggggatgttaaccaggaaatctatgatcttaagatgcttatgcacagtaaagaaacccagctcattgaagcaaacagtatgctaagggacaaagatgagcatgtgaaggtaatccagaacaagttgaataatacaaaccagaaggcttttgaggctgaaactgtggtagaaagaattttagatctcacaaacagacttgttgcttccattaaggatgaagatatgaactcatcaaaaccactactagatgaaatgggtaaccaactacttgatcaactattggagaaacctgctaatgaattgaaatggcaacaaaaaagccttgagaatgagcttgagttggccaaggtaaccttaaaagaaaaggagatggaagttcttgctgcacagagggctctaacgataaaagatgaggagctgaagatgacactttcaagattggactcaaaagaggaagagttgaaaaaagtaagggaagcagtgacagaagactccaatgatcttaaaaggctgtatgctt

SEQ ID NO: 11550 - DNA, 554 bp, Glycine max
  unsure (1)..(554): unsure at all n locations
aaggggtggaatgaaaattggaaccgggctctggatgatgaacgattcacaggccagagaccaagaactttcttcttcttctggttgtggcgcttcttccattcacagtaactccaattccatagaaagatgggtaccggggattcggattcggaatcgaatggatggaaccgtgctcgtgggttggcgcttaagactctgctactaattggtggcgcacttctcgttaagcgcctccgcaagtccaccacgcgttgggaccacgctcatttcgtcttcaactcccttaacggcgaaaagtattccaaggagcaagcttccagagacccggataactatttcaacattagaatgcttacatgccccgcagcggagctagtggatggttccaaggtcttgtattttgaacaggctttttggaggactccacaaaaaccctttcggcagaggctttttatggtgaaaacttgtcctaaagagttngaatgtgatgttgagttaagtacatatgccaattagagacatggaggagtaccaaaattttctgtgatcga

SEQ ID NO: 11551 - DNA, 819 bp, Glycine max
caagaactgaacagagtcctctgtgaaaaacttgaagataagatgaagggaactgttgttgagggaactatacagaagctatttgaagggcatcatatgaattatatcgaatgcatcaatgtggactataaatcaactagaaaggagtcattttatgaccttcagcttgatgtgaagggctgtcctgatgtttatgcttcctttgacaagtatgttgaagttgaacgtcttgaaggggataacaaatatcatgcggaacaatatggtttgcaggatgctaagaagggtgtcctatttattgattttcctcctgtccttcaactccagctaaaaagatttgaatatgattttatgcgggatactatggttaagattaatgaccgttatgagtttcccttacaacttgatcttgatcgtgaggatgggaaatatctatcacctgatgctgataggagtgtccgcaatctttacacacttcacagtgttttggttcacagtggaggtgtgcatggtggacattattatgcttttatcaggccaaccctctctgaacagtggtacaaatttgatgatgagagggtgacaaaagaagataataaaagagcattagaggagcaatatggtggtgaggaagagttaccacagacaaatcctggattcaacaacactccatttaagttcaccaaatactcaaatgcttatatgctggtgtatatacgtgaaagtgacaaggacaaaatcatatgcaatgtggatgagaaagacattgcagcacatttaagggagaggttgaagaaagaacaagaagagaaagagcac

SEQ ID NO: 11552 - DNA, 561 bp, Glycine max
gatgcatctgaatggaagaaaagaggcgacgcggtggtgatggcgttgtgtggcgcaatgctcacccctccgaatccaaagtcgtcggagaatattcttattagtattaattcattaataattatgagacgagtgcttggcttcttattcttgttctgtaagtttgcaacttttttcctttcattcattattcttctcttgccttgagttgaggatgggcaatgtgaacgtgactcctgaagaagaagaagtttctgcaagtgcaagggcaaccgatgagaacgccatgcctcagtctcctcccacctctcctacggctatccatttccccctcatattcgctcctcaggttccggtggttccgctacaaagacctgatgagatgcatgttccaagttgttcctggatggagacaacttcagggtatgaagatgtgtaccgcgaagtaggaattccaacagtgattacttggagttatgatggaaaggaagtagctgtggagggatcgtgggataatcggaaaacatgaatgctcctggagagatcagggaaggactttgc

SEQ ID NO: 11553 - DNA, 751 bp, Glycine max
attgctttgtaaatggtttggagcaccgagatgcaactgcaattttcaattgcttacgtgcatatgctgctatagataacactaagagtgcagaagaaatttttcgagttactgttgtggctccattgatacagaagattatcccacatggatcatcagctgtggttgctggatcatttggggatggtctagacgatgattatcaactaattaaggagttcattgataaagactgtagatttttattggaaatttcttcagctgaaaattcaggtttgcatgtctttgacttcttagccaattcaatccttaaggaggttctctctgcaattcagaagggaaagccaggtgcattttctcccggaaggccaacagagttcttgaaaaattacaaatcaagcttagatttcttggcttttctagaaggctactgtccatccagatctgctgttgctaaatttcgatctgaagcaatttatacagaattcatgaagcaatggaacattggagtatatttctctttgaggtttcaggaaatagcagggtcactagattctgtgcttacaacatccagtcttgtccctgttcaaaattcagatgctggcgaagcaaattatcaaggtttaacattaaagcaaagtgttactctgttggagaggttgagatcatgctggagaggagatgttctggtcccttcttgttctgacagattccttcggctatccttgcagcttctttctagatactcaag

SEQ ID NO: 11554 - DNA, 1039 bp, Glycine max
gactgccactgctgcattgcatagtgaattctttacaacaaaaccatatgcttgggagccctctatccttccaaaatatcctcccagcaaggagatggatgcaaagctacgggatgaagaagctaggagattgagagcagctggtaaagctaatgctgatggtgtcaagaaatctcgtccacgtgagcgagttgggaggggaattgcagttccagaggccaatgccgaactgcaagcaaatattgatagacgacggctgatcacacattcaaatgctaagagcaagagtgagaagtttcctcctccccaccaagatggagctctaggctatcctttgggttcttcacatcacatggatccagtttttgatccccctgatgttccatttagttctacaaacttctcacaacctaaagcaaatatccaaacctggtccggcccattggtagatccttctggtgtgggcgtgccgaggagaaagaagaaacatggcaagtgatgagcatcatatacaatcaaattcatcaaaggaggactcaaaaaagataggaatgagtcgggagtcaaagaaatattcttgtagtataacaccaatcaatttttttgaagtattcatgatgaagctgcaaatgttgctgagttgatgtcagtcctctagttgctaaaggcattggaggtaaaccaaattgtattttcctgcttccatttctttctcaatgatcaaaggtttattctctatcttgtatatcttattttttttttcttcttgaactacaaagtttaattaggttagatgaatatctaataaataggttttgggaacagtattggcaatttatatctctccctaatttttttcccatttaatttctactttccagaagcctgtgaactgtgcagtacttatacacagcattcttttaaattttttggtttattcataagattctctattatccttttttgtgcattagtttaaagaaagccttgtgattgtcatttgacgatgaatagtgatatggttcctggttgcactggt

SEQ ID NO: 11555 - DNA, 480 bp, Glycine max
cccacgcgtccgatttacctcttgagttaaaatgggatgatacatgtcttgataaaggtgtttcttgatctttatcattaacaaagtatatgtgaggttgtcttatgtttgattagtaagatacaagtgtctaaatattatgcttggctagaccctatctaagtttatacttgcactaattctgaaattcacatttattgatgaagaaacattttttgtttgattttcttttccagcctacaaatgagagagtacatcagattatttcaaggactgcaacatttgtcagcaaacatggaagccaatcagaaatcatcctgagggtgaaacaaggagacaatccaacttttggattcctaatgcctgatcatcatcttcatgcgtattttaggtttcttgttgatcaccaagaacttctgaaagttgacaaagatgatggaagctcaactgaggacatgaataggactctggggcttgatc

SEQ ID NO: 11556 - DNA, 696 bp, Glycine max
  unsure (1)..(696): unsure at all n locations
ccaagatctaaaagatactctttggtttcttttcaattggctgtatgtgatgtctccatatattatatgcctcctactgcaggttaaatgttacatacatcaactgctatcaggacttgagcactgtcatagtcgaaacgtacttcaccgtgatattaaaggatcaaaccttcttattgacaatgaaggaatacttaaaattgctgacttcggacttgcatctttctttgatccaaatcgccggcaacccatgactaatcgtgtggttaccctttggtaccgacctcttgagttgcttcttggtgccacagaatatggtgcggccattgacctttggagtgttggttgcattttaggagagttattggcagggaagcctattttgcctggtcgtacggaggtggaacaactgcataagatatacaaactntgtggttcgccttctgatgagtattggaagaagtcaaagatgcctaatgctaccttngttaaacctcgagaaccatacangagatgcataagagagacattttaaagatttncaccttcagcgctgcccctattgacactcttctttgcattgatccttgcaaacggaagagtgccacaaatgctctaagaagtgaggtgggcttttgaaaattcctgatttggtatcgatattatcatttcatgctacttatagatctattggat

SEQ ID NO: 11557 - DNA, 1454 bp, Glycine max
gacacaaaaacggctaaaaccataacaagaatggtgtttggctcaaaaaaaaagaagaagaagaaatgttagggttaggatgcttaaacctcaatcgattctctcacttcccatcccctccctctctaccatcctctcgttccgatttacttaaggttgcgtctcgtagattcgctttatcagtgactaaaacgcagcaatctccagtcactaagccacaatccaccttcaccgctataattgaaatagataacccggccagtgtcaaaaggcaattggcgcagctgtttgacttgtctctgagggcaactgtgcccgatgagccagatgttgtgccgttaattgatgcttgtgctgttaaaggtggcgtaaaatttggtgattatcaatgtaataatgcaatgggtatatggtctaagatgaagggaaagcagacaggatttaggggtcccccagcaattggtcaggctatcgttaacaatcttcctccatctgaaatgatagattcgcgctctgtagctggtcctggatttgtcaatgttgtattgtcaaagaagtggatagctgagagcctacagagaatgctaattgatggtatcaattcatgggcacctcgacttccagtcaagagggctttgattgatttttcctcacctaatatagcaaaggaaatgcatgttggccacctgagatctaccattatcggtgatacattagctcgtatgcttgaattttcacgtgttgtgtgtgtaatccgtagaaatcatgttggtgactggggaacacagtttgggatgctgattacaaacctctttgaaaaatttccaaacccagatgatgttagtgaagcagacattggagatcttcaggcattctataaggcttcaaaagtgaggtttgatagtgatcctgagtttaagttgagggcacagcaggcagttgtccgcctccagagtggagaaatcaagtatcgcaaggcatggaaacaaatttgtgatgttagtagggctgaatttgataaagtctatcaacgccttggagttcaattggaggaaaggggagagagcttctataatccatatattcctggggttctggagaaactagataatttaggactgattgaagagagtgatggtgcgcgtgtgatttatgttgagggtgtagacataccacttattgctgtgaaaagagatggtggctacaactattttacaactgatctagcatcactttggtatcgtctaaatgaagaaaaacttgaatggattgtatatgttacagatattgggcagcaacagcactttgatatgctatttaaggcctataggcgtgcaggttggttaccaaaggatgagaatgcgtatccaaaatgtactcatataggttttggtcttgttcttggggaagatggaaaacgatttcggactcgcagaggagtgtcatagtgatac

SEQ ID NO: 11558 - DNA, 1036 bp, Glycine max
  unsure (1)..(1036): unsure at all n locations
cangcgtttggttgaatggaagcgcgtgggcgggtggttcgtgtttccgttcacaacagtgtcaatgtcctcctcccttcttttcccttttaagtcagagctttccccttcccttcagattctcctcaaaccctacctggctttccccccccctcttcgcgtcttttcgcaaccgactgcatcttggatacgggaacagtgtgccaatatgagctctcgggcaggcaagggacctgctatcagaagttaccggcggagaaagacagctttggaccttgaccttaaccgtttaccggctggtgagaatcgtgagcaggagggaccttcaactcaggcggtgcctcaagaaattcaacttgaacagcagccacaggttactcaacctccgatgattgacgtggaagccattgatgatgatgttgttgaatgtaccccaagggcttttgctgaggctaaaaacaattcaagaagaattcgtaggaggactgtagttgatgttgatctagaagatcagactaggcgcaacaaacgccgaagagaattgccaaatctgattattaattgtgataagtatataaatttggaaggcagtagcagttccatggggggaagttttaaaaagccacctgaacctccaaaggagcttgtcttcaactgtccaatatgtatgggccctatggtacatgaaatgtcgacaagatgtggtcatattttttgcaaggattgcatcaaagctgctataagtgctcagggtaaatgccctacctgtagaaaaaaggttgttgcgaaagatcttataagggtgtatctcccatcgactagttagaggctttccgtggaagctgtaaagaggagaacagggattggaagaaacgtcattgtactttggacaatactgaatggctgtgttgtttctaatatgttccctcatagctgatgcttagtctgttgttgggtagctgtttctcttaatttatcatattaatacatgatgacatttggtatatagatataattccttgatcaggtttttttt

SEQ ID NO: 11559 - DNA, 1452 bp, Glycine max
cggctcgagcttcttcactcttgattcttatctctcacactgaacactcttgtagttaatcgaatttctcattccgcagaaaccttcaacgatggccgctgaaacgattccctaccagaacggcgtcgttgccagctccaacgattccaccgccacgggcaagaaatcgcgggagaacgaccgccgccgccgccgccggaagcagaagaagaacaacaaggcatctgaggccccggttcctaactcttccgaagagagtgacgatgcgaaagagaacaacgattcaaaacagcttgttgaacaaattgaaattgagtacgtaccggagaaggcagagttagttgaaggcatggatgaagagtttagaaaaatctttgagaaatttactttcactgatgccactgctttggaggatactgataagaaggatggttcagaagaaaatgcagcaactaataagaaggctaattctgattctgaagaggaagaaaacgataatgagcaaaaagagaaaggcatctcaaacaagaagaaaaagcttcaacggaggatgaaaattgctgaactgaaacaaatttgcttgaggccagatgttgttgaggtgtgggatgctactgcatcagacccaaagttgctggtgttcttgaagtcttatcggaatactgtacctgtacctaggcattggtgtcagaagagaaaatttttacagggtaaacgaggtatagagaaaccaccctttcagcttcctgatttcattgctgccactggaattgagaaaatcagacaggcttatattgagaaagaggatagtaagaagctgaaacaaaagcaaagggagcgcatgcaaccaaaaatggggaaaatggatatagattatcaggttcttcatgatgcattctttaaataccaaacaaagcctaaactgacctctcttggagacctgtatcatgaaggaaaagagtttgaggtgaagttgagggagatgaaacctggcatgttatcacatgaattgaaagaagctcttggtatgcctgaaggttctcctcctccttggcttattaatatgcagagatatggtcctccaccatcatatcctcatctgaaaatccctggactgaatgctcctatcccccctggagctagctttggttatcatcctggtggatggggcaagcctcctgttgatgaatatgggcgtccactgtatggagatgtttttggtgttcaacagcaagatcagcctaactatgaggaagagccagtcgataagaccaagcatcgtagagacttgtaagaggaagagcaagatgacgactacgacgaagaagaggaagaagatgaagaaacggcggaggaggaacttgaagctggtattcagtctcgtgatagtctgtcacagcactcccactggagtgaaaacacccgatgttattgacctccagaagcaactga

SEQ ID NO: 11560 - DNA, 1767 bp, Glycine max
cggctcgagcggctcgtgctcaagcgagacagaaaaaggggttagggtttgttcttgtgatcgaagctaagcgaagcaaaatgggtggatcagtgagggacgtgaagtcgaagggcgaggtcgacgaggtggtggcgagtggctctccggttatcctccacttctgggcgtcgtggtgcgaagcttccaagcacatggaccaactcttctctcacctttccactgatttccccaacgcccgcttcttaagggtcgaggccgaagagcaacccgagatttctgaggcttactccgtctccgctgttcctttctttgccttctgcaaggatgggaagacctttgatacattggagggagctgatccgtcaagcttagccaataaggttgctaaagtagcaggctcaattaaccctggagaatctgcatctcctgccagtcttgggatggctgcaggggcttctgttcttgaaacggtgaaagaattagcaaaagacaatgattcttcaaaggagaaaaatcaagttcaaccagggcttagtggtcctctgaaaaagagaattcagcagcttgttgactctaatcctgtcatgcttttcatgaaaggaactcctgaagagccaaaatgtggatttagcaggaaagttgttgttgtgttgaacgaagagagagtcaagtttggaagttttgatgtcctatcagactcagaggttcgtgaaggcttgaagaagttttccaattggcccacatttcctcagctttactgtaaaggagaacttcttggtgggtgtgacatagcaattgctatgcatgagagtggggaactgaaggaagtttttaaagatcatggaattgatactactaatgaagcaaaagagaaagaatcaggaaacggcaaaggtggcatctcaaaatctactgatttgagtacaaccttatcctctcgtctggaaagcctggtaaattcaagtgcagttatgctgtttatgaaaggaaagccagatgaacctaagtgtggtttcagtaggaaggtagttgaaattctccagcaagaaaatgttccctttgagagttttgacattcttactgatgaagaagttcgtcaagggcttaaggtttattcaaactggtccagttatcctcaactgtatatcaagggtgagcttattggtggatcagatattgtgttggagatgcaaaaaagcggagaacttaggaagaatttacacgagaaagggattcttcctgcagagaccattcaagatcgactgaagaatttgattgcctcgtcccctgtgatgctgttcatgaagggtaccccagatgcaccaagatgtggttttagttccagagttgctgatgcccttcgacaagagggcttgaattttgggtcctttgatatattgactgatgaggaagtgagacagggattgaaggtatactcaaattggccaacctatcctcaactctactacaaaagtgagctgattggtggtcatgatattgtgatggagctgcgaaataatggggagctgaagtcgactttatctgagtaggattattattattccttcaaataacatgtgttatgtcctagaagccattttgggaggttgtgtttgatgtcattaatgaactacatggttattttatatgctaccgtcagtgatttttaaaatgttagtgtggagcctcaactaatggtatactgaacatgcatgaattcccatcagattagaaattgttatatattacataattatttggtgg

SEQ ID NO: 11561 - DNA, 589 bp, Glycine max
ggctcgaggtttggttcaacaagaggaattctcccaaattttgtatttttcacccaaatttttccacaaaacctaaccctcctcttgtttcacgcgcaatccgaatctccatttctatcttgtcctaggacgagcttgttaatacgccatggcagccgtgtccgatcaagacactagtgtatgcactcactgtgatcgggctattccttcggcaaatattgatttgcattttgttcattgctctcgaaaccttgaaagatgccaaatttgtgacgacatgattccgaaactacttgctgaggagcactatttaaacacacatgccccggttgcctgttcgctgtgcagtgaaaccatggaacgtgatattttagatatccatagagaggaaaattgtcctaaaaggatgatcacctgtgagttctgtgagtttcctttgccggctattgatctggctgagcatcaggaagtatgtgggaatcgaacagaactgtgtcacctttgtaacaaatatgttagactgcgtgaactatacaaccatgaagatagttgcaatacaattcaagacaattctgctaggtcttcaagg

SEQ ID NO: 11562 - DNA, 740 bp, Glycine max
  unsure (1)..(740): unsure at all n locations
acgagcttcaaccgaacaaaaaaaaaaaagtcatcccaaccaaaaagccattcaaaacaacatcggaatctaagatacaccaaaccttgttatgctcgaatccgaagttgtccaaaacctaatcctcgtaataatccttgtataatccgaaattctccgtctactttttttgtttggtttccggagattttgtcgtagagggatccctctggtgtaggattgtgtgtatcttcggcgatggaagcgtgtttcggatcaagacactagtatatgcactcactgtgatcgggctattcctgctgcaaatattgacttgcattatgctcattgctctcggaagcttgaaaaatgcaaagtttgtggtgatatggttcccagaaaaaatgcggaggatcactatctaagcacccatgcaccggtttcttgttcattatgcagtgagacaatggagcgtgatattttagatatccataaaggtgaaaattgccctcaaaggattgtcacttgtcagttctgtgagtttccattgccagcaattgatctggccgagcatcaggaagtatgcgggaatcgaacagagctttgtcacctttgtaacatatatgttagactgcgtgaaagattcagccatgaagctcgatgcaatggcatccaagaatagttctgtgggtacttcaaggaatgtgagggaagctgagaagagcaaggtgctagaagaagccgctgccgnccagaatgac

SEQ ID NO: 11563 - DNA, 492 bp, Glycine max
  unsure (1)..(492): unsure at all n locations
gtgtgtttcaggactcagagagagagagagagagcattgcattggcgagaccaccgcggtggagcgagcgagcgagcaagcgacgacgaaaattgaattgctcgtgcgcgtgcgtgcgtgatcgtttgattgtttggatcttgtggtcgatcgaggacgatgtcggagatggcgagcccagatcccgagggactcgacggagtccggatgacgtggaacgtgtggccgcggacgaaggtggaatcaagcaagtgcgtgatccctctggcggcgacggtggctctgatccgtccccaccctgacatcccccgccttccgtacgcccctctccgttgtaagacctgctcctccgtcctcaaccccttctgccgcgtcgacttcaccgtcaagatctggatctgccccttctgctaccagcgcaaccacttccnccctcactaccacgccatctccgaaaccaacttacccggcgaactctacccccaatacacc

SEQ ID NO: 11564 - DNA, 408 bp, Glycine max
taacaattgaagagtgtttgacgactcagagagcacattgcattggcgacaccgcgtgcgacgacggaaattgaattgctcgtgcgcgtcggtgcgtgatcgatcgaaggacgaacgatgtcggagatggcgagcccagatcccgagggactcgacggagtccgcatgacgtggaacgtgtggccccgtacgaaggttgaatcgagcaagtgcgtgatccctctggcggcgacggtggctctgatccgtccccaccctgacatcccccgcctccagtacgcccctctccgctgcaagacctgctcctccgccctcaaccctttctcccgcgtcgacttcaccgccaagatctggatctgccccttctgctaccagcgcaaccacttcccccctcactaccacgccatc

SEQ ID NO: 11565 - DNA, 629 bp, Glycine max
  unsure (1)..(629): unsure at all n locations
ggaatggtgagcgtcaccaaccaaagttctctctcccaatgtcttggtcgtcgacgcaggaggcagtagtagcagattgtgaagaagaacgaaactggctggaccttccgcgagacgtggtgtgcacgattttccagaagctgggcgcaatcgaaatcctgacgcgcgcccagcgcgtgtgctccgtgtggcgcggcatctcgaaggagcctctcctgtggcgcaccatcgacatgcgcaattcgggcgacattgaaaccaacttcgtgttcttggccatgtgccaccgcgcaattgactacagctccggccacttgctccatatcaacatcgagtatttcgccaccgatgatctcctccgccacatcacccattctacaagtaatctacgaagcctacgtcttgcatgttgctaccaaatttcagatgaaggattgtgtgaaattgcaaaagagcttcctcagctggaggagcttgatatatcaatcagcaacttaaccaaggaccctctagaagctattggccagtgttgcccacacttaaaaacactgaaattcaatatggaaagttacagacgttcgcacattgagtgtgatgaggaggctnttgctattgcagaaaccatgccc

SEQ ID NO: 11566 - DNA, 659 bp, Glycine max
attaaattgaggattcacatacccttcagtagaacccagtgcggtgccaccattcttcttttctccgttactgcaccgaccgctactctctccggcggactttattcaaaaagaaaagaaaaaaaacgatataaattaaaaaagtttcaagtttttataatatccaaacagaaattccttattagttagggtctaacgtttgggatacttaatcctacgttagttgtgcttcaacctattaccgcattcaattttccagaaaaataaaaaaaaaagaaagatagaaatggcgcatattcctcagacccccaccaatgacgcggcggcttctggtgcaaatccgtcgatgacgaccatctcgttgtacgtcggggatcttgaccacgacgtcaacgatccgcagctctatgatctcttcaaccaggttgcccaagtcgtttccgttcgaatttgcagggacgtggccacccaacaatcccttggttacggctacgtcaatttcagcaacgctcgagatgccgcaaaagcaatggatgtgctgaatttcactccgctaaatggcaaaaccattagaataatgtactctattcgggaccctagtgctcggaagagtggtgcagctaatgttttcataaagaatttggacaaggcaatcgatc

SEQ ID NO: 11567 - DNA, 491 bp, Glycine max
cacgcgtccgcccacgcgggcgcccacgcgtccgctcccgcaaaatgataggaaagaaattcttatgcgttgttgtagcggtggcctttgttatgataacaaaggtgccccaaaatgtgagtgctcaaaactgtggttgtgctgaagggttatgttgcagccaacatgggtattgtggtaacggtgaggagtactgcggcacagggtgcaagcagggtccttgttattcgagcacaccaagtactaacaatgttaatgtggctgacattgtcacaccacaattcttcagtggcataattgatcaggctgactctggctgtgctggcaagaacttttactcacgagatgcttttcttaatgctctcaattcctataatgactttggtagacttggttcccaggatgactccaagcgcgagattgcagctgcttttgcccatttcacacatgaaactggacatttttgccacattgaagagattaatggtgca

SEQ ID NO: 11568 - DNA, 665 bp, Glycine max
cttcagcagttattatcagttgcagagaagtttaaaaggagtccatacagttacgtctgggtagctgcagggaagcagccagatcttgagaagaatgtgggtgttggagggtatggttatccagctttagtggcccttaaccttaagaaagctgtttatgctcctctcaagagtgcttttgaacttgaccagattatagaatttgtgaaagaagctggacgtggaggcaaagggaatttgcccctgcaaggcactccaaccattgtaaagacagaaccatgggatggaaaagatggagaaataattgaggaggatgaattttctcttgaagaactaatgggggaagatgcttcaagcaaggatgagctatgatcaatttataaggaatttataccaaattaaagtttcaaccaccgatttttacgttacaggcaacttgtttctcatgattattgtgatcactattctgtttttccatgttccaagttaaaaaaccagtctagtgatgagtgatcttctctgaggattttgatatatgtcattcagtgggtacgtactgatatatctccggaaaatgttagcatgttttggtattttcttttccctatcaatgagcattcagccaacaggttcaaccttcttaacaaaggaattattttttatct

SEQ ID NO: 11569 - DNA, 1348 bp, Glycine max
caaggccaccgttttcgccaccgacacgattctgtccactctcatgtgtgcccctcgttctgtttattcctgggacattgtcgtccagcgtgtcggaaacaagcttttctttgataagcgcgatgggtcgcagctcgatttgctctctgttcatgaaacctcgcaggagccattgcctgagtcgaaggatgatattaactctgcccattcgttgagcgttgaggctgcttatatcaaccagaatttctctcagcaggtgcttattagggatgggaataaggttacttttgatgaggctaacccttttgctaatgaaggtgaggaggttgcttctgtcgcttataggtataggaggtggaagcttgatgatgatatgtatcttgttgcgaggtgtgaggtgcatagtgttgttgatgtgaacaagcagaggtcgttccttactttgaatgcgttgaacgagtttgatcctaagtattccggtgtggattggaggcagaagttggagactcagaggggtgctgtgttggctactgaacttaagaacaatgcgaataagttggctaagtggactgctcaggctcttttggcgagtgcggatacaatgaagttagggtatgtgtcgaggattcatccccgcgatcatttcaatcatgtgattttggctgtggttggctataaacccagggactttgcagcacagattaatttgaacacgacgaatatgtgggggattgtgaagtctattgtggatttgtgcatgaaattgaatgaggggaagtctgttcttgtgaaagatccatctaagccccaggttaggatttacgaggctcctgcggatgcttttgaaaatgactacgtggaggagccacttccggaggatgaacaagttcagcctccatcagagggtgctgaggggggagaggcagccgctactactaatgatgtggaagacaagcagatagatggtcaagcttaaaaggtcagatgtttattggagtagatgtggccgttcatttgtgaacagatcgcactcagaataattttctttaacactgctttgtcggccaaaattttgcaatgtgatgttcctttggaccaaaagtttaaagcaaaacctgagttttttttttttctttctatgctacagctgtttatgatttacagaccttagcatatttaagtggaagcaccaaagcaacatctttcaaaattgtatttgggcttagggttattattttatggtttacaaatttccatgtcggcagagtgatgttgagattcgcaagctacaaacattaatttagtttgttatagtgcgctctattgtcaacgaccaaattagtatgat

SEQ ID NO: 11570 - DNA, 354 bp, Glycine max
  unsure (1)..(354): unsure at all n locations
tgaagatgatgtaaagctanngggcaagaggagaggatgcgcgtggagaaccacgggcattcagttttggacaaggttaagttaggagagcctggatacgaggaaaggtattatgctgaaaaatttggtgcattggatctggagaagattggaaaaatcaagaaagatacagtcttaaaatatgtagaaggcctttgttgggtttgtcggtactactaccagggtgtctgctcatggcaatggtactacccataccattatgctccttttgcttctgatcttaaagatctagctgatctggagataactttttttttgggagaaccatttaaaccatttgatcagctaatgggg

SEQ ID NO: 11571 - DNA, 467 bp, Glycine max
ggattccagtcatctctataagtaatcgatcagtggacgccgtctcaatctccttttctggctacacactttcttcaacggtaaatccctctctgcacttcgtctctgttagggattaatcattattttccgcgcaccaaacagccaaagtcaattttcttctctcttctaagacacaccaatgccagagaagaagaacaagaaagtttctttcaccgaagaagatgctgttacgctcatgcagaggtacgacgcaactacggtgttcactttacttcaggaagtggcgcattaccctcaccccaagattgattggtgcgagttggtgaagaaaagcgcgactgggatttctaacgccagagaatatcaaatgctatggcggcacttggcgtatcgccattctttgcctgaaattttcgaagatggggatgaacctttggatgatgatagtgacctaaagtgtgagc

SEQ ID NO: 11572 - DNA, 551 bp, Glycine max
cccacgcgtccgcaagaaggctgaaaagctagccggaacaattcagcctggaaattattggtgtgattttcgggctggattttggggtgtcatgggagggccttgtcttggaataattcctccatttatagaagagttcaatcatcccctcccagacaaatgttctggtgggagtactggtgttttagtaaatggtagggaacttcaccaaaaagacttagatttgctatctgggagaggactccccacagatatagatagatcttatatcattgaaatttctgggagagtcctggatgaagacacaggtgaagagctggacagcctaggcaaacttgcaccaacggtggagaaagtaaagcatggatttggcatgaacagcacctagagcagctacataagctaaatgtataaaaaaagattctgcgacaggttggagaaggtgaattttgctccttccttctgattcggtatcgttatttgggacccctgataatggaacaagctggaaatatttgcaagattacttgaacttcttccattgtatgacc

SEQ ID NO: 11573 - DNA, 662 bp, Glycine max
agcaacctacttttaaaaacaaaatagaaataccaaaccctacattccaacattaatcatacatctattcctcgtctccatcattttgtgttgtgctcgctctgtctctctgtctctgtaaagcgcgtttcagcacccgttaccggcgaacatggagagggttatcggcgggaagtttaagattggtcggaaaatcggaagcggttcgttcggagaaatttatattgcatcaaatatggatacctctgagattgtcgccatcaagatggaaagcaagaagaccaaacatccacagctattgtatgaagcaaagttatatagtattcttcaaggagaaagtggtattccaagtatgaagtggtgtggcactgatggagacaataatgttctagttattgatcttctgggacggagtcttgaagacttttttgtctactgcgggaggaagttttcattaaaaacagttttgatgttggccgatcagatgctgacaagaatagagtgcatgcattccaagggattttcgcatagagacatataaccagatgacttccttatgggtcttgtgatgaaatcaaatcagcttatattattgatttcggactatcaaaaagatatatggaccctaacacagacgaacatattccttacagagagaataa
